United States Patent Application Publication US 2009/0311680 A1 - sequence listing, part 5

SEQ ID NO: 49231 - DNA, 25 bp, Saccharomyces pastorianus
atttctggtcccaaggatcaaaaca

SEQ ID NO: 49232 - DNA, 25 bp, Saccharomyces pastorianus
ggtcccaaggatcaaaacaggcgtt

SEQ ID NO: 49233 - DNA, 25 bp, Saccharomyces pastorianus
ggtgctatgggtgctttcttaagca

SEQ ID NO: 49234 - DNA, 25 bp, Saccharomyces pastorianus
caaaacaggcgttcttcctcaaaca

SEQ ID NO: 49235 - DNA, 25 bp, Saccharomyces pastorianus
ctacctgggtgctatgggtgctttc

SEQ ID NO: 49236 - DNA, 25 bp, Saccharomyces pastorianus
atcaaaacaggcgttcttcctcaaa

SEQ ID NO: 49237 - DNA, 25 bp, Saccharomyces pastorianus
tatgggtgctttcttaagcacatct

SEQ ID NO: 49238 - DNA, 25 bp, Saccharomyces pastorianus
aggcgttcttcctcaaacacgaagg

SEQ ID NO: 49239 - DNA, 25 bp, Saccharomyces pastorianus
tgggtgctatgggtgctttcttaag

SEQ ID NO: 49240 - DNA, 25 bp, Saccharomyces pastorianus
tcttcctcaaacacgaaggctacct

SEQ ID NO: 49241 - DNA, 25 bp, Saccharomyces pastorianus
atttctggtcccaaggatcaaaaca

SEQ ID NO: 49242 - DNA, 25 bp, Saccharomyces pastorianus
ggtcccaaggatcaaaacaggcgtt

SEQ ID NO: 49243 - DNA, 25 bp, Saccharomyces pastorianus
ggtgctatgggtgctttcttaagca

SEQ ID NO: 49244 - DNA, 25 bp, Saccharomyces pastorianus
caaaacaggcgttcttcctcaaaca

SEQ ID NO: 49245 - DNA, 25 bp, Saccharomyces pastorianus
ctacctgggtgctatgggtgctttc

SEQ ID NO: 49246 - DNA, 25 bp, Saccharomyces pastorianus
atcaaaacaggcgttcttcctcaaa

SEQ ID NO: 49247 - DNA, 25 bp, Saccharomyces pastorianus
tgagctacgctattaatttctggtc

SEQ ID NO: 49248 - DNA, 25 bp, Saccharomyces pastorianus
aggttacccatccaaacaacttcag

SEQ ID NO: 49249 - DNA, 25 bp, Saccharomyces pastorianus
taacgagtcgtgttgctcacatgag

SEQ ID NO: 49250 - DNA, 25 bp, Saccharomyces pastorianus
agaataggtggctcttccttgggag

SEQ ID NO: 49251 - DNA, 25 bp, Saccharomyces pastorianus
ggttccacgaactcaaagcccatat

SEQ ID NO: 49252 - DNA, 25 bp, Saccharomyces pastorianus
aaaagccttctatttgcaatttcaa

SEQ ID NO: 49253 - DNA, 25 bp, Saccharomyces pastorianus
aagcccatatatccctatcttttag

SEQ ID NO: 49254 - DNA, 25 bp, Saccharomyces pastorianus
aatcaccggtgctcaaagttatgac

SEQ ID NO: 49255 - DNA, 25 bp, Saccharomyces pastorianus
gtcttttatcattaatcaccggtgc

SEQ ID NO: 49256 - DNA, 25 bp, Saccharomyces pastorianus
gaattgcttccaacaaatctttgcc

SEQ ID NO: 49257 - DNA, 25 bp, Saccharomyces pastorianus
ttattcatgaaatccccgacgaagt

SEQ ID NO: 49258 - DNA, 25 bp, Saccharomyces pastorianus
ggcttaaagtcctctgctattgcaa

SEQ ID NO: 49259 - DNA, 25 bp, Saccharomyces pastorianus
gttatctgaccggtaaggacatgaa

SEQ ID NO: 49260 - DNA, 25 bp, Saccharomyces pastorianus
ctgagctacgtgataacaaggagtt

SEQ ID NO: 49261 - DNA, 25 bp, Saccharomyces pastorianus
ggttccgatcctcacgaattgttaa

SEQ ID NO: 49262 - DNA, 25 bp, Saccharomyces pastorianus
aattaacacactcacttaaggccgt

SEQ ID NO: 49263 - DNA, 25 bp, Saccharomyces pastorianus
aattgaggaccccatggcaccaatc

SEQ ID NO: 49264 - DNA, 25 bp, Saccharomyces pastorianus
ccgatcctcacgaattgttaagtat

SEQ ID NO: 49265 - DNA, 25 bp, Saccharomyces pastorianus
cccatggcaccaatcctacaaaaag

SEQ ID NO: 49266 - DNA, 25 bp, Saccharomyces pastorianus
gtttgttgctcaattaacacactca

SEQ ID NO: 49267 - DNA, 25 bp, Saccharomyces pastorianus
ggtaaggacatgaatggtaagccat

SEQ ID NO: 49268 - DNA, 25 bp, Saccharomyces pastorianus
tgttaagtatcgattgcctctttgg

SEQ ID NO: 49269 - DNA, 25 bp, Saccharomyces pastorianus
ttaaaggtggttccgatcctcacga

SEQ ID NO: 49270 - DNA, 25 bp, Saccharomyces pastorianus
taacagtatggttgaccgtgtgaca

SEQ ID NO: 49271 - DNA, 25 bp, Saccharomyces pastorianus
aatttgccgcttggatcgctgacaa

SEQ ID NO: 49272 - DNA, 25 bp, Saccharomyces pastorianus
ttgccgcttggatcgctgacaaggt

SEQ ID NO: 49273 - DNA, 25 bp, Saccharomyces pastorianus
atcgctgacaaggtgactgctccta

SEQ ID NO: 49274 - DNA, 25 bp, Saccharomyces pastorianus
aaaatttgccgcttggatcgctgac

SEQ ID NO: 49275 - DNA, 25 bp, Saccharomyces pastorianus
tggatcgctgacaaggtgactgctc

SEQ ID NO: 49276 - DNA, 25 bp, Saccharomyces pastorianus
tgaaggatccaaaatttgccgcttg

SEQ ID NO: 49277 - DNA, 25 bp, Saccharomyces pastorianus
gctgacaaggtgactgctcctaaca

SEQ ID NO: 49278 - DNA, 25 bp, Saccharomyces pastorianus
ggtgactgctcctaacagtatggtt

SEQ ID NO: 49279 - DNA, 25 bp, Saccharomyces pastorianus
tgctcctaacagtatggttgaccgt

SEQ ID NO: 49280 - DNA, 25 bp, Saccharomyces pastorianus
gacaaggtgactgctcctaacagta

SEQ ID NO: 49281 - DNA, 25 bp, Saccharomyces pastorianus
ttgttttgctacaacatgggcacct

SEQ ID NO: 49282 - DNA, 25 bp, Saccharomyces pastorianus
atcaatttctattacggttacgtgt

SEQ ID NO: 49283 - DNA, 25 bp, Saccharomyces pastorianus
tacaacatgggcacctgtcgcttat

SEQ ID NO: 49284 - DNA, 25 bp, Saccharomyces pastorianus
gatttcaactgcgttcaactggtta

SEQ ID NO: 49285 - DNA, 25 bp, Saccharomyces pastorianus
atgcttggtcgctatgtttttctac

SEQ ID NO: 49286 - DNA, 25 bp, Saccharomyces pastorianus
ctacatcttctttttcttgccagaa

SEQ ID NO: 49287 - DNA, 25 bp, Saccharomyces pastorianus
gagcagccgggatgatggcctgtat

SEQ ID NO: 49288 - DNA, 25 bp, Saccharomyces pastorianus
gagctatgtcgatttcaactgcgtt

SEQ ID NO: 49289 - DNA, 25 bp, Saccharomyces pastorianus
ttacgtgttcgtgggatgcttggtc

SEQ ID NO: 49290 - DNA, 25 bp, Saccharomyces pastorianus
ggtcgctatgtttttctacatcttc

SEQ ID NO: 49291 - DNA, 25 bp, Saccharomyces pastorianus
atggcagtttttgattggtttcttt

SEQ ID NO: 49292 - DNA, 25 bp, Saccharomyces pastorianus
gatagccaggactactttcgcaagg

SEQ ID NO: 49293 - DNA, 25 bp, Saccharomyces pastorianus
atcgttatgcctttggagatagcca

SEQ ID NO: 49294 - DNA, 25 bp, Saccharomyces pastorianus
gaatcgtagttaaggccattgagcc

SEQ ID NO: 49295 - DNA, 25 bp, Saccharomyces pastorianus
gagactggcaataccattggtttca

SEQ ID NO: 49296 - DNA, 25 bp, Saccharomyces pastorianus
gtatactgggtgacggaccacttca

SEQ ID NO: 49297 - DNA, 25 bp, Saccharomyces pastorianus
gggcaattgccatcgacaccgagac

SEQ ID NO: 49298 - DNA, 25 bp, Saccharomyces pastorianus
cgcgcccaattgttgtacaccaaag

SEQ ID NO: 49299 - DNA, 25 bp, Saccharomyces pastorianus
aagcatgcggatgagctcggcacgt

SEQ ID NO: 49300 - DNA, 25 bp, Saccharomyces pastorianus
ctcggcacgtcttcagtatactggg

SEQ ID NO: 49301 - DNA, 25 bp, Saccharomyces pastorianus
tgtcaccgagaacgccaggatcaaa

SEQ ID NO: 49302 - DNA, 25 bp, Saccharomyces pastorianus
ggtttcacacattacttgagccact

SEQ ID NO: 49303 - DNA, 25 bp, Saccharomyces pastorianus
gctacatgtcggcttacgtgataca

SEQ ID NO: 49304 - DNA, 25 bp, Saccharomyces pastorianus
actccttccctataatgctacatgt

SEQ ID NO: 49305 - DNA, 25 bp, Saccharomyces pastorianus
gagcgaattctttggcaactggtaa

SEQ ID NO: 49306 - DNA, 25 bp, Saccharomyces pastorianus
tataatcattccttatccgtcactg

SEQ ID NO: 49307 - DNA, 25 bp, Saccharomyces pastorianus
ataagatacccaaactcagtgacga

SEQ ID NO: 49308 - DNA, 25 bp, Saccharomyces pastorianus
tatccgtcactggttctaaaagcac

SEQ ID NO: 49309 - DNA, 25 bp, Saccharomyces pastorianus
ttgacctgtatatatctctctcgca

SEQ ID NO: 49310 - DNA, 25 bp, Saccharomyces pastorianus
aagatcgtgcttgtttgacctgtat

SEQ ID NO: 49311 - DNA, 25 bp, Saccharomyces pastorianus
atatacagatgctactccttcccta

SEQ ID NO: 49312 - DNA, 25 bp, Saccharomyces pastorianus
tcctgctcgagcacaaacatgcatg

SEQ ID NO: 49313 - DNA, 25 bp, Saccharomyces pastorianus
ctctcgcagggccaaacgttaaaat

SEQ ID NO: 49314 - DNA, 25 bp, Saccharomyces pastorianus
atccgagaatgctgtatctcttcta

SEQ ID NO: 49315 - DNA, 25 bp, Saccharomyces pastorianus
catggccaccacattatctcaaatt

SEQ ID NO: 49316 - DNA, 25 bp, Saccharomyces pastorianus
gcgactagtgccgttattaatcaag

SEQ ID NO: 49317 - DNA, 25 bp, Saccharomyces pastorianus
aaataagtgcgactccatgaataac

SEQ ID NO: 49318 - DNA, 25 bp, Saccharomyces pastorianus
gaattcaatcacgtcaactcactct

SEQ ID NO: 49319 - DNA, 25 bp, Saccharomyces pastorianus
aattctataataacatggccaccac

SEQ ID NO: 49320 - DNA, 25 bp, Saccharomyces pastorianus
tcagcgcaaaatatactatccccaa

SEQ ID NO: 49321 - DNA, 25 bp, Saccharomyces pastorianus
aacacaaatgggaattcagcgcaaa

SEQ ID NO: 49322 - DNA, 25 bp, Saccharomyces pastorianus
gcaaaacctaacgaacgcgactagt

SEQ ID NO: 49323 - DNA, 25 bp, Saccharomyces pastorianus
gaataccgttaagactctcaaacac

SEQ ID NO: 49324 - DNA, 25 bp, Saccharomyces pastorianus
ttaaaagtacagttgacacatcgtc

SEQ ID NO: 49325 - DNA, 25 bp, Saccharomyces pastorianus
attgtcccgtgtcgtgtaccaagac

SEQ ID NO: 49326 - DNA, 25 bp, Saccharomyces pastorianus
gagtcccagttgtccaagtcacaag

SEQ ID NO: 49327 - DNA, 25 bp, Saccharomyces pastorianus
gaaagctgcaaaaccctgctgggtt

SEQ ID NO: 49328 - DNA, 25 bp, Saccharomyces pastorianus
gaagacgcgctacattgtcccgtgt

SEQ ID NO: 49329 - DNA, 25 bp, Saccharomyces pastorianus
attggcgtggtgcaaaccgcatacg

SEQ ID NO: 49330 - DNA, 25 bp, Saccharomyces pastorianus
tagactccgtcatagctaagtaccc

SEQ ID NO: 49331 - DNA, 25 bp, Saccharomyces pastorianus
gtttcatcaaaccatcgagtcccag

SEQ ID NO: 49332 - DNA, 25 bp, Saccharomyces pastorianus
tggtacgatcattttcagcgagaag

SEQ ID NO: 49333 - DNA, 25 bp, Saccharomyces pastorianus
aagcatctgcatcacgaggctgcaa

SEQ ID NO: 49334 - DNA, 25 bp, Saccharomyces pastorianus
cttgccaccttgtccattttacaaa

SEQ ID NO: 49335 - DNA, 25 bp, Saccharomyces pastorianus
gttggtcaagtgcattgttcctgat

SEQ ID NO: 49336 - DNA, 25 bp, Saccharomyces pastorianus
tagacctaaaggaccgatctttgga

SEQ ID NO: 49337 - DNA, 25 bp, Saccharomyces pastorianus
accgaccttctttggagatagacct

SEQ ID NO: 49338 - DNA, 25 bp, Saccharomyces pastorianus
gaccttctttggagatagacctaaa

SEQ ID NO: 49339 - DNA, 25 bp, Saccharomyces pastorianus
caccaacggctcttaggtataagta

SEQ ID NO: 49340 - DNA, 25 bp, Saccharomyces pastorianus
ggctcttaggtataagtatttaact

SEQ ID NO: 49341 - DNA, 25 bp, Saccharomyces pastorianus
caacggctcttaggtataagtattt

SEQ ID NO: 49342 - DNA, 25 bp, Saccharomyces pastorianus
gagatagacctaaaggaccgatctt

SEQ ID NO: 49343 - DNA, 25 bp, Saccharomyces pastorianus
gatagacctaaaggaccgatctttg

SEQ ID NO: 49344 - DNA, 25 bp, Saccharomyces pastorianus
aacttcaccaccaacggctcttagg

SEQ ID NO: 49345 - DNA, 25 bp, Saccharomyces pastorianus
caccaccaacggctcttaggtataa

SEQ ID NO: 49346 - DNA, 25 bp, Saccharomyces pastorianus
ccgaccttctttggagatagaccta

SEQ ID NO: 49347 - DNA, 25 bp, Saccharomyces pastorianus
ttcaaggcggtgatgaccaaagagg

SEQ ID NO: 49348 - DNA, 25 bp, Saccharomyces pastorianus
cttgtccttctttctgtctcttggt

SEQ ID NO: 49349 - DNA, 25 bp, Saccharomyces pastorianus
taccactgtgcttgacgttcttgtc

SEQ ID NO: 49350 - DNA, 25 bp, Saccharomyces pastorianus
caaggcggtgatgaccaaagaggaa

SEQ ID NO: 49351 - DNA, 25 bp, Saccharomyces pastorianus
ggtgatgaccaaagaggaagcagat

SEQ ID NO: 49352 - DNA, 25 bp, Saccharomyces pastorianus
ttaccactgtgcttgacgttcttgt

SEQ ID NO: 49353 - DNA, 25 bp, Saccharomyces pastorianus
actgtgcttgacgttcttgtccttc

SEQ ID NO: 49354 - DNA, 25 bp, Saccharomyces pastorianus
gtctcttggtggttccttcaaggcg

SEQ ID NO: 49355 - DNA, 25 bp, Saccharomyces pastorianus
cttcaaggcggtgatgaccaaagag

SEQ ID NO: 49356 - DNA, 25 bp, Saccharomyces pastorianus
gttaccactgtgcttgacgttcttg

SEQ ID NO: 49357 - DNA, 25 bp, Saccharomyces pastorianus
tcaaggcggtgatgaccaaagagga

SEQ ID NO: 49358 - DNA, 25 bp, Saccharomyces pastorianus
gataatctcatgcatcaaggcggga

SEQ ID NO: 49359 - DNA, 25 bp, Saccharomyces pastorianus
actatcgatcgagaggaatcttcat

SEQ ID NO: 49360 - DNA, 25 bp, Saccharomyces pastorianus
cgataggtgttccagagttgccaga

SEQ ID NO: 49361 - DNA, 25 bp, Saccharomyces pastorianus
gagttatccgttgagtactattcca

SEQ ID NO: 49362 - DNA, 25 bp, Saccharomyces pastorianus
ttgatacgagattgaaggccctttc

SEQ ID NO: 49363 - DNA, 25 bp, Saccharomyces pastorianus
cattatgcttgatagaggtcttcca

SEQ ID NO: 49364 - DNA, 25 bp, Saccharomyces pastorianus
aaagcttacttctaaggctatcaca

SEQ ID NO: 49365 - DNA, 25 bp, Saccharomyces pastorianus
gttgccagaacatgaagcctttcag

SEQ ID NO: 49366 - DNA, 25 bp, Saccharomyces pastorianus
ggctatcacaatcaactcgaaagtt

SEQ ID NO: 49367 - DNA, 25 bp, Saccharomyces pastorianus
ggaccaattacagaccactaaacaa

SEQ ID NO: 49368 - DNA, 25 bp, Saccharomyces pastorianus
aggccctttcatcctttatagaaga

SEQ ID NO: 49369 - DNA, 25 bp, Saccharomyces pastorianus
gggttcaaccgtcaactaatactat

SEQ ID NO: 49370 - DNA, 25 bp, Saccharomyces pastorianus
tgggtaaattttccttcactgactt

SEQ ID NO: 49371 - DNA, 25 bp, Saccharomyces pastorianus
atcatgatcgagttttccctaaagg

SEQ ID NO: 49372 - DNA, 25 bp, Saccharomyces pastorianus
aagccttttgaagcctattctatgt

SEQ ID NO: 49373 - DNA, 25 bp, Saccharomyces pastorianus
agtgcgatccactctatgaacaaaa

SEQ ID NO: 49374 - DNA, 25 bp, Saccharomyces pastorianus
gcaaggatcttgttcccgttaattt

SEQ ID NO: 49375 - DNA, 25 bp, Saccharomyces pastorianus
cttcactgacttttaccctttacat

SEQ ID NO: 49376 - DNA, 25 bp, Saccharomyces pastorianus
attcattgtttctggacgtatttca

SEQ ID NO: 49377 - DNA, 25 bp, Saccharomyces pastorianus
cctaggcggcgaactcattcaagaa

SEQ ID NO: 49378 - DNA, 25 bp, Saccharomyces pastorianus
taaagaattttcagcgcaaacccct

SEQ ID NO: 49379 - DNA, 25 bp, Saccharomyces pastorianus
aattcctcccaaaacacgtgtagat

SEQ ID NO: 49380 - DNA, 25 bp, Saccharomyces pastorianus
caccactacattagctccatctgac

SEQ ID NO: 49381 - DNA, 25 bp, Saccharomyces pastorianus
atcagagctcatatggcccagtatt

SEQ ID NO: 49382 - DNA, 25 bp, Saccharomyces pastorianus
accctactgatacgtacccaattga

SEQ ID NO: 49383 - DNA, 25 bp, Saccharomyces pastorianus
agtattacgcttttcaagccgccca

SEQ ID NO: 49384 - DNA, 25 bp, Saccharomyces pastorianus
tggcccagtattacgcttttcaagc

SEQ ID NO: 49385 - DNA, 25 bp, Saccharomyces pastorianus
tactgatacgtacccaattgaagtt

SEQ ID NO: 49386 - DNA, 25 bp, Saccharomyces pastorianus
atatggcccagtattacgcttttca

SEQ ID NO: 49387 - DNA, 25 bp, Saccharomyces pastorianus
catgttgaccggcatttcacccgac

SEQ ID NO: 49388 - DNA, 25 bp, Saccharomyces pastorianus
gctcatatggcccagtattacgctt

SEQ ID NO: 49389 - DNA, 25 bp, Saccharomyces pastorianus
ttgaccggcatttcacccgaccaag

SEQ ID NO: 49390 - DNA, 25 bp, Saccharomyces pastorianus
catttcacccgaccaagtcactaga

SEQ ID NO: 49391 - DNA, 25 bp, Saccharomyces pastorianus
gagcgcaacgagatcgggactgctt

SEQ ID NO: 49392 - DNA, 25 bp, Saccharomyces pastorianus
aagaagcccgccaggaggcacaagt

SEQ ID NO: 49393 - DNA, 25 bp, Saccharomyces pastorianus
ggtttaagccggcacactacaagaa

SEQ ID NO: 49394 - DNA, 25 bp, Saccharomyces pastorianus
agtgatgagcggttgctgtttctga

SEQ ID NO: 49395 - DNA, 25 bp, Saccharomyces pastorianus
gaacaacatccggtaccacaatgcg

SEQ ID NO: 49396 - DNA, 25 bp, Saccharomyces pastorianus
gaagggcgtttacaagtctcccacg

SEQ ID NO: 49397 - DNA, 25 bp, Saccharomyces pastorianus
caggcagctggtatcggacgagaac

SEQ ID NO: 49398 - DNA, 25 bp, Saccharomyces pastorianus
ccagggcgacgtacttcagcgtgga

SEQ ID NO: 49399 - DNA, 25 bp, Saccharomyces pastorianus
gcggatcaacgctttgctgagcaag

SEQ ID NO: 49400 - DNA, 25 bp, Saccharomyces pastorianus
agtactgcgacgtgacgggtctgaa

SEQ ID NO: 49401 - DNA, 25 bp, Saccharomyces pastorianus
atctaccagttgatcgtgaagccga

SEQ ID NO: 49402 - DNA, 25 bp, Saccharomyces pastorianus
atgtaagaagccaccatgctctttt

SEQ ID NO: 49403 - DNA, 25 bp, Saccharomyces pastorianus
cacacaggttacgatatcccattaa

SEQ ID NO: 49404 - DNA, 25 bp, Saccharomyces pastorianus
gaaggtgatgttacgacgactcata

SEQ ID NO: 49405 - DNA, 25 bp, Saccharomyces pastorianus
gcaatgtagatttttggccgacaca

SEQ ID NO: 49406 - DNA, 25 bp, Saccharomyces pastorianus
atgctcttttaacggtgctcaccaa

SEQ ID NO: 49407 - DNA, 25 bp, Saccharomyces pastorianus
gcgtcattaccgctgttagaatctg

SEQ ID NO: 49408 - DNA, 25 bp, Saccharomyces pastorianus
gatctctacattttctcttactttt

SEQ ID NO: 49409 - DNA, 25 bp, Saccharomyces pastorianus
aaagcgacccacacttctgtatgga

SEQ ID NO: 49410 - DNA, 25 bp, Saccharomyces pastorianus
gaggtaccgagtggtccgcaatgta

SEQ ID NO: 49411 - DNA, 25 bp, Saccharomyces pastorianus
caggcgaaacctatatcattgactt

SEQ ID NO: 49412 - DNA, 25 bp, Saccharomyces pastorianus
tcattgactttatgggacccgaggt

SEQ ID NO: 49413 - DNA, 25 bp, Saccharomyces pastorianus
gttcgtctataagcacaagttcaca

SEQ ID NO: 49414 - DNA, 25 bp, Saccharomyces pastorianus
atagttcgtctataagcacaagttc

SEQ ID NO: 49415 - DNA, 25 bp, Saccharomyces pastorianus
atgagggaaatctgcgtgcaacgga

SEQ ID NO: 49416 - DNA, 25 bp, Saccharomyces pastorianus
gcaacagcactgatagttcgtctat

SEQ ID NO: 49417 - DNA, 25 bp, Saccharomyces pastorianus
tataagcacaagttcacaagatgag

SEQ ID NO: 49418 - DNA, 25 bp, Saccharomyces pastorianus
gcactgatagttcgtctataagcac

SEQ ID NO: 49419 - DNA, 25 bp, Saccharomyces pastorianus
gcacaagttcacaagatgagggaaa

SEQ ID NO: 49420 - DNA, 25 bp, Saccharomyces pastorianus
tgaaaacgcaagcaacagcactgat

SEQ ID NO: 49421 - DNA, 25 bp, Saccharomyces pastorianus
gggaaatctgcgtgcaacggaatca

SEQ ID NO: 49422 - DNA, 25 bp, Saccharomyces pastorianus
gaaatctgcgtgcaacggaatcaaa

SEQ ID NO: 49423 - DNA, 25 bp, Saccharomyces pastorianus
tcgtctataagcacaagttcacaag

SEQ ID NO: 49424 - DNA, 25 bp, Saccharomyces pastorianus
catgattcgttcttcgatttggtta

SEQ ID NO: 49425 - DNA, 25 bp, Saccharomyces pastorianus
gctatggacagattaggaccggtta

SEQ ID NO: 49426 - DNA, 25 bp, Saccharomyces pastorianus
gaaatcctgcgctgatgttaattgc

SEQ ID NO: 49427 - DNA, 25 bp, Saccharomyces pastorianus
aaatcagctcactttgcagctagtg

SEQ ID NO: 49428 - DNA, 25 bp, Saccharomyces pastorianus
agcaagtttgaagagcctggctcaa

SEQ ID NO: 49429 - DNA, 25 bp, Saccharomyces pastorianus
taacggaaggcaagcttttgagcaa

SEQ ID NO: 49430 - DNA, 25 bp, Saccharomyces pastorianus
gactctgtgcaattttccatcaaca

SEQ ID NO: 49431 - DNA, 25 bp, Saccharomyces pastorianus
aaaaatataccacctatcgtcccat

SEQ ID NO: 49432 - DNA, 25 bp, Saccharomyces pastorianus
gacgtttccacagtatttctcatga

SEQ ID NO: 49433 - DNA, 25 bp, Saccharomyces pastorianus
tttttgcttcatccatatttcctaa

SEQ ID NO: 49434 - DNA, 25 bp, Saccharomyces pastorianus
gatactgcgtatgacgttcgacgtt

SEQ ID NO: 49435 - DNA, 25 bp, Saccharomyces pastorianus
aagtccgtatgcagtgccaaccatt

SEQ ID NO: 49436 - DNA, 25 bp, Saccharomyces pastorianus
agggtccacagcatactcgttaagt

SEQ ID NO: 49437 - DNA, 25 bp, Saccharomyces pastorianus
tgaaactgacgctgccaccggaaag

SEQ ID NO: 49438 - DNA, 25 bp, Saccharomyces pastorianus
tccttgcttgtccttattggagctt

SEQ ID NO: 49439 - DNA, 25 bp, Saccharomyces pastorianus
ggagctttacggacacaattcattg

SEQ ID NO: 49440 - DNA, 25 bp, Saccharomyces pastorianus
tagcggtaacgccaatctgtcctca

SEQ ID NO: 49441 - DNA, 25 bp, Saccharomyces pastorianus
gatatcgccgagtgtaaacgctata

SEQ ID NO: 49442 - DNA, 25 bp, Saccharomyces pastorianus
ttgtttctgaacatcacgtcctcaa

SEQ ID NO: 49443 - DNA, 25 bp, Saccharomyces pastorianus
aaccattgagtcatctccgagtgag

SEQ ID NO: 49444 - DNA, 25 bp, Saccharomyces pastorianus
gcaggtgggtctttgatatcgccga

SEQ ID NO: 49445 - DNA, 25 bp, Saccharomyces pastorianus
agatagaggtccaactccttgcttg

SEQ ID NO: 49446 - DNA, 25 bp, Saccharomyces pastorianus
aggatatctcggcttcaacttctct

SEQ ID NO: 49447 - DNA, 25 bp, Saccharomyces pastorianus
tagccacagcacctcaacgaagaag

SEQ ID NO: 49448 - DNA, 25 bp, Saccharomyces pastorianus
gaaaaacggtacttctgcctatatt

SEQ ID NO: 49449 - DNA, 25 bp, Saccharomyces pastorianus
ttggcccggtggtaactctactaat

SEQ ID NO: 49450 - DNA, 25 bp, Saccharomyces pastorianus
ggtagcaagactacttctgcgtcct

SEQ ID NO: 49451 - DNA, 25 bp, Saccharomyces pastorianus
aaaacttcgtcttcaacttcagcat

SEQ ID NO: 49452 - DNA, 25 bp, Saccharomyces pastorianus
agtggatatttctatttggcccggt

SEQ ID NO: 49453 - DNA, 25 bp, Saccharomyces pastorianus
aagagttcctctgaagcttcttcta

SEQ ID NO: 49454 - DNA, 25 bp, Saccharomyces pastorianus
cagtgccggtatgggtgctaacgtt

SEQ ID NO: 49455 - DNA, 25 bp, Saccharomyces pastorianus
ggatctggattggaccctcacaagg

SEQ ID NO: 49456 - DNA, 25 bp, Saccharomyces pastorianus
tgcctatatttacacttcatccgac

SEQ ID NO: 49457 - DNA, 25 bp, Saccharomyces pastorianus
gtttggatacgttctggaccccaat

SEQ ID NO: 49458 - DNA, 25 bp, Saccharomyces pastorianus
gactttgttcccgtattttacagag

SEQ ID NO: 49459 - DNA, 25 bp, Saccharomyces pastorianus
gagaaaggaccgtgtgtttatctac

SEQ ID NO: 49460 - DNA, 25 bp, Saccharomyces pastorianus
ggaccccatcttgaagcagttgcaa

SEQ ID NO: 49461 - DNA, 25 bp, Saccharomyces pastorianus
gtgcttacgcacgattcattggatc

SEQ ID NO: 49462 - DNA, 25 bp, Saccharomyces pastorianus
atcttgcaagatatcggcgtgggcg

SEQ ID NO: 49463 - DNA, 25 bp, Saccharomyces pastorianus
tgggctggctgtacgacctggtaat

SEQ ID NO: 49464 - DNA, 25 bp, Saccharomyces pastorianus
aatgcacatgtacccgatgcgcaaa

SEQ ID NO: 49465 - DNA, 25 bp, Saccharomyces pastorianus
aaggctatgtttgggctcagggcta

SEQ ID NO: 49466 - DNA, 25 bp, Saccharomyces pastorianus
tggcgaacgatgttaaggaccccat

SEQ ID NO: 49467 - DNA, 25 bp, Saccharomyces pastorianus
ggccagatcaaagcacccgtttatg

SEQ ID NO: 49468 - DNA, 25 bp, Saccharomyces pastorianus
ggccttgacgtcatccttggtgtca

SEQ ID NO: 49469 - DNA, 25 bp, Saccharomyces pastorianus
atatcaatggcgaccatgtggacct

SEQ ID NO: 49470 - DNA, 25 bp, Saccharomyces pastorianus
caagtccttaccttcgtcgaaagcg

SEQ ID NO: 49471 - DNA, 25 bp, Saccharomyces pastorianus
gactcttaatcggatctagcagctt

SEQ ID NO: 49472 - DNA, 25 bp, Saccharomyces pastorianus
ggaggtaccggcatcggcggtttca

SEQ ID NO: 49473 - DNA, 25 bp, Saccharomyces pastorianus
accatgtggaccttggcgtgaccgt

SEQ ID NO: 49474 - DNA, 25 bp, Saccharomyces pastorianus
aatggcgaccatgtggaccttggcg

SEQ ID NO: 49475 - DNA, 25 bp, Saccharomyces pastorianus
gcggagcgactcttaatcggatcta

SEQ ID NO: 49476 - DNA, 25 bp, Saccharomyces pastorianus
acccatggcggagatgatagtgacc

SEQ ID NO: 49477 - DNA, 25 bp, Saccharomyces pastorianus
taccttcgtcgaaagcggcttgcat

SEQ ID NO: 49478 - DNA, 25 bp, Saccharomyces pastorianus
gcttgcatggtgtcacccaattcac

SEQ ID NO: 49479 - DNA, 25 bp, Saccharomyces pastorianus
atcacatcatgcactctctgctgaa

SEQ ID NO: 49480 - DNA, 25 bp, Saccharomyces pastorianus
tttttcgttctcctaaagcattcac

SEQ ID NO: 49481 - DNA, 25 bp, Saccharomyces pastorianus
tcacatcatgcactctctgctgaac

SEQ ID NO: 49482 - DNA, 25 bp, Saccharomyces pastorianus
cactctctgctgaaccggggttttt

SEQ ID NO: 49483 - DNA, 25 bp, Saccharomyces pastorianus
aagcattcacaaataaatcttttct

SEQ ID NO: 49484 - DNA, 25 bp, Saccharomyces pastorianus
tttccatcacatcatgcactctctg

SEQ ID NO: 49485 - DNA, 25 bp, Saccharomyces pastorianus
catcatgcactctctgctgaaccgg

SEQ ID NO: 49486 - DNA, 25 bp, Saccharomyces pastorianus
atcatgcactctctgctgaaccggg

SEQ ID NO: 49487 - DNA, 25 bp, Saccharomyces pastorianus
gcattcacaaataaatcttttcttt

SEQ ID NO: 49488 - DNA, 25 bp, Saccharomyces pastorianus
acatcatgcactctctgctgaaccg

SEQ ID NO: 49489 - DNA, 25 bp, Saccharomyces pastorianus
aaactccgacccctttccatcacat

SEQ ID NO: 49490 - DNA, 25 bp, Saccharomyces pastorianus
aaaggccaagatgcagttagaagaa

SEQ ID NO: 49491 - DNA, 25 bp, Saccharomyces pastorianus
gctgatcaattagccaatgacaccg

SEQ ID NO: 49492 - DNA, 25 bp, Saccharomyces pastorianus
ttaatggcgaggacttaacaagcaa

SEQ ID NO: 49493 - DNA, 25 bp, Saccharomyces pastorianus
gaaaccgccaataaagctgatcaat

SEQ ID NO: 49494 - DNA, 25 bp, Saccharomyces pastorianus
gaccaaatttcgtcattaagggaat

SEQ ID NO: 49495 - DNA, 25 bp, Saccharomyces pastorianus
aatatcccgagtgcaagctggcgat

SEQ ID NO: 49496 - DNA, 25 bp, Saccharomyces pastorianus
aaaactctttgaacagctctacaag

SEQ ID NO: 49497 - DNA, 25 bp, Saccharomyces pastorianus
tgataaattgcaaacgtcatcgtta

SEQ ID NO: 49498 - DNA, 25 bp, Saccharomyces pastorianus
taaaaccgactctcaaatcctcaaa

SEQ ID NO: 49499 - DNA, 25 bp, Saccharomyces pastorianus
aatgacaccgagaattccttgaagg

SEQ ID NO: 49500 - DNA, 25 bp, Saccharomyces pastorianus
gaaaagctatcgaaaccgccaataa

SEQ ID NO: 49501 - DNA, 25 bp, Saccharomyces pastorianus
caacatgtctttttctagggcccaa

SEQ ID NO: 49502 - DNA, 25 bp, Saccharomyces pastorianus
ttaacttgcctttcattactgccga

SEQ ID NO: 49503 - DNA, 25 bp, Saccharomyces pastorianus
tggacgttactcctttatcgttagg

SEQ ID NO: 49504 - DNA, 25 bp, Saccharomyces pastorianus
tactgccgatgccacaggtccgaag

SEQ ID NO: 49505 - DNA, 25 bp, Saccharomyces pastorianus
tgcttccaaagccattaaccctgat

SEQ ID NO: 49506 - DNA, 25 bp, Saccharomyces pastorianus
aaattttttccactgccgcagcagg

SEQ ID NO: 49507 - DNA, 25 bp, Saccharomyces pastorianus
tgggcgccgctattcaaggtgccgt

SEQ ID NO: 49508 - DNA, 25 bp, Saccharomyces pastorianus
atctgatgttttactagtcggcggt

SEQ ID NO: 49509 - DNA, 25 bp, Saccharomyces pastorianus
gtgccgtcttgtctggtgaaattac

SEQ ID NO: 49510 - DNA, 25 bp, Saccharomyces pastorianus
gttatcgtcgactgtttctaccgaa

SEQ ID NO: 49511 - DNA, 25 bp, Saccharomyces pastorianus
aaagctcacgtcttccgatatatct

SEQ ID NO: 49512 - DNA, 25 bp, Saccharomyces pastorianus
ggaaaacactcctcattaagccgat

SEQ ID NO: 49513 - DNA, 25 bp, Saccharomyces pastorianus
aatacgctgtgagtactggacctgg

SEQ ID NO: 49514 - DNA, 25 bp, Saccharomyces pastorianus
ggatgaggtcgttgcgtcattacaa

SEQ ID NO: 49515 - DNA, 25 bp, Saccharomyces pastorianus
tacaataatctcgttggcacccatt

SEQ ID NO: 49516 - DNA, 25 bp, Saccharomyces pastorianus
gattctgataacacacttgcaattt

SEQ ID NO: 49517 - DNA, 25 bp, Saccharomyces pastorianus
gacggattccaaaacctccaaatat

SEQ ID NO: 49518 - DNA, 25 bp, Saccharomyces pastorianus
gacaggttaattatgccctatctta

SEQ ID NO: 49519 - DNA, 25 bp, Saccharomyces pastorianus
agggagtcttacctctttttatgat

SEQ ID NO: 49520 - DNA, 25 bp, Saccharomyces pastorianus
ggcatatcctatgtcgctactattg

SEQ ID NO: 49521 - DNA, 25 bp, Saccharomyces pastorianus
agccgattttcaggtctttctcaaa

SEQ ID NO: 49522 - DNA, 25 bp, Saccharomyces pastorianus
gaaagggtgtattctggcatatcct

SEQ ID NO: 49523 - DNA, 25 bp, Saccharomyces pastorianus
taggatcgacgaaggacctcccgat

SEQ ID NO: 49524 - DNA, 25 bp, Saccharomyces pastorianus
aaaggatgcctttaccctcaaatgc

SEQ ID NO: 49525 - DNA, 25 bp, Saccharomyces pastorianus
atatgtcaggcaactattccaagat

SEQ ID NO: 49526 - DNA, 25 bp, Saccharomyces pastorianus
aatttttggactgggctggcagttc

SEQ ID NO: 49527 - DNA, 25 bp, Saccharomyces pastorianus
gtacgttagtttgcattggtcagtc

SEQ ID NO: 49528 - DNA, 25 bp, Saccharomyces pastorianus
gcccaatcttgggagatctcgttat

SEQ ID NO: 49529 - DNA, 25 bp, Saccharomyces pastorianus
gatgaagaatcgcagctccgcttgg

SEQ ID NO: 49530 - DNA, 25 bp, Saccharomyces pastorianus
atattagagatgcttcccattggaa

SEQ ID NO: 49531 - DNA, 25 bp, Saccharomyces pastorianus
gcgagctattttgctaccatatcca

SEQ ID NO: 49532 - DNA, 25 bp, Saccharomyces pastorianus
gaccaaataatctgcccgaatatgt

SEQ ID NO: 49533 - DNA, 25 bp, Saccharomyces pastorianus
aaaactttcatgtgcccaatcttgg

SEQ ID NO: 49534 - DNA, 25 bp, Saccharomyces pastorianus
atgttcgtcattgtgtatccctaga

SEQ ID NO: 49535 - DNA, 25 bp, Saccharomyces pastorianus
aatacacagggactttggccgaaga

SEQ ID NO: 49536 - DNA, 25 bp, Saccharomyces pastorianus
aatgccattctcagatccatcgaag

SEQ ID NO: 49537 - DNA, 25 bp, Saccharomyces pastorianus
gccgatgccttacattccaaaacta

SEQ ID NO: 49538 - DNA, 25 bp, Saccharomyces pastorianus
tatttccagggtttgtttgattcgg

SEQ ID NO: 49539 - DNA, 25 bp, Saccharomyces pastorianus
gggaatacgactcacagccaaatca

SEQ ID NO: 49540 - DNA, 25 bp, Saccharomyces pastorianus
tgctagggtacttgccggaatgatt

SEQ ID NO: 49541 - DNA, 25 bp, Saccharomyces pastorianus
agatccatcgaagcaggttttggcc

SEQ ID NO: 49542 - DNA, 25 bp, Saccharomyces pastorianus
actactctcattgacatacgttaca

SEQ ID NO: 49543 - DNA, 25 bp, Saccharomyces pastorianus
aaacttatctgaccagtgctcacca

SEQ ID NO: 49544 - DNA, 25 bp, Saccharomyces pastorianus
aaacagttgtgtttcacgccgatgc

SEQ ID NO: 49545 - DNA, 25 bp, Saccharomyces pastorianus
gaggcagttacagcaattgattctt

SEQ ID NO: 49546 - DNA, 25 bp, Saccharomyces pastorianus
ttaccactattgaactcgagcgaaa

SEQ ID NO: 49547 - DNA, 25 bp, Saccharomyces pastorianus
gctgcggcaccgattaacgaaacca

SEQ ID NO: 49548 - DNA, 25 bp, Saccharomyces pastorianus
taccgtctgatgagatggaatccgt

SEQ ID NO: 49549 - DNA, 25 bp, Saccharomyces pastorianus
tcagaaaatccccatttcgtccata

SEQ ID NO: 49550 - DNA, 25 bp, Saccharomyces pastorianus
aggaagctagcgcaacatcgtccca

SEQ ID NO: 49551 - DNA, 25 bp, Saccharomyces pastorianus
caacaagatcgaggtaccgtctgat

SEQ ID NO: 49552 - DNA, 25 bp, Saccharomyces pastorianus
gaacgtttacttacactttctgaag

SEQ ID NO: 49553 - DNA, 25 bp, Saccharomyces pastorianus
gtgaattcgccgtggaaacactaca

SEQ ID NO: 49554 - DNA, 25 bp, Saccharomyces pastorianus
ggcacatcagtgcatcaacccatgt

SEQ ID NO: 49555 - DNA, 25 bp, Saccharomyces pastorianus
atcgagggcggattattaccactat

SEQ ID NO: 49556 - DNA, 25 bp, Saccharomyces pastorianus
gaaatctcgagcaagttccacgtga

SEQ ID NO: 49557 - DNA, 25 bp, Saccharomyces pastorianus
gaagttgacggattctgccacgagt

SEQ ID NO: 49558 - DNA, 25 bp, Saccharomyces pastorianus
aaatgtttcccgacggtgcgatgtc

SEQ ID NO: 49559 - DNA, 25 bp, Saccharomyces pastorianus
gaagtatttccgctacgatgacaaa

SEQ ID NO: 49560 - DNA, 25 bp, Saccharomyces pastorianus
aatggagtcataccaccgttcgaga

SEQ ID NO: 49561 - DNA, 25 bp, Saccharomyces pastorianus
atgtccaagtacgtatcgcatctct

SEQ ID NO: 49562 - DNA, 25 bp, Saccharomyces pastorianus
agggcccgatgatgatggtctattt

SEQ ID NO: 49563 - DNA, 25 bp, Saccharomyces pastorianus
gaagatcctcgagacaggcgctgga

SEQ ID NO: 49564 - DNA, 25 bp, Saccharomyces pastorianus
gcaacgttatgtttgtcagcgacca

SEQ ID NO: 49565 - DNA, 25 bp, Saccharomyces pastorianus
ttgatcgagttcaccctgcggaaag

SEQ ID NO: 49566 - DNA, 25 bp, Saccharomyces pastorianus
atatctgggttctcgcggatgcgca

SEQ ID NO: 49567 - DNA, 25 bp, Saccharomyces pastorianus
gatgaaaagtgcacgccgtttcttt

SEQ ID NO: 49568 - DNA, 25 bp, Saccharomyces pastorianus
tcggcaaggtatgatgctggaccca

SEQ ID NO: 49569 - DNA, 25 bp, Saccharomyces pastorianus
ctggacccagggaaattgtacatag

SEQ ID NO: 49570 - DNA, 25 bp, Saccharomyces pastorianus
ggttccttccgagattaatagatga

SEQ ID NO: 49571 - DNA, 25 bp, Saccharomyces pastorianus
cgccgtttctttacagcttacataa

SEQ ID NO: 49572 - DNA, 25 bp, Saccharomyces pastorianus
aacggtacgcatgagtttaagacat

SEQ ID NO: 49573 - DNA, 25 bp, Saccharomyces pastorianus
gcttacataacttgcagtcgccata

SEQ ID NO: 49574 - DNA, 25 bp, Saccharomyces pastorianus
gactgttgttatgttgctttcatgt

SEQ ID NO: 49575 - DNA, 25 bp, Saccharomyces pastorianus
ggcaagagcttctacgacatggaat

SEQ ID NO: 49576 - DNA, 25 bp, Saccharomyces pastorianus
gctttcatgtgataaacgctcggca

SEQ ID NO: 49577 - DNA, 25 bp, Saccharomyces pastorianus
taaatatcagcactgcaccgcacat

SEQ ID NO: 49578 - DNA, 25 bp, Saccharomyces pastorianus
acatcgacatcgcatcgggatcgat

SEQ ID NO: 49579 - DNA, 25 bp, Saccharomyces pastorianus
atccatataagtccccaagcatagg

SEQ ID NO: 49580 - DNA, 25 bp, Saccharomyces pastorianus
gaacccaacgggagcgatcccttga

SEQ ID NO: 49581 - DNA, 25 bp, Saccharomyces pastorianus
gagttgcccgataactatccatata

SEQ ID NO: 49582 - DNA, 25 bp, Saccharomyces pastorianus
gggtcctaaggacacaccatatgaa

SEQ ID NO: 49583 - DNA, 25 bp, Saccharomyces pastorianus
gagactacatgttgagttgcccgat

SEQ ID NO: 49584 - DNA, 25 bp, Saccharomyces pastorianus
aatggcactgattcggatgatgaca

SEQ ID NO: 49585 - DNA, 25 bp, Saccharomyces pastorianus
gaagctgccacactacagttacgag

SEQ ID NO: 49586 - DNA, 25 bp, Saccharomyces pastorianus
gtgaagacctaagtgacatcgatgt

SEQ ID NO: 49587 - DNA, 25 bp, Saccharomyces pastorianus
atgtccagtggtgacgatagcgtcg

SEQ ID NO: 49588 - DNA, 25 bp, Saccharomyces pastorianus
ttccatgtgaagttcttgggtccta

SEQ ID NO: 49589 - DNA, 25 bp, Saccharomyces pastorianus
agtaacccaaatgctgcttcttcct

SEQ ID NO: 49590 - DNA, 25 bp, Saccharomyces pastorianus
aagggtttcctcaatattccatgac

SEQ ID NO: 49591 - DNA, 25 bp, Saccharomyces pastorianus
agtatacccaataacagcgtcgcaa

SEQ ID NO: 49592 - DNA, 25 bp, Saccharomyces pastorianus
cggatacgctaactctcaacaatac

SEQ ID NO: 49593 - DNA, 25 bp, Saccharomyces pastorianus
tggtgctcctgtcgcaaccgaaaat

SEQ ID NO: 49594 - DNA, 25 bp, Saccharomyces pastorianus
gaccagtgctcagaattcatcgatg

SEQ ID NO: 49595 - DNA, 25 bp, Saccharomyces pastorianus
aaccttctttaactgcaggcacgaa

SEQ ID NO: 49596 - DNA, 25 bp, Saccharomyces pastorianus
acgcttcgaacactattggctctga

SEQ ID NO: 49597 - DNA, 25 bp, Saccharomyces pastorianus
tgggctgcccatatctaacatgcaa

SEQ ID NO: 49598 - DNA, 25 bp, Saccharomyces pastorianus
gcaccatcactatcagcaggaagct

SEQ ID NO: 49599 - DNA, 25 bp, Saccharomyces pastorianus
gactccttatcctgtttattctatg

SEQ ID NO: 49600 - DNA, 25 bp, Saccharomyces pastorianus
aatctcctgataacgcaaatcccac

SEQ ID NO: 49601 - DNA, 25 bp, Saccharomyces pastorianus
aaatcccactggcatgaacactcat

SEQ ID NO: 49602 - DNA, 25 bp, Saccharomyces pastorianus
atgctgctggcggtaatcaatttac

SEQ ID NO: 49603 - DNA, 25 bp, Saccharomyces pastorianus
cctgcgttgccttcaacaactttga

SEQ ID NO: 49604 - DNA, 25 bp, Saccharomyces pastorianus
gatactagaccttcacaagagctaa

SEQ ID NO: 49605 - DNA, 25 bp, Saccharomyces pastorianus
gtgatgaaagctctgggtacccaat

SEQ ID NO: 49606 - DNA, 25 bp, Saccharomyces pastorianus
gtttggtgacgccaaaagcctctcc

SEQ ID NO: 49607 - DNA, 25 bp, Saccharomyces pastorianus
gaagagacctccatttaattctata

SEQ ID NO: 49608 - DNA, 25 bp, Saccharomyces pastorianus
actcctcgactcctttaaatactgt

SEQ ID NO: 49609 - DNA, 25 bp, Saccharomyces pastorianus
agaatcatccatttctccatcgaac

SEQ ID NO: 49610 - DNA, 25 bp, Saccharomyces pastorianus
acacattgtctcatactattccgtc

SEQ ID NO: 49611 - DNA, 25 bp, Saccharomyces pastorianus
gaggccgatctaactaaggtagtca

SEQ ID NO: 49612 - DNA, 25 bp, Saccharomyces pastorianus
atatctaccaacaatctgaaggcga

SEQ ID NO: 49613 - DNA, 25 bp, Saccharomyces pastorianus
atgttgcctcgataagggctaaggg

SEQ ID NO: 49614 - DNA, 25 bp, Saccharomyces pastorianus
gggactattctttgacattggcaca

SEQ ID NO: 49615 - DNA, 25 bp, Saccharomyces pastorianus
ttcgatgtcgatgaggatgttgcct

SEQ ID NO: 49616 - DNA, 25 bp, Saccharomyces pastorianus
gaatttgcatctagacctgttatca

SEQ ID NO: 49617 - DNA, 25 bp, Saccharomyces pastorianus
gtggctgggcagattatacaagaaa

SEQ ID NO: 49618 - DNA, 25 bp, Saccharomyces pastorianus
ggcaaggatacaacgcgataaggat

SEQ ID NO: 49619 - DNA, 25 bp, Saccharomyces pastorianus
aagaacgctgccaaagtgaaagaga

SEQ ID NO: 49620 - DNA, 25 bp, Saccharomyces pastorianus
taagggccaaactacaggcgccagc

SEQ ID NO: 49621 - DNA, 25 bp, Saccharomyces pastorianus
ggtagtcaagaaagtgccattaaca

SEQ ID NO: 49622 - DNA, 25 bp, Saccharomyces pastorianus
atgtaggtctattctgtgggtgttt

SEQ ID NO: 49623 - DNA, 25 bp, Saccharomyces pastorianus
gtattcttcattgctccacatttgc

SEQ ID NO: 49624 - DNA, 25 bp, Saccharomyces pastorianus
gaaaaattcaccttctgacttcaat

SEQ ID NO: 49625 - DNA, 25 bp, Saccharomyces pastorianus
ttccggctgtggtaagtctatttta

SEQ ID NO: 49626 - DNA, 25 bp, Saccharomyces pastorianus
aacctacacctatgatcctgttgaa

SEQ ID NO: 49627 - DNA, 25 bp, Saccharomyces pastorianus
ggccgcttccgataacgtggttaga

SEQ ID NO: 49628 - DNA, 25 bp, Saccharomyces pastorianus
gtgttgacggcccaagtatcttgat

SEQ ID NO: 49629 - DNA, 25 bp, Saccharomyces pastorianus
gaagctatcttcctaagagccaagg

SEQ ID NO: 49630 - DNA, 25 bp, Saccharomyces pastorianus
aaattcgacagatcttccggctgtg

SEQ ID NO: 49631 - DNA, 25 bp, Saccharomyces pastorianus
gtttctatgctaacctacacctatg

SEQ ID NO: 49632 - DNA, 25 bp, Saccharomyces pastorianus
gccgaacctggctttgtattcttca

SEQ ID NO: 49633 - DNA, 25 bp, Saccharomyces pastorianus
gatatcatcgccctagatttcaaac

SEQ ID NO: 49634 - DNA, 25 bp, Saccharomyces pastorianus
acttggcattgaacccttctggaaa

SEQ ID NO: 49635 - DNA, 25 bp, Saccharomyces pastorianus
gaaatgcatccgcaggttctgttca

SEQ ID NO: 49636 - DNA, 25 bp, Saccharomyces pastorianus
gatcgaccacgacctgaacatgcag

SEQ ID NO: 49637 - DNA, 25 bp, Saccharomyces pastorianus
aaaaggacacttcgcagtggccagc

SEQ ID NO: 49638 - DNA, 25 bp, Saccharomyces pastorianus
ttggtggaaatctggctgctgcgct

SEQ ID NO: 49639 - DNA, 25 bp, Saccharomyces pastorianus
tgaacatgcagttggcctgtgccgc

SEQ ID NO: 49640 - DNA, 25 bp, Saccharomyces pastorianus
gggcgctcgtgtataccgttcgaga

SEQ ID NO: 49641 - DNA, 25 bp, Saccharomyces pastorianus
aacacacaataatcttgcgtccggg

SEQ ID NO: 49642 - DNA, 25 bp, Saccharomyces pastorianus
ggaaagccggtgttcacttggcatt

SEQ ID NO: 49643 - DNA, 25 bp, Saccharomyces pastorianus
gtggactccaggttcggttacatga

SEQ ID NO: 49644 - DNA, 25 bp, Saccharomyces pastorianus
aggttgcgtttatctggactgtaca

SEQ ID NO: 49645 - DNA, 25 bp, Saccharomyces pastorianus
gcaacagcatgtttgatctgggcaa

SEQ ID NO: 49646 - DNA, 25 bp, Saccharomyces pastorianus
atttgggactgatagggacaacctc

SEQ ID NO: 49647 - DNA, 25 bp, Saccharomyces pastorianus
ggcagagttcaagtctttccacgaa

SEQ ID NO: 49648 - DNA, 25 bp, Saccharomyces pastorianus
atctgggcaagagttcggcgacaat

SEQ ID NO: 49649 - DNA, 25 bp, Saccharomyces pastorianus
tcaaacttacgacccgcattctcta

SEQ ID NO: 49650 - DNA, 25 bp, Saccharomyces pastorianus
ggtgttttacaaatctcacacgatc

SEQ ID NO: 49651 - DNA, 25 bp, Saccharomyces pastorianus
cgcattctctatggccgatttctct

SEQ ID NO: 49652 - DNA, 25 bp, Saccharomyces pastorianus
aagtcaatctgctaatctcggtccg

SEQ ID NO: 49653 - DNA, 25 bp, Saccharomyces pastorianus
tggagtgatctgtttcttattttac

SEQ ID NO: 49654 - DNA, 25 bp, Saccharomyces pastorianus
agggacaacctcaaagaagcattta

SEQ ID NO: 49655 - DNA, 25 bp, Saccharomyces pastorianus
ctcgcggaagtaccactgattttga

SEQ ID NO: 49656 - DNA, 25 bp, Saccharomyces pastorianus
agccttgcctgttcaatggtgttca

SEQ ID NO: 49657 - DNA, 25 bp, Saccharomyces pastorianus
agacaccaccttccaaattgttggc

SEQ ID NO: 49658 - DNA, 25 bp, Saccharomyces pastorianus
acataccttgtgatgaccagccttg

SEQ ID NO: 49659 - DNA, 25 bp, Saccharomyces pastorianus
gaagggttcgatttgcctcgtataa

SEQ ID NO: 49660 - DNA, 25 bp, Saccharomyces pastorianus
taaatctatgtaccctttactcctg

SEQ ID NO: 49661 - DNA, 25 bp, Saccharomyces pastorianus
tgatccatgtatgcctcgcggaagt

SEQ ID NO: 49662 - DNA, 25 bp, Saccharomyces pastorianus
agaatcttgctcttcgcttcaggaa

SEQ ID NO: 49663 - DNA, 25 bp, Saccharomyces pastorianus
gaagcatactcgctagtcatgacag

SEQ ID NO: 49664 - DNA, 25 bp, Saccharomyces pastorianus
aactgggtcctcaatatacttcatg

SEQ ID NO: 49665 - DNA, 25 bp, Saccharomyces pastorianus
gtacaactctattccggacgatttc

SEQ ID NO: 49666 - DNA, 25 bp, Saccharomyces pastorianus
attctaaggcctgcccagtcggtaa

SEQ ID NO: 49667 - DNA, 25 bp, Saccharomyces pastorianus
gtgctggtctttctgtcttaaatga

SEQ ID NO: 49668 - DNA, 25 bp, Saccharomyces pastorianus
gcatgaagccgaattggctcttcta

SEQ ID NO: 49669 - DNA, 25 bp, Saccharomyces pastorianus
gcgggtgttactacttccttaagag

SEQ ID NO: 49670 - DNA, 25 bp, Saccharomyces pastorianus
tgttgatccatacccagctgtttta

SEQ ID NO: 49671 - DNA, 25 bp, Saccharomyces pastorianus
aagctttatgaagttcctcccattc

SEQ ID NO: 49672 - DNA, 25 bp, Saccharomyces pastorianus
agggtggtattccaaaccttgccag

SEQ ID NO: 49673 - DNA, 25 bp, Saccharomyces pastorianus
cccattcccgctaatgatgctgata

SEQ ID NO: 49674 - DNA, 25 bp, Saccharomyces pastorianus
tgaatctaccgttgtatccgaatgg

SEQ ID NO: 49675 - DNA, 25 bp, Saccharomyces pastorianus
gaatacttcggtagccacatctcaa

SEQ ID NO: 49676 - DNA, 25 bp, Saccharomyces pastorianus
gccccagctaccactaatgaatcta

SEQ ID NO: 49677 - DNA, 25 bp, Saccharomyces pastorianus
gccacctgctcctggctatgagaaa

SEQ ID NO: 49678 - DNA, 25 bp, Saccharomyces pastorianus
gggccgaattgccacctgctcctgg

SEQ ID NO: 49679 - DNA, 25 bp, Saccharomyces pastorianus
atgtgccctggtttaacttcagcag

SEQ ID NO: 49680 - DNA, 25 bp, Saccharomyces pastorianus
aattgttgtcattaatgctgaaaac

SEQ ID NO: 49681 - DNA, 25 bp, Saccharomyces pastorianus
aaatgcgttggctattggtgaactg

SEQ ID NO: 49682 - DNA, 25 bp, Saccharomyces pastorianus
aggtaaaattgttgtcattaatgct

SEQ ID NO: 49683 - DNA, 25 bp, Saccharomyces pastorianus
ctgctcctggctatgagaaaggtaa

SEQ ID NO: 49684 - DNA, 25 bp, Saccharomyces pastorianus
gtgccctggtttaacttcagcaggg

SEQ ID NO: 49685 - DNA, 25 bp, Saccharomyces pastorianus
ggtttaacttcagcaggggccgaat

SEQ ID NO: 49686 - DNA, 25 bp, Saccharomyces pastorianus
caaatccataaacaaaggtcattcc

SEQ ID NO: 49687 - DNA, 25 bp, Saccharomyces pastorianus
tattggtgaactgatgatgagtaca

SEQ ID NO: 49688 - DNA, 25 bp, Saccharomyces pastorianus
aaactgcttccttcctagtgaacag

SEQ ID NO: 49689 - DNA, 25 bp, Saccharomyces pastorianus
gtgtttcaagtattgaccccagcct

SEQ ID NO: 49690 - DNA, 25 bp, Saccharomyces pastorianus
aagaatcctatgcttctttcctgct

SEQ ID NO: 49691 - DNA, 25 bp, Saccharomyces pastorianus
agcctgtcagattctgctgcgttaa

SEQ ID NO: 49692 - DNA, 25 bp, Saccharomyces pastorianus
gatactatgcccaagctaacagctt

SEQ ID NO: 49693 - DNA, 25 bp, Saccharomyces pastorianus
cttttagcatactcgtcccaagaaa

SEQ ID NO: 49694 - DNA, 25 bp, Saccharomyces pastorianus
ggtatttttgacacatcattgcaga

SEQ ID NO: 49695 - DNA, 25 bp, Saccharomyces pastorianus
taatgtgaacgtaaccaacccatca

SEQ ID NO: 49696 - DNA, 25 bp, Saccharomyces pastorianus
ggcaaacgatttcggctaccatcaa

SEQ ID NO: 49697 - DNA, 25 bp, Saccharomyces pastorianus
gcatccaaggtcaaaccgtttcatt

SEQ ID NO: 49698 - DNA, 25 bp, Saccharomyces pastorianus
gaaatgctctctatgctaaacttca

SEQ ID NO: 49699 - DNA, 25 bp, Saccharomyces pastorianus
gagaaatgtgtcaagagcttccaat

SEQ ID NO: 49700 - DNA, 25 bp, Saccharomyces pastorianus
agattcaaaattcccaagttcaaag

SEQ ID NO: 49701 - DNA, 25 bp, Saccharomyces pastorianus
aaatcccacagtcgtgaggcatcac

SEQ ID NO: 49702 - DNA, 25 bp, Saccharomyces pastorianus
attcaaattttctagccgagcagta

SEQ ID NO: 49703 - DNA, 25 bp, Saccharomyces pastorianus
ggtagtagtgcacaccattccagaa

SEQ ID NO: 49704 - DNA, 25 bp, Saccharomyces pastorianus
accaatttctggtggcaactattca

SEQ ID NO: 49705 - DNA, 25 bp, Saccharomyces pastorianus
agcttccaattcctctcaaaattca

SEQ ID NO: 49706 - DNA, 25 bp, Saccharomyces pastorianus
ccggcgagccaccaagcaattatat

SEQ ID NO: 49707 - DNA, 25 bp, Saccharomyces pastorianus
tgtcagtcaaggtggagtgccctcc

SEQ ID NO: 49708 - DNA, 25 bp, Saccharomyces pastorianus
gccatcattagtttctgcttttcca

SEQ ID NO: 49709 - DNA, 25 bp, Saccharomyces pastorianus
agacctgaccacaagaccggcgagc

SEQ ID NO: 49710 - DNA, 25 bp, Saccharomyces pastorianus
gacattaagaatggcgttcccgcaa

SEQ ID NO: 49711 - DNA, 25 bp, Saccharomyces pastorianus
gtaacggcatagtctgtgttccagt

SEQ ID NO: 49712 - DNA, 25 bp, Saccharomyces pastorianus
taaatcaccctgtttttgcttatgg

SEQ ID NO: 49713 - DNA, 25 bp, Saccharomyces pastorianus
acacagtactatttgcacatgccga

SEQ ID NO: 49714 - DNA, 25 bp, Saccharomyces pastorianus
gacccaagacctgctgtaaactata

SEQ ID NO: 49715 - DNA, 25 bp, Saccharomyces pastorianus
ttaccaccaggtagctccatagtag

SEQ ID NO: 49716 - DNA, 25 bp, Saccharomyces pastorianus
tctcgccttagaacctcatttacaa

SEQ ID NO: 49717 - DNA, 25 bp, Saccharomyces pastorianus
ctaacagcgatatctttaccaccag

SEQ ID NO: 49718 - DNA, 25 bp, Saccharomyces pastorianus
tcaacaggtggctatttccctaatc

SEQ ID NO: 49719 - DNA, 25 bp, Saccharomyces pastorianus
aaagccaattccatccatttgttaa

SEQ ID NO: 49720 - DNA, 25 bp, Saccharomyces pastorianus
gtggccaccaatgtacagttgcaaa

SEQ ID NO: 49721 - DNA, 25 bp, Saccharomyces pastorianus
aattagctgtcatagcgatcccgat

SEQ ID NO: 49722 - DNA, 25 bp, Saccharomyces pastorianus
aatggcttcttgaggttgcgcctca

SEQ ID NO: 49723 - DNA, 25 bp, Saccharomyces pastorianus
tggcagcaagcagattactcagaac

SEQ ID NO: 49724 - DNA, 25 bp, Saccharomyces pastorianus
aaggcaagattccatcacccatatg

SEQ ID NO: 49725 - DNA, 25 bp, Saccharomyces pastorianus
agcgatcccgatttgattcgtaaaa

SEQ ID NO: 49726 - DNA, 25 bp, Saccharomyces pastorianus
gaatgctgctaagcgagattcgcaa

SEQ ID NO: 49727 - DNA, 25 bp, Saccharomyces pastorianus
gaatacgtgatttaccatagtcttg

SEQ ID NO: 49728 - DNA, 25 bp, Saccharomyces pastorianus
ggaatacatccttcaagttcgttgt

SEQ ID NO: 49729 - DNA, 25 bp, Saccharomyces pastorianus
aacgtttacacgagatggcagcaag

SEQ ID NO: 49730 - DNA, 25 bp, Saccharomyces pastorianus
agcatcgaacctcaatggcttcttg

SEQ ID NO: 49731 - DNA, 25 bp, Saccharomyces pastorianus
atggtgaccacctgacgttattgaa

SEQ ID NO: 49732 - DNA, 25 bp, Saccharomyces pastorianus
gtatccccgcctatagcgaaagaag

SEQ ID NO: 49733 - DNA, 25 bp, Saccharomyces pastorianus
tcagggttaagtcgcgaagttcatc

SEQ ID NO: 49734 - DNA, 25 bp, Saccharomyces pastorianus
aatatatcaaatcgtatccccgcct

SEQ ID NO: 49735 - DNA, 25 bp, Saccharomyces pastorianus
tagaccttaatcctgttcttgataa

SEQ ID NO: 49736 - DNA, 25 bp, Saccharomyces pastorianus
gtgactgatttcgtacttagcattt

SEQ ID NO: 49737 - DNA, 25 bp, Saccharomyces pastorianus
taagctccatgcaaagcggtctcga

SEQ ID NO: 49738 - DNA, 25 bp, Saccharomyces pastorianus
gaaaagagcccagacattgttatag

SEQ ID NO: 49739 - DNA, 25 bp, Saccharomyces pastorianus
gcggaaaacagacgatttagacctt

SEQ ID NO: 49740 - DNA, 25 bp, Saccharomyces pastorianus
gacgaccctgtagtgactgatttcg

SEQ ID NO: 49741 - DNA, 25 bp, Saccharomyces pastorianus
aactgcgatgggttggttcatatat

SEQ ID NO: 49742 - DNA, 25 bp, Saccharomyces pastorianus
ggcatatcttacgaagacagcacta

SEQ ID NO: 49743 - DNA, 25 bp, Saccharomyces pastorianus
tgctcctgcagaagtactccaacta

SEQ ID NO: 49744 - DNA, 25 bp, Saccharomyces pastorianus
agtgctgctgctgattgcgacgctg

SEQ ID NO: 49745 - DNA, 25 bp, Saccharomyces pastorianus
ttacagactgtcgatgccggtgtcc

SEQ ID NO: 49746 - DNA, 25 bp, Saccharomyces pastorianus
gactcgctgctaaacacctggaggg

SEQ ID NO: 49747 - DNA, 25 bp, Saccharomyces pastorianus
aaggatccctcacttggactgcagc

SEQ ID NO: 49748 - DNA, 25 bp, Saccharomyces pastorianus
atgggcccgttgcaacagttgctca

SEQ ID NO: 49749 - DNA, 25 bp, Saccharomyces pastorianus
acacgtacatgaagaccgcgcagag

SEQ ID NO: 49750 - DNA, 25 bp, Saccharomyces pastorianus
cgcgtactcgtgcaccttgaatgta

SEQ ID NO: 49751 - DNA, 25 bp, Saccharomyces pastorianus
gatttcgtttctgtttggcaggtct

SEQ ID NO: 49752 - DNA, 25 bp, Saccharomyces pastorianus
agacagaagttcttgcgcggcgtgc

SEQ ID NO: 49753 - DNA, 25 bp, Saccharomyces pastorianus
atcgacccggagttcttacagactg

SEQ ID NO: 49754 - DNA, 25 bp, Saccharomyces pastorianus
acactccttactttcttgcaatggg

SEQ ID NO: 49755 - DNA, 25 bp, Saccharomyces pastorianus
gaaccaaccaatgcagtagctgcgt

SEQ ID NO: 49756 - DNA, 25 bp, Saccharomyces pastorianus
ttcttgcaatgggattcccaacttc

SEQ ID NO: 49757 - DNA, 25 bp, Saccharomyces pastorianus
agcatcaacaaaacaaaggcagggc

SEQ ID NO: 49758 - DNA, 25 bp, Saccharomyces pastorianus
caatgcagtagctgcgtccatattc

SEQ ID NO: 49759 - DNA, 25 bp, Saccharomyces pastorianus
agggcctgaaccaaccaatgcagta

SEQ ID NO: 49760 - DNA, 25 bp, Saccharomyces pastorianus
attgcacactccttactttcttgca

SEQ ID NO: 49761 - DNA, 25 bp, Saccharomyces pastorianus
aaggcagggcctgaaccaaccaatg

SEQ ID NO: 49762 - DNA, 25 bp, Saccharomyces pastorianus
ccatcaaggattccagcatcaacaa

SEQ ID NO: 49763 - DNA, 25 bp, Saccharomyces pastorianus
actttcttgcaatgggattcccaac

SEQ ID NO: 49764 - DNA, 25 bp, Saccharomyces pastorianus
ggattccagcatcaacaaaacaaag

SEQ ID NO: 49765 - DNA, 25 bp, Saccharomyces pastorianus
ggaacccattgaaactaagcctgga

SEQ ID NO: 49766 - DNA, 25 bp, Saccharomyces pastorianus
aagcctggaaaatctgaagagccta

SEQ ID NO: 49767 - DNA, 25 bp, Saccharomyces pastorianus
gatacctccaatatcattacatctg

SEQ ID NO: 49768 - DNA, 25 bp, Saccharomyces pastorianus
tacatctggaagaagaacccgcggc

SEQ ID NO: 49769 - DNA, 25 bp, Saccharomyces pastorianus
gaacccgcggcaaggtaattgatta

SEQ ID NO: 49770 - DNA, 25 bp, Saccharomyces pastorianus
gaagctactgtaaagcccactaatg

SEQ ID NO: 49771 - DNA, 25 bp, Saccharomyces pastorianus
gaaactacgacgattacgatgctga

SEQ ID NO: 49772 - DNA, 25 bp, Saccharomyces pastorianus
aggcaagactgctgcggaggactca

SEQ ID NO: 49773 - DNA, 25 bp, Saccharomyces pastorianus
gatttagctgaaattgatacctcca

SEQ ID NO: 49774 - DNA, 25 bp, Saccharomyces pastorianus
attacgatgctgaggtggccaaaga

SEQ ID NO: 49775 - DNA, 25 bp, Saccharomyces pastorianus
gagtcggacatggacgatgccaaat

SEQ ID NO: 49776 - DNA, 25 bp, Saccharomyces pastorianus
ggtagtagtaaatcctcatcatata

SEQ ID NO: 49777 - DNA, 25 bp, Saccharomyces pastorianus
gatgcaacatctcaaccctctgtaa

SEQ ID NO: 49778 - DNA, 25 bp, Saccharomyces pastorianus
ttcggctaatactggccttacggat

SEQ ID NO: 49779 - DNA, 25 bp, Saccharomyces pastorianus
gtacggatcaaataccgccgacaac

SEQ ID NO: 49780 - DNA, 25 bp, Saccharomyces pastorianus
ggacgaaactgctagatacccgaaa

SEQ ID NO: 49781 - DNA, 25 bp, Saccharomyces pastorianus
acccgagcgtgtcctagagttcaac

SEQ ID NO: 49782 - DNA, 25 bp, Saccharomyces pastorianus
atcatctatcaattggtggacgaaa

SEQ ID NO: 49783 - DNA, 25 bp, Saccharomyces pastorianus
tgtaacggctaacaggtcaatccta

SEQ ID NO: 49784 - DNA, 25 bp, Saccharomyces pastorianus
ttcgtcctcattcccagaagaacaa

SEQ ID NO: 49785 - DNA, 25 bp, Saccharomyces pastorianus
aagatcaagagtgcttccgccacta

SEQ ID NO: 49786 - DNA, 25 bp, Saccharomyces pastorianus
aacattgattttcgtcctcattccc

SEQ ID NO: 49787 - DNA, 25 bp, Saccharomyces pastorianus
ggacaaattgtctacagaccagtct

SEQ ID NO: 49788 - DNA, 25 bp, Saccharomyces pastorianus
agcgagtcagccgacaggttcatgg

SEQ ID NO: 49789 - DNA, 25 bp, Saccharomyces pastorianus
tcagccgacaggttcatggacaaat

SEQ ID NO: 49790 - DNA, 25 bp, Saccharomyces pastorianus
atcatcgcggacagcgagtcagccg

SEQ ID NO: 49791 - DNA, 25 bp, Saccharomyces pastorianus
gagtcagccgacaggttcatggaca

SEQ ID NO: 49792 - DNA, 25 bp, Saccharomyces pastorianus
cttccatgatgatggagcaaacaat

SEQ ID NO: 49793 - DNA, 25 bp, Saccharomyces pastorianus
gccgacaggttcatggacaaattgt

SEQ ID NO: 49794 - DNA, 25 bp, Saccharomyces pastorianus
gtctacagaccagtcttccatgatg

SEQ ID NO: 49795 - DNA, 25 bp, Saccharomyces pastorianus
tacagaccagtcttccatgatgatg

SEQ ID NO: 49796 - DNA, 25 bp, Saccharomyces pastorianus
attgtctacagaccagtcttccatg

SEQ ID NO: 49797 - DNA, 25 bp, Saccharomyces pastorianus
gacagcgagtcagccgacaggttca

SEQ ID NO: 49798 - DNA, 25 bp, Saccharomyces pastorianus
gtttcttggagcgtcaaagaggatc

SEQ ID NO: 49799 - DNA, 25 bp, Saccharomyces pastorianus
aagatcgacagaaacgacaaaacgt

SEQ ID NO: 49800 - DNA, 25 bp, Saccharomyces pastorianus
aaccccagaaagatcgacagaaacg

SEQ ID NO: 49801 - DNA, 25 bp, Saccharomyces pastorianus
gaggatcaatccggcaagtgctata

SEQ ID NO: 49802 - DNA, 25 bp, Saccharomyces pastorianus
gagcgtcaaagaggatcaatccggc

SEQ ID NO: 49803 - DNA, 25 bp, Saccharomyces pastorianus
gacagaaaccccagaaagatcgaca

SEQ ID NO: 49804 - DNA, 25 bp, Saccharomyces pastorianus
aaacgtttcttggagcgtcaaagag

SEQ ID NO: 49805 - DNA, 25 bp, Saccharomyces pastorianus
cttggagcgtcaaagaggatcaatc

SEQ ID NO: 49806 - DNA, 25 bp, Saccharomyces pastorianus
aagaggatcaatccggcaagtgcta

SEQ ID NO: 49807 - DNA, 25 bp, Saccharomyces pastorianus
gaaaccccagaaagatcgacagaaa

SEQ ID NO: 49808 - DNA, 25 bp, Saccharomyces pastorianus
cgacaaaacgtttcttggagcgtca

SEQ ID NO: 49809 - DNA, 25 bp, Saccharomyces pastorianus
ttgatcctctttgacgctccaagaa

SEQ ID NO: 49810 - DNA, 25 bp, Saccharomyces pastorianus
tgatcatcagtggtttggcgtccgt

SEQ ID NO: 49811 - DNA, 25 bp, Saccharomyces pastorianus
tctgcgctgttcgttttgatcatgc

SEQ ID NO: 49812 - DNA, 25 bp, Saccharomyces pastorianus
tggcatcctatacgcagtcgctaaa

SEQ ID NO: 49813 - DNA, 25 bp, Saccharomyces pastorianus
atttgtccatgaacctgtcggctga

SEQ ID NO: 49814 - DNA, 25 bp, Saccharomyces pastorianus
gttcgtcttgaatccaggttacctc

SEQ ID NO: 49815 - DNA, 25 bp, Saccharomyces pastorianus
acttattccatggtgggagccctga

SEQ ID NO: 49816 - DNA, 25 bp, Saccharomyces pastorianus
gatgtcgcccctagaagatcttgac

SEQ ID NO: 49817 - DNA, 25 bp, Saccharomyces pastorianus
catggagctgtcatcgttctttatg

SEQ ID NO: 49818 - DNA, 25 bp, Saccharomyces pastorianus
ggagccctgaacaaactgcctatag

SEQ ID NO: 49819 - DNA, 25 bp, Saccharomyces pastorianus
gagaatccgcctgactaactttaag

SEQ ID NO: 49820 - DNA, 25 bp, Saccharomyces pastorianus
agttccctgcatatgagatatcatt

SEQ ID NO: 49821 - DNA, 25 bp, Saccharomyces pastorianus
tggaaaagttccctgcatatgagat

SEQ ID NO: 49822 - DNA, 25 bp, Saccharomyces pastorianus
gttattctatctttactcgaagcct

SEQ ID NO: 49823 - DNA, 25 bp, Saccharomyces pastorianus
gccttagaaaggattgagtggaaat

SEQ ID NO: 49824 - DNA, 25 bp, Saccharomyces pastorianus
ctatctttactcgaagccttagaaa

SEQ ID NO: 49825 - DNA, 25 bp, Saccharomyces pastorianus
atacaggctgctctattggttacgg

SEQ ID NO: 49826 - DNA, 25 bp, Saccharomyces pastorianus
gctgctctattggttacggccgaaa

SEQ ID NO: 49827 - DNA, 25 bp, Saccharomyces pastorianus
gtggaaatatttcgcggcttttttg

SEQ ID NO: 49828 - DNA, 25 bp, Saccharomyces pastorianus
gagcgtacatacaggctgctctatt

SEQ ID NO: 49829 - DNA, 25 bp, Saccharomyces pastorianus
gaaatttgattgctcgttttcgatt

SEQ ID NO: 49830 - DNA, 25 bp, Saccharomyces pastorianus
gctctattggttacggccgaaagaa

SEQ ID NO: 49831 - DNA, 25 bp, Saccharomyces pastorianus
gaagtaagcagaaccgcacaaacca

SEQ ID NO: 49832 - DNA, 25 bp, Saccharomyces pastorianus
aagtggcgtgaatcccttagagttc

SEQ ID NO: 49833 - DNA, 25 bp, Saccharomyces pastorianus
agtcattgtccaaaaagctccccaa

SEQ ID NO: 49834 - DNA, 25 bp, Saccharomyces pastorianus
aaatatgtcaccaccacaggaagaa

SEQ ID NO: 49835 - DNA, 25 bp, Saccharomyces pastorianus
attgttcatccaaacgtaccttgta

SEQ ID NO: 49836 - DNA, 25 bp, Saccharomyces pastorianus
gtaccttgtacaacttcggagtgaa

SEQ ID NO: 49837 - DNA, 25 bp, Saccharomyces pastorianus
agataccacaggcttatcggccaag

SEQ ID NO: 49838 - DNA, 25 bp, Saccharomyces pastorianus
gaatccagcatagagataccacagg

SEQ ID NO: 49839 - DNA, 25 bp, Saccharomyces pastorianus
gaatcccttagagttctatgcaaga

SEQ ID NO: 49840 - DNA, 25 bp, Saccharomyces pastorianus
cgtttgatttttctatgggtcggat

SEQ ID NO: 49841 - DNA, 25 bp, Saccharomyces pastorianus
tgtaatgttacctttcatcaagaag

SEQ ID NO: 49842 - DNA, 25 bp, Saccharomyces pastorianus
atcccgtccggatacattcatgtag

SEQ ID NO: 49843 - DNA, 25 bp, Saccharomyces pastorianus
gaagtttttgctatttcctcctact

SEQ ID NO: 49844 - DNA, 25 bp, Saccharomyces pastorianus
gatagccgaagtcagtaactccaca

SEQ ID NO: 49845 - DNA, 25 bp, Saccharomyces pastorianus
aaaggacgcctacacggactttcat

SEQ ID NO: 49846 - DNA, 25 bp, Saccharomyces pastorianus
tggataccttttaaaacctggagtg

SEQ ID NO: 49847 - DNA, 25 bp, Saccharomyces pastorianus
gtagtttatacaccagcagattctc

SEQ ID NO: 49848 - DNA, 25 bp, Saccharomyces pastorianus
cagcttttttctaggcgatgttctt

SEQ ID NO: 49849 - DNA, 25 bp, Saccharomyces pastorianus
gggtaatttcctagcaatgcgtgat

SEQ ID NO: 49850 - DNA, 25 bp, Saccharomyces pastorianus
tttcgccggcacatcagtttattat

SEQ ID NO: 49851 - DNA, 25 bp, Saccharomyces pastorianus
tgatttgtttatgatcccgtccgga

SEQ ID NO: 49852 - DNA, 25 bp, Saccharomyces pastorianus
ggactttcatttggatttcgccggc

SEQ ID NO: 49853 - DNA, 25 bp, Saccharomyces pastorianus
tgccaataatattccagacatgtat

SEQ ID NO: 49854 - DNA, 25 bp, Saccharomyces pastorianus
ttgtgttctattggctttgtccacc

SEQ ID NO: 49855 - DNA, 25 bp, Saccharomyces pastorianus
gttctattggctttgtccaccattg

SEQ ID NO: 49856 - DNA, 25 bp, Saccharomyces pastorianus
tgttgctgccttcggcgttgccttg

SEQ ID NO: 49857 - DNA, 25 bp, Saccharomyces pastorianus
ctgccttatttgttgctgccttcgg

SEQ ID NO: 49858 - DNA, 25 bp, Saccharomyces pastorianus
ggtattgctgccttatttgttgctg

SEQ ID NO: 49859 - DNA, 25 bp, Saccharomyces pastorianus
ggctttgtccaccattgccaataat

SEQ ID NO: 49860 - DNA, 25 bp, Saccharomyces pastorianus
aacttactgggttggcgaaatcagt

SEQ ID NO: 49861 - DNA, 25 bp, Saccharomyces pastorianus
actgggttggcgaaatcagtcgttt

SEQ ID NO: 49862 - DNA, 25 bp, Saccharomyces pastorianus
attgctgccttatttgttgctgcct

SEQ ID NO: 49863 - DNA, 25 bp, Saccharomyces pastorianus
cttatttgttgctgccttcggcgtt

SEQ ID NO: 49864 - DNA, 25 bp, Saccharomyces pastorianus
tgtctggaccatggctggtaatgcc

SEQ ID NO: 49865 - DNA, 25 bp, Saccharomyces pastorianus
gtcagttctgttgtgttctattggc

SEQ ID NO: 49866 - DNA, 25 bp, Saccharomyces pastorianus
ctttgatgggttcatggaaaacttc

SEQ ID NO: 49867 - DNA, 25 bp, Saccharomyces pastorianus
ggtaatgccgcaacgttgggtatct

SEQ ID NO: 49868 - DNA, 25 bp, Saccharomyces pastorianus
agagttgtctggaccatggctggta

SEQ ID NO: 49869 - DNA, 25 bp, Saccharomyces pastorianus
acgggtttggtcagttctgttgtgt

SEQ ID NO: 49870 - DNA, 25 bp, Saccharomyces pastorianus
tgccgcaacgttgggtatctctata

SEQ ID NO: 49871 - DNA, 25 bp, Saccharomyces pastorianus
acgttgggtatctctatacctgcca

SEQ ID NO: 49872 - DNA, 25 bp, Saccharomyces pastorianus
ggaaaacttcatggactccatcggt

SEQ ID NO: 49873 - DNA, 25 bp, Saccharomyces pastorianus
tatacctgccacctattactttgat

SEQ ID NO: 49874 - DNA, 25 bp, Saccharomyces pastorianus
aaataccgagagttgtctggaccat

SEQ ID NO: 49875 - DNA, 25 bp, Saccharomyces pastorianus
attgctttatcagtgcaggctacgt

SEQ ID NO: 49876 - DNA, 25 bp, Saccharomyces pastorianus
ggtggtttaacatttgctatccttg

SEQ ID NO: 49877 - DNA, 25 bp, Saccharomyces pastorianus
gactttattaggtaacgcagccgct

SEQ ID NO: 49878 - DNA, 25 bp, Saccharomyces pastorianus
aatgactgctgtcggtgatccaacg

SEQ ID NO: 49879 - DNA, 25 bp, Saccharomyces pastorianus
gttcctaacatgtacacgattgctt

SEQ ID NO: 49880 - DNA, 25 bp, Saccharomyces pastorianus
ggctacgtgggagcctttggcaaaa

SEQ ID NO: 49881 - DNA, 25 bp, Saccharomyces pastorianus
tttcgattcccgcttgttattattt

SEQ ID NO: 49882 - DNA, 25 bp, Saccharomyces pastorianus
gattcggccaattttgctgcgtttt

SEQ ID NO: 49883 - DNA, 25 bp, Saccharomyces pastorianus
gctgcgttttgttgtctttatccac

SEQ ID NO: 49884 - DNA, 25 bp, Saccharomyces pastorianus
caaattctgttcatggattcggcca

SEQ ID NO: 49885 - DNA, 25 bp, Saccharomyces pastorianus
gcagccgctttagctatttcgattc

SEQ ID NO: 49886 - DNA, 25 bp, Saccharomyces pastorianus
gtcagagtgctgaacctcttattag

SEQ ID NO: 49887 - DNA, 25 bp, Saccharomyces pastorianus
ggacttcttgactatactatcgcaa

SEQ ID NO: 49888 - DNA, 25 bp, Saccharomyces pastorianus
tcgcaaaggttattcgtacccgcca

SEQ ID NO: 49889 - DNA, 25 bp, Saccharomyces pastorianus
cgccactagccaattatttgccgat

SEQ ID NO: 49890 - DNA, 25 bp, Saccharomyces pastorianus
acgcttcaccaatacccattagttt

SEQ ID NO: 49891 - DNA, 25 bp, Saccharomyces pastorianus
gaactcagcatctgaagtactccgt

SEQ ID NO: 49892 - DNA, 25 bp, Saccharomyces pastorianus
atttaccatcctccacaaggcagta

SEQ ID NO: 49893 - DNA, 25 bp, Saccharomyces pastorianus
gatctcacacaaccttcattggatg

SEQ ID NO: 49894 - DNA, 25 bp, Saccharomyces pastorianus
attatgggttcgacacggccttggc

SEQ ID NO: 49895 - DNA, 25 bp, Saccharomyces pastorianus
gaaaattccagacttccggaacgat

SEQ ID NO: 49896 - DNA, 25 bp, Saccharomyces pastorianus
actaagggcttctatctcatttgta

SEQ ID NO: 49897 - DNA, 25 bp, Saccharomyces pastorianus
aaacaccatggcatcgtcatgtgta

SEQ ID NO: 49898 - DNA, 25 bp, Saccharomyces pastorianus
ttgtagtcgacaaacaccatggcat

SEQ ID NO: 49899 - DNA, 25 bp, Saccharomyces pastorianus
gtcgacaaacaccatggcatcgtca

SEQ ID NO: 49900 - DNA, 25 bp, Saccharomyces pastorianus
gatactcggtttcctcaccatagtg

SEQ ID NO: 49901 - DNA, 25 bp, Saccharomyces pastorianus
aatggcctaccatgatactcggttt

SEQ ID NO: 49902 - DNA, 25 bp, Saccharomyces pastorianus
cgtcatgtgtacacactacttgaac

SEQ ID NO: 49903 - DNA, 25 bp, Saccharomyces pastorianus
cacagggtgtgttttgtagtcgaca

SEQ ID NO: 49904 - DNA, 25 bp, Saccharomyces pastorianus
atgtgtagccacagggtgtgttttg

SEQ ID NO: 49905 - DNA, 25 bp, Saccharomyces pastorianus
atgatactcggtttcctcaccatag

SEQ ID NO: 49906 - DNA, 25 bp, Saccharomyces pastorianus
atggcatcgtcatgtgtacacacta

SEQ ID NO: 49907 - DNA, 25 bp, Saccharomyces pastorianus
tctatcttgaatggcctaccatgat

SEQ ID NO: 49908 - DNA, 25 bp, Saccharomyces pastorianus
caaccttgaacgattccctgggaca

SEQ ID NO: 49909 - DNA, 25 bp, Saccharomyces pastorianus
aaaagcattctcttgctgcggaaga

SEQ ID NO: 49910 - DNA, 25 bp, Saccharomyces pastorianus
tacaaagacccttacgatgcgttgg

SEQ ID NO: 49911 - DNA, 25 bp, Saccharomyces pastorianus
aatagactactctgcttccgtggtt

SEQ ID NO: 49912 - DNA, 25 bp, Saccharomyces pastorianus
gcttccgtggttcaattcttacaaa

SEQ ID NO: 49913 - DNA, 25 bp, Saccharomyces pastorianus
gggacaccatactattaccacaact

SEQ ID NO: 49914 - DNA, 25 bp, Saccharomyces pastorianus
atgccgtcggttttttggacacaag

SEQ ID NO: 49915 - DNA, 25 bp, Saccharomyces pastorianus
aatatccgtcattattttcctggga

SEQ ID NO: 49916 - DNA, 25 bp, Saccharomyces pastorianus
aaacgtcccgtatctatcaaatcta

SEQ ID NO: 49917 - DNA, 25 bp, Saccharomyces pastorianus
accaggtatctttggcccacaaaat

SEQ ID NO: 49918 - DNA, 25 bp, Saccharomyces pastorianus
agaacagtagctccatcaacttgcc

SEQ ID NO: 49919 - DNA, 25 bp, Saccharomyces pastorianus
gagaacgttaggtacgtcacactgt

SEQ ID NO: 49920 - DNA, 25 bp, Saccharomyces pastorianus
gcatttatctggcactagagtcatt

SEQ ID NO: 49921 - DNA, 25 bp, Saccharomyces pastorianus
tggagagggccaagctagccagaaa

SEQ ID NO: 49922 - DNA, 25 bp, Saccharomyces pastorianus
atatgaagaagttgctcccgctctg

SEQ ID NO: 49923 - DNA, 25 bp, Saccharomyces pastorianus
caaccctcctgttccatatgaagaa

SEQ ID NO: 49924 - DNA, 25 bp, Saccharomyces pastorianus
gtcacactgtctcctgaagagctga

SEQ ID NO: 49925 - DNA, 25 bp, Saccharomyces pastorianus
ccattctaacaatgccgccggcgag

SEQ ID NO: 49926 - DNA, 25 bp, Saccharomyces pastorianus
cccagcatgccgtcgtaagtacgat

SEQ ID NO: 49927 - DNA, 25 bp, Saccharomyces pastorianus
tatgtagtcggtatcaaccctcctg

SEQ ID NO: 49928 - DNA, 25 bp, Saccharomyces pastorianus
gtggttaccaaatctgtcaattctg

SEQ ID NO: 49929 - DNA, 25 bp, Saccharomyces pastorianus
cccctttgtattgagccgatggata

SEQ ID NO: 49930 - DNA, 25 bp, Saccharomyces pastorianus
gacggtctccattcctatcaaaaag

SEQ ID NO: 49931 - DNA, 25 bp, Saccharomyces pastorianus
aagacttgtccgtgtcattgatgac

SEQ ID NO: 49932 - DNA, 25 bp, Saccharomyces pastorianus
caggatattctggtgccggtacgaa

SEQ ID NO: 49933 - DNA, 25 bp, Saccharomyces pastorianus
aagggtgcagccactcaatgtttgc

SEQ ID NO: 49934 - DNA, 25 bp, Saccharomyces pastorianus
acggtgctgtcattggtggctttaa

SEQ ID NO: 49935 - DNA, 25 bp, Saccharomyces pastorianus
taacaacttgattccttacgcgcta

SEQ ID NO: 49936 - DNA, 25 bp, Saccharomyces pastorianus
attgctgccgctacgaaaattgcca

SEQ ID NO: 49937 - DNA, 25 bp, Saccharomyces pastorianus
gagatttctactcgtattgggcacg

SEQ ID NO: 49938 - DNA, 25 bp, Saccharomyces pastorianus
aagggttcattgtccaccggtgagg

SEQ ID NO: 49939 - DNA, 25 bp, Saccharomyces pastorianus
gttccaaggtatttctctgacggtc

SEQ ID NO: 49940 - DNA, 25 bp, Saccharomyces pastorianus
gttgcatttatacctcatgtcggac

SEQ ID NO: 49941 - DNA, 25 bp, Saccharomyces pastorianus
ttatctgccaaggactaacactcgc

SEQ ID NO: 49942 - DNA, 25 bp, Saccharomyces pastorianus
ggtagaaacattcgtcaggtctttt

SEQ ID NO: 49943 - DNA, 25 bp, Saccharomyces pastorianus
acaagcttgtatgttccgatgcggc

SEQ ID NO: 49944 - DNA, 25 bp, Saccharomyces pastorianus
gaatctgttgcatcctacttgagag

SEQ ID NO: 49945 - DNA, 25 bp, Saccharomyces pastorianus
taacactcgccgtgctgatggcaag

SEQ ID NO: 49946 - DNA, 25 bp, Saccharomyces pastorianus
actcggtccaaaccatgcagtacga

SEQ ID NO: 49947 - DNA, 25 bp, Saccharomyces pastorianus
aggtcttttgataccactcggtcca

SEQ ID NO: 49948 - DNA, 25 bp, Saccharomyces pastorianus
gatgaaccccttgaagcactagcta

SEQ ID NO: 49949 - DNA, 25 bp, Saccharomyces pastorianus
atattcaatgccttacgtcgtgatt

SEQ ID NO: 49950 - DNA, 25 bp, Saccharomyces pastorianus
acgtcgtgatttctctgcattacaa

SEQ ID NO: 49951 - DNA, 25 bp, Saccharomyces pastorianus
atgccgatttcgtttcttacggtga

SEQ ID NO: 49952 - DNA, 25 bp, Saccharomyces pastorianus
ggagactgttttatgttattctatt

SEQ ID NO: 49953 - DNA, 25 bp, Saccharomyces pastorianus
ttagggagactgttttatgttattc

SEQ ID NO: 49954 - DNA, 25 bp, Saccharomyces pastorianus
gttttatgttattctattactaatt

SEQ ID NO: 49955 - DNA, 25 bp, Saccharomyces pastorianus
attactaattaatgctgttgctgtg

SEQ ID NO: 49956 - DNA, 25 bp, Saccharomyces pastorianus
gggagactgttttatgttattctat

SEQ ID NO: 49957 - DNA, 25 bp, Saccharomyces pastorianus
actaattaatgctgttgctgtgctg

SEQ ID NO: 49958 - DNA, 25 bp, Saccharomyces pastorianus
tactaattaatgctgttgctgtgct

SEQ ID NO: 49959 - DNA, 25 bp, Saccharomyces pastorianus
ggattagggagactgttttatgtta

SEQ ID NO: 49960 - DNA, 25 bp, Saccharomyces pastorianus
atttggattagggagactgttttat

SEQ ID NO: 49961 - DNA, 25 bp, Saccharomyces pastorianus
gactgttttatgttattctattact

SEQ ID NO: 49962 - DNA, 25 bp, Saccharomyces pastorianus
atgatatttggattagggagactgt

SEQ ID NO: 49963 - DNA, 25 bp, Saccharomyces pastorianus
acaccaccaagtccaaggttgtaca

SEQ ID NO: 49964 - DNA, 25 bp, Saccharomyces pastorianus
ccaagtccaaggttgtacaattgat

SEQ ID NO: 49965 - DNA, 25 bp, Saccharomyces pastorianus
gagacacctgtttttggtcaggatc

SEQ ID NO: 49966 - DNA, 25 bp, Saccharomyces pastorianus
accaccaagtccaaggttgtacaat

SEQ ID NO: 49967 - DNA, 25 bp, Saccharomyces pastorianus
tgatgagacacctgtttttggtcag

SEQ ID NO: 49968 - DNA, 25 bp, Saccharomyces pastorianus
gacacctgtttttggtcaggatcaa

SEQ ID NO: 49969 - DNA, 25 bp, Saccharomyces pastorianus
gatcaaatgatgagacacctgtttt

SEQ ID NO: 49970 - DNA, 25 bp, Saccharomyces pastorianus
gatcaaaacaccaccaagtccaagg

SEQ ID NO: 49971 - DNA, 25 bp, Saccharomyces pastorianus
cacctgtttttggtcaggatcaaaa

SEQ ID NO: 49972 - DNA, 25 bp, Saccharomyces pastorianus
gtccaaggttgtacaattgattggt

SEQ ID NO: 49973 - DNA, 25 bp, Saccharomyces pastorianus
gtcaggatcaaaacaccaccaagtc

SEQ ID NO: 49974 - DNA, 25 bp, Saccharomyces pastorianus
gcaacgcatcgtatggactttcaaa

SEQ ID NO: 49975 - DNA, 25 bp, Saccharomyces pastorianus
gaatgtttccggtttctgtaatgcc

SEQ ID NO: 49976 - DNA, 25 bp, Saccharomyces pastorianus
agatcctgccgttgattggtctatc

SEQ ID NO: 49977 - DNA, 25 bp, Saccharomyces pastorianus
ggctaatttccgagctttcattttc

SEQ ID NO: 49978 - DNA, 25 bp, Saccharomyces pastorianus
aaaacggctttctgtatccatctag

SEQ ID NO: 49979 - DNA, 25 bp, Saccharomyces pastorianus
ctgggctctttcatgtccaaaggac

SEQ ID NO: 49980 - DNA, 25 bp, Saccharomyces pastorianus
gttcctgctttcgactttggtagta

SEQ ID NO: 49981 - DNA, 25 bp, Saccharomyces pastorianus
ggtctatcttcgtttctacttggaa

SEQ ID NO: 49982 - DNA, 25 bp, Saccharomyces pastorianus
tatagcactcctgccgaacgggata

SEQ ID NO: 49983 - DNA, 25 bp, Saccharomyces pastorianus
tgtaatgcctatgacttcgctgttc

SEQ ID NO: 49984 - DNA, 25 bp, Saccharomyces pastorianus
acaggcctctgctgacagcttgaaa

SEQ ID NO: 49985 - DNA, 25 bp, Saccharomyces pastorianus
atggctttgactcatggaagttctt

SEQ ID NO: 49986 - DNA, 25 bp, Saccharomyces pastorianus
aatctttgctaaacggcatcttcga

SEQ ID NO: 49987 - DNA, 25 bp, Saccharomyces pastorianus
gattcattggtcatacggaggctat

SEQ ID NO: 49988 - DNA, 25 bp, Saccharomyces pastorianus
gtttctcgccagaagacatctcttg

SEQ ID NO: 49989 - DNA, 25 bp, Saccharomyces pastorianus
ggaggctatctactcttcgaagcta

SEQ ID NO: 49990 - DNA, 25 bp, Saccharomyces pastorianus
gttggtgatgacactggcgccagta

SEQ ID NO: 49991 - DNA, 25 bp, Saccharomyces pastorianus
gataggagcaagtttctcgccagaa

SEQ ID NO: 49992 - DNA, 25 bp, Saccharomyces pastorianus
atcaagctaccgacgctagacagcg

SEQ ID NO: 49993 - DNA, 25 bp, Saccharomyces pastorianus
gggagtactagaagacctgcttgaa

SEQ ID NO: 49994 - DNA, 25 bp, Saccharomyces pastorianus
aagacaagcggttcgttgcgttaga

SEQ ID NO: 49995 - DNA, 25 bp, Saccharomyces pastorianus
gaagttcttgtttcctgtcctgaaa

SEQ ID NO: 49996 - DNA, 25 bp, Saccharomyces pastorianus
aatgacattccagatgtgaaacctg

SEQ ID NO: 49997 - DNA, 25 bp, Saccharomyces pastorianus
aaagaaggtgtgatttcggaagatc

SEQ ID NO: 49998 - DNA, 25 bp, Saccharomyces pastorianus
caggtctgcgttcgtttatgcgtaa

SEQ ID NO: 49999 - DNA, 25 bp, Saccharomyces pastorianus
ctgcgttcgtttatgcgtaaaaaga

SEQ ID NO: 50000 - DNA, 25 bp, Saccharomyces pastorianus
aaattcaggtctgcgttcgtttatg

SEQ ID NO: 50001 - DNA, 25 bp, Saccharomyces pastorianus
gagagttcagaaacaattacataag

SEQ ID NO: 50002 - DNA, 25 bp, Saccharomyces pastorianus
attccagatgtgaaacctgaagtaa

SEQ ID NO: 50003 - DNA, 25 bp, Saccharomyces pastorianus
tccaaggagaataatgacattccag

SEQ ID NO: 50004 - DNA, 25 bp, Saccharomyces pastorianus
ggtctgcgttcgtttatgcgtaaaa

SEQ ID NO: 50005 - DNA, 25 bp, Saccharomyces pastorianus
agggcaaaaattcaggtctgcgttc

SEQ ID NO: 50006 - DNA, 25 bp, Saccharomyces pastorianus
ggacgccaataataaatccaaggag

SEQ ID NO: 50007 - DNA, 25 bp, Saccharomyces pastorianus
tctcgtggtcctcatgttacattat

SEQ ID NO: 50008 - DNA, 25 bp, Saccharomyces pastorianus
gtaaagttactctctgccagaggcc

SEQ ID NO: 50009 - DNA, 25 bp, Saccharomyces pastorianus
tacctgctagccactgctggtgaaa

SEQ ID NO: 50010 - DNA, 25 bp, Saccharomyces pastorianus
gcattgccatcgacagaagcggtta

SEQ ID NO: 50011 - DNA, 25 bp, Saccharomyces pastorianus
gaagcggttactatatggtcaccac

SEQ ID NO: 50012 - DNA, 25 bp, Saccharomyces pastorianus
gtcaatgcctgaccccttggtaaag

SEQ ID NO: 50013 - DNA, 25 bp, Saccharomyces pastorianus
gatgtttccactggtcaactggttt

SEQ ID NO: 50014 - DNA, 25 bp, Saccharomyces pastorianus
atggtacagtttcgctatggtctcc

SEQ ID NO: 50015 - DNA, 25 bp, Saccharomyces pastorianus
ggtctattagcattgtctcgtggtc

SEQ ID NO: 50016 - DNA, 25 bp, Saccharomyces pastorianus
gaaggcacagaactacaccgtttga

SEQ ID NO: 50017 - DNA, 25 bp, Saccharomyces pastorianus
aggcacgaacgtttcaatttcagat

SEQ ID NO: 50018 - DNA, 25 bp, Saccharomyces pastorianus
ttccactcctgatttgttttcctta

SEQ ID NO: 50019 - DNA, 25 bp, Saccharomyces pastorianus
gttttccttactgagctccatgaat

SEQ ID NO: 50020 - DNA, 25 bp, Saccharomyces pastorianus
tgaatactggtatgccgggcgcaga

SEQ ID NO: 50021 - DNA, 25 bp, Saccharomyces pastorianus
tcaccactgttttcgctacatttga

SEQ ID NO: 50022 - DNA, 25 bp, Saccharomyces pastorianus
aaatgctgcggtgtggtctgctttc

SEQ ID NO: 50023 - DNA, 25 bp, Saccharomyces pastorianus
aagctagtttcgcttgtgcccgagg

SEQ ID NO: 50024 - DNA, 25 bp, Saccharomyces pastorianus
tttgcgcctttgagaaacccatcta

SEQ ID NO: 50025 - DNA, 25 bp, Saccharomyces pastorianus
agactaccacgattacttgctcaat

SEQ ID NO: 50026 - DNA, 25 bp, Saccharomyces pastorianus
ttattgccctatctgtttctactta

SEQ ID NO: 50027 - DNA, 25 bp, Saccharomyces pastorianus
atattgggatctgctgtccatgctc

SEQ ID NO: 50028 - DNA, 25 bp, Saccharomyces pastorianus
gcattcgctcaatcggcttggtttg

SEQ ID NO: 50029 - DNA, 25 bp, Saccharomyces pastorianus
tttcttctgccttttcgacttccag

SEQ ID NO: 50030 - DNA, 25 bp, Saccharomyces pastorianus
tgctgctgttgcaggtgagtctgtt

SEQ ID NO: 50031 - DNA, 25 bp, Saccharomyces pastorianus
tgctgctgctgttgcaggtgagtct

SEQ ID NO: 50032 - DNA, 25 bp, Saccharomyces pastorianus
gcggtttcttctgccttttcgactt

SEQ ID NO: 50033 - DNA, 25 bp, Saccharomyces pastorianus
tctgccttttcgacttccagcaaca

SEQ ID NO: 50034 - DNA, 25 bp, Saccharomyces pastorianus
atgtgggcaccacagctcgcggttt

SEQ ID NO: 50035 - DNA, 25 bp, Saccharomyces pastorianus
tacagactccagcaccaggttcagg

SEQ ID NO: 50036 - DNA, 25 bp, Saccharomyces pastorianus
ttcaggccatccaccatgtgggcac

SEQ ID NO: 50037 - DNA, 25 bp, Saccharomyces pastorianus
aggttcaggccatccaccatgtggg

SEQ ID NO: 50038 - DNA, 25 bp, Saccharomyces pastorianus
acagctcgcggtttcttctgccttt

SEQ ID NO: 50039 - DNA, 25 bp, Saccharomyces pastorianus
gactccagcaccaggttcaggccat

SEQ ID NO: 50040 - DNA, 25 bp, Saccharomyces pastorianus
gcccgcagtgtcaaaggaacagtca

SEQ ID NO: 50041 - DNA, 25 bp, Saccharomyces pastorianus
tgctgctgctgttgcaggtgagtct

SEQ ID NO: 50042 - DNA, 25 bp, Saccharomyces pastorianus
gcggtttcttctgccttttcgactt

SEQ ID NO: 50043 - DNA, 25 bp, Saccharomyces pastorianus
tctgccttttcgacttccagcaaca

SEQ ID NO: 50044 - DNA, 25 bp, Saccharomyces pastorianus
atgtgggcaccacagctcgcggttt

SEQ ID NO: 50045 - DNA, 25 bp, Saccharomyces pastorianus
tacagactccagcaccaggttcagg

SEQ ID NO: 50046 - DNA, 25 bp, Saccharomyces pastorianus
aggttcaggccatccaccatgtggg

SEQ ID NO: 50047 - DNA, 25 bp, Saccharomyces pastorianus
ttcaggccatccaccatgtgggcac

SEQ ID NO: 50048 - DNA, 25 bp, Saccharomyces pastorianus
acagctcgcggtttcttctgccttt

SEQ ID NO: 50049 - DNA, 25 bp, Saccharomyces pastorianus
tgttgcgcccgcagtgtcaaaggaa

SEQ ID NO: 50050 - DNA, 25 bp, Saccharomyces pastorianus
tgcaggtgagtctgttgcgcccgca

SEQ ID NO: 50051 - DNA, 25 bp, Saccharomyces pastorianus
taaacccatttgcatcacggcccag

SEQ ID NO: 50052 - DNA, 25 bp, Saccharomyces pastorianus
gccatctaaacccatttgcatcacg

SEQ ID NO: 50053 - DNA, 25 bp, Saccharomyces pastorianus
atctaaacccatttgcatcacggcc

SEQ ID NO: 50054 - DNA, 25 bp, Saccharomyces pastorianus
tggccatctaaacccatttgcatca

SEQ ID NO: 50055 - DNA, 25 bp, Saccharomyces pastorianus
ccatctaaacccatttgcatcacgg

SEQ ID NO: 50056 - DNA, 25 bp, Saccharomyces pastorianus
atggctggccatctaaacccatttg

SEQ ID NO: 50057 - DNA, 25 bp, Saccharomyces pastorianus
catctaaacccatttgcatcacggc

SEQ ID NO: 50058 - DNA, 25 bp, Saccharomyces pastorianus
ggctggccatctaaacccatttgca

SEQ ID NO: 50059 - DNA, 25 bp, Saccharomyces pastorianus
tggctggccatctaaacccatttgc

SEQ ID NO: 50060 - DNA, 25 bp, Saccharomyces pastorianus
gctggccatctaaacccatttgcat

SEQ ID NO: 50061 - DNA, 25 bp, Saccharomyces pastorianus
aacccatttgcatcacggcccagtt

SEQ ID NO: 50062 - DNA, 25 bp, Saccharomyces pastorianus
ttgttggacaacttccgttccgaag

SEQ ID NO: 50063 - DNA, 25 bp, Saccharomyces pastorianus
agatgattcgtccaatgcttccgac

SEQ ID NO: 50064 - DNA, 25 bp, Saccharomyces pastorianus
attttttcaccagatccagcagatg

SEQ ID NO: 50065 - DNA, 25 bp, Saccharomyces pastorianus
tgtcctccaaggatgtttctccgga

SEQ ID NO: 50066 - DNA, 25 bp, Saccharomyces pastorianus
atgatgaaccattccagctctacaa

SEQ ID NO: 50067 - DNA, 25 bp, Saccharomyces pastorianus
ttgcatcgttccaaaggatccgcac

SEQ ID NO: 50068 - DNA, 25 bp, Saccharomyces pastorianus
agactgggcgtctcgtcaaacgatg

SEQ ID NO: 50069 - DNA, 25 bp, Saccharomyces pastorianus
ggagttgtcaattcttcttccacag

SEQ ID NO: 50070 - DNA, 25 bp, Saccharomyces pastorianus
gattcacaatcacttccgagacgag

SEQ ID NO: 50071 - DNA, 25 bp, Saccharomyces pastorianus
ttttcgtccagcagttccaatttgt

SEQ ID NO: 50072 - DNA, 25 bp, Saccharomyces pastorianus
agacgagcttttcgaacaccaccga

SEQ ID NO: 50073 - DNA, 25 bp, Saccharomyces pastorianus
agtcaattgggcaaccacatccttt

SEQ ID NO: 50074 - DNA, 25 bp, Saccharomyces pastorianus
aagccaaagcattactgtttcggat

SEQ ID NO: 50075 - DNA, 25 bp, Saccharomyces pastorianus
gtatcgcaatgacgaggactccatt

SEQ ID NO: 50076 - DNA, 25 bp, Saccharomyces pastorianus
aagtatggtccgaggctctttgaaa

SEQ ID NO: 50077 - DNA, 25 bp, Saccharomyces pastorianus
gttcctttgcgggttattcatcaac

SEQ ID NO: 50078 - DNA, 25 bp, Saccharomyces pastorianus
gccctacgtaggacagtatcgcaat

SEQ ID NO: 50079 - DNA, 25 bp, Saccharomyces pastorianus
gccaaaccggcttgataggttccta

SEQ ID NO: 50080 - DNA, 25 bp, Saccharomyces pastorianus
gaacctatcgggattgcactgccaa

SEQ ID NO: 50081 - DNA, 25 bp, Saccharomyces pastorianus
acatcctttcgaaccgcgcagtaaa

SEQ ID NO: 50082 - DNA, 25 bp, Saccharomyces pastorianus
gtatcggttcaagccgcatgtcaga

SEQ ID NO: 50083 - DNA, 25 bp, Saccharomyces pastorianus
aaacactagtcttttcgcgaacgag

SEQ ID NO: 50084 - DNA, 25 bp, Saccharomyces pastorianus
gaacactacgtcaagtagtccgtct

SEQ ID NO: 50085 - DNA, 25 bp, Saccharomyces pastorianus
tagccatgataactcaagtacccaa

SEQ ID NO: 50086 - DNA, 25 bp, Saccharomyces pastorianus
gcagtacaaagcagagtagccctct

SEQ ID NO: 50087 - DNA, 25 bp, Saccharomyces pastorianus
gttcagtgactaacgtaactccatt

SEQ ID NO: 50088 - DNA, 25 bp, Saccharomyces pastorianus
attaacaccgagacatagccatgat

SEQ ID NO: 50089 - DNA, 25 bp, Saccharomyces pastorianus
gagcatacctcgcagtacaaagcag

SEQ ID NO: 50090 - DNA, 25 bp, Saccharomyces pastorianus
gtagtccgtctacaatcatgaacga

SEQ ID NO: 50091 - DNA, 25 bp, Saccharomyces pastorianus
taacgtaactccattattaacaccg

SEQ ID NO: 50092 - DNA, 25 bp, Saccharomyces pastorianus
aagtacccaaatatcaagtatgaag

SEQ ID NO: 50093 - DNA, 25 bp, Saccharomyces pastorianus
gtcgacaccgttcagtgactaacgt

SEQ ID NO: 50094 - DNA, 25 bp, Saccharomyces pastorianus
tctctcaagtcgacaccgttcagtg

SEQ ID NO: 50095 - DNA, 25 bp, Saccharomyces pastorianus
gggcatttgatgtttcaaccgctag

SEQ ID NO: 50096 - DNA, 25 bp, Saccharomyces pastorianus
aatgtctgcattgacgtttgcgtcc

SEQ ID NO: 50097 - DNA, 25 bp, Saccharomyces pastorianus
aagagaattcatgggtctccctcaa

SEQ ID NO: 50098 - DNA, 25 bp, Saccharomyces pastorianus
aaccgctagagaattcgtcttcaag

SEQ ID NO: 50099 - DNA, 25 bp, Saccharomyces pastorianus
aaaggagcgaggcaatgtctgcatt

SEQ ID NO: 50100 - DNA, 25 bp, Saccharomyces pastorianus
aactgaactacaagccgccaccgtt

SEQ ID NO: 50101 - DNA, 25 bp, Saccharomyces pastorianus
gctgcttccataggtacgttcagta

SEQ ID NO: 50102 - DNA, 25 bp, Saccharomyces pastorianus
cgttcagtacgttggtatttggatt

SEQ ID NO: 50103 - DNA, 25 bp, Saccharomyces pastorianus
ctccctcaaacgtcagacactgata

SEQ ID NO: 50104 - DNA, 25 bp, Saccharomyces pastorianus
tttgcgtccgctgcttccataggta

SEQ ID NO: 50105 - DNA, 25 bp, Saccharomyces pastorianus
gccaccgttctctcaaaggagcgag

SEQ ID NO: 50106 - DNA, 25 bp, Saccharomyces pastorianus
gctccaaatggtcaagttttatggt

SEQ ID NO: 50107 - DNA, 25 bp, Saccharomyces pastorianus
cagtttcaccctcatcactatgagg

SEQ ID NO: 50108 - DNA, 25 bp, Saccharomyces pastorianus
ggatgctccaaatggtcaagtttta

SEQ ID NO: 50109 - DNA, 25 bp, Saccharomyces pastorianus
ttttatggtgcagccagtttcaccc

SEQ ID NO: 50110 - DNA, 25 bp, Saccharomyces pastorianus
atggtgcagccagtttcaccctcat

SEQ ID NO: 50111 - DNA, 25 bp, Saccharomyces pastorianus
agtacaagagaaggaggatgctcca

SEQ ID NO: 50112 - DNA, 25 bp, Saccharomyces pastorianus
aggaggatgctccaaatggtcaagt

SEQ ID NO: 50113 - DNA, 25 bp, Saccharomyces pastorianus
gtcaagttttatggtgcagccagtt

SEQ ID NO: 50114 - DNA, 25 bp, Saccharomyces pastorianus
atgactgatgcgaagaagcagtaca

SEQ ID NO: 50115 - DNA, 25 bp, Saccharomyces pastorianus
aatggtcaagttttatggtgcagcc

SEQ ID NO: 50116 - DNA, 25 bp, Saccharomyces pastorianus
agttttatggtgcagccagtttcac

SEQ ID NO: 50117 - DNA, 25 bp, Saccharomyces pastorianus
tcgcggtactgaatatccatggttt

SEQ ID NO: 50118 - DNA, 25 bp, Saccharomyces pastorianus
tttcatctattctaatctccatttg

SEQ ID NO: 50119 - DNA, 25 bp, Saccharomyces pastorianus
tcaacataatgtgcggtctgggact

SEQ ID NO: 50120 - DNA, 25 bp, Saccharomyces pastorianus
tgagctacttaacggcttcgtggtt

SEQ ID NO: 50121 - DNA, 25 bp, Saccharomyces pastorianus
atggaattatactctctctactaca

SEQ ID NO: 50122 - DNA, 25 bp, Saccharomyces pastorianus
aatgagattctgcttcgaagacaaa

SEQ ID NO: 50123 - DNA, 25 bp, Saccharomyces pastorianus
atctccatttgttatagtctactct

SEQ ID NO: 50124 - DNA, 25 bp, Saccharomyces pastorianus
agtctactcttcaacataatgtgcg

SEQ ID NO: 50125 - DNA, 25 bp, Saccharomyces pastorianus
gactgggcggactgagctacttaac

SEQ ID NO: 50126 - DNA, 25 bp, Saccharomyces pastorianus
tctctactacattttcgcggtactg

SEQ ID NO: 50127 - DNA, 25 bp, Saccharomyces pastorianus
gaatatccatggtttttcatctatt

SEQ ID NO: 50128 - DNA, 25 bp, Saccharomyces pastorianus
tgccggtgtcatcgccaacccaaag

SEQ ID NO: 50129 - DNA, 25 bp, Saccharomyces pastorianus
cggtgtcatcgccaacccaaagggt

SEQ ID NO: 50130 - DNA, 25 bp, Saccharomyces pastorianus
tcgccaacccaaagggtgaaatgaa

SEQ ID NO: 50131 - DNA, 25 bp, Saccharomyces pastorianus
atcgccaacccaaagggtgaaatga

SEQ ID NO: 50132 - DNA, 25 bp, Saccharomyces pastorianus
ggtgtcatcgccaacccaaagggtg

SEQ ID NO: 50133 - DNA, 25 bp, Saccharomyces pastorianus
tcatcgccaacccaaagggtgaaat

SEQ ID NO: 50134 - DNA, 25 bp, Saccharomyces pastorianus
gtgtcatcgccaacccaaagggtga

SEQ ID NO: 50135 - DNA, 25 bp, Saccharomyces pastorianus
tgtcatcgccaacccaaagggtgaa

SEQ ID NO: 50136 - DNA, 25 bp, Saccharomyces pastorianus
agacaatgccggtgtcatcgccaac

SEQ ID NO: 50137 - DNA, 25 bp, Saccharomyces pastorianus
aatgccggtgtcatcgccaacccaa

SEQ ID NO: 50138 - DNA, 25 bp, Saccharomyces pastorianus
atgccggtgtcatcgccaacccaaa

SEQ ID NO: 50139 - DNA, 25 bp, Saccharomyces pastorianus
gttgtatccctacgacgcagatggc

SEQ ID NO: 50140 - DNA, 25 bp, Saccharomyces pastorianus
ttattccaagtaattatgttcagtt

SEQ ID NO: 50141 - DNA, 25 bp, Saccharomyces pastorianus
tcgaacaaaacgaaattctacaagt

SEQ ID NO: 50142 - DNA, 25 bp, Saccharomyces pastorianus
ctacgacgcagatggcgatgatgct

SEQ ID NO: 50143 - DNA, 25 bp, Saccharomyces pastorianus
aaggcaaaggcgttgtatccctacg

SEQ ID NO: 50144 - DNA, 25 bp, Saccharomyces pastorianus
ggctgtatagcgatataggcgatga

SEQ ID NO: 50145 - DNA, 25 bp, Saccharomyces pastorianus
gatataggcgatgacaactttgtat

SEQ ID NO: 50146 - DNA, 25 bp, Saccharomyces pastorianus
gtatccctacgacgcagatggcgat

SEQ ID NO: 50147 - DNA, 25 bp, Saccharomyces pastorianus
aaaggcgttgtatccctacgacgca

SEQ ID NO: 50148 - DNA, 25 bp, Saccharomyces pastorianus
gatgacaactttgtatacaaggcaa

SEQ ID NO: 50149 - DNA, 25 bp, Saccharomyces pastorianus
gagcaaatggtgaaacaggaattat

SEQ ID NO: 50150 - DNA, 25 bp, Saccharomyces pastorianus
aatcttcacacagagctactgctga

SEQ ID NO: 50151 - DNA, 25 bp, Saccharomyces pastorianus
atcagagaatcatccgaccaaccag

SEQ ID NO: 50152 - DNA, 25 bp, Saccharomyces pastorianus
tgcgggcattatcaacacggacaaa

SEQ ID NO: 50153 - DNA, 25 bp, Saccharomyces pastorianus
ggaacgtaaggtcacctcgtttgag

SEQ ID NO: 50154 - DNA, 25 bp, Saccharomyces pastorianus
ccaaccagattggagcacgtctatt

SEQ ID NO: 50155 - DNA, 25 bp, Saccharomyces pastorianus
gatcttctttggtaagccacggcga

SEQ ID NO: 50156 - DNA, 25 bp, Saccharomyces pastorianus
atacagaccaaatactgcgggcatt

SEQ ID NO: 50157 - DNA, 25 bp, Saccharomyces pastorianus
tatagaccaccaaagattaccgccg

SEQ ID NO: 50158 - DNA, 25 bp, Saccharomyces pastorianus
gaaacgtgcgctggaaagatcttct

SEQ ID NO: 50159 - DNA, 25 bp, Saccharomyces pastorianus
aggatcgtagcaataaatcgcgtat

SEQ ID NO: 50160 - DNA, 25 bp, Saccharomyces pastorianus
ggtgctgacattgtaaatcacggac

SEQ ID NO: 50161 - DNA, 25 bp, Saccharomyces pastorianus
gaaagtacagaacctgctccagctg

SEQ ID NO: 50162 - DNA, 25 bp, Saccharomyces pastorianus
gtataacgatgctgtggctcaattg

SEQ ID NO: 50163 - DNA, 25 bp, Saccharomyces pastorianus
ggacatgcaaccatgcgcaatttgc

SEQ ID NO: 50164 - DNA, 25 bp, Saccharomyces pastorianus
ggaggacgcagacaccttactggaa

SEQ ID NO: 50165 - DNA, 25 bp, Saccharomyces pastorianus
ataccttaatatctgcccaaagccg

SEQ ID NO: 50166 - DNA, 25 bp, Saccharomyces pastorianus
taaaccatctacaaccgtcctttat

SEQ ID NO: 50167 - DNA, 25 bp, Saccharomyces pastorianus
ggaccctaaggaactgctgcaaaaa

SEQ ID NO: 50168 - DNA, 25 bp, Saccharomyces pastorianus
cagactggctatacacgtgcgatat

SEQ ID NO: 50169 - DNA, 25 bp, Saccharomyces pastorianus
gcctgctgatgtccctctagaggta

SEQ ID NO: 50170 - DNA, 25 bp, Saccharomyces pastorianus
gagaactactctaatacggacccta

SEQ ID NO: 50171 - DNA, 25 bp, Saccharomyces pastorianus
tcagtttactatccccatctacagt

SEQ ID NO: 50172 - DNA, 25 bp, Saccharomyces pastorianus
acgatcgcgatctttgacagttgca

SEQ ID NO: 50173 - DNA, 25 bp, Saccharomyces pastorianus
aggacgccctagattctactaatgt

SEQ ID NO: 50174 - DNA, 25 bp, Saccharomyces pastorianus
gagggaagccaataccattactact

SEQ ID NO: 50175 - DNA, 25 bp, Saccharomyces pastorianus
agatacatcaaagtccgtgccttga

SEQ ID NO: 50176 - DNA, 25 bp, Saccharomyces pastorianus
gacgacgataactccacataacata

SEQ ID NO: 50177 - DNA, 25 bp, Saccharomyces pastorianus
aggaggagacacaactcttcaaaag

SEQ ID NO: 50178 - DNA, 25 bp, Saccharomyces pastorianus
ggagttaatgctaaacgccgggaat

SEQ ID NO: 50179 - DNA, 25 bp, Saccharomyces pastorianus
gaagaaggtctataccctcaaataa

SEQ ID NO: 50180 - DNA, 25 bp, Saccharomyces pastorianus
tgagccatcaaacaacccacaaaat

SEQ ID NO: 50181 - DNA, 25 bp, Saccharomyces pastorianus
actaggaggctttggcggtaatcac

SEQ ID NO: 50182 - DNA, 25 bp, Saccharomyces pastorianus
gtgccttgatcaacccattgggaat

SEQ ID NO: 50183 - DNA, 25 bp, Saccharomyces pastorianus
ttccaaattttaaaacctgctcaga

SEQ ID NO: 50184 - DNA, 25 bp, Saccharomyces pastorianus
atattcccgatgttggtttgttatg

SEQ ID NO: 50185 - DNA, 25 bp, Saccharomyces pastorianus
agatggttacgaattcttcagtaag

SEQ ID NO: 50186 - DNA, 25 bp, Saccharomyces pastorianus
acaagacatggagctgatttgcaga

SEQ ID NO: 50187 - DNA, 25 bp, Saccharomyces pastorianus
gcagagcccatcaagtcgtggaaga

SEQ ID NO: 50188 - DNA, 25 bp, Saccharomyces pastorianus
ttagaagagtaatgagaccaacgga

SEQ ID NO: 50189 - DNA, 25 bp, Saccharomyces pastorianus
ggagctgatttgcagagcccatcaa

SEQ ID NO: 50190 - DNA, 25 bp, Saccharomyces pastorianus
cccgatgttggtttgttatgtgatt

SEQ ID NO: 50191 - DNA, 25 bp, Saccharomyces pastorianus
atttattgtggtcggatccagataa

SEQ ID NO: 50192 - DNA, 25 bp, Saccharomyces pastorianus
atgtgatttattgtggtcggatcca

SEQ ID NO: 50193 - DNA, 25 bp, Saccharomyces pastorianus
gagacagttggtaacacttttcagt

SEQ ID NO: 50194 - DNA, 25 bp, Saccharomyces pastorianus
ctcaaaagccagatccatattcata

SEQ ID NO: 50195 - DNA, 25 bp, Saccharomyces pastorianus
atgctcaaaagccagatccatattc

SEQ ID NO: 50196 - DNA, 25 bp, Saccharomyces pastorianus
gactcacagccagttgacgttgaca

SEQ ID NO: 50197 - DNA, 25 bp, Saccharomyces pastorianus
gttgacgttgacaatatcatcgata

SEQ ID NO: 50198 - DNA, 25 bp, Saccharomyces pastorianus
atacttatgctcaaaagccagatcc

SEQ ID NO: 50199 - DNA, 25 bp, Saccharomyces pastorianus
cttatgctcaaaagccagatccata

SEQ ID NO: 50200 - DNA, 25 bp, Saccharomyces pastorianus
acttatgctcaaaagccagatccat

SEQ ID NO: 50201 - DNA, 25 bp, Saccharomyces pastorianus
tgctcaaaagccagatccatattca

SEQ ID NO: 50202 - DNA, 25 bp, Saccharomyces pastorianus
gctcaaaagccagatccatattcat

SEQ ID NO: 50203 - DNA, 25 bp, Saccharomyces pastorianus
taagaggatctaaaccaggtcaaca

SEQ ID NO: 50204 - DNA, 25 bp, Saccharomyces pastorianus
ttatgctcaaaagccagatccatat

SEQ ID NO: 50205 - DNA, 25 bp, Saccharomyces pastorianus
ggaatctcttgcagcgtactttact

SEQ ID NO: 50206 - DNA, 25 bp, Saccharomyces pastorianus
aggcggtggttgacagtctagttac

SEQ ID NO: 50207 - DNA, 25 bp, Saccharomyces pastorianus
ggatatattcgctccagaagatctg

SEQ ID NO: 50208 - DNA, 25 bp, Saccharomyces pastorianus
cattatggcggtacgtttccggact

SEQ ID NO: 50209 - DNA, 25 bp, Saccharomyces pastorianus
tttccggactacaaagtgcttttcg

SEQ ID NO: 50210 - DNA, 25 bp, Saccharomyces pastorianus
atctcagcagattagtggcctagca

SEQ ID NO: 50211 - DNA, 25 bp, Saccharomyces pastorianus
gccagtacgatcatatctcagcaga

SEQ ID NO: 50212 - DNA, 25 bp, Saccharomyces pastorianus
gacatacttggaatctcttgcagcg

SEQ ID NO: 50213 - DNA, 25 bp, Saccharomyces pastorianus
gatttgcaccttataggtctgtgtt

SEQ ID NO: 50214 - DNA, 25 bp, Saccharomyces pastorianus
gaggctctcgagcacaaatattgaa

SEQ ID NO: 50215 - DNA, 25 bp, Saccharomyces pastorianus
aaatgctcggaaagatttgcacctt

SEQ ID NO: 50216 - DNA, 25 bp, Saccharomyces pastorianus
gaagcacacaatgagtctaccggag

SEQ ID NO: 50217 - DNA, 25 bp, Saccharomyces pastorianus
gacccggaggacgagaccaagaaca

SEQ ID NO: 50218 - DNA, 25 bp, Saccharomyces pastorianus
acgctggtcggcttcgacgacttcg

SEQ ID NO: 50219 - DNA, 25 bp, Saccharomyces pastorianus
gagtgctgatcgtgctgcagtcgaa

SEQ ID NO: 50220 - DNA, 25 bp, Saccharomyces pastorianus
tcatgcagggcaaaccacacacaca

SEQ ID NO: 50221 - DNA, 25 bp, Saccharomyces pastorianus
caacgtcatactggaggacgctgtt

SEQ ID NO: 50222 - DNA, 25 bp, Saccharomyces pastorianus
ggacgctgttgagtggctcatcgac

SEQ ID NO: 50223 - DNA, 25 bp, Saccharomyces pastorianus
atcaaccagagagtgctgatcgtgc

SEQ ID NO: 50224 - DNA, 25 bp, Saccharomyces pastorianus
tcatcgacccggaggacgagaccaa

SEQ ID NO: 50225 - DNA, 25 bp, Saccharomyces pastorianus
gttactacaagcactcatgcagggc

SEQ ID NO: 50226 - DNA, 25 bp, Saccharomyces pastorianus
gaaccgcgaatttgagggcacgctg

SEQ ID NO: 50227 - DNA, 25 bp, Saccharomyces pastorianus
acagcagcgaaacgtttagggttat

SEQ ID NO: 50228 - DNA, 25 bp, Saccharomyces pastorianus
gtcacagtggccacaatattttgca

SEQ ID NO: 50229 - DNA, 25 bp, Saccharomyces pastorianus
tatactccgcattacgcgcatgtag

SEQ ID NO: 50230 - DNA, 25 bp, Saccharomyces pastorianus
actgttttcaagtccagcctacaac

SEQ ID NO: 50231 - DNA, 25 bp, Saccharomyces pastorianus
tgtggcagatgtatccttttcagat

SEQ ID NO: 50232 - DNA, 25 bp, Saccharomyces pastorianus
tagtgccactgttttcaagtccagc

SEQ ID NO: 50233 - DNA, 25 bp, Saccharomyces pastorianus
gaacaataccagatgtggcagatgt

SEQ ID NO: 50234 - DNA, 25 bp, Saccharomyces pastorianus
cagcctacaacccaaagtcacagtg

SEQ ID NO: 50235 - DNA, 25 bp, Saccharomyces pastorianus
tttgcaatgttggaacaataccaga

SEQ ID NO: 50236 - DNA, 25 bp, Saccharomyces pastorianus
ttagggttatactccgcattacgcg

SEQ ID NO: 50237 - DNA, 25 bp, Saccharomyces pastorianus
attacgcgcatgtagtgccactgtt

SEQ ID NO: 50238 - DNA, 25 bp, Saccharomyces pastorianus
gcatatctgattgttgcgcatcact

SEQ ID NO: 50239 - DNA, 25 bp, Saccharomyces pastorianus
tgcgtactcgtcaacacttttttaa

SEQ ID NO: 50240 - DNA, 25 bp, Saccharomyces pastorianus
gccacctgttggacttcctatagaa

SEQ ID NO: 50241 - DNA, 25 bp, Saccharomyces pastorianus
aagtgagcgtgatccagagccacct

SEQ ID NO: 50242 - DNA, 25 bp, Saccharomyces pastorianus
gaatgaggtgttttccttttcactt

SEQ ID NO: 50243 - DNA, 25 bp, Saccharomyces pastorianus
gcatcgtgacgttttcttatagcat

SEQ ID NO: 50244 - DNA, 25 bp, Saccharomyces pastorianus
ctgtttgcttcctctaattctttat

SEQ ID NO: 50245 - DNA, 25 bp, Saccharomyces pastorianus
tgaactcaacttgctgtttgcttcc

SEQ ID NO: 50246 - DNA, 25 bp, Saccharomyces pastorianus
tagctggcgagctcaccggtgatga

SEQ ID NO: 50247 - DNA, 25 bp, Saccharomyces pastorianus
gttccctttcatattttctttgcgt

SEQ ID NO: 50248 - DNA, 25 bp, Saccharomyces pastorianus
tgtatctatgttcacgttcttcggc

SEQ ID NO: 50249 - DNA, 25 bp, Saccharomyces pastorianus
gatcgttttcaaattgcttggtcaa

SEQ ID NO: 50250 - DNA, 25 bp, Saccharomyces pastorianus
caaattgcttggtcaaaaaattatg

SEQ ID NO: 50251 - DNA, 25 bp, Saccharomyces pastorianus
atcattaaacgccgtctccaactca

SEQ ID NO: 50252 - DNA, 25 bp, Saccharomyces pastorianus
tcgttttcaaattgcttggtcaaaa

SEQ ID NO: 50253 - DNA, 25 bp, Saccharomyces pastorianus
gcaaatcattaaacgccgtctccaa

SEQ ID NO: 50254 - DNA, 25 bp, Saccharomyces pastorianus
ggcacgatcgttttcaaattgcttg

SEQ ID NO: 50255 - DNA, 25 bp, Saccharomyces pastorianus
acgatcgttttcaaattgcttggtc

SEQ ID NO: 50256 - DNA, 25 bp, Saccharomyces pastorianus
tcggcacgatcgttttcaaattgct

SEQ ID NO: 50257 - DNA, 25 bp, Saccharomyces pastorianus
gttgcaaatcattaaacgccgtctc

SEQ ID NO: 50258 - DNA, 25 bp, Saccharomyces pastorianus
agttgcaaatcattaaacgccgtct

SEQ ID NO: 50259 - DNA, 25 bp, Saccharomyces pastorianus
caaatcattaaacgccgtctccaac

SEQ ID NO: 50260 - DNA, 25 bp, Saccharomyces pastorianus
tagcaagggagttggtccccaaagt

SEQ ID NO: 50261 - DNA, 25 bp, Saccharomyces pastorianus
gttgtcaacctattagatgctgtgc

SEQ ID NO: 50262 - DNA, 25 bp, Saccharomyces pastorianus
ttggcgtacttgaaaaacctattga

SEQ ID NO: 50263 - DNA, 25 bp, Saccharomyces pastorianus
aactcatccacgattttgactttag

SEQ ID NO: 50264 - DNA, 25 bp, Saccharomyces pastorianus
gcaacggcgaagatttatcatcaag

SEQ ID NO: 50265 - DNA, 25 bp, Saccharomyces pastorianus
gagttaatcacacagtcctattcta

SEQ ID NO: 50266 - DNA, 25 bp, Saccharomyces pastorianus
aacctattgatgttgcgtgactcca

SEQ ID NO: 50267 - DNA, 25 bp, Saccharomyces pastorianus
gttgcgtgactccatacaaaatttt

SEQ ID NO: 50268 - DNA, 25 bp, Saccharomyces pastorianus
atactttggatatcagcaacggcga

SEQ ID NO: 50269 - DNA, 25 bp, Saccharomyces pastorianus
gcacgtacagaactaatctccgagt

SEQ ID NO: 50270 - DNA, 25 bp, Saccharomyces pastorianus
aggttgcccagaatatacgaacaaa

SEQ ID NO: 50271 - DNA, 25 bp, Saccharomyces pastorianus
gcgtctgcgagatgaatggtctacc

SEQ ID NO: 50272 - DNA, 25 bp, Saccharomyces pastorianus
aatgaggacgtcactccggtagaaa

SEQ ID NO: 50273 - DNA, 25 bp, Saccharomyces pastorianus
tggtctcccatcgactattgtagat

SEQ ID NO: 50274 - DNA, 25 bp, Saccharomyces pastorianus
acaaaatacctctgactgcgtctgt

SEQ ID NO: 50275 - DNA, 25 bp, Saccharomyces pastorianus
gatgtgacaattcctttcttgataa

SEQ ID NO: 50276 - DNA, 25 bp, Saccharomyces pastorianus
agtccttacgctttgctgatgaaat

SEQ ID NO: 50277 - DNA, 25 bp, Saccharomyces pastorianus
aagtcaagacatggctaacccttcc

SEQ ID NO: 50278 - DNA, 25 bp, Saccharomyces pastorianus
aggcccctaattcctctattatcaa

SEQ ID NO: 50279 - DNA, 25 bp, Saccharomyces pastorianus
attatcaactctttaccatcatcgc

SEQ ID NO: 50280 - DNA, 25 bp, Saccharomyces pastorianus
aaaatgcttccaagtccttacgctt

SEQ ID NO: 50281 - DNA, 25 bp, Saccharomyces pastorianus
aagaccagcgtgttcttgaggcgtc

SEQ ID NO: 50282 - DNA, 25 bp, Saccharomyces pastorianus
atagatgcgccggttgtcattggta

SEQ ID NO: 50283 - DNA, 25 bp, Saccharomyces pastorianus
atgcgccggttgtcattggtacgta

SEQ ID NO: 50284 - DNA, 25 bp, Saccharomyces pastorianus
acatcatgtttatgcttatgcgctc

SEQ ID NO: 50285 - DNA, 25 bp, Saccharomyces pastorianus
tttggtttatattacattacattac

SEQ ID NO: 50286 - DNA, 25 bp, Saccharomyces pastorianus
tatgcgctctcttcttcctcctgtg

SEQ ID NO: 50287 - DNA, 25 bp, Saccharomyces pastorianus
cgtacgtgattacatttcgtccttg

SEQ ID NO: 50288 - DNA, 25 bp, Saccharomyces pastorianus
gcacagagatagatgcgccggttgt

SEQ ID NO: 50289 - DNA, 25 bp, Saccharomyces pastorianus
gccggttgtcattggtacgtacgtg

SEQ ID NO: 50290 - DNA, 25 bp, Saccharomyces pastorianus
tatgcttatgcgctctcttcttcct

SEQ ID NO: 50291 - DNA, 25 bp, Saccharomyces pastorianus
gtacgtacgtgattacatttcgtcc

SEQ ID NO: 50292 - DNA, 25 bp, Saccharomyces pastorianus
atgtttatgcttatgcgctctcttc

SEQ ID NO: 50293 - DNA, 25 bp, Saccharomyces pastorianus
ggccttgcagaagattattcggatt

SEQ ID NO: 50294 - DNA, 25 bp, Saccharomyces pastorianus
gagggccttgcagaagattattcgg

SEQ ID NO: 50295 - DNA, 25 bp, Saccharomyces pastorianus
tgcagaagattattcggatttcatg

SEQ ID NO: 50296 - DNA, 25 bp, Saccharomyces pastorianus
cagaagagggccttgcagaagatta

SEQ ID NO: 50297 - DNA, 25 bp, Saccharomyces pastorianus
gaagagggccttgcagaagattatt

SEQ ID NO: 50298 - DNA, 25 bp, Saccharomyces pastorianus
aagtgctgcagaagagggccttgca

SEQ ID NO: 50299 - DNA, 25 bp, Saccharomyces pastorianus
ccttgcagaagattattcggatttc

SEQ ID NO: 50300 - DNA, 25 bp, Saccharomyces pastorianus
gggccttgcagaagattattcggat

SEQ ID NO: 50301 - DNA, 25 bp, Saccharomyces pastorianus
aagagggccttgcagaagattattc

SEQ ID NO: 50302 - DNA, 25 bp, Saccharomyces pastorianus
aaagtgctgcagaagagggccttgc

SEQ ID NO: 50303 - DNA, 25 bp, Saccharomyces pastorianus
agggccttgcagaagattattcgga

SEQ ID NO: 50304 - DNA, 25 bp, Saccharomyces pastorianus
gaaggagtacttcgaactaatacgg

SEQ ID NO: 50305 - DNA, 25 bp, Saccharomyces pastorianus
tgacaacctgccgaaggagtacttc

SEQ ID NO: 50306 - DNA, 25 bp, Saccharomyces pastorianus
ccgataatgcgcctttgcaaagacg

SEQ ID NO: 50307 - DNA, 25 bp, Saccharomyces pastorianus
aggaaaccgataatgcgcctttgca

SEQ ID NO: 50308 - DNA, 25 bp, Saccharomyces pastorianus
caacctgccgaaggagtacttcgaa

SEQ ID NO: 50309 - DNA, 25 bp, Saccharomyces pastorianus
atgaatgacaacctgccgaaggagt

SEQ ID NO: 50310 - DNA, 25 bp, Saccharomyces pastorianus
gaatgacaacctgccgaaggagtac

SEQ ID NO: 50311 - DNA, 25 bp, Saccharomyces pastorianus
gagtacttcgaactaatacggaaag

SEQ ID NO: 50312 - DNA, 25 bp, Saccharomyces pastorianus
gaaaccgataatgcgcctttgcaaa

SEQ ID NO: 50313 - DNA, 25 bp, Saccharomyces pastorianus
ggaaaccgataatgcgcctttgcaa

SEQ ID NO: 50314 - DNA, 25 bp, Saccharomyces pastorianus
acctgccgaaggagtacttcgaact

SEQ ID NO: 50315 - DNA, 25 bp, Saccharomyces pastorianus
agatcaccagcaccgccaaaagggt

SEQ ID NO: 50316 - DNA, 25 bp, Saccharomyces pastorianus
atcaaaccccctagtaagatcacca

SEQ ID NO: 50317 - DNA, 25 bp, Saccharomyces pastorianus
tcaccagcaccgccaaaagggtaaa

SEQ ID NO: 50318 - DNA, 25 bp, Saccharomyces pastorianus
taagatcaccagcaccgccaaaagg

SEQ ID NO: 50319 - DNA, 25 bp, Saccharomyces pastorianus
ggagatatctccgttgaaatcaaac

SEQ ID NO: 50320 - DNA, 25 bp, Saccharomyces pastorianus
gtaagatcaccagcaccgccaaaag

SEQ ID NO: 50321 - DNA, 25 bp, Saccharomyces pastorianus
cagatgaaaacgaggcaaacggtgt

SEQ ID NO: 50322 - DNA, 25 bp, Saccharomyces pastorianus
gatatctccgttgaaatcaaacccc

SEQ ID NO: 50323 - DNA, 25 bp, Saccharomyces pastorianus
aggcaaacggtgtaggagatatctc

SEQ ID NO: 50324 - DNA, 25 bp, Saccharomyces pastorianus
tagtaagatcaccagcaccgccaaa

SEQ ID NO: 50325 - DNA, 25 bp, Saccharomyces pastorianus
acggtgtaggagatatctccgttga

SEQ ID NO: 50326 - DNA, 25 bp, Saccharomyces pastorianus
agccctgtggccattaaagccgcta

SEQ ID NO: 50327 - DNA, 25 bp, Saccharomyces pastorianus
gaaattcagttaagccagtcctaag

SEQ ID NO: 50328 - DNA, 25 bp, Saccharomyces pastorianus
atgatacctgccaactgctgtctaa

SEQ ID NO: 50329 - DNA, 25 bp, Saccharomyces pastorianus
agaagctgttgaggccgctattgat

SEQ ID NO: 50330 - DNA, 25 bp, Saccharomyces pastorianus
ctgtctaattgaaagccctgtggcc

SEQ ID NO: 50331 - DNA, 25 bp, Saccharomyces pastorianus
tattccaccattggcgaccggaaat

SEQ ID NO: 50332 - DNA, 25 bp, Saccharomyces pastorianus
agccagtcctaagcggtattgttat

SEQ ID NO: 50333 - DNA, 25 bp, Saccharomyces pastorianus
atcgaggtttttgcacccacaatga

SEQ ID NO: 50334 - DNA, 25 bp, Saccharomyces pastorianus
gtaacttctttcaagttcgaacgtg

SEQ ID NO: 50335 - DNA, 25 bp, Saccharomyces pastorianus
aatcttaaagactggctgtaggtgc

SEQ ID NO: 50336 - DNA, 25 bp, Saccharomyces pastorianus
cctggttgcaaagagtgcggctatt

SEQ ID NO: 50337 - DNA, 25 bp, Saccharomyces pastorianus
aaacgacacgtctgtagtggcccct

SEQ ID NO: 50338 - DNA, 25 bp, Saccharomyces pastorianus
atcgattcggacagggaaccatcct

SEQ ID NO: 50339 - DNA, 25 bp, Saccharomyces pastorianus
gcatcctgaaaggtcattccatcgc

SEQ ID NO: 50340 - DNA, 25 bp, Saccharomyces pastorianus
tatccaattgtgtgcttgggccatt

SEQ ID NO: 50341 - DNA, 25 bp, Saccharomyces pastorianus
atttgctcccgaggaaattgtacta

SEQ ID NO: 50342 - DNA, 25 bp, Saccharomyces pastorianus
accctactgtgcaaccgcaggatga

SEQ ID NO: 50343 - DNA, 25 bp, Saccharomyces pastorianus
gaggtcgaggtccaatcctttactt

SEQ ID NO: 50344 - DNA, 25 bp, Saccharomyces pastorianus
ggccattaactgacccaagtgacat

SEQ ID NO: 50345 - DNA, 25 bp, Saccharomyces pastorianus
gtcatcatctcaccaggcacaaaaa

SEQ ID NO: 50346 - DNA, 25 bp, Saccharomyces pastorianus
atccaccgtgtcaaatctatccaat

SEQ ID NO: 50347 - DNA, 25 bp, Saccharomyces pastorianus
gaagagatcatgtcctgcagcattt

SEQ ID NO: 50348 - DNA, 25 bp, Saccharomyces pastorianus
ggcgagtttatgattacttacccat

SEQ ID NO: 50349 - DNA, 25 bp, Saccharomyces pastorianus
tacctctacgctggcctatggaagg

SEQ ID NO: 50350 - DNA, 25 bp, Saccharomyces pastorianus
tttggcgccccaaaacaatggtatt

SEQ ID NO: 50351 - DNA, 25 bp, Saccharomyces pastorianus
gaagccaagaactgtcccgaatttc

SEQ ID NO: 50352 - DNA, 25 bp, Saccharomyces pastorianus
gtagacctatctgactttgaaaatc

SEQ ID NO: 50353 - DNA, 25 bp, Saccharomyces pastorianus
cgctaaactttacaacgcccatgta

SEQ ID NO: 50354 - DNA, 25 bp, Saccharomyces pastorianus
tggtgtaaacgactcctacctctac

SEQ ID NO: 50355 - DNA, 25 bp, Saccharomyces pastorianus
atagttcatcatgcaggcgagttta

SEQ ID NO: 50356 - DNA, 25 bp, Saccharomyces pastorianus
tactccgggatccatatttcctgaa

SEQ ID NO: 50357 - DNA, 25 bp, Saccharomyces pastorianus
ggaacgtggccaagctaccgaacat

SEQ ID NO: 50358 - DNA, 25 bp, Saccharomyces pastorianus
ataaactacatccattttggcgccc

SEQ ID NO: 50359 - DNA, 25 bp, Saccharomyces pastorianus
ggaccggaaagcaacaggatcctat

SEQ ID NO: 50360 - DNA, 25 bp, Saccharomyces pastorianus
gttgctttctcgtctatatttagga

SEQ ID NO: 50361 - DNA, 25 bp, Saccharomyces pastorianus
ctttacgattgtacttttagagcat

SEQ ID NO: 50362 - DNA, 25 bp, Saccharomyces pastorianus
gagcatccactaggaccggaaagca

SEQ ID NO: 50363 - DNA, 25 bp, Saccharomyces pastorianus
gctttctcgtctatatttaggaact

SEQ ID NO: 50364 - DNA, 25 bp, Saccharomyces pastorianus
gatcctatgtttggcatcaggcaaa

SEQ ID NO: 50365 - DNA, 25 bp, Saccharomyces pastorianus
acttttgagagttcctttacgattg

SEQ ID NO: 50366 - DNA, 25 bp, Saccharomyces pastorianus
atgttgctttctcgtctatatttag

SEQ ID NO: 50367 - DNA, 25 bp, Saccharomyces pastorianus
aacaggatcctatgtttggcatcag

SEQ ID NO: 50368 - DNA, 25 bp, Saccharomyces pastorianus
gagagttcctttacgattgtacttt

SEQ ID NO: 50369 - DNA, 25 bp, Saccharomyces pastorianus
tttagagcatccactaggaccggaa

SEQ ID NO: 50370 - DNA, 25 bp, Saccharomyces pastorianus
aatacagtgcattcattcagagata

SEQ ID NO: 50371 - DNA, 25 bp, Saccharomyces pastorianus
ggaggagttccaagatacaatgcaa

SEQ ID NO: 50372 - DNA, 25 bp, Saccharomyces pastorianus
acgcacctttgatcaggaagtcaca

SEQ ID NO: 50373 - DNA, 25 bp, Saccharomyces pastorianus
gagatatagcgctacagcttggcta

SEQ ID NO: 50374 - DNA, 25 bp, Saccharomyces pastorianus
gacgtgtcgtttaatgatgatccta

SEQ ID NO: 50375 - DNA, 25 bp, Saccharomyces pastorianus
aattcattcagggtccaagccaagg

SEQ ID NO: 50376 - DNA, 25 bp, Saccharomyces pastorianus
gcggacctattgagtctctatctgt

SEQ ID NO: 50377 - DNA, 25 bp, Saccharomyces pastorianus
agcttggctattacgcacctttgat

SEQ ID NO: 50378 - DNA, 25 bp, Saccharomyces pastorianus
agacgggctagaaccattgatggat

SEQ ID NO: 50379 - DNA, 25 bp, Saccharomyces pastorianus
aaaaatcttccgactgactctgtgg

SEQ ID NO: 50380 - DNA, 25 bp, Saccharomyces pastorianus
taattgatcgcataggcggacctat

SEQ ID NO: 50381 - DNA, 25 bp, Saccharomyces pastorianus
gatacggtggccattccatgtccga

SEQ ID NO: 50382 - DNA, 25 bp, Saccharomyces pastorianus
gctgctcctccagaagctaaactat

SEQ ID NO: 50383 - DNA, 25 bp, Saccharomyces pastorianus
tgtttatccggtaagggtcctcttg

SEQ ID NO: 50384 - DNA, 25 bp, Saccharomyces pastorianus
ggtctcaagatgcatttggtcgatt

SEQ ID NO: 50385 - DNA, 25 bp, Saccharomyces pastorianus
cgtggtcaatacatcccaggtttga

SEQ ID NO: 50386 - DNA, 25 bp, Saccharomyces pastorianus
gtatgggtacttctgccgcaagatc

SEQ ID NO: 50387 - DNA, 25 bp, Saccharomyces pastorianus
gaccctggtaccacatacagaacta

SEQ ID NO: 50388 - DNA, 25 bp, Saccharomyces pastorianus
gtatggtgacggtgcctccaaccaa

SEQ ID NO: 50389 - DNA, 25 bp, Saccharomyces pastorianus
aaggccaagtctttgagtctttcaa

SEQ ID NO: 50390 - DNA, 25 bp, Saccharomyces pastorianus
gcaagatcatctgccatgaccgaat

SEQ ID NO: 50391 - DNA, 25 bp, Saccharomyces pastorianus
acttgcccgttgtgttttgttgtga

SEQ ID NO: 50392 - DNA, 25 bp, Saccharomyces pastorianus
tgactaaccaagttcaatccgaccc

SEQ ID NO: 50393 - DNA, 25 bp, Saccharomyces pastorianus
tgatcctgaatcatgcttagcaaac

SEQ ID NO: 50394 - DNA, 25 bp, Saccharomyces pastorianus
gaaagctacgaccttgatcctgaat

SEQ ID NO: 50395 - DNA, 25 bp, Saccharomyces pastorianus
aacgtcgcagtatttctgactaacc

SEQ ID NO: 50396 - DNA, 25 bp, Saccharomyces pastorianus
aaaaccgattggtgggcacgtcctg

SEQ ID NO: 50397 - DNA, 25 bp, Saccharomyces pastorianus
gatgtctcatactttatgcgttacg

SEQ ID NO: 50398 - DNA, 25 bp, Saccharomyces pastorianus
gtcgctaaattacaggattctccag

SEQ ID NO: 50399 - DNA, 25 bp, Saccharomyces pastorianus
aagagagtgtgtttacgtgatcggt

SEQ ID NO: 50400 - DNA, 25 bp, Saccharomyces pastorianus
atgcgttacgacacaacttccaagg

SEQ ID NO: 50401 - DNA, 25 bp, Saccharomyces pastorianus
ttatcgtttggtggttgtggactca

SEQ ID NO: 50402 - DNA, 25 bp, Saccharomyces pastorianus
tgcttctgccttatttgcatctgca

SEQ ID NO: 50403 - DNA, 25 bp, Saccharomyces pastorianus
taaagggaaggcaggtttggctaat

SEQ ID NO: 50404 - DNA, 25 bp, Saccharomyces pastorianus
ttggctaatgtatccttttcgttcc

SEQ ID NO: 50405 - DNA, 25 bp, Saccharomyces pastorianus
cgccctagtaccagctttttgtata

SEQ ID NO: 50406 - DNA, 25 bp, Saccharomyces pastorianus
tagtaccagctttttgtataaaggg

SEQ ID NO: 50407 - DNA, 25 bp, Saccharomyces pastorianus
aaaatagccgccctagtaccagctt

SEQ ID NO: 50408 - DNA, 25 bp, Saccharomyces pastorianus
taatgtatccttttcgttccttcac

SEQ ID NO: 50409 - DNA, 25 bp, Saccharomyces pastorianus
gtttggctaatgtatccttttcgtt

SEQ ID NO: 50410 - DNA, 25 bp, Saccharomyces pastorianus
tcaaaacaccgaaaatagccgccct

SEQ ID NO: 50411 - DNA, 25 bp, Saccharomyces pastorianus
ggctaatgtatccttttcgttcctt

SEQ ID NO: 50412 - DNA, 25 bp, Saccharomyces pastorianus
ggcaggtttggctaatgtatccttt

SEQ ID NO: 50413 - DNA, 25 bp, Saccharomyces pastorianus
tgtatccttttcgttccttcacttt

SEQ ID NO: 50414 - DNA, 25 bp, Saccharomyces pastorianus
gacggcgttcatcgtaggactttta

SEQ ID NO: 50415 - DNA, 25 bp, Saccharomyces pastorianus
ggagctcttgtatacgacctgttca

SEQ ID NO: 50416 - DNA, 25 bp, Saccharomyces pastorianus
ggagcaatggcgtacggctattttt

SEQ ID NO: 50417 - DNA, 25 bp, Saccharomyces pastorianus
gtcctcgtatattcgcttctatgat

SEQ ID NO: 50418 - DNA, 25 bp, Saccharomyces pastorianus
atgtgaatcacctatcaactacccg

SEQ ID NO: 50419 - DNA, 25 bp, Saccharomyces pastorianus
agtagacaaacttctccacgctgag

SEQ ID NO: 50420 - DNA, 25 bp, Saccharomyces pastorianus
acggcaactggtgcatgtctcttca

SEQ ID NO: 50421 - DNA, 25 bp, Saccharomyces pastorianus
attggttatggtcctcatgcctttc

SEQ ID NO: 50422 - DNA, 25 bp, Saccharomyces pastorianus
aatgctccaccagctaacggtatga

SEQ ID NO: 50423 - DNA, 25 bp, Saccharomyces pastorianus
gcctttcatcttacgcattggtggt

SEQ ID NO: 50424 - DNA, 25 bp, Saccharomyces pastorianus
tacgacctgttcattttcactggat

SEQ ID NO: 50425 - DNA, 25 bp, Saccharomyces pastorianus
ggcacttctggaggtctgtactcaa

SEQ ID NO: 50426 - DNA, 25 bp, Saccharomyces pastorianus
ggaaagggccctagagcagctgctc

SEQ ID NO: 50427 - DNA, 25 bp, Saccharomyces pastorianus
gaacaactcttgtttctggtggtaa

SEQ ID NO: 50428 - DNA, 25 bp, Saccharomyces pastorianus
gcgtgacggcagactatgatacttt

SEQ ID NO: 50429 - DNA, 25 bp, Saccharomyces pastorianus
gattgatgctcttcaaccttttgtt

SEQ ID NO: 50430 - DNA, 25 bp, Saccharomyces pastorianus
aaggcgttgaccgaagctattgaaa

SEQ ID NO: 50431 - DNA, 25 bp, Saccharomyces pastorianus
gtataagtacaccagagcacgtcct

SEQ ID NO: 50432 - DNA, 25 bp, Saccharomyces pastorianus
ggaagcctcccaatttgctttagaa

SEQ ID NO: 50433 - DNA, 25 bp, Saccharomyces pastorianus
gaaaatcattcgttgcgtctcgatg

SEQ ID NO: 50434 - DNA, 25 bp, Saccharomyces pastorianus
aatctacctttcagctcttgcaaaa

SEQ ID NO: 50435 - DNA, 25 bp, Saccharomyces pastorianus
gcgtgcctcatacgtggctaaggaa

SEQ ID NO: 50436 - DNA, 25 bp, Saccharomyces pastorianus
tagacgcgataaccacccattttta

SEQ ID NO: 50437 - DNA, 25 bp, Saccharomyces pastorianus
tataatgtctcaatcgaagctggga

SEQ ID NO: 50438 - DNA, 25 bp, Saccharomyces pastorianus
gaattaccggatccattgattccta

SEQ ID NO: 50439 - DNA, 25 bp, Saccharomyces pastorianus
gcactgttgccagcgttgtcaaaat

SEQ ID NO: 50440 - DNA, 25 bp, Saccharomyces pastorianus
acttccatttggaccgattcagtga

SEQ ID NO: 50441 - DNA, 25 bp, Saccharomyces pastorianus
atatatcctgatttgcctaacgaca

SEQ ID NO: 50442 - DNA, 25 bp, Saccharomyces pastorianus
atcggacattcttcgggtactatac

SEQ ID NO: 50443 - DNA, 25 bp, Saccharomyces pastorianus
gaagctgggaccaagcactgttgcc

SEQ ID NO: 50444 - DNA, 25 bp, Saccharomyces pastorianus
agtctgacacatcaacttcgaaatt

SEQ ID NO: 50445 - DNA, 25 bp, Saccharomyces pastorianus
gattcagattcctcttctaaggacc

SEQ ID NO: 50446 - DNA, 25 bp, Saccharomyces pastorianus
tcttccttaagcaaaccccatatag

SEQ ID NO: 50447 - DNA, 25 bp, Saccharomyces pastorianus
acaattacatcctggtcctgttcaa

SEQ ID NO: 50448 - DNA, 25 bp, Saccharomyces pastorianus
aaggaggtccttagcaacccagtca

SEQ ID NO: 50449 - DNA, 25 bp, Saccharomyces pastorianus
agagaacgttctatcagtccatcct

SEQ ID NO: 50450 - DNA, 25 bp, Saccharomyces pastorianus
acggtattcattacgactccttgac

SEQ ID NO: 50451 - DNA, 25 bp, Saccharomyces pastorianus
attcagcgacgccattttggacaaa

SEQ ID NO: 50452 - DNA, 25 bp, Saccharomyces pastorianus
gataacgtccgtgccctaagagaga

SEQ ID NO: 50453 - DNA, 25 bp, Saccharomyces pastorianus
atgctatcgcctactgtatcttcaa

SEQ ID NO: 50454 - DNA, 25 bp, Saccharomyces pastorianus
tttgcaactagcctctaacctgaag

SEQ ID NO: 50455 - DNA, 25 bp, Saccharomyces pastorianus
ctgccagatgaccttcgtgggcgaa

SEQ ID NO: 50456 - DNA, 25 bp, Saccharomyces pastorianus
actcgcagtggccatttacgtggtg

SEQ ID NO: 50457 - DNA, 25 bp, Saccharomyces pastorianus
gatcggcatcatatctgacacactc

SEQ ID NO: 50458 - DNA, 25 bp, Saccharomyces pastorianus
gcagcaggtcattcaaacgattggt

SEQ ID NO: 50459 - DNA, 25 bp, Saccharomyces pastorianus
atttgtcaagctgctggtattcccg

SEQ ID NO: 50460 - DNA, 25 bp, Saccharomyces pastorianus
gaaaactacctcgatatttgtcaag

SEQ ID NO: 50461 - DNA, 25 bp, Saccharomyces pastorianus
aaatcccctggctttcatattgatg

SEQ ID NO: 50462 - DNA, 25 bp, Saccharomyces pastorianus
gtggcatttattgtttcctttatta

SEQ ID NO: 50463 - DNA, 25 bp, Saccharomyces pastorianus
gaggcccctacaatacttcaggaaa

SEQ ID NO: 50464 - DNA, 25 bp, Saccharomyces pastorianus
gggctgtactctattgctcaatatg

SEQ ID NO: 50465 - DNA, 25 bp, Saccharomyces pastorianus
cattacctaagggatttaccgcaga

SEQ ID NO: 50466 - DNA, 25 bp, Saccharomyces pastorianus
gtttggtatttccattgccacgtag

SEQ ID NO: 50467 - DNA, 25 bp, Saccharomyces pastorianus
ggtattcccgttgctggtaatgcag

SEQ ID NO: 50468 - DNA, 25 bp, Saccharomyces pastorianus
gcatcaatcttcattgaggccccta

SEQ ID NO: 50469 - DNA, 25 bp, Saccharomyces pastorianus
ggcatcacaccttttacaacgagtt

SEQ ID NO: 50470 - DNA, 25 bp, Saccharomyces pastorianus
tggcatcacaccttttacaacgagt

SEQ ID NO: 50471 - DNA, 25 bp, Saccharomyces pastorianus
tggtatcgtgaccaactgggacgat

SEQ ID NO: 50472 - DNA, 25 bp, Saccharomyces pastorianus
ttacccaattgaacatggtatcgtg

SEQ ID NO: 50473 - DNA, 25 bp, Saccharomyces pastorianus
aacatggtatcgtgaccaactggga

SEQ ID NO: 50474 - DNA, 25 bp, Saccharomyces pastorianus
tcacaccttttacaacgagttgaga

SEQ ID NO: 50475 - DNA, 25 bp, Saccharomyces pastorianus
catggtatcgtgaccaactgggacg

SEQ ID NO: 50476 - DNA, 25 bp, Saccharomyces pastorianus
ttacaacgagttgagagttgcacca

SEQ ID NO: 50477 - DNA, 25 bp, Saccharomyces pastorianus
ttgaacatggtatcgtgaccaactg

SEQ ID NO: 50478 - DNA, 25 bp, Saccharomyces pastorianus
ctggcatcacaccttttacaacgag

SEQ ID NO: 50479 - DNA, 25 bp, Saccharomyces pastorianus
gcatcacaccttttacaacgagttg

SEQ ID NO: 50480 - DNA, 25 bp, Saccharomyces pastorianus
gtcgtcccaatctacgccggtttct

SEQ ID NO: 50481 - DNA, 25 bp, Saccharomyces pastorianus
ctcttctggtagaaccaccggtatt

SEQ ID NO: 50482 - DNA, 25 bp, Saccharomyces pastorianus
tctggtagaaccaccggtattgttt

SEQ ID NO: 50483 - DNA, 25 bp, Saccharomyces pastorianus
tgtactcttctggtagaaccaccgg

SEQ ID NO: 50484 - DNA, 25 bp, Saccharomyces pastorianus
actcttctggtagaaccaccggtat

SEQ ID NO: 50485 - DNA, 25 bp, Saccharomyces pastorianus
cttctggtagaaccaccggtattgt

SEQ ID NO: 50486 - DNA, 25 bp, Saccharomyces pastorianus
tcttctggtagaaccaccggtattg

SEQ ID NO: 50487 - DNA, 25 bp, Saccharomyces pastorianus
ttgtactcttctggtagaaccaccg

SEQ ID NO: 50488 - DNA, 25 bp, Saccharomyces pastorianus
gtactcttctggtagaaccaccggt

SEQ ID NO: 50489 - DNA, 25 bp, Saccharomyces pastorianus
tactcttctggtagaaccaccggta

SEQ ID NO: 50490 - DNA, 25 bp, Saccharomyces pastorianus
cgctcaatcctcttccattgaaaaa

SEQ ID NO: 50491 - DNA, 25 bp, Saccharomyces pastorianus
tgagaatcgatttggccggtagaga

SEQ ID NO: 50492 - DNA, 25 bp, Saccharomyces pastorianus
gaagatcttgagtgaacgtggttac

SEQ ID NO: 50493 - DNA, 25 bp, Saccharomyces pastorianus
gactacttgatgaagatcttgagtg

SEQ ID NO: 50494 - DNA, 25 bp, Saccharomyces pastorianus
caagccgttttgtccttgtactctt

SEQ ID NO: 50495 - DNA, 25 bp, Saccharomyces pastorianus
gacttcgaacaagaaatgcaaaccg

SEQ ID NO: 50496 - DNA, 25 bp, Saccharomyces pastorianus
ccatccaagccgttttgtccttgta

SEQ ID NO: 50497 - DNA, 25 bp, Saccharomyces pastorianus
gtggttactctttctccaccactgc

SEQ ID NO: 50498 - DNA, 25 bp, Saccharomyces pastorianus
tcgatttggccggtagagatttgac

SEQ ID NO: 50499 - DNA, 25 bp, Saccharomyces pastorianus
gtccgtgacatcaaggaaaaactat

SEQ ID NO: 50500 - DNA, 25 bp, Saccharomyces pastorianus
agtgaacgtggttactctttctcca

SEQ ID NO: 50501 - DNA, 25 bp, Saccharomyces pastorianus
tcaaggaaaaactatgttacgtcgc

SEQ ID NO: 50502 - DNA, 25 bp, Saccharomyces pastorianus
gtactctgtctggatcggtggttcc

SEQ ID NO: 50503 - DNA, 25 bp, Saccharomyces pastorianus
gagaaagtactctgtctggatcggt

SEQ ID NO: 50504 - DNA, 25 bp, Saccharomyces pastorianus
gaatccgctggtattgaccaaacca

SEQ ID NO: 50505 - DNA, 25 bp, Saccharomyces pastorianus
tgtctggatcggtggttccatcttg

SEQ ID NO: 50506 - DNA, 25 bp, Saccharomyces pastorianus
cgctggtattgaccaaaccacttac

SEQ ID NO: 50507 - DNA, 25 bp, Saccharomyces pastorianus
gtcttgggtttggaatccgctggta

SEQ ID NO: 50508 - DNA, 25 bp, Saccharomyces pastorianus
tccgctggtattgaccaaaccactt

SEQ ID NO: 50509 - DNA, 25 bp, Saccharomyces pastorianus
ttccgtcttgggtttggaatccgct

SEQ ID NO: 50510 - DNA, 25 bp, Saccharomyces pastorianus
cttgggtttggaatccgctggtatt

SEQ ID NO: 50511 - DNA, 25 bp, Saccharomyces pastorianus
actctgtctggatcggtggttccat

SEQ ID NO: 50512 - DNA, 25 bp, Saccharomyces pastorianus
ccgtcttgggtttggaatccgctgg

SEQ ID NO: 50513 - DNA, 25 bp, Saccharomyces pastorianus
gtcgatgtccgtaaggaattatacg

SEQ ID NO: 50514 - DNA, 25 bp, Saccharomyces pastorianus
atgtccggtggtaccaccatgttcc

SEQ ID NO: 50515 - DNA, 25 bp, Saccharomyces pastorianus
ttcccaggtattgccgaaagaatgc

SEQ ID NO: 50516 - DNA, 25 bp, Saccharomyces pastorianus
gtaacgaaagattcagagccccaga

SEQ ID NO: 50517 - DNA, 25 bp, Saccharomyces pastorianus
gctccatcttccatgaaggtcaaga

SEQ ID NO: 50518 - DNA, 25 bp, Saccharomyces pastorianus
tttggctccatcttccatgaaggtc

SEQ ID NO: 50519 - DNA, 25 bp, Saccharomyces pastorianus
aaggtcaagatcattgctcctccag

SEQ ID NO: 50520 - DNA, 25 bp, Saccharomyces pastorianus
ccatgttcccaggtattgccgaaag

SEQ ID NO: 50521 - DNA, 25 bp, Saccharomyces pastorianus
aggaaatcaccgctttggctccatc

SEQ ID NO: 50522 - DNA, 25 bp, Saccharomyces pastorianus
agagccccagaagctttgttccatc

SEQ ID NO: 50523 - DNA, 25 bp, Saccharomyces pastorianus
gattcagagccccagaagctttgtt

SEQ ID NO: 50524 - DNA, 25 bp, Saccharomyces pastorianus
tacgattatctgttcaagctactgt

SEQ ID NO: 50525 - DNA, 25 bp, Saccharomyces pastorianus
gtcctgtctgcttttgaggttttca

SEQ ID NO: 50526 - DNA, 25 bp, Saccharomyces pastorianus
atgccgttcttggagaccagtgctc

SEQ ID NO: 50527 - DNA, 25 bp, Saccharomyces pastorianus
ggcaataagtgcgacctcaaagaca

SEQ ID NO: 50528 - DNA, 25 bp, Saccharomyces pastorianus
ggcaagaccgtcaagctgcagatct

SEQ ID NO: 50529 - DNA, 25 bp, Saccharomyces pastorianus
aagctgcagatctgggacaccgcgg

SEQ ID NO: 50530 - DNA, 25 bp, Saccharomyces pastorianus
aagctactgttgatcgggaactccg

SEQ ID NO: 50531 - DNA, 25 bp, Saccharomyces pastorianus
gttacaagaaatcgaccgctacgcg

SEQ ID NO: 50532 - DNA, 25 bp, Saccharomyces pastorianus
ggttttcagacgacacgtacaccaa

SEQ ID NO: 50533 - DNA, 25 bp, Saccharomyces pastorianus
ggttcgcacgggatcatcatagtgt

SEQ ID NO: 50534 - DNA, 25 bp, Saccharomyces pastorianus
tggccaaggagttcgcggacgcaaa

SEQ ID NO: 50535 - DNA, 25 bp, Saccharomyces pastorianus
gccggtcctcacacagattatttat

SEQ ID NO: 50536 - DNA, 25 bp, Saccharomyces pastorianus
aagaacctctttcctaccaagaatg

SEQ ID NO: 50537 - DNA, 25 bp, Saccharomyces pastorianus
tatccaacaatgaatgccggtcctc

SEQ ID NO: 50538 - DNA, 25 bp, Saccharomyces pastorianus
tagaagcccattggaactcgttttt

SEQ ID NO: 50539 - DNA, 25 bp, Saccharomyces pastorianus
atacgtaacgccagatgcatatcca

SEQ ID NO: 50540 - DNA, 25 bp, Saccharomyces pastorianus
tctcactaccggctagtcaatacat

SEQ ID NO: 50541 - DNA, 25 bp, Saccharomyces pastorianus
attgtacacctatcgctagaagccc

SEQ ID NO: 50542 - DNA, 25 bp, Saccharomyces pastorianus
gagaggccggaatcacaacaagtaa

SEQ ID NO: 50543 - DNA, 25 bp, Saccharomyces pastorianus
tgactccacttttaccgttaatcga

SEQ ID NO: 50544 - DNA, 25 bp, Saccharomyces pastorianus
cgttcccgcaacaattttctagaga

SEQ ID NO: 50545 - DNA, 25 bp, Saccharomyces pastorianus
aatagacaagtctcactaccggcta

SEQ ID NO: 50546 - DNA, 25 bp, Saccharomyces pastorianus
ctgcatctgcagtacctcgagaaga

SEQ ID NO: 50547 - DNA, 25 bp, Saccharomyces pastorianus
ttcgccattgaactgcacgctcgag

SEQ ID NO: 50548 - DNA, 25 bp, Saccharomyces pastorianus
ggagaacatacaagaacccgccaca

SEQ ID NO: 50549 - DNA, 25 bp, Saccharomyces pastorianus
gaatagtctgccctttgacaattca

SEQ ID NO: 50550 - DNA, 25 bp, Saccharomyces pastorianus
agagcttgctgagtaacgtcgacct

SEQ ID NO: 50551 - DNA, 25 bp, Saccharomyces pastorianus
gagaagaagtgctccctcctggaga

SEQ ID NO: 50552 - DNA, 25 bp, Saccharomyces pastorianus
gagtacagggacttccagtgctcgc

SEQ ID NO: 50553 - DNA, 25 bp, Saccharomyces pastorianus
acgtcgacctcgagaaactggccga

SEQ ID NO: 50554 - DNA, 25 bp, Saccharomyces pastorianus
gaaactggccgagcgcaaagacgtg

SEQ ID NO: 50555 - DNA, 25 bp, Saccharomyces pastorianus
gcaaagacgtgttggcctgcagccg

SEQ ID NO: 50556 - DNA, 25 bp, Saccharomyces pastorianus
gataacaacctgtttcacacggcgg

SEQ ID NO: 50557 - DNA, 25 bp, Saccharomyces pastorianus
ggtgtcacaagaccgatgtccctga

SEQ ID NO: 50558 - DNA, 25 bp, Saccharomyces pastorianus
ggaagaactcgctcaacatcatcac

SEQ ID NO: 50559 - DNA, 25 bp, Saccharomyces pastorianus
aagaaaaactacaccgccagcgtgg

SEQ ID NO: 50560 - DNA, 25 bp, Saccharomyces pastorianus
tcaagaagagacaacgctcctccgc

SEQ ID NO: 50561 - DNA, 25 bp, Saccharomyces pastorianus
tggcctgttcctcaagctgcacggt

SEQ ID NO: 50562 - DNA, 25 bp, Saccharomyces pastorianus
agccgcaggagcagcatcatcgaaa

SEQ ID NO: 50563 - DNA, 25 bp, Saccharomyces pastorianus
agcttccagcccgacatgaacatga

SEQ ID NO: 50564 - DNA, 25 bp, Saccharomyces pastorianus
cgtggccgcgtctaagaggaagaac

SEQ ID NO: 50565 - DNA, 25 bp, Saccharomyces pastorianus
acaataacagccaccacttttcgag

SEQ ID NO: 50566 - DNA, 25 bp, Saccharomyces pastorianus
atgaacatgaacctccacaacacat

SEQ ID NO: 50567 - DNA, 25 bp, Saccharomyces pastorianus
acaacatctccgttcgaacaacaat

SEQ ID NO: 50568 - DNA, 25 bp, Saccharomyces pastorianus
caccgtggcggaactgttgtacttt

SEQ ID NO: 50569 - DNA, 25 bp, Saccharomyces pastorianus
gcattgacgtttttcacctctgtag

SEQ ID NO: 50570 - DNA, 25 bp, Saccharomyces pastorianus
gatatcagcttgtccaccttgttca

SEQ ID NO: 50571 - DNA, 25 bp, Saccharomyces pastorianus
tcttgatgcgttggtcggacccaaa

SEQ ID NO: 50572 - DNA, 25 bp, Saccharomyces pastorianus
caatggcgttaggttcaggtcgttt

SEQ ID NO: 50573 - DNA, 25 bp, Saccharomyces pastorianus
acgtgcttgtgcagatccagcgata

SEQ ID NO: 50574 - DNA, 25 bp, Saccharomyces pastorianus
ttgtcaataacaactgcgccggcgg

SEQ ID NO: 50575 - DNA, 25 bp, Saccharomyces pastorianus
tactcgtgtcctgtacgtcttaaaa

SEQ ID NO: 50576 - DNA, 25 bp, Saccharomyces pastorianus
tgaacttgccgggagatgcatcgcc

SEQ ID NO: 50577 - DNA, 25 bp, Saccharomyces pastorianus
cttccttttccatcttgttcatgaa

SEQ ID NO: 50578 - DNA, 25 bp, Saccharomyces pastorianus
ttcttcttctatttctgctgctgct

SEQ ID NO: 50579 - DNA, 25 bp, Saccharomyces pastorianus
aaagtacaacagttccgccacggtg

SEQ ID NO: 50580 - DNA, 25 bp, Saccharomyces pastorianus
agctgatatcgctggatctgcacaa

SEQ ID NO: 50581 - DNA, 25 bp, Saccharomyces pastorianus
gacctgaacctaacgccattgaaaa

SEQ ID NO: 50582 - DNA, 25 bp, Saccharomyces pastorianus
gagaccaggtcgctgttgacgccca

SEQ ID NO: 50583 - DNA, 25 bp, Saccharomyces pastorianus
ccgccggcgcagttgttattgacaa

SEQ ID NO: 50584 - DNA, 25 bp, Saccharomyces pastorianus
gagtttgaggacatccctgtagcct

SEQ ID NO: 50585 - DNA, 25 bp, Saccharomyces pastorianus
aagtcgcaagtacccaacaggctga

SEQ ID NO: 50586 - DNA, 25 bp, Saccharomyces pastorianus
aaaggtgcttctgcagaggatcgaa

SEQ ID NO: 50587 - DNA, 25 bp, Saccharomyces pastorianus
gactacatgaagaacctcggcgcat

SEQ ID NO: 50588 - DNA, 25 bp, Saccharomyces pastorianus
gaatcctcttcacccatggtgttga

SEQ ID NO: 50589 - DNA, 25 bp, Saccharomyces pastorianus
aaagacgcgatatcgggctggtcaa

SEQ ID NO: 50590 - DNA, 25 bp, Saccharomyces pastorianus
aaagaccctacgatgaaagatttca

SEQ ID NO: 50591 - DNA, 25 bp, Saccharomyces pastorianus
cagcattgacttgcattttctgccc

SEQ ID NO: 50592 - DNA, 25 bp, Saccharomyces pastorianus
gaaaacagctttatgtccaatgcaa

SEQ ID NO: 50593 - DNA, 25 bp, Saccharomyces pastorianus
aaaaagaaccattgcgccttgctca

SEQ ID NO: 50594 - DNA, 25 bp, Saccharomyces pastorianus
aagctggaatacgacgggccgctga

SEQ ID NO: 50595 - DNA, 25 bp, Saccharomyces pastorianus
gaactgatatcacacgttgtcatcg

SEQ ID NO: 50596 - DNA, 25 bp, Saccharomyces pastorianus
aactcgctgcgtatcgaaagaccct

SEQ ID NO: 50597 - DNA, 25 bp, Saccharomyces pastorianus
gcgccttgctcatctgatatttacg

SEQ ID NO: 50598 - DNA, 25 bp, Saccharomyces pastorianus
ggttcgaaagacatttgcctaagga

SEQ ID NO: 50599 - DNA, 25 bp, Saccharomyces pastorianus
gaaagtagaagtcctttcccatgaa

SEQ ID NO: 50600 - DNA, 25 bp, Saccharomyces pastorianus
acgggccgctgaacctacagtaaag

SEQ ID NO: 50601 - DNA, 25 bp, Saccharomyces pastorianus
gggactaactctagaagaagtcaac

SEQ ID NO: 50602 - DNA, 25 bp, Saccharomyces pastorianus
aagtctggcgactgggtaccaagcg

SEQ ID NO: 50603 - DNA, 25 bp, Saccharomyces pastorianus
tggaagtctggcgactgggtaccaa

SEQ ID NO: 50604 - DNA, 25 bp, Saccharomyces pastorianus
atgaagagaggataaagccatggaa

SEQ ID NO: 50605 - DNA, 25 bp, Saccharomyces pastorianus
agcgctaagaggttagaacaactaa

SEQ ID NO: 50606 - DNA, 25 bp, Saccharomyces pastorianus
tttgtgagacaaagggactaactct

SEQ ID NO: 50607 - DNA, 25 bp, Saccharomyces pastorianus
actgggtaccaagcgctaagaggtt

SEQ ID NO: 50608 - DNA, 25 bp, Saccharomyces pastorianus
ccatggaagtctggcgactgggtac

SEQ ID NO: 50609 - DNA, 25 bp, Saccharomyces pastorianus
gagacaaagggactaactctagaag

SEQ ID NO: 50610 - DNA, 25 bp, Saccharomyces pastorianus
gtaccaagcgctaagaggttagaac

SEQ ID NO: 50611 - DNA, 25 bp, Saccharomyces pastorianus
ctggcgactgggtaccaagcgctaa

SEQ ID NO: 50612 - DNA, 25 bp, Saccharomyces pastorianus
atatcgtctggtttctgtgaactaa

SEQ ID NO: 50613 - DNA, 25 bp, Saccharomyces pastorianus
gacctatttatgtgatgtcgtcaaa

SEQ ID NO: 50614 - DNA, 25 bp, Saccharomyces pastorianus
cacgttggcatggtggttacctgcg

SEQ ID NO: 50615 - DNA, 25 bp, Saccharomyces pastorianus
gatccaagacgtttttcaaccattt

SEQ ID NO: 50616 - DNA, 25 bp, Saccharomyces pastorianus
tcagccgttgatttagagaagcgtg

SEQ ID NO: 50617 - DNA, 25 bp, Saccharomyces pastorianus
gataacatgtttgatcctgaatctg

SEQ ID NO: 50618 - DNA, 25 bp, Saccharomyces pastorianus
gcaatgtgtcattcttttctttaat

SEQ ID NO: 50619 - DNA, 25 bp, Saccharomyces pastorianus
taatcatccttttaatatcgtctgg

SEQ ID NO: 50620 - DNA, 25 bp, Saccharomyces pastorianus
aaggcttcaatgattatgtccgttg

SEQ ID NO: 50621 - DNA, 25 bp, Saccharomyces pastorianus
cagccacacaccaaacttctaaaat

SEQ ID NO: 50622 - DNA, 25 bp, Saccharomyces pastorianus
agagcactggccatttagtgacgaa

SEQ ID NO: 50623 - DNA, 25 bp, Saccharomyces pastorianus
agacgtattatctggtagcctgaac

SEQ ID NO: 50624 - DNA, 25 bp, Saccharomyces pastorianus
atggaaacagttccctcggaggaca

SEQ ID NO: 50625 - DNA, 25 bp, Saccharomyces pastorianus
aacaaacttgtgctgcagttgagga

SEQ ID NO: 50626 - DNA, 25 bp, Saccharomyces pastorianus
aagcttcgggaaactctagaggcat

SEQ ID NO: 50627 - DNA, 25 bp, Saccharomyces pastorianus
tagaggcatccaaacagaccacctt

SEQ ID NO: 50628 - DNA, 25 bp, Saccharomyces pastorianus
gctttgtcagtacagcagcagcagc

SEQ ID NO: 50629 - DNA, 25 bp, Saccharomyces pastorianus
ttaaagcatgtcgttgcgcaattaa

SEQ ID NO: 50630 - DNA, 25 bp, Saccharomyces pastorianus
gggagaacaccttaatgtatcacga

SEQ ID NO: 50631 - DNA, 25 bp, Saccharomyces pastorianus
tcggaacaatctcatgacacaacag

SEQ ID NO: 50632 - DNA, 25 bp, Saccharomyces pastorianus
acaagtatatatgtcccctcaagca

SEQ ID NO: 50633 - DNA, 25 bp, Saccharomyces pastorianus
acagaccacctttgaatccatggat

SEQ ID NO: 50634 - DNA, 25 bp, Saccharomyces pastorianus
tcttggctgagcttgagtatgcttt

SEQ ID NO: 50635 - DNA, 25 bp, Saccharomyces pastorianus
ttctcttggctgagcttgagtatgc

SEQ ID NO: 50636 - DNA, 25 bp, Saccharomyces pastorianus
cttttctcttggctgagcttgagta

SEQ ID NO: 50637 - DNA, 25 bp, Saccharomyces pastorianus
atgcttttctttattcaacccataa

SEQ ID NO: 50638 - DNA, 25 bp, Saccharomyces pastorianus
agtatgcttttctttattcaaccca

SEQ ID NO: 50639 - DNA, 25 bp, Saccharomyces pastorianus
ggctgagcttgagtatgcttttctt

SEQ ID NO: 50640 - DNA, 25 bp, Saccharomyces pastorianus
tttgaattcctccatctcctcataa

SEQ ID NO: 50641 - DNA, 25 bp, Saccharomyces pastorianus
gagcttgagtatgcttttctttatt

SEQ ID NO: 50642 - DNA, 25 bp, Saccharomyces pastorianus
tttcttttctcttggctgagcttga

SEQ ID NO: 50643 - DNA, 25 bp, Saccharomyces pastorianus
ccatctcctcataacagttcaacga

SEQ ID NO: 50644 - DNA, 25 bp, Saccharomyces pastorianus
attcctccatctcctcataacagtt

SEQ ID NO: 50645 - DNA, 25 bp, Saccharomyces pastorianus
aacgcaactacgatccgccgtggtt

SEQ ID NO: 50646 - DNA, 25 bp, Saccharomyces pastorianus
atccgctagatttccagcaccaaga

SEQ ID NO: 50647 - DNA, 25 bp, Saccharomyces pastorianus
taactataactctcattccattccg

SEQ ID NO: 50648 - DNA, 25 bp, Saccharomyces pastorianus
tttatcacaattttacttccccatc

SEQ ID NO: 50649 - DNA, 25 bp, Saccharomyces pastorianus
agcccgcctcttcaagatatattca

SEQ ID NO: 50650 - DNA, 25 bp, Saccharomyces pastorianus
gaatttcgagccattcgcaacgcaa

SEQ ID NO: 50651 - DNA, 25 bp, Saccharomyces pastorianus
catcgtatccgcagcaggtgggaga

SEQ ID NO: 50652 - DNA, 25 bp, Saccharomyces pastorianus
gttgttcggtgctcaggttgcctca

SEQ ID NO: 50653 - DNA, 25 bp, Saccharomyces pastorianus
gtgcctaagaaatacaagcctgcct

SEQ ID NO: 50654 - DNA, 25 bp, Saccharomyces pastorianus
gagagattaccaagtcacagcgcct

SEQ ID NO: 50655 - DNA, 25 bp, Saccharomyces pastorianus
gcctgcctacagacaacggatgcgt

SEQ ID NO: 50656 - DNA, 25 bp, Saccharomyces pastorianus
gtacaagcgcaagccgtcatcaaga

SEQ ID NO: 50657 - DNA, 25 bp, Saccharomyces pastorianus
gagactgacgagttcctggagcaat

SEQ ID NO: 50658 - DNA, 25 bp, Saccharomyces pastorianus
agaagccgctcttgaaactagggaa

SEQ ID NO: 50659 - DNA, 25 bp, Saccharomyces pastorianus
aacgccctgctccaatcattagaag

SEQ ID NO: 50660 - DNA, 25 bp, Saccharomyces pastorianus
tagggaagcctcgttcaatggtgaa

SEQ ID NO: 50661 - DNA, 25 bp, Saccharomyces pastorianus
gtaagggcagaagccttccaggtgt

SEQ ID NO: 50662 - DNA, 25 bp, Saccharomyces pastorianus
gatcgacacgttagcgaagccacct

SEQ ID NO: 50663 - DNA, 25 bp, Saccharomyces pastorianus
gaacaaaccgtctaagcactatcct

SEQ ID NO: 50664 - DNA, 25 bp, Saccharomyces pastorianus
gggcgcaacgacctcatagggaact

SEQ ID NO: 50665 - DNA, 25 bp, Saccharomyces pastorianus
gacaagtgagatccgcaagctgaac

SEQ ID NO: 50666 - DNA, 25 bp, Saccharomyces pastorianus
gagccaaccgcggatgacatcttca

SEQ ID NO: 50667 - DNA, 25 bp, Saccharomyces pastorianus
atgtcgaggataacaggctttcgga

SEQ ID NO: 50668 - DNA, 25 bp, Saccharomyces pastorianus
gtggaagctgacgaaactgtgaaag

SEQ ID NO: 50669 - DNA, 25 bp, Saccharomyces pastorianus
gtgtcgaggctgttaaaattggtgt

SEQ ID NO: 50670 - DNA, 25 bp, Saccharomyces pastorianus
tgaaatcagaagacaccaaagtgga

SEQ ID NO: 50671 - DNA, 25 bp, Saccharomyces pastorianus
gacgctaccgaagcagccaagactt

SEQ ID NO: 50672 - DNA, 25 bp, Saccharomyces pastorianus
cgacgctataaaagctaccgacgct

SEQ ID NO: 50673 - DNA, 25 bp, Saccharomyces pastorianus
taaagctaccgacgctaccgacgct

SEQ ID NO: 50674 - DNA, 25 bp, Saccharomyces pastorianus
ccgaagctgccggagctctgaaaga

SEQ ID NO: 50675 - DNA, 25 bp, Saccharomyces pastorianus
acgaaagtggaagacgccgaagctg

SEQ ID NO: 50676 - DNA, 25 bp, Saccharomyces pastorianus
ggaagatgccgaagctctggaagaa

SEQ ID NO: 50677 - DNA, 25 bp, Saccharomyces pastorianus
agataccgaagcagccaaggctctg

SEQ ID NO: 50678 - DNA, 25 bp, Saccharomyces pastorianus
tatccacatcttctccaaaagctgt

SEQ ID NO: 50679 - DNA, 25 bp, Saccharomyces pastorianus
gacccgactggagcttcgagttatt

SEQ ID NO: 50680 - DNA, 25 bp, Saccharomyces pastorianus
agttcattcagctcttcagacactt

SEQ ID NO: 50681 - DNA, 25 bp, Saccharomyces pastorianus
gtcaaggcagatttgctgctccaac

SEQ ID NO: 50682 - DNA, 25 bp, Saccharomyces pastorianus
gattctcgctacacatttgacgatg

SEQ ID NO: 50683 - DNA, 25 bp, Saccharomyces pastorianus
gaaactcgagagtaacacccactgt

SEQ ID NO: 50684 - DNA, 25 bp, Saccharomyces pastorianus
aggagatcgggcaccgctcagtcga

SEQ ID NO: 50685 - DNA, 25 bp, Saccharomyces pastorianus
agacacttcatctggcagggccaat

SEQ ID NO: 50686 - DNA, 25 bp, Saccharomyces pastorianus
ggtggtaaacttgacgacccgactg

SEQ ID NO: 50687 - DNA, 25 bp, Saccharomyces pastorianus
gaggtctcacccttcaagaaattca

SEQ ID NO: 50688 - DNA, 25 bp, Saccharomyces pastorianus
gacgattacggtgatgggcttccaa

SEQ ID NO: 50689 - DNA, 25 bp, Saccharomyces pastorianus
ctcacggtggtggtaaccatcaaca

SEQ ID NO: 50690 - DNA, 25 bp, Saccharomyces pastorianus
acggtggtggtaaccatcaacatat

SEQ ID NO: 50691 - DNA, 25 bp, Saccharomyces pastorianus
ggtaaccatcaacatattggtaagg

SEQ ID NO: 50692 - DNA, 25 bp, Saccharomyces pastorianus
cacggtggtggtaaccatcaacata

SEQ ID NO: 50693 - DNA, 25 bp, Saccharomyces pastorianus
catcaacatattggtaaggcttcta

SEQ ID NO: 50694 - DNA, 25 bp, Saccharomyces pastorianus
ggtggtaaccatcaacatattggta

SEQ ID NO: 50695 - DNA, 25 bp, Saccharomyces pastorianus
cctcacggtggtggtaaccatcaac

SEQ ID NO: 50696 - DNA, 25 bp, Saccharomyces pastorianus
tcacggtggtggtaaccatcaacat

SEQ ID NO: 50697 - DNA, 25 bp, Saccharomyces pastorianus
cggtggtggtaaccatcaacatatt

SEQ ID NO: 50698 - DNA, 25 bp, Saccharomyces pastorianus
atcaacatattggtaaggcttctac

SEQ ID NO: 50699 - DNA, 25 bp, Saccharomyces pastorianus
gtggtggtaaccatcaacatattgg

SEQ ID NO: 50700 - DNA, 25 bp, Saccharomyces pastorianus
tactccccgcaggagatctggattt

SEQ ID NO: 50701 - DNA, 25 bp, Saccharomyces pastorianus
ggcaccagcggcactagtacaagaa

SEQ ID NO: 50702 - DNA, 25 bp, Saccharomyces pastorianus
ttactgacagcgagatccgcgagct

SEQ ID NO: 50703 - DNA, 25 bp, Saccharomyces pastorianus
agaagagatgcattcccttggcgcc

SEQ ID NO: 50704 - DNA, 25 bp, Saccharomyces pastorianus
aaccagtgattgtgaagcccgcttt

SEQ ID NO: 50705 - DNA, 25 bp, Saccharomyces pastorianus
ggacacggtctactgccacgatttg

SEQ ID NO: 50706 - DNA, 25 bp, Saccharomyces pastorianus
tgtttctgaaactgcatgtccctta

SEQ ID NO: 50707 - DNA, 25 bp, Saccharomyces pastorianus
tagatatctgcgacgacgtgggcaa

SEQ ID NO: 50708 - DNA, 25 bp, Saccharomyces pastorianus
gaaggccatccaagacctcaacgga

SEQ ID NO: 50709 - DNA, 25 bp, Saccharomyces pastorianus
tgcatgtcccttacgaggcagaacc

SEQ ID NO: 50710 - DNA, 25 bp, Saccharomyces pastorianus
gatttgcctgacgacgttactgaca

SEQ ID NO: 50711 - DNA, 25 bp, Saccharomyces pastorianus
gattctgccgtcgaatagcacacga

SEQ ID NO: 50712 - DNA, 25 bp, Saccharomyces pastorianus
tatactcgccgctgattcatacgca

SEQ ID NO: 50713 - DNA, 25 bp, Saccharomyces pastorianus
gcgagtcgcacaagcacgcggaaca

SEQ ID NO: 50714 - DNA, 25 bp, Saccharomyces pastorianus
gcttcgctgtttgaactgccggaca

SEQ ID NO: 50715 - DNA, 25 bp, Saccharomyces pastorianus
ggaagcagcagcacgtgtcgaccgc

SEQ ID NO: 50716 - DNA, 25 bp, Saccharomyces pastorianus
atacgcagactgcagtacccgtgac

SEQ ID NO: 50717 - DNA, 25 bp, Saccharomyces pastorianus
tcgtcgctagcgagtcaccagtgat

SEQ ID NO: 50718 - DNA, 25 bp, Saccharomyces pastorianus
gtagcccgtatctgaacaagcgtag

SEQ ID NO: 50719 - DNA, 25 bp, Saccharomyces pastorianus
ggacagcgtaattccgacgccgaaa

SEQ ID NO: 50720 - DNA, 25 bp, Saccharomyces pastorianus
gtatcctaaggtgattctgccgtcg

SEQ ID NO: 50721 - DNA, 25 bp, Saccharomyces pastorianus
aatctaatggccaccactttcactt

SEQ ID NO: 50722 - DNA, 25 bp, Saccharomyces pastorianus
cagacgcgccactgctgtggtcgct

SEQ ID NO: 50723 - DNA, 25 bp, Saccharomyces pastorianus
gtcgttaccttgcaacaacgcaacg

SEQ ID NO: 50724 - DNA, 25 bp, Saccharomyces pastorianus
ttatccagtttgtcgttaccttgca

SEQ ID NO: 50725 - DNA, 25 bp, Saccharomyces pastorianus
gcgagatctccttagacttgtcaga

SEQ ID NO: 50726 - DNA, 25 bp, Saccharomyces pastorianus
aacaacgcaacgaccgcatcgttca

SEQ ID NO: 50727 - DNA, 25 bp, Saccharomyces pastorianus
tccagtttgtcgttaccttgcaaca

SEQ ID NO: 50728 - DNA, 25 bp, Saccharomyces pastorianus
tagacttgtcagaaaccttatccag

SEQ ID NO: 50729 - DNA, 25 bp, Saccharomyces pastorianus
gttcacacaccccatcagtttggac

SEQ ID NO: 50730 - DNA, 25 bp, Saccharomyces pastorianus
gtcagaaaccttatccagtttgtcg

SEQ ID NO: 50731 - DNA, 25 bp, Saccharomyces pastorianus
acttctgcgagatctccttagactt

SEQ ID NO: 50732 - DNA, 25 bp, Saccharomyces pastorianus
catcagtttggacccagacgcgcca

SEQ ID NO: 50733 - DNA, 25 bp, Saccharomyces pastorianus
acagcttcgtgaacttgttctccag

SEQ ID NO: 50734 - DNA, 25 bp, Saccharomyces pastorianus
tttagcatcttttcggactccttca

SEQ ID NO: 50735 - DNA, 25 bp, Saccharomyces pastorianus
gtaccagttttttcgacacgttcag

SEQ ID NO: 50736 - DNA, 25 bp, Saccharomyces pastorianus
taacgtccaggatctgcttgctcaa

SEQ ID NO: 50737 - DNA, 25 bp, Saccharomyces pastorianus
cgataaccggtcgtttagcatcttt

SEQ ID NO: 50738 - DNA, 25 bp, Saccharomyces pastorianus
agttttttcgacacgttcagctcct

SEQ ID NO: 50739 - DNA, 25 bp, Saccharomyces pastorianus
tccagcgacttgttaacgtccagga

SEQ ID NO: 50740 - DNA, 25 bp, Saccharomyces pastorianus
gactccttcacgtatttcagctttt

SEQ ID NO: 50741 - DNA, 25 bp, Saccharomyces pastorianus
atctgcttgctcaacgataaccggt

SEQ ID NO: 50742 - DNA, 25 bp, Saccharomyces pastorianus
gtatttcagcttttccagctccagt

SEQ ID NO: 50743 - DNA, 25 bp, Saccharomyces pastorianus
agttgcgtctccagatcacacagct

SEQ ID NO: 50744 - DNA, 25 bp, Saccharomyces pastorianus
attggtgcgagctaaatttctttga

SEQ ID NO: 50745 - DNA, 25 bp, Saccharomyces pastorianus
gcggacacggttgttttgtttgaca

SEQ ID NO: 50746 - DNA, 25 bp, Saccharomyces pastorianus
gtatcaacctagtcggagcggacac

SEQ ID NO: 50747 - DNA, 25 bp, Saccharomyces pastorianus
gtggaatcaactcgactgtgttaca

SEQ ID NO: 50748 - DNA, 25 bp, Saccharomyces pastorianus
ctttctgttatccacaagagccgca

SEQ ID NO: 50749 - DNA, 25 bp, Saccharomyces pastorianus
gttctgcaaatattgatcccaccat

SEQ ID NO: 50750 - DNA, 25 bp, Saccharomyces pastorianus
gaccgatgccatcgtattggccaag

SEQ ID NO: 50751 - DNA, 25 bp, Saccharomyces pastorianus
aagtcctcatttattctcaattcgt

SEQ ID NO: 50752 - DNA, 25 bp, Saccharomyces pastorianus
tttccgtatttgcatcctgaggatt

SEQ ID NO: 50753 - DNA, 25 bp, Saccharomyces pastorianus
gacttacaagccatggaccgatgcc

SEQ ID NO: 50754 - DNA, 25 bp, Saccharomyces pastorianus
gagccgcagggctgggtatcaacct

SEQ ID NO: 50755 - DNA, 25 bp, Saccharomyces pastorianus
taattcaacagatcttcaacgggag

SEQ ID NO: 50756 - DNA, 25 bp, Saccharomyces pastorianus
gaagtttccacatatactcctgtta

SEQ ID NO: 50757 - DNA, 25 bp, Saccharomyces pastorianus
gaactgtttctaacgcatccttgga

SEQ ID NO: 50758 - DNA, 25 bp, Saccharomyces pastorianus
taaccgttccaaatgaagagggagc

SEQ ID NO: 50759 - DNA, 25 bp, Saccharomyces pastorianus
tcctcgttctgtccttgtttaattt

SEQ ID NO: 50760 - DNA, 25 bp, Saccharomyces pastorianus
atactcctgttatcagagatccaaa

SEQ ID NO: 50761 - DNA, 25 bp, Saccharomyces pastorianus
gtatgacaccagaatcgtttctaaa

SEQ ID NO: 50762 - DNA, 25 bp, Saccharomyces pastorianus
gtttctaacgcatccttggaataat

SEQ ID NO: 50763 - DNA, 25 bp, Saccharomyces pastorianus
atataattcattcctcgttctgtcc

SEQ ID NO: 50764 - DNA, 25 bp, Saccharomyces pastorianus
tttatgactgatataaccgttccaa

SEQ ID NO: 50765 - DNA, 25 bp, Saccharomyces pastorianus
caacgggagaatggatttttcatat

SEQ ID NO: 50766 - DNA, 25 bp, Saccharomyces pastorianus
aagagttcttacagccactcctggg

SEQ ID NO: 50767 - DNA, 25 bp, Saccharomyces pastorianus
gaatgtgagccacttcggaatgtca

SEQ ID NO: 50768 - DNA, 25 bp, Saccharomyces pastorianus
tacaataccacaagcgccacaatag

SEQ ID NO: 50769 - DNA, 25 bp, Saccharomyces pastorianus
ttgtgagcttcaaccgattgcaaca

SEQ ID NO: 50770 - DNA, 25 bp, Saccharomyces pastorianus
ggtgtcttgcatcccaatacattca

SEQ ID NO: 50771 - DNA, 25 bp, Saccharomyces pastorianus
gccggcgtacgatatgccacttgaa

SEQ ID NO: 50772 - DNA, 25 bp, Saccharomyces pastorianus
aagactgggcctcgatagaattcac

SEQ ID NO: 50773 - DNA, 25 bp, Saccharomyces pastorianus
gaaggattttgtcacgccggaatgt

SEQ ID NO: 50774 - DNA, 25 bp, Saccharomyces pastorianus
aatggttttaccaacgtcatcgaat

SEQ ID NO: 50775 - DNA, 25 bp, Saccharomyces pastorianus
aagacctctttcgacttgtatatag

SEQ ID NO: 50776 - DNA, 25 bp, Saccharomyces pastorianus
actctttcgcaagtctaccggaatg

SEQ ID NO: 50777 - DNA, 25 bp, Saccharomyces pastorianus
ggagatacccttcattatccattca

SEQ ID NO: 50778 - DNA, 25 bp, Saccharomyces pastorianus
gacggtgcccattcaatcaacgaga

SEQ ID NO: 50779 - DNA, 25 bp, Saccharomyces pastorianus
gggtttcggatccattcaatgctca

SEQ ID NO: 50780 - DNA, 25 bp, Saccharomyces pastorianus
aatgctcaatttaccgctgccaaga

SEQ ID NO: 50781 - DNA, 25 bp, Saccharomyces pastorianus
aagagttgaacgctgctaccggctc

SEQ ID NO: 50782 - DNA, 25 bp, Saccharomyces pastorianus
gtggctctatcccaattactttgac

SEQ ID NO: 50783 - DNA, 25 bp, Saccharomyces pastorianus
tcatgatggtgcctactgggtttcg

SEQ ID NO: 50784 - DNA, 25 bp, Saccharomyces pastorianus
ctaccggctccaagactagtttgta

SEQ ID NO: 50785 - DNA, 25 bp, Saccharomyces pastorianus
caccaagttggtctacggcgttgat

SEQ ID NO: 50786 - DNA, 25 bp, Saccharomyces pastorianus
gtgcgaagactgtcatcccagcaaa

SEQ ID NO: 50787 - DNA, 25 bp, Saccharomyces pastorianus
caaattcaagtcgttaggctcccca

SEQ ID NO: 50788 - DNA, 25 bp, Saccharomyces pastorianus
agggtaccgcttttgagatcatctt

SEQ ID NO: 50789 - DNA, 25 bp, Saccharomyces pastorianus
gccccagattaagtcgtatttcgtg

SEQ ID NO: 50790 - DNA, 25 bp, Saccharomyces pastorianus
gaacctggccgcatttggtaagact

SEQ ID NO: 50791 - DNA, 25 bp, Saccharomyces pastorianus
ttgaagaccggcttacagctgcagc

SEQ ID NO: 50792 - DNA, 25 bp, Saccharomyces pastorianus
attcagtcagcaatggtcgatccta

SEQ ID NO: 50793 - DNA, 25 bp, Saccharomyces pastorianus
agtctgtttatcatcccctttgaaa

SEQ ID NO: 50794 - DNA, 25 bp, Saccharomyces pastorianus
cctttcggcatttgtccagggaaca

SEQ ID NO: 50795 - DNA, 25 bp, Saccharomyces pastorianus
gtatcacacaagaggcctttcggca

SEQ ID NO: 50796 - DNA, 25 bp, Saccharomyces pastorianus
ccgcctctgtgactcgtatcgaaaa

SEQ ID NO: 50797 - DNA, 25 bp, Saccharomyces pastorianus
tatttcgtgggtatttccgctttga

SEQ ID NO: 50798 - DNA, 25 bp, Saccharomyces pastorianus
aacctgctggttgccggtacattaa

SEQ ID NO: 50799 - DNA, 25 bp, Saccharomyces pastorianus
tttatccgaaagaagaattgccgaa

SEQ ID NO: 50800 - DNA, 25 bp, Saccharomyces pastorianus
taagtctcttggtgtcatcggtgct

SEQ ID NO: 50801 - DNA, 25 bp, Saccharomyces pastorianus
gtaagtctcttggtgtcatcggtgc

SEQ ID NO: 50802 - DNA, 25 bp, Saccharomyces pastorianus
tccaatcaagattgtcccagctgaa

SEQ ID NO: 50803 - DNA, 25 bp, Saccharomyces pastorianus
attgctgctttatccgaaagaagaa

SEQ ID NO: 50804 - DNA, 25 bp, Saccharomyces pastorianus
gatccaatcaagattgtcccagctg

SEQ ID NO: 50805 - DNA, 25 bp, Saccharomyces pastorianus
atgccaccaacgatccaatcaagat

SEQ ID NO: 50806 - DNA, 25 bp, Saccharomyces pastorianus
ttattgctgctttatccgaaagaag

SEQ ID NO: 50807 - DNA, 25 bp, Saccharomyces pastorianus
gccaccaacgatccaatcaagattg

SEQ ID NO: 50808 - DNA, 25 bp, Saccharomyces pastorianus
tgttattgctgctttatccgaaaga

SEQ ID NO: 50809 - DNA, 25 bp, Saccharomyces pastorianus
ggtaagtctcttggtgtcatcggtg

SEQ ID NO: 50810 - DNA, 25 bp, Saccharomyces pastorianus
aactgatatgtgttacggcgaatac

SEQ ID NO: 50811 - DNA, 25 bp, Saccharomyces pastorianus
tttcggtatcttggctgagaacgct

SEQ ID NO: 50812 - DNA, 25 bp, Saccharomyces pastorianus
ttctctaggttacgtccacgccatt

SEQ ID NO: 50813 - DNA, 25 bp, Saccharomyces pastorianus
gtttcaactgcatctaacccaataa

SEQ ID NO: 50814 - DNA, 25 bp, Saccharomyces pastorianus
tgaaggatgcttgccacgtgaccaa

SEQ ID NO: 50815 - DNA, 25 bp, Saccharomyces pastorianus
acccaataactgatgcatgtgctct

SEQ ID NO: 50816 - DNA, 25 bp, Saccharomyces pastorianus
tgttgcctcacgtccaggaattcaa

SEQ ID NO: 50817 - DNA, 25 bp, Saccharomyces pastorianus
aattgctttgcatgttggtgcctca

SEQ ID NO: 50818 - DNA, 25 bp, Saccharomyces pastorianus
ggctttgcacgccttcaatagaact

SEQ ID NO: 50819 - DNA, 25 bp, Saccharomyces pastorianus
tggtgcctcacaagcaattccagaa

SEQ ID NO: 50820 - DNA, 25 bp, Saccharomyces pastorianus
ttaacgcttacaacgacggctctga

SEQ ID NO: 50821 - DNA, 25 bp, Saccharomyces pastorianus
tgaaaacaggtttaggtgccatagt

SEQ ID NO: 50822 - DNA, 25 bp, Saccharomyces pastorianus
gaaaatttgctgcagttgaaaacag

SEQ ID NO: 50823 - DNA, 25 bp, Saccharomyces pastorianus
acaggagacataacctcgtgcgaag

SEQ ID NO: 50824 - DNA, 25 bp, Saccharomyces pastorianus
acaggtttaggtgccatagtgtcta

SEQ ID NO: 50825 - DNA, 25 bp, Saccharomyces pastorianus
tgccatagtgtctaccgtgatagaa

SEQ ID NO: 50826 - DNA, 25 bp, Saccharomyces pastorianus
atagaagaattcaccctgtttatgg

SEQ ID NO: 50827 - DNA, 25 bp, Saccharomyces pastorianus
gtgtctaccgtgatagaagaattca

SEQ ID NO: 50828 - DNA, 25 bp, Saccharomyces pastorianus
gacataacctcgtgcgaagcagaaa

SEQ ID NO: 50829 - DNA, 25 bp, Saccharomyces pastorianus
aggtgccatagtgtctaccgtgata

SEQ ID NO: 50830 - DNA, 25 bp, Saccharomyces pastorianus
aacctcgtgcgaagcagaaaatttg

SEQ ID NO: 50831 - DNA, 25 bp, Saccharomyces pastorianus
gtttaggtgccatagtgtctaccgt

SEQ ID NO: 50832 - DNA, 25 bp, Saccharomyces pastorianus
tttggagcgaaaccagccggtacat

SEQ ID NO: 50833 - DNA, 25 bp, Saccharomyces pastorianus
taaacctgccggtagtacttccttg

SEQ ID NO: 50834 - DNA, 25 bp, Saccharomyces pastorianus
ggaggcggtctctttggtagcaaac

SEQ ID NO: 50835 - DNA, 25 bp, Saccharomyces pastorianus
atgacccgaatttctgagctaccac

SEQ ID NO: 50836 - DNA, 25 bp, Saccharomyces pastorianus
agtagcactacaggaggcggtctct

SEQ ID NO: 50837 - DNA, 25 bp, Saccharomyces pastorianus
attctggccagggtgctaataccaa

SEQ ID NO: 50838 - DNA, 25 bp, Saccharomyces pastorianus
aacctccttgtttggctcgtcaaat

SEQ ID NO: 50839 - DNA, 25 bp, Saccharomyces pastorianus
aagcagtggcctattcggttctaaa

SEQ ID NO: 50840 - DNA, 25 bp, Saccharomyces pastorianus
gcagcgcccacaagcggaagtttat

SEQ ID NO: 50841 - DNA, 25 bp, Saccharomyces pastorianus
ggtggattttttggctccaacgcag

SEQ ID NO: 50842 - DNA, 25 bp, Saccharomyces pastorianus
agccggtacatctctatttggtaac

SEQ ID NO: 50843 - DNA, 25 bp, Saccharomyces pastorianus
ggacaagatggccaaactgaccaaa

SEQ ID NO: 50844 - DNA, 25 bp, Saccharomyces pastorianus
gtttaagccgcctattatgattttt

SEQ ID NO: 50845 - DNA, 25 bp, Saccharomyces pastorianus
ttaattatgatgttccaggatcttc

SEQ ID NO: 50846 - DNA, 25 bp, Saccharomyces pastorianus
agattcagtagctatcaaaccgata

SEQ ID NO: 50847 - DNA, 25 bp, Saccharomyces pastorianus
agatcaccactgtgcctaagattga

SEQ ID NO: 50848 - DNA, 25 bp, Saccharomyces pastorianus
aaacgtagacgtgattcatgcggaa

SEQ ID NO: 50849 - DNA, 25 bp, Saccharomyces pastorianus
gagggtgagtttaagccgcctatta

SEQ ID NO: 50850 - DNA, 25 bp, Saccharomyces pastorianus
tagcccgtggtatcgatttcaaagg

SEQ ID NO: 50851 - DNA, 25 bp, Saccharomyces pastorianus
aatcgctatcagacaattggttcaa

SEQ ID NO: 50852 - DNA, 25 bp, Saccharomyces pastorianus
gtcaggtaaggccataacgctttat

SEQ ID NO: 50853 - DNA, 25 bp, Saccharomyces pastorianus
ttgtacagatgttttagcccgtggt

SEQ ID NO: 50854 - DNA, 25 bp, Saccharomyces pastorianus
atcgtttggtaacattgatttaaat

SEQ ID NO: 50855 - DNA, 25 bp, Saccharomyces pastorianus
gacaaaatcgtttggtaacattgat

SEQ ID NO: 50856 - DNA, 25 bp, Saccharomyces pastorianus
atgacaaaatcgtttggtaacattg

SEQ ID NO: 50857 - DNA, 25 bp, Saccharomyces pastorianus
acaaaatcgtttggtaacattgatt

SEQ ID NO: 50858 - DNA, 25 bp, Saccharomyces pastorianus
cattgatttaaataaaatgcccaaa

SEQ ID NO: 50859 - DNA, 25 bp, Saccharomyces pastorianus
aacattgatttaaataaaatgccca

SEQ ID NO: 50860 - DNA, 25 bp, Saccharomyces pastorianus
caaaatcgtttggtaacattgattt

SEQ ID NO: 50861 - DNA, 25 bp, Saccharomyces pastorianus
tgacaaaatcgtttggtaacattga

SEQ ID NO: 50862 - DNA, 25 bp, Saccharomyces pastorianus
tcgtttggtaacattgatttaaata

SEQ ID NO: 50863 - DNA, 25 bp, Saccharomyces pastorianus
acattgatttaaataaaatgcccaa

SEQ ID NO: 50864 - DNA, 25 bp, Saccharomyces pastorianus
gagcctccctaattcctatgatcaa

SEQ ID NO: 50865 - DNA, 25 bp, Saccharomyces pastorianus
gctgctactaccacatttaccaaaa

SEQ ID NO: 50866 - DNA, 25 bp, Saccharomyces pastorianus
ggagattgacatttgcctgacaagt

SEQ ID NO: 50867 - DNA, 25 bp, Saccharomyces pastorianus
tagcagttcgcaaattctccaacca

SEQ ID NO: 50868 - DNA, 25 bp, Saccharomyces pastorianus
acactctccctcaagaatgtcgaaa

SEQ ID NO: 50869 - DNA, 25 bp, Saccharomyces pastorianus
atcttccctctcttaaaagtttcag

SEQ ID NO: 50870 - DNA, 25 bp, Saccharomyces pastorianus
tctccaaccaatctgaaacccaaaa

SEQ ID NO: 50871 - DNA, 25 bp, Saccharomyces pastorianus
gcctgacaagtataccatttttcga

SEQ ID NO: 50872 - DNA, 25 bp, Saccharomyces pastorianus
aaactcagcaagtgggacacccaat

SEQ ID NO: 50873 - DNA, 25 bp, Saccharomyces pastorianus
accaactcttcaaatttctgggaga

SEQ ID NO: 50874 - DNA, 25 bp, Saccharomyces pastorianus
tgtttccccggtaataatctatatc

SEQ ID NO: 50875 - DNA, 25 bp, Saccharomyces pastorianus
aatagcagtaatatgtcagacaccc

SEQ ID NO: 50876 - DNA, 25 bp, Saccharomyces pastorianus
aacagtactactaatgagtaatagc

SEQ ID NO: 50877 - DNA, 25 bp, Saccharomyces pastorianus
agcagtaatatgtcagacaccccta

SEQ ID NO: 50878 - DNA, 25 bp, Saccharomyces pastorianus
gtactactaatgagtaatagcagta

SEQ ID NO: 50879 - DNA, 25 bp, Saccharomyces pastorianus
cagtaatatgtcagacacccctaaa

SEQ ID NO: 50880 - DNA, 25 bp, Saccharomyces pastorianus
atatgtcagacacccctaaacgttc

SEQ ID NO: 50881 - DNA, 25 bp, Saccharomyces pastorianus
gtaatatgtcagacacccctaaacg

SEQ ID NO: 50882 - DNA, 25 bp, Saccharomyces pastorianus
aatatgtcagacacccctaaacgtt

SEQ ID NO: 50883 - DNA, 25 bp, Saccharomyces pastorianus
gcagtaatatgtcagacacccctaa

SEQ ID NO: 50884 - DNA, 25 bp, Saccharomyces pastorianus
atagcagtaatatgtcagacacccc

SEQ ID NO: 50885 - DNA, 25 bp, Saccharomyces pastorianus
tatgtcagacacccctaaacgttcg

SEQ ID NO: 50886 - DNA, 25 bp, Saccharomyces pastorianus
aggcccagagaagcctccaagtcta

SEQ ID NO: 50887 - DNA, 25 bp, Saccharomyces pastorianus
agccgtcgcttggaagcacacatgc

SEQ ID NO: 50888 - DNA, 25 bp, Saccharomyces pastorianus
tactagtctttctcttggtgtggca

SEQ ID NO: 50889 - DNA, 25 bp, Saccharomyces pastorianus
ttggtgtggcacttacagggctcgc

SEQ ID NO: 50890 - DNA, 25 bp, Saccharomyces pastorianus
actgagctatggcacgatgctgcct

SEQ ID NO: 50891 - DNA, 25 bp, Saccharomyces pastorianus
gcacacatgcatccgccagaagggt

SEQ ID NO: 50892 - DNA, 25 bp, Saccharomyces pastorianus
gtcttggcgccatcgctttgtaggg

SEQ ID NO: 50893 - DNA, 25 bp, Saccharomyces pastorianus
acagagtcgttgtcatgtccacata

SEQ ID NO: 50894 - DNA, 25 bp, Saccharomyces pastorianus
gccgcttcaggactgactgagctat

SEQ ID NO: 50895 - DNA, 25 bp, Saccharomyces pastorianus
agatttttaacggtcgccgcttcag

SEQ ID NO: 50896 - DNA, 25 bp, Saccharomyces pastorianus
ataagatcgacgctgttcaggccca

SEQ ID NO: 50897 - DNA, 25 bp, Saccharomyces pastorianus
gtcaactttagacgaccagccggcg

SEQ ID NO: 50898 - DNA, 25 bp, Saccharomyces pastorianus
agctcacagtatattttcatgccag

SEQ ID NO: 50899 - DNA, 25 bp, Saccharomyces pastorianus
attccgcccttgaacagagttacga

SEQ ID NO: 50900 - DNA, 25 bp, Saccharomyces pastorianus
gataccgaatcccataagagtgcaa

SEQ ID NO: 50901 - DNA, 25 bp, Saccharomyces pastorianus
tcagcgccctggtgggatggcataa

SEQ ID NO: 50902 - DNA, 25 bp, Saccharomyces pastorianus
aacagagaacttacattccgccctt

SEQ ID NO: 50903 - DNA, 25 bp, Saccharomyces pastorianus
aatacgcttacgctaccgttgagga

SEQ ID NO: 50904 - DNA, 25 bp, Saccharomyces pastorianus
acttactagaagttgacccgcgcaa

SEQ ID NO: 50905 - DNA, 25 bp, Saccharomyces pastorianus
tgtacacgatgttgtgcggctaccc

SEQ ID NO: 50906 - DNA, 25 bp, Saccharomyces pastorianus
tttgatgaactcgatgggcctttta

SEQ ID NO: 50907 - DNA, 25 bp, Saccharomyces pastorianus
acgtacgattgcttgaggccgtcaa

SEQ ID NO: 50908 - DNA, 25 bp, Saccharomyces pastorianus
gataatgcgcacagcacgtattcca

SEQ ID NO: 50909 - DNA, 25 bp, Saccharomyces pastorianus
gtattccactgattgccgtaggtct

SEQ ID NO: 50910 - DNA, 25 bp, Saccharomyces pastorianus
gataacttcctggacagcgacattc

SEQ ID NO: 50911 - DNA, 25 bp, Saccharomyces pastorianus
aggagacggcgcattttccagagta

SEQ ID NO: 50912 - DNA, 25 bp, Saccharomyces pastorianus
gtaggtcttctctctcagtgaacat

SEQ ID NO: 50913 - DNA, 25 bp, Saccharomyces pastorianus
gatattttagtgacgtctttccaaa

SEQ ID NO: 50914 - DNA, 25 bp, Saccharomyces pastorianus
acacctgatgccacttattctgaag

SEQ ID NO: 50915 - DNA, 25 bp, Saccharomyces pastorianus
atagcggacggtctctgttttcgcc

SEQ ID NO: 50916 - DNA, 25 bp, Saccharomyces pastorianus
gaacaaattccggttgccatcaaag

SEQ ID NO: 50917 - DNA, 25 bp, Saccharomyces pastorianus
actcgtctacttactattccgttat

SEQ ID NO: 50918 - DNA, 25 bp, Saccharomyces pastorianus
atcgataccccttctggagagagtg

SEQ ID NO: 50919 - DNA, 25 bp, Saccharomyces pastorianus
ttggctgttctattgttacgggctt

SEQ ID NO: 50920 - DNA, 25 bp, Saccharomyces pastorianus
aatcggcttctgcaattgtttggct

SEQ ID NO: 50921 - DNA, 25 bp, Saccharomyces pastorianus
atcactgtctttcccgttaacggag

SEQ ID NO: 50922 - DNA, 25 bp, Saccharomyces pastorianus
aagagcgtctgatccatgtgtgata

SEQ ID NO: 50923 - DNA, 25 bp, Saccharomyces pastorianus
attaccttagataacgttccactgg

SEQ ID NO: 50924 - DNA, 25 bp, Saccharomyces pastorianus
cctgtggtccctgaaagaatcgtat

SEQ ID NO: 50925 - DNA, 25 bp, Saccharomyces pastorianus
aacggagcttcattggacattacct

SEQ ID NO: 50926 - DNA, 25 bp, Saccharomyces pastorianus
gttccactggttttttattctcgat

SEQ ID NO: 50927 - DNA, 25 bp, Saccharomyces pastorianus
gtgatattcacttacctgtggtccc

SEQ ID NO: 50928 - DNA, 25 bp, Saccharomyces pastorianus
aatgaccttaacatgggcatcccaa

SEQ ID NO: 50929 - DNA, 25 bp, Saccharomyces pastorianus
cagtgtgtagctatgtccttggtga

SEQ ID NO: 50930 - DNA, 25 bp, Saccharomyces pastorianus
gcactagtacttgttgcagttcgga

SEQ ID NO: 50931 - DNA, 25 bp, Saccharomyces pastorianus
gtcttcgatcttttctttgtttctc

SEQ ID NO: 50932 - DNA, 25 bp, Saccharomyces pastorianus
taagctctgtctgttctgtttcgat

SEQ ID NO: 50933 - DNA, 25 bp, Saccharomyces pastorianus
gtcacctagctctttcaacttattg

SEQ ID NO: 50934 - DNA, 25 bp, Saccharomyces pastorianus
cctgcatgttgctgttgtctgaaac

SEQ ID NO: 50935 - DNA, 25 bp, Saccharomyces pastorianus
aacttattgctttcttgctctctaa

SEQ ID NO: 50936 - DNA, 25 bp, Saccharomyces pastorianus
gagcgaatccatttctctttggata

SEQ ID NO: 50937 - DNA, 25 bp, Saccharomyces pastorianus
attgtttagttcctgcatgttgctg

SEQ ID NO: 50938 - DNA, 25 bp, Saccharomyces pastorianus
gtaggttggacatctcgagcttaac

SEQ ID NO: 50939 - DNA, 25 bp, Saccharomyces pastorianus
tctttgtttctcgtagtttgcacta

SEQ ID NO: 50940 - DNA, 25 bp, Saccharomyces pastorianus
cagttcggaaattgtgtcacctagc

SEQ ID NO: 50941 - DNA, 25 bp, Saccharomyces pastorianus
aagtgacggtatacagactgcttgt

SEQ ID NO: 50942 - DNA, 25 bp, Saccharomyces pastorianus
cacagagttctgatttatttccaaa

SEQ ID NO: 50943 - DNA, 25 bp, Saccharomyces pastorianus
attggcaaactaacccagagatttt

SEQ ID NO: 50944 - DNA, 25 bp, Saccharomyces pastorianus
gactgcttgttcgtggcaccatcga

SEQ ID NO: 50945 - DNA, 25 bp, Saccharomyces pastorianus
ttcattaccgaatcagcaaagctaa

SEQ ID NO: 50946 - DNA, 25 bp, Saccharomyces pastorianus
catattagactggatggttcatcga

SEQ ID NO: 50947 - DNA, 25 bp, Saccharomyces pastorianus
ggtattaacttaacggctgctgata

SEQ ID NO: 50948 - DNA, 25 bp, Saccharomyces pastorianus
tagagcacatagattgggtcaaact

SEQ ID NO: 50949 - DNA, 25 bp, Saccharomyces pastorianus
aagcggaaggtcacagagttctgat

SEQ ID NO: 50950 - DNA, 25 bp, Saccharomyces pastorianus
aagatcgtcgtgatttggttcatga

SEQ ID NO: 50951 - DNA, 25 bp, Saccharomyces pastorianus
aaacatatcgatgccgtctatggat

SEQ ID NO: 50952 - DNA, 25 bp, Saccharomyces pastorianus
gtcatcttcgtcatctaccaagttg

SEQ ID NO: 50953 - DNA, 25 bp, Saccharomyces pastorianus
gacaatgtcgatgcggtctcggctg

SEQ ID NO: 50954 - DNA, 25 bp, Saccharomyces pastorianus
gaagacttcaatcctgacggcgaga

SEQ ID NO: 50955 - DNA, 25 bp, Saccharomyces pastorianus
aaagccctaccaaacacgtcaatgg

SEQ ID NO: 50956 - DNA, 25 bp, Saccharomyces pastorianus
gttgtcaatgaactcgctatctctt

SEQ ID NO: 50957 - DNA, 25 bp, Saccharomyces pastorianus
tgaagaggaggacttcgccgctttt

SEQ ID NO: 50958 - DNA, 25 bp, Saccharomyces pastorianus
aaaagaaggattccacggctgccct

SEQ ID NO: 50959 - DNA, 25 bp, Saccharomyces pastorianus
tctcggctgtcgatggcgacgataa

SEQ ID NO: 50960 - DNA, 25 bp, Saccharomyces pastorianus
aactcgctatctcttataacatcca

SEQ ID NO: 50961 - DNA, 25 bp, Saccharomyces pastorianus
gaccgaaaatcgtacgtgagcttat

SEQ ID NO: 50962 - DNA, 25 bp, Saccharomyces pastorianus
ggagaaagaggtcttcgtcatcttc

SEQ ID NO: 50963 - DNA, 25 bp, Saccharomyces pastorianus
gttgaactggctagccaacctgtat

SEQ ID NO: 50964 - DNA, 25 bp, Saccharomyces pastorianus
atcgatatttcagcattagttccaa

SEQ ID NO: 50965 - DNA, 25 bp, Saccharomyces pastorianus
ggctagccaacctgtatgaccaagg

SEQ ID NO: 50966 - DNA, 25 bp, Saccharomyces pastorianus
aacccaaaattttagcatgcacttt

SEQ ID NO: 50967 - DNA, 25 bp, Saccharomyces pastorianus
gatttccactctattgatttcgata

SEQ ID NO: 50968 - DNA, 25 bp, Saccharomyces pastorianus
atatccaaatttcggcctgaattca

SEQ ID NO: 50969 - DNA, 25 bp, Saccharomyces pastorianus
gaatgcttcgaatgctctggctgaa

SEQ ID NO: 50970 - DNA, 25 bp, Saccharomyces pastorianus
ctgcctccactctacataattgggt

SEQ ID NO: 50971 - DNA, 25 bp, Saccharomyces pastorianus
aaccgtacaatctatttctgttcta

SEQ ID NO: 50972 - DNA, 25 bp, Saccharomyces pastorianus
ttgatgctcacgcaaacgcacaggg

SEQ ID NO: 50973 - DNA, 25 bp, Saccharomyces pastorianus
ttctgttctagctcatttggcggaa

SEQ ID NO: 50974 - DNA, 25 bp, Saccharomyces pastorianus
cgacgttttatgtaatttgactcaa

SEQ ID NO: 50975 - DNA, 25 bp, Saccharomyces pastorianus
atttgactcaaagacaagccaagtt

SEQ ID NO: 50976 - DNA, 25 bp, Saccharomyces pastorianus
ggacattgaatctcatgccgaagca

SEQ ID NO: 50977 - DNA, 25 bp, Saccharomyces pastorianus
gactattattaactggtacacctat

SEQ ID NO: 50978 - DNA, 25 bp, Saccharomyces pastorianus
tggtacacctatccagaacagtatg

SEQ ID NO: 50979 - DNA, 25 bp, Saccharomyces pastorianus
gacaagccaagttataccaagtgtt

SEQ ID NO: 50980 - DNA, 25 bp, Saccharomyces pastorianus
gccgtttatgttaagacgtgtgaaa

SEQ ID NO: 50981 - DNA, 25 bp, Saccharomyces pastorianus
aacgtgcaatccgaattgggtgaca

SEQ ID NO: 50982 - DNA, 25 bp, Saccharomyces pastorianus
cttccctttttgactctcatgatga

SEQ ID NO: 50983 - DNA, 25 bp, Saccharomyces pastorianus
ttgcatatgatcttgaagccgttta

SEQ ID NO: 50984 - DNA, 25 bp, Saccharomyces pastorianus
aattgctaagctttcattgtcgtaa

SEQ ID NO: 50985 - DNA, 25 bp, Saccharomyces pastorianus
gattcattagatatcccattaccta

SEQ ID NO: 50986 - DNA, 25 bp, Saccharomyces pastorianus
cgtggtcgacactagaaatgcctgt

SEQ ID NO: 50987 - DNA, 25 bp, Saccharomyces pastorianus
agacacggagatccaggacgcactt

SEQ ID NO: 50988 - DNA, 25 bp, Saccharomyces pastorianus
atgataatgatgacggcgccactgt

SEQ ID NO: 50989 - DNA, 25 bp, Saccharomyces pastorianus
tcagcagctcctagatccagaatat

SEQ ID NO: 50990 - DNA, 25 bp, Saccharomyces pastorianus
acttcaagattgcaacgtggtcgac

SEQ ID NO: 50991 - DNA, 25 bp, Saccharomyces pastorianus
aaatgggtgatttcgcatctttaag

SEQ ID NO: 50992 - DNA, 25 bp, Saccharomyces pastorianus
gttttaagcttaccaccacacgcca

SEQ ID NO: 50993 - DNA, 25 bp, Saccharomyces pastorianus
ggcgccactgtaccaagtgctgaat

SEQ ID NO: 50994 - DNA, 25 bp, Saccharomyces pastorianus
ggtttgaaccagtttctacacgatt

SEQ ID NO: 50995 - DNA, 25 bp, Saccharomyces pastorianus
gatcgaaacaatcagcagctcctag

SEQ ID NO: 50996 - DNA, 25 bp, Saccharomyces pastorianus
agacgtccattttaacggtgatgac

SEQ ID NO: 50997 - DNA, 25 bp, Saccharomyces pastorianus
agaatattcttctccaagctttttt

SEQ ID NO: 50998 - DNA, 25 bp, Saccharomyces pastorianus
gtcgctttgaaaccggacgctcata

SEQ ID NO: 50999 - DNA, 25 bp, Saccharomyces pastorianus
gaaagtttcctaacgcgtacggatg

SEQ ID NO: 51000 - DNA, 25 bp, Saccharomyces pastorianus
cggcgtctttgatgaaggtcctaca

SEQ ID NO: 51001 - DNA, 25 bp, Saccharomyces pastorianus
aggatcccaatgacgagattcttcg

SEQ ID NO: 51002 - DNA, 25 bp, Saccharomyces pastorianus
ggaatactccggaggatcccaatga

SEQ ID NO: 51003 - DNA, 25 bp, Saccharomyces pastorianus
gaggcttcagtgctatgaccgacag

SEQ ID NO: 51004 - DNA, 25 bp, Saccharomyces pastorianus
acagaggatgatattccgcaatcta

SEQ ID NO: 51005 - DNA, 25 bp, Saccharomyces pastorianus
ggatggcccgtaatcgatcatttaa

SEQ ID NO: 51006 - DNA, 25 bp, Saccharomyces pastorianus
ggtgacgacaattgttttcctcaag

SEQ ID NO: 51007 - DNA, 25 bp, Saccharomyces pastorianus
atcctccattgcacctacttgaaga

SEQ ID NO: 51008 - DNA, 25 bp, Saccharomyces pastorianus
tgtggtcaattacttgcgatcctcc

SEQ ID NO: 51009 - DNA, 25 bp, Saccharomyces pastorianus
gagtatcgaaacaagctgaccagct

SEQ ID NO: 51010 - DNA, 25 bp, Saccharomyces pastorianus
gctcgttccctttatatcagtgttt

SEQ ID NO: 51011 - DNA, 25 bp, Saccharomyces pastorianus
gaatcagggtccatcgaagtcatga

SEQ ID NO: 51012 - DNA, 25 bp, Saccharomyces pastorianus
caataggtttttcaactcccttgct

SEQ ID NO: 51013 - DNA, 25 bp, Saccharomyces pastorianus
gacccaaaagcctcttcgaagcttg

SEQ ID NO: 51014 - DNA, 25 bp, Saccharomyces pastorianus
tagaaacttcccaccgatattccgt

SEQ ID NO: 51015 - DNA, 25 bp, Saccharomyces pastorianus
actcccttgctcattgggattcaag

SEQ ID NO: 51016 - DNA, 25 bp, Saccharomyces pastorianus
ttaaaacttctgctctggctcgttc

SEQ ID NO: 51017 - DNA, 25 bp, Saccharomyces pastorianus
attcgacaccgggtcaaagttatct

SEQ ID NO: 51018 - DNA, 25 bp, Saccharomyces pastorianus
tttcgcgcgaaaacctgtcaacatt

SEQ ID NO: 51019 - DNA, 25 bp, Saccharomyces pastorianus
ggatgatagaacctccttccaaagg

SEQ ID NO: 51020 - DNA, 25 bp, Saccharomyces pastorianus
gaggattcggatcacaaaactttgt

SEQ ID NO: 51021 - DNA, 25 bp, Saccharomyces pastorianus
gacacaagctcaactgcagacccat

SEQ ID NO: 51022 - DNA, 25 bp, Saccharomyces pastorianus
cacagtctgacgcacataatggatt

SEQ ID NO: 51023 - DNA, 25 bp, Saccharomyces pastorianus
aggcaacgttgcaagggatcataac

SEQ ID NO: 51024 - DNA, 25 bp, Saccharomyces pastorianus
ggttccaaatcatacccaggacaca

SEQ ID NO: 51025 - DNA, 25 bp, Saccharomyces pastorianus
acaacgttcacctcaagtgatgaga

SEQ ID NO: 51026 - DNA, 25 bp, Saccharomyces pastorianus
acaacctaacaaatctttcgcgcga

SEQ ID NO: 51027 - DNA, 25 bp, Saccharomyces pastorianus
gaaggtaccgtcaacagatctgtag

SEQ ID NO: 51028 - DNA, 25 bp, Saccharomyces pastorianus
gtagccaacgaattacttgctttag

SEQ ID NO: 51029 - DNA, 25 bp, Saccharomyces pastorianus
ggctgataatatcactgaccagtaa

SEQ ID NO: 51030 - DNA, 25 bp, Saccharomyces pastorianus
ggaaaactcccaactgtcagcaaac

SEQ ID NO: 51031 - DNA, 25 bp, Saccharomyces pastorianus
aatcgtgttccataattgggctgat

SEQ ID NO: 51032 - DNA, 25 bp, Saccharomyces pastorianus
gacgtcattagtcacatgtatggaa

SEQ ID NO: 51033 - DNA, 25 bp, Saccharomyces pastorianus
gtagcgacgtcattagtcacatgta

SEQ ID NO: 51034 - DNA, 25 bp, Saccharomyces pastorianus
tacaaaccttcaaatcgtgttccat

SEQ ID NO: 51035 - DNA, 25 bp, Saccharomyces pastorianus
ttttgatgtcgtctttgacccggac

SEQ ID NO: 51036 - DNA, 25 bp, Saccharomyces pastorianus
aaaggaagctagtagcgacgtcatt

SEQ ID NO: 51037 - DNA, 25 bp, Saccharomyces pastorianus
gtaacataggtctagtagaggcgaa

SEQ ID NO: 51038 - DNA, 25 bp, Saccharomyces pastorianus
ctttgacccggacgacaggtcgcta

SEQ ID NO: 51039 - DNA, 25 bp, Saccharomyces pastorianus
gtcagcaaacagttttgatgtcgtc

SEQ ID NO: 51040 - DNA, 25 bp, Saccharomyces pastorianus
aacaggaaaaggctgccgctgcaga

SEQ ID NO: 51041 - DNA, 25 bp, Saccharomyces pastorianus
agcacacgacctagaatccttattc

SEQ ID NO: 51042 - DNA, 25 bp, Saccharomyces pastorianus
ggcagctgatgcacaacctctaatt

SEQ ID NO: 51043 - DNA, 25 bp, Saccharomyces pastorianus
gatttagattctgctccaacatcga

SEQ ID NO: 51044 - DNA, 25 bp, Saccharomyces pastorianus
atccttattcttattgcattcatct

SEQ ID NO: 51045 - DNA, 25 bp, Saccharomyces pastorianus
gatcactaggtgacgcatctttaca

SEQ ID NO: 51046 - DNA, 25 bp, Saccharomyces pastorianus
ggcattcaatgcttattgggttgct

SEQ ID NO: 51047 - DNA, 25 bp, Saccharomyces pastorianus
aagcagctttattaggttcgacata

SEQ ID NO: 51048 - DNA, 25 bp, Saccharomyces pastorianus
ccgagaggttctcagaagcagcttt

SEQ ID NO: 51049 - DNA, 25 bp, Saccharomyces pastorianus
cgaagggttaccaagctcatcaaag

SEQ ID NO: 51050 - DNA, 25 bp, Saccharomyces pastorianus
gctccaacatcgaaacatgcccaag

SEQ ID NO: 51051 - DNA, 25 bp, Saccharomyces pastorianus
attgccgacgaacttgtgaaactag

SEQ ID NO: 51052 - DNA, 25 bp, Saccharomyces pastorianus
aagaattttggctcgctcggaaagg

SEQ ID NO: 51053 - DNA, 25 bp, Saccharomyces pastorianus
aaatggcactattgaaacggttgat

SEQ ID NO: 51054 - DNA, 25 bp, Saccharomyces pastorianus
aaggaggctgcgttggatgaaaaac

SEQ ID NO: 51055 - DNA, 25 bp, Saccharomyces pastorianus
ctgatattctagctgatgcggaaga

SEQ ID NO: 51056 - DNA, 25 bp, Saccharomyces pastorianus
attacagacatttcaaggccatgga

SEQ ID NO: 51057 - DNA, 25 bp, Saccharomyces pastorianus
cattgggagcatttactaagagcga

SEQ ID NO: 51058 - DNA, 25 bp, Saccharomyces pastorianus
aaaactggaggccattgccgacgaa

SEQ ID NO: 51059 - DNA, 25 bp, Saccharomyces pastorianus
actagatgatagctccaagacacgg

SEQ ID NO: 51060 - DNA, 25 bp, Saccharomyces pastorianus
aaagaaccaaagtctctcggagcaa

SEQ ID NO: 51061 - DNA, 25 bp, Saccharomyces pastorianus
gggatcttcacttcgcaagaatgca

SEQ ID NO: 51062 - DNA, 25 bp, Saccharomyces pastorianus
gatggaagggcttgacccagccatt

SEQ ID NO: 51063 - DNA, 25 bp, Saccharomyces pastorianus
atttgctcatgctgtggtacatcta

SEQ ID NO: 51064 - DNA, 25 bp, Saccharomyces pastorianus
cgcaccttggccgaatcgagatatt

SEQ ID NO: 51065 - DNA, 25 bp, Saccharomyces pastorianus
tgacccagccattcttggtatgaat

SEQ ID NO: 51066 - DNA, 25 bp, Saccharomyces pastorianus
tataaacataccagcggtcgcacct

SEQ ID NO: 51067 - DNA, 25 bp, Saccharomyces pastorianus
taactaatcctagagcgtgcgtact

SEQ ID NO: 51068 - DNA, 25 bp, Saccharomyces pastorianus
attcttgtaacttaaactcaggcgt

SEQ ID NO: 51069 - DNA, 25 bp, Saccharomyces pastorianus
caggcgttttagaggctgactacga

SEQ ID NO: 51070 - DNA, 25 bp, Saccharomyces pastorianus
tggcatataagcctcaacataccct

SEQ ID NO: 51071 - DNA, 25 bp, Saccharomyces pastorianus
gggatccaggcgaatctataactaa

SEQ ID NO: 51072 - DNA, 25 bp, Saccharomyces pastorianus
gtagcgctgactttaagcttttgtt

SEQ ID NO: 51073 - DNA, 25 bp, Saccharomyces pastorianus
aattgggaccacttgatcgatgaga

SEQ ID NO: 51074 - DNA, 25 bp, Saccharomyces pastorianus
aagtatttcctgagcggcaacggta

SEQ ID NO: 51075 - DNA, 25 bp, Saccharomyces pastorianus
aagtgtattccttggatctgcaaat

SEQ ID NO: 51076 - DNA, 25 bp, Saccharomyces pastorianus
gtcatgacccactcacataatcgtg

SEQ ID NO: 51077 - DNA, 25 bp, Saccharomyces pastorianus
tgagttagccatccagtccaaagtg

SEQ ID NO: 51078 - DNA, 25 bp, Saccharomyces pastorianus
gttttcgatttgctatccgtcatga

SEQ ID NO: 51079 - DNA, 25 bp, Saccharomyces pastorianus
ttaactacctctttttctgcataca

SEQ ID NO: 51080 - DNA, 25 bp, Saccharomyces pastorianus
agagaaagctctaccattctggcca

SEQ ID NO: 51081 - DNA, 25 bp, Saccharomyces pastorianus
agtgcccatcatgttcacggtagat

SEQ ID NO: 51082 - DNA, 25 bp, Saccharomyces pastorianus
tatgttaccagacaccactacgaac

SEQ ID NO: 51083 - DNA, 25 bp, Saccharomyces pastorianus
attctggccatctctggtgtagata

SEQ ID NO: 51084 - DNA, 25 bp, Saccharomyces pastorianus
ctgatcccactacactattattcgg

SEQ ID NO: 51085 - DNA, 25 bp, Saccharomyces pastorianus
gcaagtccagcgctatggcgaacta

SEQ ID NO: 51086 - DNA, 25 bp, Saccharomyces pastorianus
tattcggacttcaacctacaaacgg

SEQ ID NO: 51087 - DNA, 25 bp, Saccharomyces pastorianus
ggctcatcgagcaacaacgcaggac

SEQ ID NO: 51088 - DNA, 25 bp, Saccharomyces pastorianus
agaaccatccttactacgattgctc

SEQ ID NO: 51089 - DNA, 25 bp, Saccharomyces pastorianus
aggagctggtcaagtggcaacgtca

SEQ ID NO: 51090 - DNA, 25 bp, Saccharomyces pastorianus
gcacaacacatattcaggagctggt

SEQ ID NO: 51091 - DNA, 25 bp, Saccharomyces pastorianus
atacggcgactggaaacatctggac

SEQ ID NO: 51092 - DNA, 25 bp, Saccharomyces pastorianus
atgactacttcaagggcgactctat

SEQ ID NO: 51093 - DNA, 25 bp, Saccharomyces pastorianus
gaaaagctacaacgctccgaatccg

SEQ ID NO: 51094 - DNA, 25 bp, Saccharomyces pastorianus
tcaagctgtgttgctcatctgcgaa

SEQ ID NO: 51095 - DNA, 25 bp, Saccharomyces pastorianus
aagatcatccagttgcaaggcccgc

SEQ ID NO: 51096 - DNA, 25 bp, Saccharomyces pastorianus
gaactgcctcttcatcttgaagctg

SEQ ID NO: 51097 - DNA, 25 bp, Saccharomyces pastorianus
tgccagatgccaacaacgacaccag

SEQ ID NO: 51098 - DNA, 25 bp, Saccharomyces pastorianus
cgccctactcgcaatgcatagtgta

SEQ ID NO: 51099 - DNA, 25 bp, Saccharomyces pastorianus
tacttgctcacccaacaacagatat

SEQ ID NO: 51100 - DNA, 25 bp, Saccharomyces pastorianus
tggagtccgccatcgtcaatgaaga

SEQ ID NO: 51101 - DNA, 25 bp, Saccharomyces pastorianus
atgcatagtgtacccgaactgcctc

SEQ ID NO: 51102 - DNA, 25 bp, Saccharomyces pastorianus
gctgcccaccaggttcgaggtggaa

SEQ ID NO: 51103 - DNA, 25 bp, Saccharomyces pastorianus
tcttgaagctgctgaacgggttcat

SEQ ID NO: 51104 - DNA, 25 bp, Saccharomyces pastorianus
tggaactcgagttcgtccagtcctt

SEQ ID NO: 51105 - DNA, 25 bp, Saccharomyces pastorianus
tccagtccttggctaacatccaata

SEQ ID NO: 51106 - DNA, 25 bp, Saccharomyces pastorianus
tctctctagccgtcggtcacgctgt

SEQ ID NO: 51107 - DNA, 25 bp, Saccharomyces pastorianus
gttgctggtcacgtggctgtggcag

SEQ ID NO: 51108 - DNA, 25 bp, Saccharomyces pastorianus
acgtggctgtggcagctgctgctga

SEQ ID NO: 51109 - DNA, 25 bp, Saccharomyces pastorianus
gaccacccgatcgtgctgctgttgg

SEQ ID NO: 51110 - DNA, 25 bp, Saccharomyces pastorianus
gtccgggctgctcgccgcgtacata

SEQ ID NO: 51111 - DNA, 25 bp, Saccharomyces pastorianus
cgatcgtgctgctgttggcgttgct

SEQ ID NO: 51112 - DNA, 25 bp, Saccharomyces pastorianus
ggctgtggcgcgctctctctctagc

SEQ ID NO: 51113 - DNA, 25 bp, Saccharomyces pastorianus
tgcgcgagcacctgtccgggctgct

SEQ ID NO: 51114 - DNA, 25 bp, Saccharomyces pastorianus
tagccgtcggtcacgctgtcgctcg

SEQ ID NO: 51115 - DNA, 25 bp, Saccharomyces pastorianus
ctgctgttggcgttgctggtcacgt

SEQ ID NO: 51116 - DNA, 25 bp, Saccharomyces pastorianus
gcttggcgcggtgcatcgcgtgcga

SEQ ID NO: 51117 - DNA, 25 bp, Saccharomyces pastorianus
atccagtccctgatcgacgattatt

SEQ ID NO: 51118 - DNA, 25 bp, Saccharomyces pastorianus
gaccaagttgcccaagctgatcgaa

SEQ ID NO: 51119 - DNA, 25 bp, Saccharomyces pastorianus
cacgacgttgcttgtctggttatca

SEQ ID NO: 51120 - DNA, 25 bp, Saccharomyces pastorianus
tacagcccaccattgtcgagaagat

SEQ ID NO: 51121 - DNA, 25 bp, Saccharomyces pastorianus
aaggaggagttctaccacattttgg

SEQ ID NO: 51122 - DNA, 25 bp, Saccharomyces pastorianus
attattgcctggtcaacatcgtcga

SEQ ID NO: 51123 - DNA, 25 bp, Saccharomyces pastorianus
gaagatctccttcttggcatggaag

SEQ ID NO: 51124 - DNA, 25 bp, Saccharomyces pastorianus
aatttgaagtgcttgccctggagcg

SEQ ID NO: 51125 - DNA, 25 bp, Saccharomyces pastorianus
aggtcaacggcattcggtccaacga

SEQ ID NO: 51126 - DNA, 25 bp, Saccharomyces pastorianus
ggagttcatgttgcccaagaccaag

SEQ ID NO: 51127 - DNA, 25 bp, Saccharomyces pastorianus
ggtcgagttgaaccagcactccata

SEQ ID NO: 51128 - DNA, 25 bp, Saccharomyces pastorianus
tctttcgttgccattggtaacactt

SEQ ID NO: 51129 - DNA, 25 bp, Saccharomyces pastorianus
agacctctaaggaagtcgctggtgc

SEQ ID NO: 51130 - DNA, 25 bp, Saccharomyces pastorianus
gttgccattggtaacacttacggct

SEQ ID NO: 51131 - DNA, 25 bp, Saccharomyces pastorianus
cctctaaggaagtcgctggtgccat

SEQ ID NO: 51132 - DNA, 25 bp, Saccharomyces pastorianus
gtatcaagacctctaaggaagtcgc

SEQ ID NO: 51133 - DNA, 25 bp, Saccharomyces pastorianus
ttctttcgttgccattggtaacact

SEQ ID NO: 51134 - DNA, 25 bp, Saccharomyces pastorianus
gccattggtaacacttacggcttct

SEQ ID NO: 51135 - DNA, 25 bp, Saccharomyces pastorianus
cattgccaagttgtctgttattcca

SEQ ID NO: 51136 - DNA, 25 bp, Saccharomyces pastorianus
catcattgccaagttgtctgttatt

SEQ ID NO: 51137 - DNA, 25 bp, Saccharomyces pastorianus
caagacctctaaggaagtcgctggt

SEQ ID NO: 51138 - DNA, 25 bp, Saccharomyces pastorianus
cattggtaacacttacggcttcttg

SEQ ID NO: 51139 - DNA, 25 bp, Saccharomyces pastorianus
gaaccagatttaaggctgttgtcgt

SEQ ID NO: 51140 - DNA, 25 bp, Saccharomyces pastorianus
attgccagtttctccattggacatc

SEQ ID NO: 51141 - DNA, 25 bp, Saccharomyces pastorianus
aaccagagccggtcaaagaaccaga

SEQ ID NO: 51142 - DNA, 25 bp, Saccharomyces pastorianus
tgttagattgatcccagccccaaga

SEQ ID NO: 51143 - DNA, 25 bp, Saccharomyces pastorianus
agtgtggttccgtcactgttagatt

SEQ ID NO: 51144 - DNA, 25 bp, Saccharomyces pastorianus
attggctggtgttgaagatgtctac

SEQ ID NO: 51145 - DNA, 25 bp, Saccharomyces pastorianus
gctggtgccatcagagctggtatca

SEQ ID NO: 51146 - DNA, 25 bp, Saccharomyces pastorianus
tgactctaacggtcacgttggtttg

SEQ ID NO: 51147 - DNA, 25 bp, Saccharomyces pastorianus
ttgggtcaaccacattctttggcca

SEQ ID NO: 51148 - DNA, 25 bp, Saccharomyces pastorianus
ttgtgggccgaacaaccattgccag

SEQ ID NO: 51149 - DNA, 25 bp, Saccharomyces pastorianus
ttcttgactccaaacttgtgggccg

SEQ ID NO: 51150 - DNA, 25 bp, Saccharomyces pastorianus
tcggtggccgtaacaagggtcgtca

SEQ ID NO: 51151 - DNA, 25 bp, Saccharomyces pastorianus
atgtctgctccagaggctcaacaac

SEQ ID NO: 51152 - DNA, 25 bp, Saccharomyces pastorianus
tgtctgctccagaggctcaacaaca

SEQ ID NO: 51153 - DNA, 25 bp, Saccharomyces pastorianus
caagggtcgtcaaaacagaagagga

SEQ ID NO: 51154 - DNA, 25 bp, Saccharomyces pastorianus
acaagggtcgtcaaaacagaagagg

SEQ ID NO: 51155 - DNA, 25 bp, Saccharomyces pastorianus
gccgtaacaagggtcgtcaaaacag

SEQ ID NO: 51156 - DNA, 25 bp, Saccharomyces pastorianus
taacaagggtcgtcaaaacagaaga

SEQ ID NO: 51157 - DNA, 25 bp, Saccharomyces pastorianus
gtaacaagggtcgtcaaaacagaag

SEQ ID NO: 51158 - DNA, 25 bp, Saccharomyces pastorianus
aacaagggtcgtcaaaacagaagag

SEQ ID NO: 51159 - DNA, 25 bp, Saccharomyces pastorianus
tcggtggccgtaacaagggtcgtca

SEQ ID NO: 51160 - DNA, 25 bp, Saccharomyces pastorianus
atgggtcccagttaccaagctaggt

SEQ ID NO: 51161 - DNA, 25 bp, Saccharomyces pastorianus
ccaagctaggtagattagtcaaggc

SEQ ID NO: 51162 - DNA, 25 bp, Saccharomyces pastorianus
atgtctgctccagaggctcaacaac

SEQ ID NO: 51163 - DNA, 25 bp, Saccharomyces pastorianus
tgtctgctccagaggctcaacaaca

SEQ ID NO: 51164 - DNA, 25 bp, Saccharomyces pastorianus
caagggtcgtcaaaacagaagagga

SEQ ID NO: 51165 - DNA, 25 bp, Saccharomyces pastorianus
gccgtaacaagggtcgtcaaaacag

SEQ ID NO: 51166 - DNA, 25 bp, Saccharomyces pastorianus
gtaacaagggtcgtcaaaacagaag

SEQ ID NO: 51167 - DNA, 25 bp, Saccharomyces pastorianus
tccagaggctcaacaacaacaaaag

SEQ ID NO: 51168 - DNA, 25 bp, Saccharomyces pastorianus
aacaagggtcgtcaaaacagaagag

SEQ ID NO: 51169 - DNA, 25 bp, Saccharomyces pastorianus
gggatgggtcccagttaccaagcta

SEQ ID NO: 51170 - DNA, 25 bp, Saccharomyces pastorianus
accccagtaacctcttctgattgga

SEQ ID NO: 51171 - DNA, 25 bp, Saccharomyces pastorianus
aataacagacaacttggcaatgatg

SEQ ID NO: 51172 - DNA, 25 bp, Saccharomyces pastorianus
cccagtaacctcttctgattggaat

SEQ ID NO: 51173 - DNA, 25 bp, Saccharomyces pastorianus
tggaataacagacaacttggcaatg

SEQ ID NO: 51174 - DNA, 25 bp, Saccharomyces pastorianus
gaaccccagtaacctcttctgattg

SEQ ID NO: 51175 - DNA, 25 bp, Saccharomyces pastorianus
acttggcaatgatgataccagctct

SEQ ID NO: 51176 - DNA, 25 bp, Saccharomyces pastorianus
gtaacctcttctgattggaataaca

SEQ ID NO: 51177 - DNA, 25 bp, Saccharomyces pastorianus
tggttgacccaagttggaaccccag

SEQ ID NO: 51178 - DNA, 25 bp, Saccharomyces pastorianus
ttggaaccccagtaacctcttctga

SEQ ID NO: 51179 - DNA, 25 bp, Saccharomyces pastorianus
ggaataacagacaacttggcaatga

SEQ ID NO: 51180 - DNA, 25 bp, Saccharomyces pastorianus
gaataacagacaacttggcaatgat

SEQ ID NO: 51181 - DNA, 25 bp, Saccharomyces pastorianus
caagtttggcaacaaagtgtcaatg

SEQ ID NO: 51182 - DNA, 25 bp, Saccharomyces pastorianus
gatttggtattccttgactggccaa

SEQ ID NO: 51183 - DNA, 25 bp, Saccharomyces pastorianus
agtgtcaatgatttggtattccttg

SEQ ID NO: 51184 - DNA, 25 bp, Saccharomyces pastorianus
gtgtcaatgatttggtattccttga

SEQ ID NO: 51185 - DNA, 25 bp, Saccharomyces pastorianus
aatgatttggtattccttgactggc

SEQ ID NO: 51186 - DNA, 25 bp, Saccharomyces pastorianus
tgcaagtttggcaacaaagtgtcaa

SEQ ID NO: 51187 - DNA, 25 bp, Saccharomyces pastorianus
gcaagtttggcaacaaagtgtcaat

SEQ ID NO: 51188 - DNA, 25 bp, Saccharomyces pastorianus
atgatttggtattccttgactggcc

SEQ ID NO: 51189 - DNA, 25 bp, Saccharomyces pastorianus
tgatttggtattccttgactggcca

SEQ ID NO: 51190 - DNA, 25 bp, Saccharomyces pastorianus
tcaatgatttggtattccttgactg

SEQ ID NO: 51191 - DNA, 25 bp, Saccharomyces pastorianus
caatgatttggtattccttgactgg

SEQ ID NO: 51192 - DNA, 25 bp, Saccharomyces pastorianus
tccaaggctggtgacaaggtattct

SEQ ID NO: 51193 - DNA, 25 bp, Saccharomyces pastorianus
gaaccaccaaaaggttccaaggctg

SEQ ID NO: 51194 - DNA, 25 bp, Saccharomyces pastorianus
aacctcatttcaccaccgatagcgg

SEQ ID NO: 51195 - DNA, 25 bp, Saccharomyces pastorianus
ccgatagcggtctggaggttatctt

SEQ ID NO: 51196 - DNA, 25 bp, Saccharomyces pastorianus
aagtccacggccatggtcttgtgtg

SEQ ID NO: 51197 - DNA, 25 bp, Saccharomyces pastorianus
ggtattctttgaaggattcggtgat

SEQ ID NO: 51198 - DNA, 25 bp, Saccharomyces pastorianus
ggccatggtcttgtgtggttctaac

SEQ ID NO: 51199 - DNA, 25 bp, Saccharomyces pastorianus
taaagtcgagtttgtggaaccacca

SEQ ID NO: 51200 - DNA, 25 bp, Saccharomyces pastorianus
tgagaggtatcaagtccacggccat

SEQ ID NO: 51201 - DNA, 25 bp, Saccharomyces pastorianus
ggtgatgaagctccaatgaaacagt

SEQ ID NO: 51202 - DNA, 25 bp, Saccharomyces pastorianus
agtaagaaagttgactaacgccaag

SEQ ID NO: 51203 - DNA, 25 bp, Saccharomyces pastorianus
gattattcacgacattctttcaggt

SEQ ID NO: 51204 - DNA, 25 bp, Saccharomyces pastorianus
cattgccgccttcataatgggtatg

SEQ ID NO: 51205 - DNA, 25 bp, Saccharomyces pastorianus
gttgcatacactttcccgattattc

SEQ ID NO: 51206 - DNA, 25 bp, Saccharomyces pastorianus
ggttaaatttgttgccgttcataat

SEQ ID NO: 51207 - DNA, 25 bp, Saccharomyces pastorianus
acatccaccatttcagtctccattg

SEQ ID NO: 51208 - DNA, 25 bp, Saccharomyces pastorianus
gatacggcaccatctgcaattgggt

SEQ ID NO: 51209 - DNA, 25 bp, Saccharomyces pastorianus
aaatttccagccctcaagacatggt

SEQ ID NO: 51210 - DNA, 25 bp, Saccharomyces pastorianus
cagctgcttcaatgagtgtctacat

SEQ ID NO: 51211 - DNA, 25 bp, Saccharomyces pastorianus
gacatggtccttgctcaaagatacg

SEQ ID NO: 51212 - DNA, 25 bp, Saccharomyces pastorianus
atttttgctgtcacagctgcttcaa

SEQ ID NO: 51213 - DNA, 25 bp, Saccharomyces pastorianus
gtaggaactttcatcgttgcataca

SEQ ID NO: 51214 - DNA, 25 bp, Saccharomyces pastorianus
ggccagatttgtctccaagttggct

SEQ ID NO: 51215 - DNA, 25 bp, Saccharomyces pastorianus
ggaatctgctccagtcattgacacc

SEQ ID NO: 51216 - DNA, 25 bp, Saccharomyces pastorianus
ttgaagtctgcttccaaggaatctg

SEQ ID NO: 51217 - DNA, 25 bp, Saccharomyces pastorianus
gtcaaggccagatttgtctccaagt

SEQ ID NO: 51218 - DNA, 25 bp, Saccharomyces pastorianus
tacttgaagtctgcttccaaggaat

SEQ ID NO: 51219 - DNA, 25 bp, Saccharomyces pastorianus
tctgctccagtcattgacaccttgg

SEQ ID NO: 51220 - DNA, 25 bp, Saccharomyces pastorianus
aaggccagatttgtctccaagttgg

SEQ ID NO: 51221 - DNA, 25 bp, Saccharomyces pastorianus
caaacgtcccagttatcgtcaaggc

SEQ ID NO: 51222 - DNA, 25 bp, Saccharomyces pastorianus
agttatcgtcaaggccagatttgtc

SEQ ID NO: 51223 - DNA, 25 bp, Saccharomyces pastorianus
gtcccagttatcgtcaaggccagat

SEQ ID NO: 51224 - DNA, 25 bp, Saccharomyces pastorianus
atcgtcaaggccagatttgtctcca

SEQ ID NO: 51225 - DNA, 25 bp, Saccharomyces pastorianus
tcctgcaaatattctagcggttctt

SEQ ID NO: 51226 - DNA, 25 bp, Saccharomyces pastorianus
aaggatggacccagcgtctattaga

SEQ ID NO: 51227 - DNA, 25 bp, Saccharomyces pastorianus
acctcatcccaattatcagttagcg

SEQ ID NO: 51228 - DNA, 25 bp, Saccharomyces pastorianus
tgtgggtgacataactcctaacgac

SEQ ID NO: 51229 - DNA, 25 bp, Saccharomyces pastorianus
tcgttcatgatttcgcggagtcact

SEQ ID NO: 51230 - DNA, 25 bp, Saccharomyces pastorianus
tgggttgaccatgatatcgatccat

SEQ ID NO: 51231 - DNA, 25 bp, Saccharomyces pastorianus
gggcttaacttccatgttgattacg

SEQ ID NO: 51232 - DNA, 25 bp, Saccharomyces pastorianus
gttagcgttcttaaacatcgttcaa

SEQ ID NO: 51233 - DNA, 25 bp, Saccharomyces pastorianus
tagcggttctttcgaaacctcatcc

SEQ ID NO: 51234 - DNA, 25 bp, Saccharomyces pastorianus
tttggagcgccatcagtgacattaa

SEQ ID NO: 51235 - DNA, 25 bp, Saccharomyces pastorianus
tgtatcagaattgccctcgttcatg

SEQ ID NO: 51236 - DNA, 25 bp, Saccharomyces pastorianus
acaatttagggcatgactctgttaa

SEQ ID NO: 51237 - DNA, 25 bp, Saccharomyces pastorianus
gcagggtgccgtggcatttcaatca

SEQ ID NO: 51238 - DNA, 25 bp, Saccharomyces pastorianus
agaagcattcgagtgtctacaaaat

SEQ ID NO: 51239 - DNA, 25 bp, Saccharomyces pastorianus
attggtattcaagttgcatcgcaag

SEQ ID NO: 51240 - DNA, 25 bp, Saccharomyces pastorianus
attgacctagactctgtacatgcaa

SEQ ID NO: 51241 - DNA, 25 bp, Saccharomyces pastorianus
taaacttgttgggagcctgaagcag

SEQ ID NO: 51242 - DNA, 25 bp, Saccharomyces pastorianus
gttttcattttcatgatcctcggtt

SEQ ID NO: 51243 - DNA, 25 bp, Saccharomyces pastorianus
gaatgtcagtacgaatcataccaga

SEQ ID NO: 51244 - DNA, 25 bp, Saccharomyces pastorianus
catgatcctcggtttgatgctaaca

SEQ ID NO: 51245 - DNA, 25 bp, Saccharomyces pastorianus
gcatcgcaaggtctgatggacgtta

SEQ ID NO: 51246 - DNA, 25 bp, Saccharomyces pastorianus
gcaacagacgcgtatccacaagagg

SEQ ID NO: 51247 - DNA, 25 bp, Saccharomyces pastorianus
taatcagagcgtaccttcatttccg

SEQ ID NO: 51248 - DNA, 25 bp, Saccharomyces pastorianus
gaaaggtcttctctggccaaaatga

SEQ ID NO: 51249 - DNA, 25 bp, Saccharomyces pastorianus
agtagcatcccctgtgttttttatt

SEQ ID NO: 51250 - DNA, 25 bp, Saccharomyces pastorianus
gagacaaggtcaagcctaccctgta

SEQ ID NO: 51251 - DNA, 25 bp, Saccharomyces pastorianus
ttacctggagctaccgttcatattt

SEQ ID NO: 51252 - DNA, 25 bp, Saccharomyces pastorianus
ataattgctgttggagcgcctccca

SEQ ID NO: 51253 - DNA, 25 bp, Saccharomyces pastorianus
aactccggatattgcgtccaatggc

SEQ ID NO: 51254 - DNA, 25 bp, Saccharomyces pastorianus
aactcttagcgcaaacaggtctcac

SEQ ID NO: 51255 - DNA, 25 bp, Saccharomyces pastorianus
tagaaaagccgctgtcaggcccaat

SEQ ID NO: 51256 - DNA, 25 bp, Saccharomyces pastorianus
atgcctcagcctgttgggatttcca

SEQ ID NO: 51257 - DNA, 25 bp, Saccharomyces pastorianus
ccgcccgtctatagtcattatcaag

SEQ ID NO: 51258 - DNA, 25 bp, Saccharomyces pastorianus
gcgttacctggcatacgtcttgtta

SEQ ID NO: 51259 - DNA, 25 bp, Saccharomyces pastorianus
tatggaacaccattcgttgatgatt

SEQ ID NO: 51260 - DNA, 25 bp, Saccharomyces pastorianus
aagatacctttcgttgcgttacctg

SEQ ID NO: 51261 - DNA, 25 bp, Saccharomyces pastorianus
gattcaattgaggacgcctacactg

SEQ ID NO: 51262 - DNA, 25 bp, Saccharomyces pastorianus
gacagcccttgccagaatatccatt

SEQ ID NO: 51263 - DNA, 25 bp, Saccharomyces pastorianus
acaccgccatatacttcttgcaagg

SEQ ID NO: 51264 - DNA, 25 bp, Saccharomyces pastorianus
ctacactgccttaattctctacaag

SEQ ID NO: 51265 - DNA, 25 bp, Saccharomyces pastorianus
tgatgccgagtttgtctcgttgcaa

SEQ ID NO: 51266 - DNA, 25 bp, Saccharomyces pastorianus
cttcccggtgatctagatcctgaga

SEQ ID NO: 51267 - DNA, 25 bp, Saccharomyces pastorianus
gatacagtggtattcttcccggtga

SEQ ID NO: 51268 - DNA, 25 bp, Saccharomyces pastorianus
cagcttggctgtatatttgtcggac

SEQ ID NO: 51269 - DNA, 25 bp, Saccharomyces pastorianus
tggtacggataactttgattttact

SEQ ID NO: 51270 - DNA, 25 bp, Saccharomyces pastorianus
gccattgacgacaggcaggtttggt

SEQ ID NO: 51271 - DNA, 25 bp, Saccharomyces pastorianus
atgtacgccgcaacgaataaatatg

SEQ ID NO: 51272 - DNA, 25 bp, Saccharomyces pastorianus
gaagtaccaccagcgtatagtagac

SEQ ID NO: 51273 - DNA, 25 bp, Saccharomyces pastorianus
gtatagtagactgccattgacgaca

SEQ ID NO: 51274 - DNA, 25 bp, Saccharomyces pastorianus
attccggattagatccagacgtcga

SEQ ID NO: 51275 - DNA, 25 bp, Saccharomyces pastorianus
attagatccagacgtcgataaccat

SEQ ID NO: 51276 - DNA, 25 bp, Saccharomyces pastorianus
acactgaatattccggattagatcc

SEQ ID NO: 51277 - DNA, 25 bp, Saccharomyces pastorianus
aataaatatgaagtaccaccagcgt

SEQ ID NO: 51278 - DNA, 25 bp, Saccharomyces pastorianus
acgacaggcaggtttggtacggata

SEQ ID NO: 51279 - DNA, 25 bp, Saccharomyces pastorianus
caggcaggtttggtacggataactt

SEQ ID NO: 51280 - DNA, 25 bp, Saccharomyces pastorianus
gcatggcctcatgtagttttcaaaa

SEQ ID NO: 51281 - DNA, 25 bp, Saccharomyces pastorianus
gagttttctttatcacctaatggtg

SEQ ID NO: 51282 - DNA, 25 bp, Saccharomyces pastorianus
ctgttatgatcgttggctctagttc

SEQ ID NO: 51283 - DNA, 25 bp, Saccharomyces pastorianus
gttcacccttgtcagtcaatcaaag

SEQ ID NO: 51284 - DNA, 25 bp, Saccharomyces pastorianus
gagaacacagtacgttcacccttgt

SEQ ID NO: 51285 - DNA, 25 bp, Saccharomyces pastorianus
gaaggcactataccacagctatcag

SEQ ID NO: 51286 - DNA, 25 bp, Saccharomyces pastorianus
ggctctagttctggttcttttgatt

SEQ ID NO: 51287 - DNA, 25 bp, Saccharomyces pastorianus
ggcatatccagactacttcaatgat

SEQ ID NO: 51288 - DNA, 25 bp, Saccharomyces pastorianus
acagctatcaggtaagcctccttta

SEQ ID NO: 51289 - DNA, 25 bp, Saccharomyces pastorianus
gaggctgataaccatctagacacat

SEQ ID NO: 51290 - DNA, 25 bp, Saccharomyces pastorianus
gaatttcccctgttacggtatgatc

SEQ ID NO: 51291 - DNA, 25 bp, Saccharomyces pastorianus
tctagagtcattaacgggcgtacgt

SEQ ID NO: 51292 - DNA, 25 bp, Saccharomyces pastorianus
cttatcatcctttgcccagggaata

SEQ ID NO: 51293 - DNA, 25 bp, Saccharomyces pastorianus
ggatattgtttacacgctttgacat

SEQ ID NO: 51294 - DNA, 25 bp, Saccharomyces pastorianus
gccatcacgggatgtactttccgat

SEQ ID NO: 51295 - DNA, 25 bp, Saccharomyces pastorianus
tgaagctcttgtttccagttaaaat

SEQ ID NO: 51296 - DNA, 25 bp, Saccharomyces pastorianus
aataagtggaatcctcccttcattc

SEQ ID NO: 51297 - DNA, 25 bp, Saccharomyces pastorianus
tcaacaagactattcgccatcacgg

SEQ ID NO: 51298 - DNA, 25 bp, Saccharomyces pastorianus
agtcttttaccgcatatccttatca

SEQ ID NO: 51299 - DNA, 25 bp, Saccharomyces pastorianus
gcgacactttcagtagagtttcttc

SEQ ID NO: 51300 - DNA, 25 bp, Saccharomyces pastorianus
gtattttccaacttgtttattgcca

SEQ ID NO: 51301 - DNA, 25 bp, Saccharomyces pastorianus
gcagagtgttgagcctggagaccaa

SEQ ID NO: 51302 - DNA, 25 bp, Saccharomyces pastorianus
gacactaaactaatagacggcctgg

SEQ ID NO: 51303 - DNA, 25 bp, Saccharomyces pastorianus
ttaactttccgctcaacaggtctaa

SEQ ID NO: 51304 - DNA, 25 bp, Saccharomyces pastorianus
gctccaagagtatttttcttcaagt

SEQ ID NO: 51305 - DNA, 25 bp, Saccharomyces pastorianus
aagccgactttaatgaacaggatca

SEQ ID NO: 51306 - DNA, 25 bp, Saccharomyces pastorianus
atctggctcttacaagccgacttta

SEQ ID NO: 51307 - DNA, 25 bp, Saccharomyces pastorianus
aaattcaccatctggctcttacaag

SEQ ID NO: 51308 - DNA, 25 bp, Saccharomyces pastorianus
acaggtctaatctcacagagactca

SEQ ID NO: 51309 - DNA, 25 bp, Saccharomyces pastorianus
gttggaattggttctagcggaaaat

SEQ ID NO: 51310 - DNA, 25 bp, Saccharomyces pastorianus
gttaatgagggatcaacttcagttg

SEQ ID NO: 51311 - DNA, 25 bp, Saccharomyces pastorianus
gacggcctggataagaaagttaact

SEQ ID NO: 51312 - DNA, 25 bp, Saccharomyces pastorianus
tgcattctctgcttactatatcgat

SEQ ID NO: 51313 - DNA, 25 bp, Saccharomyces pastorianus
agctaccctgatagtcctgcttcaa

SEQ ID NO: 51314 - DNA, 25 bp, Saccharomyces pastorianus
gacagctaccctgatagtcctgctt

SEQ ID NO: 51315 - DNA, 25 bp, Saccharomyces pastorianus
aacagccgtactcaacgtcgtggaa

SEQ ID NO: 51316 - DNA, 25 bp, Saccharomyces pastorianus
aaagtttcttggacagctaccctga

SEQ ID NO: 51317 - DNA, 25 bp, Saccharomyces pastorianus
tgatagtcctgcttcaacagccgta

SEQ ID NO: 51318 - DNA, 25 bp, Saccharomyces pastorianus
atagtcctgcttcaacagccgtact

SEQ ID NO: 51319 - DNA, 25 bp, Saccharomyces pastorianus
ttcttggacagctaccctgatagtc

SEQ ID NO: 51320 - DNA, 25 bp, Saccharomyces pastorianus
taccctgatagtcctgcttcaacag

SEQ ID NO: 51321 - DNA, 25 bp, Saccharomyces pastorianus
gtgaaagtttcttggacagctaccc

SEQ ID NO: 51322 - DNA, 25 bp, Saccharomyces pastorianus
agtttcttggacagctaccctgata

SEQ ID NO: 51323 - DNA, 25 bp, Saccharomyces pastorianus
ttcaacagccgtactcaacgtcgtg

SEQ ID NO: 51324 - DNA, 25 bp, Saccharomyces pastorianus
gtagccgataacctagccaccatgt

SEQ ID NO: 51325 - DNA, 25 bp, Saccharomyces pastorianus
atgtccatccaatatatgctcccag

SEQ ID NO: 51326 - DNA, 25 bp, Saccharomyces pastorianus
tgggtccgttcccttggatccaagg

SEQ ID NO: 51327 - DNA, 25 bp, Saccharomyces pastorianus
tatatgctcccagaagacgactcag

SEQ ID NO: 51328 - DNA, 25 bp, Saccharomyces pastorianus
cgcctggaacgtccgatgaacacat

SEQ ID NO: 51329 - DNA, 25 bp, Saccharomyces pastorianus
actactcctcaagaagtggcactgc

SEQ ID NO: 51330 - DNA, 25 bp, Saccharomyces pastorianus
attatttggtgatcgacactccgcc

SEQ ID NO: 51331 - DNA, 25 bp, Saccharomyces pastorianus
gagaccgtgcacgaatcgaattccg

SEQ ID NO: 51332 - DNA, 25 bp, Saccharomyces pastorianus
tggacacccgtctatgtagccgata

SEQ ID NO: 51333 - DNA, 25 bp, Saccharomyces pastorianus
aagtggcactgctagacgtacgaaa

SEQ ID NO: 51334 - DNA, 25 bp, Saccharomyces pastorianus
actacaggtggtggtgaagcgcttt

SEQ ID NO: 51335 - DNA, 25 bp, Saccharomyces pastorianus
cagaagcttggcactggctgcaatt

SEQ ID NO: 51336 - DNA, 25 bp, Saccharomyces pastorianus
gccgttatcgggtacctggatctag

SEQ ID NO: 51337 - DNA, 25 bp, Saccharomyces pastorianus
ggtgatcatgacatcgctgttctac

SEQ ID NO: 51338 - DNA, 25 bp, Saccharomyces pastorianus
tggctgcaattgaggcctggccaac

SEQ ID NO: 51339 - DNA, 25 bp, Saccharomyces pastorianus
aaagagaagccgtcgccgatgcttg

SEQ ID NO: 51340 - DNA, 25 bp, Saccharomyces pastorianus
atacgaccattgttgacgcggctca

SEQ ID NO: 51341 - DNA, 25 bp, Saccharomyces pastorianus
gatgcttggcactggctgaagttga

SEQ ID NO: 51342 - DNA, 25 bp, Saccharomyces pastorianus
agaagctgacgcttggcattggttg

SEQ ID NO: 51343 - DNA, 25 bp, Saccharomyces pastorianus
tgccagtggcctattattcatcaat

SEQ ID NO: 51344 - DNA, 25 bp, Saccharomyces pastorianus
ttctgtgatttccactattgcccta

SEQ ID NO: 51345 - DNA, 25 bp, Saccharomyces pastorianus
attcagcaattctactgccagtggc

SEQ ID NO: 51346 - DNA, 25 bp, Saccharomyces pastorianus
ggaaatggcaactccagctaataag

SEQ ID NO: 51347 - DNA, 25 bp, Saccharomyces pastorianus
ggcccgcctcacagtaatcatgaaa

SEQ ID NO: 51348 - DNA, 25 bp, Saccharomyces pastorianus
aaatctaccatgtgtgaatcaaact

SEQ ID NO: 51349 - DNA, 25 bp, Saccharomyces pastorianus
caccaaaggttacattcatttccaa

SEQ ID NO: 51350 - DNA, 25 bp, Saccharomyces pastorianus
aacaggatctattctctttccatag

SEQ ID NO: 51351 - DNA, 25 bp, Saccharomyces pastorianus
gggcatacaccatggaaaccctatt

SEQ ID NO: 51352 - DNA, 25 bp, Saccharomyces pastorianus
actttcacactctgcgtgactggaa

SEQ ID NO: 51353 - DNA, 25 bp, Saccharomyces pastorianus
ccagattctccaccaaaggttacat

SEQ ID NO: 51354 - DNA, 25 bp, Saccharomyces pastorianus
gtgaatcaaactacaggcgaggtcc

SEQ ID NO: 51355 - DNA, 25 bp, Saccharomyces pastorianus
tctttccatagagtgtggcccaaac

SEQ ID NO: 51356 - DNA, 25 bp, Saccharomyces pastorianus
ggcgaggtccaaccggactttcaca

SEQ ID NO: 51357 - DNA, 25 bp, Saccharomyces pastorianus
tcaactcccctgttttttagcaact

SEQ ID NO: 51358 - DNA, 25 bp, Saccharomyces pastorianus
gtaaagcggaaactactatccatct

SEQ ID NO: 51359 - DNA, 25 bp, Saccharomyces pastorianus
gacatttgattgctgacttaaacga

SEQ ID NO: 51360 - DNA, 25 bp, Saccharomyces pastorianus
agacttaacgaattgcaacttgaaa

SEQ ID NO: 51361 - DNA, 25 bp, Saccharomyces pastorianus
gtccattcattagtgaccaatttat

SEQ ID NO: 51362 - DNA, 25 bp, Saccharomyces pastorianus
aataccaatttctgtctatgattca

SEQ ID NO: 51363 - DNA, 25 bp, Saccharomyces pastorianus
ttacaactgcgcgatggtccattca

SEQ ID NO: 51364 - DNA, 25 bp, Saccharomyces pastorianus
gaattccagcaagatggtcgagtta

SEQ ID NO: 51365 - DNA, 25 bp, Saccharomyces pastorianus
ggttttccaggcttaagcaggtctt

SEQ ID NO: 51366 - DNA, 25 bp, Saccharomyces pastorianus
ggatgatctcatgaacttatgggtt

SEQ ID NO: 51367 - DNA, 25 bp, Saccharomyces pastorianus
agatagaggtcaactcccctgtttt

SEQ ID NO: 51368 - DNA, 25 bp, Saccharomyces pastorianus
atacaaggccacgattggtgaatta

SEQ ID NO: 51369 - DNA, 25 bp, Saccharomyces pastorianus
aggttcacctagtatggacaataag

SEQ ID NO: 51370 - DNA, 25 bp, Saccharomyces pastorianus
gggtcatctccatttctagaaagtc

SEQ ID NO: 51371 - DNA, 25 bp, Saccharomyces pastorianus
tagaaagtcctaaaggttcacctag

SEQ ID NO: 51372 - DNA, 25 bp, Saccharomyces pastorianus
aagtgacgaaccaatgtgaccattt

SEQ ID NO: 51373 - DNA, 25 bp, Saccharomyces pastorianus
aaggtaaccgtcagattcaagcgct

SEQ ID NO: 51374 - DNA, 25 bp, Saccharomyces pastorianus
gtgaccatttcacgctggaatcgga

SEQ ID NO: 51375 - DNA, 25 bp, Saccharomyces pastorianus
agcaatagcggtgggtcatctccat

SEQ ID NO: 51376 - DNA, 25 bp, Saccharomyces pastorianus
gcagttacagaagcagacgaatatt

SEQ ID NO: 51377 - DNA, 25 bp, Saccharomyces pastorianus
gtctacaagcgacaaggacaaactt

SEQ ID NO: 51378 - DNA, 25 bp, Saccharomyces pastorianus
gattcaagcgctgcaattcaaatta

SEQ ID NO: 51379 - DNA, 25 bp, Saccharomyces pastorianus
ctccttgtcatccaaaagcgtttct

SEQ ID NO: 51380 - DNA, 25 bp, Saccharomyces pastorianus
cacctgggttttcgatttctttgca

SEQ ID NO: 51381 - DNA, 25 bp, Saccharomyces pastorianus
gggactccacacaccaagtttgatg

SEQ ID NO: 51382 - DNA, 25 bp, Saccharomyces pastorianus
gaaatcgcttttagcgggactccac

SEQ ID NO: 51383 - DNA, 25 bp, Saccharomyces pastorianus
gcgtttctaatgctcggcctttaaa

SEQ ID NO: 51384 - DNA, 25 bp, Saccharomyces pastorianus
tcaatctttttcaagcacgggcacc

SEQ ID NO: 51385 - DNA, 25 bp, Saccharomyces pastorianus
tcagggtacacaaaggccatcaata

SEQ ID NO: 51386 - DNA, 25 bp, Saccharomyces pastorianus
aagcaataacaacctgccacctggg

SEQ ID NO: 51387 - DNA, 25 bp, Saccharomyces pastorianus
aaccacttccaaggtcagaggtgaa

SEQ ID NO: 51388 - DNA, 25 bp, Saccharomyces pastorianus
gtagcagccatgaaacccgttagaa

SEQ ID NO: 51389 - DNA, 25 bp, Saccharomyces pastorianus
ctgggcactagaggcttttcaacaa

SEQ ID NO: 51390 - DNA, 25 bp, Saccharomyces pastorianus
atcgattcttacacgtgctcggaca

SEQ ID NO: 51391 - DNA, 25 bp, Saccharomyces pastorianus
ggagagcgtactaaaaccactattt

SEQ ID NO: 51392 - DNA, 25 bp, Saccharomyces pastorianus
aaacgttctgatttcttggagagcg

SEQ ID NO: 51393 - DNA, 25 bp, Saccharomyces pastorianus
acagttcttgttaccgttgctttca

SEQ ID NO: 51394 - DNA, 25 bp, Saccharomyces pastorianus
gaggtgctagattttcccactgtaa

SEQ ID NO: 51395 - DNA, 25 bp, Saccharomyces pastorianus
gggctatttaccaagacaaccagtt

SEQ ID NO: 51396 - DNA, 25 bp, Saccharomyces pastorianus
gccaccgtttgcttgatcgatagtt

SEQ ID NO: 51397 - DNA, 25 bp, Saccharomyces pastorianus
attgcaaatcccgttagctttagag

SEQ ID NO: 51398 - DNA, 25 bp, Saccharomyces pastorianus
cactttatctcaactatcctttcaa

SEQ ID NO: 51399 - DNA, 25 bp, Saccharomyces pastorianus
aagtgctacgaatttcccaatcctt

SEQ ID NO: 51400 - DNA, 25 bp, Saccharomyces pastorianus
gctcggacactattcttcctttgtt

SEQ ID NO: 51401 - DNA, 25 bp, Saccharomyces pastorianus
ggaactaatcaggtgcactattgca

SEQ ID NO: 51402 - DNA, 25 bp, Saccharomyces pastorianus
caacagcgcgtggatattactaata

SEQ ID NO: 51403 - DNA, 25 bp, Saccharomyces pastorianus
attgcagttgttaaccgctctttac

SEQ ID NO: 51404 - DNA, 25 bp, Saccharomyces pastorianus
gagaaatgcgacttcacctggacaa

SEQ ID NO: 51405 - DNA, 25 bp, Saccharomyces pastorianus
gatagccaaaatttagccgccaagt

SEQ ID NO: 51406 - DNA, 25 bp, Saccharomyces pastorianus
ggaacaattccgtattgccctcttc

SEQ ID NO: 51407 - DNA, 25 bp, Saccharomyces pastorianus
tcgaggaggcaggttttccgtcctt

SEQ ID NO: 51408 - DNA, 25 bp, Saccharomyces pastorianus
agttggtatggtctatctgaagcta

SEQ ID NO: 51409 - DNA, 25 bp, Saccharomyces pastorianus
gggccaagacggaatacatgctcat

SEQ ID NO: 51410 - DNA, 25 bp, Saccharomyces pastorianus
acatgctcatttcctcttctaaaat

SEQ ID NO: 51411 - DNA, 25 bp, Saccharomyces pastorianus
aaccgctctttacacgatagccaaa

SEQ ID NO: 51412 - DNA, 25 bp, Saccharomyces pastorianus
gctttaatgaccacggtagtcccgc

SEQ ID NO: 51413 - DNA, 25 bp, Saccharomyces pastorianus
atggctaggcctactgagaacgcta

SEQ ID NO: 51414 - DNA, 25 bp, Saccharomyces pastorianus
aaaatttggcgccacacacagcagc

SEQ ID NO: 51415 - DNA, 25 bp, Saccharomyces pastorianus
ggagccggctatcgtcgagatccaa

SEQ ID NO: 51416 - DNA, 25 bp, Saccharomyces pastorianus
gaagtggactgacgtctttcctggc

SEQ ID NO: 51417 - DNA, 25 bp, Saccharomyces pastorianus
cacagcgcactccaattctaatata

SEQ ID NO: 51418 - DNA, 25 bp, Saccharomyces pastorianus
aaaacaagcgataccctgccaagct

SEQ ID NO: 51419 - DNA, 25 bp, Saccharomyces pastorianus
aacgaacacgggagtgccagtgcca

SEQ ID NO: 51420 - DNA, 25 bp, Saccharomyces pastorianus
aacgacgacaatgacggcggtggca

SEQ ID NO: 51421 - DNA, 25 bp, Saccharomyces pastorianus
aattctgttcattctatcccttcga

SEQ ID NO: 51422 - DNA, 25 bp, Saccharomyces pastorianus
atatactctcaccagggtatcctaa

SEQ ID NO: 51423 - DNA, 25 bp, Saccharomyces pastorianus
gaatcttccaaaccaacctatacaa

SEQ ID NO: 51424 - DNA, 25 bp, Saccharomyces pastorianus
gggcacaccattgggaatcttccaa

SEQ ID NO: 51425 - DNA, 25 bp, Saccharomyces pastorianus
agggcgccagcttctagtggagcta

SEQ ID NO: 51426 - DNA, 25 bp, Saccharomyces pastorianus
aaggaagccatccactagcacacat

SEQ ID NO: 51427 - DNA, 25 bp, Saccharomyces pastorianus
gagaagatatcagtcgcacaagtcg

SEQ ID NO: 51428 - DNA, 25 bp, Saccharomyces pastorianus
aacattccgtatatagggcgccagc

SEQ ID NO: 51429 - DNA, 25 bp, Saccharomyces pastorianus
gtggagctactaacgtacagccccg

SEQ ID NO: 51430 - DNA, 25 bp, Saccharomyces pastorianus
agtcgagacctgcttttgttaataa

SEQ ID NO: 51431 - DNA, 25 bp, Saccharomyces pastorianus
acttcgcttcttttgttaggcaact

SEQ ID NO: 51432 - DNA, 25 bp, Saccharomyces pastorianus
aatactttgttgtcttctaagctac

SEQ ID NO: 51433 - DNA, 25 bp, Saccharomyces pastorianus
tctccttcctttttcaatgactcaa

SEQ ID NO: 51434 - DNA, 25 bp, Saccharomyces pastorianus
ttcgctagtatacttagggacatgc

SEQ ID NO: 51435 - DNA, 25 bp, Saccharomyces pastorianus
tcgctagtatacttagggacatgct

SEQ ID NO: 51436 - DNA, 25 bp, Saccharomyces pastorianus
tggttaacgctggtgtaatgcgcgt

SEQ ID NO: 51437 - DNA, 25 bp, Saccharomyces pastorianus
gatagaggaggatctcttcgctagt

SEQ ID NO: 51438 - DNA, 25 bp, Saccharomyces pastorianus
atgcgcgttttcatccagatagagg

SEQ ID NO: 51439 - DNA, 25 bp, Saccharomyces pastorianus
gtgtaatgcgcgttttcatccagat

SEQ ID NO: 51440 - DNA, 25 bp, Saccharomyces pastorianus
ctagtatacttagggacatgctgtg

SEQ ID NO: 51441 - DNA, 25 bp, Saccharomyces pastorianus
gctagtatacttagggacatgctgt

SEQ ID NO: 51442 - DNA, 25 bp, Saccharomyces pastorianus
gttaacgctggtgtaatgcgcgttt

SEQ ID NO: 51443 - DNA, 25 bp, Saccharomyces pastorianus
tagtatacttagggacatgctgtgt

SEQ ID NO: 51444 - DNA, 25 bp, Saccharomyces pastorianus
cttcgctagtatacttagggacatg

SEQ ID NO: 51445 - DNA, 25 bp, Saccharomyces pastorianus
cagtgaacacagttttggcctccgg

SEQ ID NO: 51446 - DNA, 25 bp, Saccharomyces pastorianus
tctttcaagacctttggagcagcct

SEQ ID NO: 51447 - DNA, 25 bp, Saccharomyces pastorianus
gtcgaaagaatccaacttcacagtg

SEQ ID NO: 51448 - DNA, 25 bp, Saccharomyces pastorianus
gaatttcttagcttcaactagtgag

SEQ ID NO: 51449 - DNA, 25 bp, Saccharomyces pastorianus
gtgagagacctagtaaacctttgac

SEQ ID NO: 51450 - DNA, 25 bp, Saccharomyces pastorianus
acagttttggcctccggcttggctt

SEQ ID NO: 51451 - DNA, 25 bp, Saccharomyces pastorianus
agctgagcctgctgcgttaccagca

SEQ ID NO: 51452 - DNA, 25 bp, Saccharomyces pastorianus
gtaaacctttgacttctttgatgac

SEQ ID NO: 51453 - DNA, 25 bp, Saccharomyces pastorianus
ggagcagcctcgacgaatttcttag

SEQ ID NO: 51454 - DNA, 25 bp, Saccharomyces pastorianus
gacttctttgatgactttagccttg

SEQ ID NO: 51455 - DNA, 25 bp, Saccharomyces pastorianus
tttagccttggtctttgcgtcgaaa

SEQ ID NO: 51456 - DNA, 25 bp, Saccharomyces pastorianus
tccattggagactatcgagccgtat

SEQ ID NO: 51457 - DNA, 25 bp, Saccharomyces pastorianus
atcgagccgtatgtcgctggcgaaa

SEQ ID NO: 51458 - DNA, 25 bp, Saccharomyces pastorianus
tgggctactgccattgaccaaagca

SEQ ID NO: 51459 - DNA, 25 bp, Saccharomyces pastorianus
gttatggctgccgttatggtatttt

SEQ ID NO: 51460 - DNA, 25 bp, Saccharomyces pastorianus
taaggcctgctgttcccattcaatg

SEQ ID NO: 51461 - DNA, 25 bp, Saccharomyces pastorianus
tagaatcattcaaagccagccatac

SEQ ID NO: 51462 - DNA, 25 bp, Saccharomyces pastorianus
attacccttgggaaatgcttggagt

SEQ ID NO: 51463 - DNA, 25 bp, Saccharomyces pastorianus
aatgcttggagtttcgctctttaat

SEQ ID NO: 51464 - DNA, 25 bp, Saccharomyces pastorianus
atttttgacctccatttcatcatcc

SEQ ID NO: 51465 - DNA, 25 bp, Saccharomyces pastorianus
gctctttaatttcctcttgcacatg

SEQ ID NO: 51466 - DNA, 25 bp, Saccharomyces pastorianus
aagggtcctccctaatgatccatgg

SEQ ID NO: 51467 - DNA, 25 bp, Saccharomyces pastorianus
gaaaaaatcactccctttctgtctt

SEQ ID NO: 51468 - DNA, 25 bp, Saccharomyces pastorianus
aatgccgtcggtctaactggtgatg

SEQ ID NO: 51469 - DNA, 25 bp, Saccharomyces pastorianus
tataaactctgcattgagccccttc

SEQ ID NO: 51470 - DNA, 25 bp, Saccharomyces pastorianus
aaggcgttggcgcaaactctctacg

SEQ ID NO: 51471 - DNA, 25 bp, Saccharomyces pastorianus
ctgccgttcggtctggattttaaag

SEQ ID NO: 51472 - DNA, 25 bp, Saccharomyces pastorianus
gcacgtgcttgtagctacagaccta

SEQ ID NO: 51473 - DNA, 25 bp, Saccharomyces pastorianus
gttgttctctacgacgtgccgaaaa

SEQ ID NO: 51474 - DNA, 25 bp, Saccharomyces pastorianus
tggccagaggcctcaacttcaaagg

SEQ ID NO: 51475 - DNA, 25 bp, Saccharomyces pastorianus
acgatgacactgaacccgggtttga

SEQ ID NO: 51476 - DNA, 25 bp, Saccharomyces pastorianus
aaaaagaagtccctgcacgtgcttg

SEQ ID NO: 51477 - DNA, 25 bp, Saccharomyces pastorianus
aatctcgcagttaaggcctccagag

SEQ ID NO: 51478 - DNA, 25 bp, Saccharomyces pastorianus
agtacgtgggtacgcacaacttcca

SEQ ID NO: 51479 - DNA, 25 bp, Saccharomyces pastorianus
cgcgactacgtggatctcttgagca

SEQ ID NO: 51480 - DNA, 25 bp, Saccharomyces pastorianus
gtgttcgcgcagtacaacagcaagc

SEQ ID NO: 51481 - DNA, 25 bp, Saccharomyces pastorianus
aggacgagcctttaacgcgcgacta

SEQ ID NO: 51482 - DNA, 25 bp, Saccharomyces pastorianus
gattcggcgcgcaaccagatgagga

SEQ ID NO: 51483 - DNA, 25 bp, Saccharomyces pastorianus
gaatgccagatctacactgcggtgg

SEQ ID NO: 51484 - DNA, 25 bp, Saccharomyces pastorianus
gagggcaaagctgctcgctctcgag

SEQ ID NO: 51485 - DNA, 25 bp, Saccharomyces pastorianus
aggaagtcgtagtagcaccggccgc

SEQ ID NO: 51486 - DNA, 25 bp, Saccharomyces pastorianus
atgctgcaccagatccggcggatgg

SEQ ID NO: 51487 - DNA, 25 bp, Saccharomyces pastorianus
tcgaggccgcgatgcagcagtacgt

SEQ ID NO: 51488 - DNA, 25 bp, Saccharomyces pastorianus
gagcgccaagcggtacatcaaggaa

SEQ ID NO: 51489 - DNA, 25 bp, Saccharomyces pastorianus
ggaaatgatcatctcttctccatca

SEQ ID NO: 51490 - DNA, 25 bp, Saccharomyces pastorianus
aaagaagtctttgtcaccgatggtg

SEQ ID NO: 51491 - DNA, 25 bp, Saccharomyces pastorianus
tgatcatctcttctccatcagacgg

SEQ ID NO: 51492 - DNA, 25 bp, Saccharomyces pastorianus
gaagtctttgtcaccgatggtgaaa

SEQ ID NO: 51493 - DNA, 25 bp, Saccharomyces pastorianus
ctcttccgatttgttggtcttattg

SEQ ID NO: 51494 - DNA, 25 bp, Saccharomyces pastorianus
gacggccaagtcaaagaagtctttg

SEQ ID NO: 51495 - DNA, 25 bp, Saccharomyces pastorianus
aaatgatcatctcttctccatcaga

SEQ ID NO: 51496 - DNA, 25 bp, Saccharomyces pastorianus
aaatgtggactcttccgatttgttg

SEQ ID NO: 51497 - DNA, 25 bp, Saccharomyces pastorianus
ggactcttccgatttgttggtctta

SEQ ID NO: 51498 - DNA, 25 bp, Saccharomyces pastorianus
ttctccatcagacggccaagtcaaa

SEQ ID NO: 51499 - DNA, 25 bp, Saccharomyces pastorianus
atgtggactcttccgatttgttggt

SEQ ID NO: 51500 - DNA, 25 bp, Saccharomyces pastorianus
aatacggtgacttgtcagtactacc

SEQ ID NO: 51501 - DNA, 25 bp, Saccharomyces pastorianus
aaatccgcgttgctgatagatcaca

SEQ ID NO: 51502 - DNA, 25 bp, Saccharomyces pastorianus
agttgacatgtcgtccaggtttgga

SEQ ID NO: 51503 - DNA, 25 bp, Saccharomyces pastorianus
agctaactctttggatttccctgac

SEQ ID NO: 51504 - DNA, 25 bp, Saccharomyces pastorianus
ttcttgtctccgctagatacagatg

SEQ ID NO: 51505 - DNA, 25 bp, Saccharomyces pastorianus
gttgttggtgacttggcccaattca

SEQ ID NO: 51506 - DNA, 25 bp, Saccharomyces pastorianus
gaatgtgacgttgcctcttacaata

SEQ ID NO: 51507 - DNA, 25 bp, Saccharomyces pastorianus
gaaactgtcacccaatcaaaggcgg

SEQ ID NO: 51508 - DNA, 25 bp, Saccharomyces pastorianus
gacttggcccaattcatggtttcaa

SEQ ID NO: 51509 - DNA, 25 bp, Saccharomyces pastorianus
acgtcaaacgtctagctaactcttt

SEQ ID NO: 51510 - DNA, 25 bp, Saccharomyces pastorianus
accaaccaaatgtttcttgtctccg

SEQ ID NO: 51511 - DNA, 25 bp, Saccharomyces pastorianus
gggtcaaataatctcgttgcaatta

SEQ ID NO: 51512 - DNA, 25 bp, Saccharomyces pastorianus
actttgatgttgtttgttagcccag

SEQ ID NO: 51513 - DNA, 25 bp, Saccharomyces pastorianus
cggctccaaataccaagactaaagt

SEQ ID NO: 51514 - DNA, 25 bp, Saccharomyces pastorianus
gcttcgaagctctataacgctgcaa

SEQ ID NO: 51515 - DNA, 25 bp, Saccharomyces pastorianus
ttataaactgcataccggctccaaa

SEQ ID NO: 51516 - DNA, 25 bp, Saccharomyces pastorianus
aacgctgcaatgtcttgtggcttca

SEQ ID NO: 51517 - DNA, 25 bp, Saccharomyces pastorianus
gtttgttagcccagaatatgtaagt

SEQ ID NO: 51518 - DNA, 25 bp, Saccharomyces pastorianus
tgtagagacttccagatagcttcga

SEQ ID NO: 51519 - DNA, 25 bp, Saccharomyces pastorianus
atgagccgttcatattgcatgtcaa

SEQ ID NO: 51520 - DNA, 25 bp, Saccharomyces pastorianus
ttaaactggatgtgccaatcggcta

SEQ ID NO: 51521 - DNA, 25 bp, Saccharomyces pastorianus
caatcggctatttggatgagagttc

SEQ ID NO: 51522 - DNA, 25 bp, Saccharomyces pastorianus
gaacttgacccgtggtatcaaccta

SEQ ID NO: 51523 - DNA, 25 bp, Saccharomyces pastorianus
gatccagtgcttttaagaccaggta

SEQ ID NO: 51524 - DNA, 25 bp, Saccharomyces pastorianus
tgagggttcccgtatggttcgtgaa

SEQ ID NO: 51525 - DNA, 25 bp, Saccharomyces pastorianus
gaaatcgattcgatcgggtccaccc

SEQ ID NO: 51526 - DNA, 25 bp, Saccharomyces pastorianus
aagctggtatgtttgccctaagaga

SEQ ID NO: 51527 - DNA, 25 bp, Saccharomyces pastorianus
agttcatcagagtcagtggtgccga

SEQ ID NO: 51528 - DNA, 25 bp, Saccharomyces pastorianus
atgctccttccattatcttcatgga

SEQ ID NO: 51529 - DNA, 25 bp, Saccharomyces pastorianus
atagaaagatcgagttccctcctcc

SEQ ID NO: 51530 - DNA, 25 bp, Saccharomyces pastorianus
gaatacacgtcacccaagaggattt

SEQ ID NO: 51531 - DNA, 25 bp, Saccharomyces pastorianus
gttcgtgaactgtttgtgatggcca

SEQ ID NO: 51532 - DNA, 25 bp, Saccharomyces pastorianus
gctcatcacaccgactgtaagttca

SEQ ID NO: 51533 - DNA, 25 bp, Saccharomyces pastorianus
tggtatcaagccttattttgaacaa

SEQ ID NO: 51534 - DNA, 25 bp, Saccharomyces pastorianus
gagacagacataaagatccgctcca

SEQ ID NO: 51535 - DNA, 25 bp, Saccharomyces pastorianus
caagagacagacataaagatccgct

SEQ ID NO: 51536 - DNA, 25 bp, Saccharomyces pastorianus
ggtatcaagccttattttgaacaaa

SEQ ID NO: 51537 - DNA, 25 bp, Saccharomyces pastorianus
caaaagatccaagagacagacataa

SEQ ID NO: 51538 - DNA, 25 bp, Saccharomyces pastorianus
cacgaaagtggtatcaagccttatt

SEQ ID NO: 51539 - DNA, 25 bp, Saccharomyces pastorianus
gctccaaaacagagaactgtgcgcc

SEQ ID NO: 51540 - DNA, 25 bp, Saccharomyces pastorianus
caaaacagagaactgtgcgccgact

SEQ ID NO: 51541 - DNA, 25 bp, Saccharomyces pastorianus
agacataaagatccgctccaaaaca

SEQ ID NO: 51542 - DNA, 25 bp, Saccharomyces pastorianus
tatcaagccttattttgaacaaaag

SEQ ID NO: 51543 - DNA, 25 bp, Saccharomyces pastorianus
tgaacaaaagatccaagagacagac

SEQ ID NO: 51544 - DNA, 25 bp, Saccharomyces pastorianus
ttgaaagtgcccctagacgcatttt

SEQ ID NO: 51545 - DNA, 25 bp, Saccharomyces pastorianus
ctagccccactgaatgcatacgaat

SEQ ID NO: 51546 - DNA, 25 bp, Saccharomyces pastorianus
aggcatgtccatcgaaactgtcata

SEQ ID NO: 51547 - DNA, 25 bp, Saccharomyces pastorianus
ggctcgggcgtagaacacaacatca

SEQ ID NO: 51548 - DNA, 25 bp, Saccharomyces pastorianus
tgagcaagttcttctccttccaata

SEQ ID NO: 51549 - DNA, 25 bp, Saccharomyces pastorianus
gcgcaagatccagtaccggacttga

SEQ ID NO: 51550 - DNA, 25 bp, Saccharomyces pastorianus
ggctcagaaacgtcacaggcatgtc

SEQ ID NO: 51551 - DNA, 25 bp, Saccharomyces pastorianus
gtctccgagggctatgaatccagta

SEQ ID NO: 51552 - DNA, 25 bp, Saccharomyces pastorianus
ggacttgagagactggctagcccca

SEQ ID NO: 51553 - DNA, 25 bp, Saccharomyces pastorianus
atacgaatgcgacgatgtccccgtt

SEQ ID NO: 51554 - DNA, 25 bp, Saccharomyces pastorianus
gttccagcccagaattcatttgaaa

SEQ ID NO: 51555 - DNA, 25 bp, Saccharomyces pastorianus
gaaagtggttaatggttcatccgcg

SEQ ID NO: 51556 - DNA, 25 bp, Saccharomyces pastorianus
ccgcggatcttgtttgcaattggta

SEQ ID NO: 51557 - DNA, 25 bp, Saccharomyces pastorianus
gatcttgtttgcaattggtagtagg

SEQ ID NO: 51558 - DNA, 25 bp, Saccharomyces pastorianus
gcggatcttgtttgcaattggtagt

SEQ ID NO: 51559 - DNA, 25 bp, Saccharomyces pastorianus
tcatccgcggatcttgtttgcaatt

SEQ ID NO: 51560 - DNA, 25 bp, Saccharomyces pastorianus
ttaatggttcatccgcggatcttgt

SEQ ID NO: 51561 - DNA, 25 bp, Saccharomyces pastorianus
tgcttcacaagtacagaaagtggtt

SEQ ID NO: 51562 - DNA, 25 bp, Saccharomyces pastorianus
gtggttaatggttcatccgcggatc

SEQ ID NO: 51563 - DNA, 25 bp, Saccharomyces pastorianus
ggttaatggttcatccgcggatctt

SEQ ID NO: 51564 - DNA, 25 bp, Saccharomyces pastorianus
atccgcggatcttgtttgcaattgg

SEQ ID NO: 51565 - DNA, 25 bp, Saccharomyces pastorianus
gttcatccgcggatcttgtttgcaa

SEQ ID NO: 51566 - DNA, 25 bp, Saccharomyces pastorianus
gacccatcactaattacacccagag

SEQ ID NO: 51567 - DNA, 25 bp, Saccharomyces pastorianus
taaactcaaagcctaacgttctgga

SEQ ID NO: 51568 - DNA, 25 bp, Saccharomyces pastorianus
taacgacaagatcgatgcgcacatc

SEQ ID NO: 51569 - DNA, 25 bp, Saccharomyces pastorianus
gtcttgggacaacaggcaacctaac

SEQ ID NO: 51570 - DNA, 25 bp, Saccharomyces pastorianus
gaaactatgctcagtcttgggacaa

SEQ ID NO: 51571 - DNA, 25 bp, Saccharomyces pastorianus
gaaattctcgaatggacccatcact

SEQ ID NO: 51572 - DNA, 25 bp, Saccharomyces pastorianus
gcgtcgctcgttcgatgaaattctc

SEQ ID NO: 51573 - DNA, 25 bp, Saccharomyces pastorianus
ggagaacttctccagtatatgctaa

SEQ ID NO: 51574 - DNA, 25 bp, Saccharomyces pastorianus
tacacccagagtttgaggagaactt

SEQ ID NO: 51575 - DNA, 25 bp, Saccharomyces pastorianus
gatgcgcacatcaaagttcaaaaac

SEQ ID NO: 51576 - DNA, 25 bp, Saccharomyces pastorianus
gaaacaaggttttggcgtcgctcgt

SEQ ID NO: 51577 - DNA, 25 bp, Saccharomyces pastorianus
cggtaagttattcagagtcggtgtt

SEQ ID NO: 51578 - DNA, 25 bp, Saccharomyces pastorianus
gtctactacttccaaggtggtaaca

SEQ ID NO: 51579 - DNA, 25 bp, Saccharomyces pastorianus
gtggtaacaacgaattgggtactgc

SEQ ID NO: 51580 - DNA, 25 bp, Saccharomyces pastorianus
aagactaaggtctactacttccaag

SEQ ID NO: 51581 - DNA, 25 bp, Saccharomyces pastorianus
tactacttccaaggtggtaacaacg

SEQ ID NO: 51582 - DNA, 25 bp, Saccharomyces pastorianus
ttgtccaagactaaggtctactact

SEQ ID NO: 51583 - DNA, 25 bp, Saccharomyces pastorianus
cggtgttgtctctattttggaagct

SEQ ID NO: 51584 - DNA, 25 bp, Saccharomyces pastorianus
gactaaggtctactacttccaaggt

SEQ ID NO: 51585 - DNA, 25 bp, Saccharomyces pastorianus
taaggtctactacttccaaggtggt

SEQ ID NO: 51586 - DNA, 25 bp, Saccharomyces pastorianus
tgttgtctctattttggaagctggt

SEQ ID NO: 51587 - DNA, 25 bp, Saccharomyces pastorianus
agtcggtgttgtctctattttggaa

SEQ ID NO: 51588 - DNA, 25 bp, Saccharomyces pastorianus
atgattactggaaagaacctggtca

SEQ ID NO: 51589 - DNA, 25 bp, Saccharomyces pastorianus
tactggaaagaacctggtcaatacg

SEQ ID NO: 51590 - DNA, 25 bp, Saccharomyces pastorianus
attactggaaagaacctggtcaata

SEQ ID NO: 51591 - DNA, 25 bp, Saccharomyces pastorianus
gattactggaaagaacctggtcaat

SEQ ID NO: 51592 - DNA, 25 bp, Saccharomyces pastorianus
aagaacctggtcaatacggtatcga

SEQ ID NO: 51593 - DNA, 25 bp, Saccharomyces pastorianus
cgacttataatgattactggaaaga

SEQ ID NO: 51594 - DNA, 25 bp, Saccharomyces pastorianus
ggaaagaacctggtcaatacggtat

SEQ ID NO: 51595 - DNA, 25 bp, Saccharomyces pastorianus
agaacctggtcaatacggtatcgaa

SEQ ID NO: 51596 - DNA, 25 bp, Saccharomyces pastorianus
gaaagaacctggtcaatacggtatc

SEQ ID NO: 51597 - DNA, 25 bp, Saccharomyces pastorianus
aaagaacctggtcaatacggtatcg

SEQ ID NO: 51598 - DNA, 25 bp, Saccharomyces pastorianus
ctggaaagaacctggtcaatacggt

SEQ ID NO: 51599 - DNA, 25 bp, Saccharomyces pastorianus
actaccactcaggttattgttgccc

SEQ ID NO: 51600 - DNA, 25 bp, Saccharomyces pastorianus
cttctactttgcaactagcttctac

SEQ ID NO: 51601 - DNA, 25 bp, Saccharomyces pastorianus
aacagatttctactctactaccact

SEQ ID NO: 51602 - DNA, 25 bp, Saccharomyces pastorianus
agaaggtgtcaacccaaccgctgaa

SEQ ID NO: 51603 - DNA, 25 bp, Saccharomyces pastorianus
atgtcgcaggtgattcgcaaaccca

SEQ ID NO: 51604 - DNA, 25 bp, Saccharomyces pastorianus
gtgttaccttcaccacaactttaat

SEQ ID NO: 51605 - DNA, 25 bp, Saccharomyces pastorianus
aggttcaagaaactacgcccgctct

SEQ ID NO: 51606 - DNA, 25 bp, Saccharomyces pastorianus
gctacagagtttctatcatcgctat

SEQ ID NO: 51607 - DNA, 25 bp, Saccharomyces pastorianus
gccagtcctgcccaagagagaaatt

SEQ ID NO: 51608 - DNA, 25 bp, Saccharomyces pastorianus
tatgcttaacctatctagcctctgc

SEQ ID NO: 51609 - DNA, 25 bp, Saccharomyces pastorianus
ttctcatcaagctgctgcgacaact

SEQ ID NO: 51610 - DNA, 25 bp, Saccharomyces pastorianus
aaagaattcgtgtgccatgagggtt

SEQ ID NO: 51611 - DNA, 25 bp, Saccharomyces pastorianus
attcgggctgctgtcgttatcaaga

SEQ ID NO: 51612 - DNA, 25 bp, Saccharomyces pastorianus
attaaagcttatccccaaagactcg

SEQ ID NO: 51613 - DNA, 25 bp, Saccharomyces pastorianus
gagatactactaccctgaggtcact

SEQ ID NO: 51614 - DNA, 25 bp, Saccharomyces pastorianus
tcaattacttgtgccttgatgcaat

SEQ ID NO: 51615 - DNA, 25 bp, Saccharomyces pastorianus
aaattgttgccttgatgagtgactc

SEQ ID NO: 51616 - DNA, 25 bp, Saccharomyces pastorianus
gggttatatctctttgttgccattt

SEQ ID NO: 51617 - DNA, 25 bp, Saccharomyces pastorianus
gtgatgccaagaagctgtaccaaag

SEQ ID NO: 51618 - DNA, 25 bp, Saccharomyces pastorianus
tacagtcccgtagacggtcacggta

SEQ ID NO: 51619 - DNA, 25 bp, Saccharomyces pastorianus
gcgctgagcatttcactggttggac

SEQ ID NO: 51620 - DNA, 25 bp, Saccharomyces pastorianus
gctactgtgacatcagcatcgattt

SEQ ID NO: 51621 - DNA, 25 bp, Saccharomyces pastorianus
tactgggacgaaggtttccatcttt

SEQ ID NO: 51622 - DNA, 25 bp, Saccharomyces pastorianus
gataccgagtattttgaccattaga

SEQ ID NO: 51623 - DNA, 25 bp, Saccharomyces pastorianus
gaggagggtccattcgatttattta

SEQ ID NO: 51624 - DNA, 25 bp, Saccharomyces pastorianus
ggaaatttgccttggaaacactatc

SEQ ID NO: 51625 - DNA, 25 bp, Saccharomyces pastorianus
atacgatttcgatcttgcctttgaa

SEQ ID NO: 51626 - DNA, 25 bp, Saccharomyces pastorianus
ttttccacgtggattctactgggac

SEQ ID NO: 51627 - DNA, 25 bp, Saccharomyces pastorianus
aactcagagtatttccactagggaa

SEQ ID NO: 51628 - DNA, 25 bp, Saccharomyces pastorianus
atttatttaccagcattccgagccg

SEQ ID NO: 51629 - DNA, 25 bp, Saccharomyces pastorianus
gagggattggctacttccatgggaa

SEQ ID NO: 51630 - DNA, 25 bp, Saccharomyces pastorianus
gttcgacgagagtcaatttgccgag

SEQ ID NO: 51631 - DNA, 25 bp, Saccharomyces pastorianus
gaacgtccagctgatttgataccga

SEQ ID NO: 51632 - DNA, 25 bp, Saccharomyces pastorianus
actctgtttccgctgggttagatta

SEQ ID NO: 51633 - DNA, 25 bp, Saccharomyces pastorianus
cacgggtatgttctcgccatttgaa

SEQ ID NO: 51634 - DNA, 25 bp, Saccharomyces pastorianus
tggaagtccactggccgtgctgaat

SEQ ID NO: 51635 - DNA, 25 bp, Saccharomyces pastorianus
caaggaacaattcgccgccatgaac

SEQ ID NO: 51636 - DNA, 25 bp, Saccharomyces pastorianus
gtaaactacctgatgctgtcgttgc

SEQ ID NO: 51637 - DNA, 25 bp, Saccharomyces pastorianus
aagtgttgccgaagtcttgccaaaa

SEQ ID NO: 51638 - DNA, 25 bp, Saccharomyces pastorianus
gatgcctctgttaagctattgggtg

SEQ ID NO: 51639 - DNA, 25 bp, Saccharomyces pastorianus
tgaattcattgcagccaccgatgct

SEQ ID NO: 51640 - DNA, 25 bp, Saccharomyces pastorianus
cggtgtcaagacctatgtcctgcaa

SEQ ID NO: 51641 - DNA, 25 bp, Saccharomyces pastorianus
tgctcaagctctactcggattcaaa

SEQ ID NO: 51642 - DNA, 25 bp, Saccharomyces pastorianus
ttgcatgtgtcggtggcggttccaa

SEQ ID NO: 51643 - DNA, 25 bp, Saccharomyces pastorianus
aaggaactggattctctggacctca

SEQ ID NO: 51644 - DNA, 25 bp, Saccharomyces pastorianus
acagcaatggcaaggaactggattc

SEQ ID NO: 51645 - DNA, 25 bp, Saccharomyces pastorianus
ggaactggattctctggacctcaac

SEQ ID NO: 51646 - DNA, 25 bp, Saccharomyces pastorianus
tgaacaccgtgaacagcaatggcaa

SEQ ID NO: 51647 - DNA, 25 bp, Saccharomyces pastorianus
ggcatgaacaccgtgaacagcaatg

SEQ ID NO: 51648 - DNA, 25 bp, Saccharomyces pastorianus
actggattctctggacctcaacaac

SEQ ID NO: 51649 - DNA, 25 bp, Saccharomyces pastorianus
atgggcatgaacaccgtgaacagca

SEQ ID NO: 51650 - DNA, 25 bp, Saccharomyces pastorianus
ggattctctggacctcaacaacctg

SEQ ID NO: 51651 - DNA, 25 bp, Saccharomyces pastorianus
gcaatggcaaggaactggattctct

SEQ ID NO: 51652 - DNA, 25 bp, Saccharomyces pastorianus
gcaaggaactggattctctggacct

SEQ ID NO: 51653 - DNA, 25 bp, Saccharomyces pastorianus
tggcaaggaactggattctctggac

SEQ ID NO: 51654 - DNA, 25 bp, Saccharomyces pastorianus
tgaactcccttttcaggccaagaaa

SEQ ID NO: 51655 - DNA, 25 bp, Saccharomyces pastorianus
aaacgatgttctgggcagcgtgatc

SEQ ID NO: 51656 - DNA, 25 bp, Saccharomyces pastorianus
taacgagttgagtcgcggtggcctc

SEQ ID NO: 51657 - DNA, 25 bp, Saccharomyces pastorianus
caagatatgcgacgactgcctggtc

SEQ ID NO: 51658 - DNA, 25 bp, Saccharomyces pastorianus
atctggactcacaggcgaacttcat

SEQ ID NO: 51659 - DNA, 25 bp, Saccharomyces pastorianus
tactgccacaaaccatttactctgt

SEQ ID NO: 51660 - DNA, 25 bp, Saccharomyces pastorianus
cgcccatccaggtgagatcgtacga

SEQ ID NO: 51661 - DNA, 25 bp, Saccharomyces pastorianus
gcgacggcgccgacaatgaagacga

SEQ ID NO: 51662 - DNA, 25 bp, Saccharomyces pastorianus
actggatcccggacagcaagcggaa

SEQ ID NO: 51663 - DNA, 25 bp, Saccharomyces pastorianus
gaaggtccgcaactactacaagaac

SEQ ID NO: 51664 - DNA, 25 bp, Saccharomyces pastorianus
aacgacggcggcacgttgtgcaaga

SEQ ID NO: 51665 - DNA, 25 bp, Saccharomyces pastorianus
gggcccaagaaccatgactaccgag

SEQ ID NO: 51666 - DNA, 25 bp, Saccharomyces pastorianus
gatgcggacacggtgacgtctccca

SEQ ID NO: 51667 - DNA, 25 bp, Saccharomyces pastorianus
gactgcgttgcacagtgtggccaaa

SEQ ID NO: 51668 - DNA, 25 bp, Saccharomyces pastorianus
tgacgtctcccatcacgttcgagaa

SEQ ID NO: 51669 - DNA, 25 bp, Saccharomyces pastorianus
aggacatcggcacactcggaacaga

SEQ ID NO: 51670 - DNA, 25 bp, Saccharomyces pastorianus
agagcattttgagtagcatctcgct

SEQ ID NO: 51671 - DNA, 25 bp, Saccharomyces pastorianus
agtcgatggtgaaccagcaccggca

SEQ ID NO: 51672 - DNA, 25 bp, Saccharomyces pastorianus
agcaccggcagcaggaaggctcgac

SEQ ID NO: 51673 - DNA, 25 bp, Saccharomyces pastorianus
cggcacactcggaacagagcatttt

SEQ ID NO: 51674 - DNA, 25 bp, Saccharomyces pastorianus
gtagcatctcgctcaagtcgatggt

SEQ ID NO: 51675 - DNA, 25 bp, Saccharomyces pastorianus
agcagaaggtggtgcccaggacatc

SEQ ID NO: 51676 - DNA, 25 bp, Saccharomyces pastorianus
aaccagagcttctacaaagtcaaga

SEQ ID NO: 51677 - DNA, 25 bp, Saccharomyces pastorianus
gatgacgtccaaggtaggtctttga

SEQ ID NO: 51678 - DNA, 25 bp, Saccharomyces pastorianus
aaatgatcacctcacaagacgtccc

SEQ ID NO: 51679 - DNA, 25 bp, Saccharomyces pastorianus
tctttgaaagacgttggtgacctaa

SEQ ID NO: 51680 - DNA, 25 bp, Saccharomyces pastorianus
ggtgacctaaccagagcttctacaa

SEQ ID NO: 51681 - DNA, 25 bp, Saccharomyces pastorianus
aattgttcaacggtggtcaagctac

SEQ ID NO: 51682 - DNA, 25 bp, Saccharomyces pastorianus
ctttgatgaagtgtttacgtccgaa

SEQ ID NO: 51683 - DNA, 25 bp, Saccharomyces pastorianus
ggatttcccacaattgttcaacggt

SEQ ID NO: 51684 - DNA, 25 bp, Saccharomyces pastorianus
aaactcgttactgtacaagatgtcc

SEQ ID NO: 51685 - DNA, 25 bp, Saccharomyces pastorianus
gtcaagctaccgacagagtacgtca

SEQ ID NO: 51686 - DNA, 25 bp, Saccharomyces pastorianus
cgtccctccattagactactttgat

SEQ ID NO: 51687 - DNA, 25 bp, Saccharomyces pastorianus
gtggtatggccgacagaacgacttt

SEQ ID NO: 51688 - DNA, 25 bp, Saccharomyces pastorianus
gtaagctggctttgatcgacgattt

SEQ ID NO: 51689 - DNA, 25 bp, Saccharomyces pastorianus
atcttcggtggcctaattgggttcg

SEQ ID NO: 51690 - DNA, 25 bp, Saccharomyces pastorianus
aactcgatgtcgactacgtcctggt

SEQ ID NO: 51691 - DNA, 25 bp, Saccharomyces pastorianus
aaggtatctggcctgacgagatcaa

SEQ ID NO: 51692 - DNA, 25 bp, Saccharomyces pastorianus
aagccaagtgccatactagccaaat

SEQ ID NO: 51693 - DNA, 25 bp, Saccharomyces pastorianus
aagaacgtgacttctataccccaga

SEQ ID NO: 51694 - DNA, 25 bp, Saccharomyces pastorianus
ggatttcaaagctagcgaccgcaaa

SEQ ID NO: 51695 - DNA, 25 bp, Saccharomyces pastorianus
ggatcgttcgtcttctacttgtacc

SEQ ID NO: 51696 - DNA, 25 bp, Saccharomyces pastorianus
gactttggtcgacaacaacacctgg

SEQ ID NO: 51697 - DNA, 25 bp, Saccharomyces pastorianus
ggaacaacactcatatcgccattgt

SEQ ID NO: 51698 - DNA, 25 bp, Saccharomyces pastorianus
acgtcttcctactgatcttgatggg

SEQ ID NO: 51699 - DNA, 25 bp, Saccharomyces pastorianus
gggagtcttcggcttgattcagatc

SEQ ID NO: 51700 - DNA, 25 bp, Saccharomyces pastorianus
tatgctacttctatatggtctccgc

SEQ ID NO: 51701 - DNA, 25 bp, Saccharomyces pastorianus
ggtctctttgatgttgatcctggtc

SEQ ID NO: 51702 - DNA, 25 bp, Saccharomyces pastorianus
agatcgtcgcctttggtgacttcat

SEQ ID NO: 51703 - DNA, 25 bp, Saccharomyces pastorianus
taaaggctcagaagaccggctccat

SEQ ID NO: 51704 - DNA, 25 bp, Saccharomyces pastorianus
attgtccccggctacatttctagat

SEQ ID NO: 51705 - DNA, 25 bp, Saccharomyces pastorianus
tgtattccgcctacactacatggta

SEQ ID NO: 51706 - DNA, 25 bp, Saccharomyces pastorianus
atctgtggctggatcctacgacaac

SEQ ID NO: 51707 - DNA, 25 bp, Saccharomyces pastorianus
gggtagatactcgtccaagctgtat

SEQ ID NO: 51708 - DNA, 25 bp, Saccharomyces pastorianus
gattctattcgctatgggacaccaa

SEQ ID NO: 51709 - DNA, 25 bp, Saccharomyces pastorianus
ggttatattacttgtcacgaattct

SEQ ID NO: 51710 - DNA, 25 bp, Saccharomyces pastorianus
catccactctttttcccgaatggga

SEQ ID NO: 51711 - DNA, 25 bp, Saccharomyces pastorianus
gattttttggtcctgcgttggtata

SEQ ID NO: 51712 - DNA, 25 bp, Saccharomyces pastorianus
tacgccaatttcgttgatttcgttg

SEQ ID NO: 51713 - DNA, 25 bp, Saccharomyces pastorianus
caagagattagaggcaacggacatt

SEQ ID NO: 51714 - DNA, 25 bp, Saccharomyces pastorianus
cactgtgtttatatttactgttcaa

SEQ ID NO: 51715 - DNA, 25 bp, Saccharomyces pastorianus
gtagtagattgcaaacccctcagga

SEQ ID NO: 51716 - DNA, 25 bp, Saccharomyces pastorianus
tgttcaaagatcatggtacgccaat

SEQ ID NO: 51717 - DNA, 25 bp, Saccharomyces pastorianus
aaacccctcaggaagacgtcttatg

SEQ ID NO: 51718 - DNA, 25 bp, Saccharomyces pastorianus
gaataccaataccagtttgagtttg

SEQ ID NO: 51719 - DNA, 25 bp, Saccharomyces pastorianus
cgtcttatgcttacggttggaccat

SEQ ID NO: 51720 - DNA, 25 bp, Saccharomyces pastorianus
tcacacatttctagcgaccggatcc

SEQ ID NO: 51721 - DNA, 25 bp, Saccharomyces pastorianus
aatctgccgcttcacattcgacggt

SEQ ID NO: 51722 - DNA, 25 bp, Saccharomyces pastorianus
gcgagtaggccaataagtctgcttg

SEQ ID NO: 51723 - DNA, 25 bp, Saccharomyces pastorianus
gtctgcttgagacgacaaacaattt

SEQ ID NO: 51724 - DNA, 25 bp, Saccharomyces pastorianus
aacggattactttcggaggagcact

SEQ ID NO: 51725 - DNA, 25 bp, Saccharomyces pastorianus
gaccggatccaccattttagaaagt

SEQ ID NO: 51726 - DNA, 25 bp, Saccharomyces pastorianus
ccagaggtggactttctatgtttca

SEQ ID NO: 51727 - DNA, 25 bp, Saccharomyces pastorianus
gtccatctctcataaacttccagaa

SEQ ID NO: 51728 - DNA, 25 bp, Saccharomyces pastorianus
attcgacggtgtccatctctcataa

SEQ ID NO: 51729 - DNA, 25 bp, Saccharomyces pastorianus
gaaatacgtccattaaactatccag

SEQ ID NO: 51730 - DNA, 25 bp, Saccharomyces pastorianus
ggaggagcactcagagtcttgtcca

SEQ ID NO: 51731 - DNA, 25 bp, Saccharomyces pastorianus
atccgaagcctttgacagaatgatg

SEQ ID NO: 51732 - DNA, 25 bp, Saccharomyces pastorianus
gactgatatcgtcactgttgtccgt

SEQ ID NO: 51733 - DNA, 25 bp, Saccharomyces pastorianus
aaactggactgatatcgtcactgtt

SEQ ID NO: 51734 - DNA, 25 bp, Saccharomyces pastorianus
tgaacggtaagccagcaaaggaaac

SEQ ID NO: 51735 - DNA, 25 bp, Saccharomyces pastorianus
tactacgaaatgtctacatccgaag

SEQ ID NO: 51736 - DNA, 25 bp, Saccharomyces pastorianus
agtgtcgaagatttcttagctgcca

SEQ ID NO: 51737 - DNA, 25 bp, Saccharomyces pastorianus
cgaagatttcttagctgccatgcaa

SEQ ID NO: 51738 - DNA, 25 bp, Saccharomyces pastorianus
atatcgtcactgttgtccgtgtctg

SEQ ID NO: 51739 - DNA, 25 bp, Saccharomyces pastorianus
aaatgtctacatccgaagcctttga

SEQ ID NO: 51740 - DNA, 25 bp, Saccharomyces pastorianus
gtctacatccgaagcctttgacaga

SEQ ID NO: 51741 - DNA, 25 bp, Saccharomyces pastorianus
cgtcactgttgtccgtgtctggatc

SEQ ID NO: 51742 - DNA, 25 bp, Saccharomyces pastorianus
atggagcgtcgttttcatcttacgt

SEQ ID NO: 51743 - DNA, 25 bp, Saccharomyces pastorianus
cggagctattttccttctttttgag

SEQ ID NO: 51744 - DNA, 25 bp, Saccharomyces pastorianus
gtgaacttacccatattcctgagga

SEQ ID NO: 51745 - DNA, 25 bp, Saccharomyces pastorianus
tttttctgtttacgccggagctatt

SEQ ID NO: 51746 - DNA, 25 bp, Saccharomyces pastorianus
taaatcggacaacttagctagccaa

SEQ ID NO: 51747 - DNA, 25 bp, Saccharomyces pastorianus
gtacgttcaaacgaagccttcaact

SEQ ID NO: 51748 - DNA, 25 bp, Saccharomyces pastorianus
gttaatgctgctattgtccgtatca

SEQ ID NO: 51749 - DNA, 25 bp, Saccharomyces pastorianus
taagccaccaacagctactgcagag

SEQ ID NO: 51750 - DNA, 25 bp, Saccharomyces pastorianus
gaaggtgccaattattgccggtcct

SEQ ID NO: 51751 - DNA, 25 bp, Saccharomyces pastorianus
gtaatgtcaatgtcagcagttccta

SEQ ID NO: 51752 - DNA, 25 bp, Saccharomyces pastorianus
ggtcctgcttcattccataaatcgg

SEQ ID NO: 51753 - DNA, 25 bp, Saccharomyces pastorianus
gagtaccatccggagttgtttttag

SEQ ID NO: 51754 - DNA, 25 bp, Saccharomyces pastorianus
gaagtaccatcggattaccagctcg

SEQ ID NO: 51755 - DNA, 25 bp, Saccharomyces pastorianus
gctcttcccgttattattgcaactg

SEQ ID NO: 51756 - DNA, 25 bp, Saccharomyces pastorianus
tcaaggcggccaaagtgctgctaat

SEQ ID NO: 51757 - DNA, 25 bp, Saccharomyces pastorianus
acggatttgttaatctccctcgcta

SEQ ID NO: 51758 - DNA, 25 bp, Saccharomyces pastorianus
cctcgctactgttctttatcattta

SEQ ID NO: 51759 - DNA, 25 bp, Saccharomyces pastorianus
gacgcagacgaaataccccagaagg

SEQ ID NO: 51760 - DNA, 25 bp, Saccharomyces pastorianus
atccatcacaaatcggttccacaaa

SEQ ID NO: 51761 - DNA, 25 bp, Saccharomyces pastorianus
attggtgtgaccagcgtgggcatcc

SEQ ID NO: 51762 - DNA, 25 bp, Saccharomyces pastorianus
ccgtagtgctcattccaagattcaa

SEQ ID NO: 51763 - DNA, 25 bp, Saccharomyces pastorianus
aaccttgccattcaatcctacatga

SEQ ID NO: 51764 - DNA, 25 bp, Saccharomyces pastorianus
tgcgtgagttccttggcgtatatga

SEQ ID NO: 51765 - DNA, 25 bp, Saccharomyces pastorianus
aagcgggcccttgtacacgagctga

SEQ ID NO: 51766 - DNA, 25 bp, Saccharomyces pastorianus
agaacaggaacattggcgcccacaa

SEQ ID NO: 51767 - DNA, 25 bp, Saccharomyces pastorianus
atctgcagagaacctcggtgcgctt

SEQ ID NO: 51768 - DNA, 25 bp, Saccharomyces pastorianus
gagggcccagagcacgtcaaaatca

SEQ ID NO: 51769 - DNA, 25 bp, Saccharomyces pastorianus
gaaagagctgctacatcttgccaac

SEQ ID NO: 51770 - DNA, 25 bp, Saccharomyces pastorianus
gcagaggaccttttgccctttacgg

SEQ ID NO: 51771 - DNA, 25 bp, Saccharomyces pastorianus
gagctagtcgactacattctcgaga

SEQ ID NO: 51772 - DNA, 25 bp, Saccharomyces pastorianus
caactcggcggaaagctccagtgat

SEQ ID NO: 51773 - DNA, 25 bp, Saccharomyces pastorianus
acaagaatgtgtccgagggcccaga

SEQ ID NO: 51774 - DNA, 25 bp, Saccharomyces pastorianus
ggtaatgcacgggagccgccatcat

SEQ ID NO: 51775 - DNA, 25 bp, Saccharomyces pastorianus
gtttctccccatttccttagatcaa

SEQ ID NO: 51776 - DNA, 25 bp, Saccharomyces pastorianus
gacacccaagacgtttttgtgcggt

SEQ ID NO: 51777 - DNA, 25 bp, Saccharomyces pastorianus
gattgaagcttggtcatccttttcc

SEQ ID NO: 51778 - DNA, 25 bp, Saccharomyces pastorianus
tcatacagtatctcttcagggcgtc

SEQ ID NO: 51779 - DNA, 25 bp, Saccharomyces pastorianus
acagcgcctccaacatacttaagga

SEQ ID NO: 51780 - DNA, 25 bp, Saccharomyces pastorianus
gttttcgtatcaccacagttgtatt

SEQ ID NO: 51781 - DNA, 25 bp, Saccharomyces pastorianus
tcagggacagcaccgaacagcagca

SEQ ID NO: 51782 - DNA, 25 bp, Saccharomyces pastorianus
atgccaggaatcatgtctcagggac

SEQ ID NO: 51783 - DNA, 25 bp, Saccharomyces pastorianus
tcatcattctctcgcgcacagatag

SEQ ID NO: 51784 - DNA, 25 bp, Saccharomyces pastorianus
tatcaggtgctcaaacagtttctcc

SEQ ID NO: 51785 - DNA, 25 bp, Saccharomyces pastorianus
ttttcctcattcttggacacccaag

SEQ ID NO: 51786 - DNA, 25 bp, Saccharomyces pastorianus
tggcagctcttcatcttcaggaaac

SEQ ID NO: 51787 - DNA, 25 bp, Saccharomyces pastorianus
gaatccagagacttccagtattagt

SEQ ID NO: 51788 - DNA, 25 bp, Saccharomyces pastorianus
tggccgcaatggttgatccatccat

SEQ ID NO: 51789 - DNA, 25 bp, Saccharomyces pastorianus
agtagcggctcaactggatcctctt

SEQ ID NO: 51790 - DNA, 25 bp, Saccharomyces pastorianus
atccctctaactggcctattacata

SEQ ID NO: 51791 - DNA, 25 bp, Saccharomyces pastorianus
aattccagtgtatctagttccagca

SEQ ID NO: 51792 - DNA, 25 bp, Saccharomyces pastorianus
gaatctgtaacacaatccatgcgga

SEQ ID NO: 51793 - DNA, 25 bp, Saccharomyces pastorianus
tacccaaaatttcaaggcccatcgc

SEQ ID NO: 51794 - DNA, 25 bp, Saccharomyces pastorianus
gtcggagggtgcttgtacattttgt

SEQ ID NO: 51795 - DNA, 25 bp, Saccharomyces pastorianus
atgatgactcggcaccagctagaaa

SEQ ID NO: 51796 - DNA, 25 bp, Saccharomyces pastorianus
ggttcttcaaattcgggatcttcaa

SEQ ID NO: 51797 - DNA, 25 bp, Saccharomyces pastorianus
ttcacagagctcgaccggagttcaa

SEQ ID NO: 51798 - DNA, 25 bp, Saccharomyces pastorianus
tactgcaagcacttcatctacgatt

SEQ ID NO: 51799 - DNA, 25 bp, Saccharomyces pastorianus
gacatctagtcaaaagccatccacc

SEQ ID NO: 51800 - DNA, 25 bp, Saccharomyces pastorianus
tttcatccacctctagtttgtcttc

SEQ ID NO: 51801 - DNA, 25 bp, Saccharomyces pastorianus
tccaccacctctattttgtctgaga

SEQ ID NO: 51802 - DNA, 25 bp, Saccharomyces pastorianus
tgtcttcggtgtctcaaatctcaac

SEQ ID NO: 51803 - DNA, 25 bp, Saccharomyces pastorianus
aaatctacaacgtcatcggccgatg

SEQ ID NO: 51804 - DNA, 25 bp, Saccharomyces pastorianus
tctacgattattccatcctctatac

SEQ ID NO: 51805 - DNA, 25 bp, Saccharomyces pastorianus
agtatctcgtcaccattatcttcaa

SEQ ID NO: 51806 - DNA, 25 bp, Saccharomyces pastorianus
gaagttcggttagcaccgtttcaca

SEQ ID NO: 51807 - DNA, 25 bp, Saccharomyces pastorianus
tctataccatcttcatctgcgggaa

SEQ ID NO: 51808 - DNA, 25 bp, Saccharomyces pastorianus
ctaagtttccatgcgccgatgttaa

SEQ ID NO: 51809 - DNA, 25 bp, Saccharomyces pastorianus
aagtgtggcggatctgtggctctct

SEQ ID NO: 51810 - DNA, 25 bp, Saccharomyces pastorianus
tctccagtatgcctcacttgttaga

SEQ ID NO: 51811 - DNA, 25 bp, Saccharomyces pastorianus
accgccctatgaaactccagaattg

SEQ ID NO: 51812 - DNA, 25 bp, Saccharomyces pastorianus
gggcttgcaatctagctttatcagc

SEQ ID NO: 51813 - DNA, 25 bp, Saccharomyces pastorianus
ttgcctatggtttcctttctgtaaa

SEQ ID NO: 51814 - DNA, 25 bp, Saccharomyces pastorianus
aatggcccgacttatcaggacagga

SEQ ID NO: 51815 - DNA, 25 bp, Saccharomyces pastorianus
agcagcgattattctcttttgaggg

SEQ ID NO: 51816 - DNA, 25 bp, Saccharomyces pastorianus
atataaacttttcgatgcccctctc

SEQ ID NO: 51817 - DNA, 25 bp, Saccharomyces pastorianus
taatattcacctggcacaaccacat

SEQ ID NO: 51818 - DNA, 25 bp, Saccharomyces pastorianus
ctaaagggttctcccaattggcaga

SEQ ID NO: 51819 - DNA, 25 bp, Saccharomyces pastorianus
gcgctcgagaaactgcagaagctga

SEQ ID NO: 51820 - DNA, 25 bp, Saccharomyces pastorianus
gatgcgctcgagaaactgcagaagc

SEQ ID NO: 51821 - DNA, 25 bp, Saccharomyces pastorianus
aaactgcagaagctgaccgctgcgc

SEQ ID NO: 51822 - DNA, 25 bp, Saccharomyces pastorianus
aactgcagaagctgaccgctgcgct

SEQ ID NO: 51823 - DNA, 25 bp, Saccharomyces pastorianus
gaagctgaccgctgcgctcgaggac

SEQ ID NO: 51824 - DNA, 25 bp, Saccharomyces pastorianus
tgcagaagctgaccgctgcgctcga

SEQ ID NO: 51825 - DNA, 25 bp, Saccharomyces pastorianus
cgctgcgctcgaggacatcgaggaa

SEQ ID NO: 51826 - DNA, 25 bp, Saccharomyces pastorianus
agctgaccgctgcgctcgaggacat

SEQ ID NO: 51827 - DNA, 25 bp, Saccharomyces pastorianus
gaaactgcagaagctgaccgctgcg

SEQ ID NO: 51828 - DNA, 25 bp, Saccharomyces pastorianus
gagaaactgcagaagctgaccgctg

SEQ ID NO: 51829 - DNA, 25 bp, Saccharomyces pastorianus
atgcgctcgagaaactgcagaagct

SEQ ID NO: 51830 - DNA, 25 bp, Saccharomyces pastorianus
agaagacgcagaggccgacgcagaa

SEQ ID NO: 51831 - DNA, 25 bp, Saccharomyces pastorianus
acggcgtcacagacccgagcatgaa

SEQ ID NO: 51832 - DNA, 25 bp, Saccharomyces pastorianus
aggtagcggccttgctcaaagagca

SEQ ID NO: 51833 - DNA, 25 bp, Saccharomyces pastorianus
ccgacactgttcttctttgacaaga

SEQ ID NO: 51834 - DNA, 25 bp, Saccharomyces pastorianus
agatccagggcatcgaggacattgc

SEQ ID NO: 51835 - DNA, 25 bp, Saccharomyces pastorianus
tttgccaaccaaatagccatgtcgg

SEQ ID NO: 51836 - DNA, 25 bp, Saccharomyces pastorianus
gaacgtgtctgaactatgtgtgtac

SEQ ID NO: 51837 - DNA, 25 bp, Saccharomyces pastorianus
tggtggaggcgctcacggataacaa

SEQ ID NO: 51838 - DNA, 25 bp, Saccharomyces pastorianus
ccgcatgaactggacaccgaggaca

SEQ ID NO: 51839 - DNA, 25 bp, Saccharomyces pastorianus
tcgccaccagcatagaactagccaa

SEQ ID NO: 51840 - DNA, 25 bp, Saccharomyces pastorianus
agccatgtcggtcaagttgggcaac

SEQ ID NO: 51841 - DNA, 25 bp, Saccharomyces pastorianus
aaacgctccaaaaatagaatcaaga

SEQ ID NO: 51842 - DNA, 25 bp, Saccharomyces pastorianus
gagaaaacgctccaaaaatagaatc

SEQ ID NO: 51843 - DNA, 25 bp, Saccharomyces pastorianus
tgaaaaaacctaaattcgactgcaa

SEQ ID NO: 51844 - DNA, 25 bp, Saccharomyces pastorianus
aaggtggatgtgtgaggcccataat

SEQ ID NO: 51845 - DNA, 25 bp, Saccharomyces pastorianus
ctaaattcgactgcaacttttggga

SEQ ID NO: 51846 - DNA, 25 bp, Saccharomyces pastorianus
tattttcacatatctatccttgcaa

SEQ ID NO: 51847 - DNA, 25 bp, Saccharomyces pastorianus
gaggcccataataaagtcaatacga

SEQ ID NO: 51848 - DNA, 25 bp, Saccharomyces pastorianus
aacctaaattcgactgcaacttttg

SEQ ID NO: 51849 - DNA, 25 bp, Saccharomyces pastorianus
taaattcgactgcaacttttgggaa

SEQ ID NO: 51850 - DNA, 25 bp, Saccharomyces pastorianus
tatattttcacatatctatccttgc

SEQ ID NO: 51851 - DNA, 25 bp, Saccharomyces pastorianus
ggcccataataaagtcaatacgaaa

SEQ ID NO: 51852 - DNA, 25 bp, Saccharomyces pastorianus
aaacgctccaaaaatagaatcaaga

SEQ ID NO: 51853 - DNA, 25 bp, Saccharomyces pastorianus
atatctatccttgcaactggtgcgc

SEQ ID NO: 51854 - DNA, 25 bp, Saccharomyces pastorianus
gagaaaacgctccaaaaatagaatc

SEQ ID NO: 51855 - DNA, 25 bp, Saccharomyces pastorianus
tgaaaaaacctaaattcgactgcaa

SEQ ID NO: 51856 - DNA, 25 bp, Saccharomyces pastorianus
aaggtggatgtgtgaggcccataat

SEQ ID NO: 51857 - DNA, 25 bp, Saccharomyces pastorianus
tattttcacatatctatccttgcaa

SEQ ID NO: 51858 - DNA, 25 bp, Saccharomyces pastorianus
gaggcccataataaagtcaatacga

SEQ ID NO: 51859 - DNA, 25 bp, Saccharomyces pastorianus
aacctaaattcgactgcaacttttg

SEQ ID NO: 51860 - DNA, 25 bp, Saccharomyces pastorianus
taaattcgactgcaacttttgggaa

SEQ ID NO: 51861 - DNA, 25 bp, Saccharomyces pastorianus
aactggtgcgctaaagactttgaaa

SEQ ID NO: 51862 - DNA, 25 bp, Saccharomyces pastorianus
ggcccataataaagtcaatacgaaa

SEQ ID NO: 51863 - DNA, 25 bp, Saccharomyces pastorianus
gttccggtttgaatggcactttcca

SEQ ID NO: 51864 - DNA, 25 bp, Saccharomyces pastorianus
gatactggctcaaagatgtcaactt

SEQ ID NO: 51865 - DNA, 25 bp, Saccharomyces pastorianus
aaagtcactactacactcatactcc

SEQ ID NO: 51866 - DNA, 25 bp, Saccharomyces pastorianus
tgcattgttggacccgctgtagctt

SEQ ID NO: 51867 - DNA, 25 bp, Saccharomyces pastorianus
agcctgttctttctgattttactta

SEQ ID NO: 51868 - DNA, 25 bp, Saccharomyces pastorianus
gctgtagcttcatctcactttaaaa

SEQ ID NO: 51869 - DNA, 25 bp, Saccharomyces pastorianus
ggaaatattgcagcctgttctttct

SEQ ID NO: 51870 - DNA, 25 bp, Saccharomyces pastorianus
ccacccatctactctttgaaacaga

SEQ ID NO: 51871 - DNA, 25 bp, Saccharomyces pastorianus
ttgttgcatgcattgttggacccgc

SEQ ID NO: 51872 - DNA, 25 bp, Saccharomyces pastorianus
atcgaataacgatactggctcaaag

SEQ ID NO: 51873 - DNA, 25 bp, Saccharomyces pastorianus
atattggttccggtttgaatggcac

SEQ ID NO: 51874 - DNA, 25 bp, Saccharomyces pastorianus
ggactcagccaacgagagagttaac

SEQ ID NO: 51875 - DNA, 25 bp, Saccharomyces pastorianus
ttgtcttaggacatgtaattttaat

SEQ ID NO: 51876 - DNA, 25 bp, Saccharomyces pastorianus
gacatgtaattttaatttttcaact

SEQ ID NO: 51877 - DNA, 25 bp, Saccharomyces pastorianus
catggactcagccaacgagagagtt

SEQ ID NO: 51878 - DNA, 25 bp, Saccharomyces pastorianus
tagaactttccgaatttgcagcgga

SEQ ID NO: 51879 - DNA, 25 bp, Saccharomyces pastorianus
tcagccaacgagagagttaactgcc

SEQ ID NO: 51880 - DNA, 25 bp, Saccharomyces pastorianus
atagaactttccgaatttgcagcgg

SEQ ID NO: 51881 - DNA, 25 bp, Saccharomyces pastorianus
gagttaactgccaaagttatagaac

SEQ ID NO: 51882 - DNA, 25 bp, Saccharomyces pastorianus
tgcagcggattttgtcttaggacat

SEQ ID NO: 51883 - DNA, 25 bp, Saccharomyces pastorianus
actgccaaagttatagaactttccg

SEQ ID NO: 51884 - DNA, 25 bp, Saccharomyces pastorianus
gcggattttgtcttaggacatgtaa

SEQ ID NO: 51885 - DNA, 25 bp, Saccharomyces pastorianus
gactcattttccactgtatgaccgt

SEQ ID NO: 51886 - DNA, 25 bp, Saccharomyces pastorianus
ggctgagattataccgtgcgcaatt

SEQ ID NO: 51887 - DNA, 25 bp, Saccharomyces pastorianus
tattgctattcttttcctatgcctt

SEQ ID NO: 51888 - DNA, 25 bp, Saccharomyces pastorianus
gaggatgtcaaggtcccgtatcact

SEQ ID NO: 51889 - DNA, 25 bp, Saccharomyces pastorianus
tgttgtccacattctcttctttatt

SEQ ID NO: 51890 - DNA, 25 bp, Saccharomyces pastorianus
tcatggcaggttttgctcacggtgt

SEQ ID NO: 51891 - DNA, 25 bp, Saccharomyces pastorianus
actttggctccaatcgtcattgata

SEQ ID NO: 51892 - DNA, 25 bp, Saccharomyces pastorianus
gtgttatcatttgtactttggctcc

SEQ ID NO: 51893 - DNA, 25 bp, Saccharomyces pastorianus
ggccattattcggtatgtgctgtaa

SEQ ID NO: 51894 - DNA, 25 bp, Saccharomyces pastorianus
tttcttgttgttctgggccattatt

SEQ ID NO: 51895 - DNA, 25 bp, Saccharomyces pastorianus
gtgaactccgctttacgtgttatca

SEQ ID NO: 51896 - DNA, 25 bp, Saccharomyces pastorianus
gtgggcgcattgaacggttcgctat

SEQ ID NO: 51897 - DNA, 25 bp, Saccharomyces pastorianus
agacgggcttgatcaactggttttt

SEQ ID NO: 51898 - DNA, 25 bp, Saccharomyces pastorianus
atgacagactcgtacaacttggcgc

SEQ ID NO: 51899 - DNA, 25 bp, Saccharomyces pastorianus
tttgcttcacctacaactctttgaa

SEQ ID NO: 51900 - DNA, 25 bp, Saccharomyces pastorianus
acaacttggcgcctgtaacattgaa

SEQ ID NO: 51901 - DNA, 25 bp, Saccharomyces pastorianus
agctgcggatcgttaggttattcta

SEQ ID NO: 51902 - DNA, 25 bp, Saccharomyces pastorianus
tcggcatcattagggagacgggctt

SEQ ID NO: 51903 - DNA, 25 bp, Saccharomyces pastorianus
gtcattctgcgtctgtttttctaga

SEQ ID NO: 51904 - DNA, 25 bp, Saccharomyces pastorianus
gtgggctagctttactgtcattctg

SEQ ID NO: 51905 - DNA, 25 bp, Saccharomyces pastorianus
tgcctagtgcacattctcagttcat

SEQ ID NO: 51906 - DNA, 25 bp, Saccharomyces pastorianus
aatgcatttttgctagtgggctagc

SEQ ID NO: 51907 - DNA, 25 bp, Saccharomyces pastorianus
gaatagtacagccgccgcgataaat

SEQ ID NO: 51908 - DNA, 25 bp, Saccharomyces pastorianus
gcgataaatcctaacccaaatgtca

SEQ ID NO: 51909 - DNA, 25 bp, Saccharomyces pastorianus
aaatcctaacccaaatgtcataccg

SEQ ID NO: 51910 - DNA, 25 bp, Saccharomyces pastorianus
ccgcgataaatcctaacccaaatgt

SEQ ID NO: 51911 - DNA, 25 bp, Saccharomyces pastorianus
gataaatcctaacccaaatgtcata

SEQ ID NO: 51912 - DNA, 25 bp, Saccharomyces pastorianus
cgcgataaatcctaacccaaatgtc

SEQ ID NO: 51913 - DNA, 25 bp, Saccharomyces pastorianus
gccgcgataaatcctaacccaaatg

SEQ ID NO: 51914 - DNA, 25 bp, Saccharomyces pastorianus
cgccgcgataaatcctaacccaaat

SEQ ID NO: 51915 - DNA, 25 bp, Saccharomyces pastorianus
tcctaacccaaatgtcataccgttc

SEQ ID NO: 51916 - DNA, 25 bp, Saccharomyces pastorianus
atgaatagtacagccgccgcgataa

SEQ ID NO: 51917 - DNA, 25 bp, Saccharomyces pastorianus
aatcctaacccaaatgtcataccgt

SEQ ID NO: 51918 - DNA, 25 bp, Saccharomyces pastorianus
aagtgcctatagaagtgcttaaaga

SEQ ID NO: 51919 - DNA, 25 bp, Saccharomyces pastorianus
gcctatagaagtgcttaaagacatg

SEQ ID NO: 51920 - DNA, 25 bp, Saccharomyces pastorianus
gtgcctatagaagtgcttaaagaca

SEQ ID NO: 51921 - DNA, 25 bp, Saccharomyces pastorianus
gaagtgcctatagaagtgcttaaag

SEQ ID NO: 51922 - DNA, 25 bp, Saccharomyces pastorianus
tgcctatagaagtgcttaaagacat

SEQ ID NO: 51923 - DNA, 25 bp, Saccharomyces pastorianus
ggaagaagaagaagtgcctatagaa

SEQ ID NO: 51924 - DNA, 25 bp, Saccharomyces pastorianus
agaagtgcctatagaagtgcttaaa

SEQ ID NO: 51925 - DNA, 25 bp, Saccharomyces pastorianus
tatagaagtgcttaaagacatgctc

SEQ ID NO: 51926 - DNA, 25 bp, Saccharomyces pastorianus
gaagaagtgcctatagaagtgctta

SEQ ID NO: 51927 - DNA, 25 bp, Saccharomyces pastorianus
aagaagtgcctatagaagtgcttaa

SEQ ID NO: 51928 - DNA, 25 bp, Saccharomyces pastorianus
agtgcctatagaagtgcttaaagac

SEQ ID NO: 51929 - DNA, 25 bp, Saccharomyces pastorianus
cttacctggcgatgtatcacgattc

SEQ ID NO: 51930 - DNA, 25 bp, Saccharomyces pastorianus
tccttacctggcgatgtatcacgat

SEQ ID NO: 51931 - DNA, 25 bp, Saccharomyces pastorianus
tacctggcgatgtatcacgattcag

SEQ ID NO: 51932 - DNA, 25 bp, Saccharomyces pastorianus
gaagccctgagacatccttacctgg

SEQ ID NO: 51933 - DNA, 25 bp, Saccharomyces pastorianus
cctgagacatccttacctggcgatg

SEQ ID NO: 51934 - DNA, 25 bp, Saccharomyces pastorianus
gacatccttacctggcgatgtatca

SEQ ID NO: 51935 - DNA, 25 bp, Saccharomyces pastorianus
tgcggaagccctgagacatccttac

SEQ ID NO: 51936 - DNA, 25 bp, Saccharomyces pastorianus
gctgcggaagccctgagacatcctt

SEQ ID NO: 51937 - DNA, 25 bp, Saccharomyces pastorianus
gagacatccttacctggcgatgtat

SEQ ID NO: 51938 - DNA, 25 bp, Saccharomyces pastorianus
agcgctgcggaagccctgagacatc

SEQ ID NO: 51939 - DNA, 25 bp, Saccharomyces pastorianus
cctggcgatgtatcacgattcagcg

SEQ ID NO: 51940 - DNA, 25 bp, Saccharomyces pastorianus
taatggctcctctactttaagtgat

SEQ ID NO: 51941 - DNA, 25 bp, Saccharomyces pastorianus
acttaccagattttgagggcgctca

SEQ ID NO: 51942 - DNA, 25 bp, Saccharomyces pastorianus
atccatagtgcacaggttatccata

SEQ ID NO: 51943 - DNA, 25 bp, Saccharomyces pastorianus
gtagcgacgcgatggtacagagcac

SEQ ID NO: 51944 - DNA, 25 bp, Saccharomyces pastorianus
atagcaaacttacccatgaggccgc

SEQ ID NO: 51945 - DNA, 25 bp, Saccharomyces pastorianus
ggcagggactatcaccatcagttat

SEQ ID NO: 51946 - DNA, 25 bp, Saccharomyces pastorianus
tgaggccgcctttaccgtgggagaa

SEQ ID NO: 51947 - DNA, 25 bp, Saccharomyces pastorianus
attttggaagtgctaggcaccccgt

SEQ ID NO: 51948 - DNA, 25 bp, Saccharomyces pastorianus
tataaagccatcgaacctgttactg

SEQ ID NO: 51949 - DNA, 25 bp, Saccharomyces pastorianus
agggcgctcaaatctatccatagtg

SEQ ID NO: 51950 - DNA, 25 bp, Saccharomyces pastorianus
aaggtttgcgattttgggctagctc

SEQ ID NO: 51951 - DNA, 25 bp, Saccharomyces pastorianus
aaggctggccggtggttacaacaat

SEQ ID NO: 51952 - DNA, 25 bp, Saccharomyces pastorianus
ttacgatgtcttccacttgtgcaaa

SEQ ID NO: 51953 - DNA, 25 bp, Saccharomyces pastorianus
gtaaaattgacctgttctgggaaca

SEQ ID NO: 51954 - DNA, 25 bp, Saccharomyces pastorianus
gaacatggttgactctgcatggaac

SEQ ID NO: 51955 - DNA, 25 bp, Saccharomyces pastorianus
gctcctgagggtatcggatgccgaa

SEQ ID NO: 51956 - DNA, 25 bp, Saccharomyces pastorianus
gacaatacgtctggcaagacctgcc

SEQ ID NO: 51957 - DNA, 25 bp, Saccharomyces pastorianus
gacacctctacaaaagattcctttt

SEQ ID NO: 51958 - DNA, 25 bp, Saccharomyces pastorianus
atcaataccatctaatttccagtta

SEQ ID NO: 51959 - DNA, 25 bp, Saccharomyces pastorianus
tgcatggaacaaagacacctctaca

SEQ ID NO: 51960 - DNA, 25 bp, Saccharomyces pastorianus
aatcattgtggatacgctcctgagg

SEQ ID NO: 51961 - DNA, 25 bp, Saccharomyces pastorianus
aagacctgcccgatatttacgatgt

SEQ ID NO: 51962 - DNA, 25 bp, Saccharomyces pastorianus
ggtgacctttacgactttcttgata

SEQ ID NO: 51963 - DNA, 25 bp, Saccharomyces pastorianus
atgcttgatttttacactgacgatt

SEQ ID NO: 51964 - DNA, 25 bp, Saccharomyces pastorianus
gactattggtcgctgggtgctacta

SEQ ID NO: 51965 - DNA, 25 bp, Saccharomyces pastorianus
gggtgctactatattctatttgctt

SEQ ID NO: 51966 - DNA, 25 bp, Saccharomyces pastorianus
tgctaagagtcaaggcaccccttca

SEQ ID NO: 51967 - DNA, 25 bp, Saccharomyces pastorianus
agagtactgcgagtgcggtgacctt

SEQ ID NO: 51968 - DNA, 25 bp, Saccharomyces pastorianus
gattcgtactacgtcatggttctag

SEQ ID NO: 51969 - DNA, 25 bp, Saccharomyces pastorianus
gctcacagcttagggattgcacata

SEQ ID NO: 51970 - DNA, 25 bp, Saccharomyces pastorianus
gaagactttaagctctcacagccct

SEQ ID NO: 51971 - DNA, 25 bp, Saccharomyces pastorianus
tcaaaccgtatcgagacttcttctt

SEQ ID NO: 51972 - DNA, 25 bp, Saccharomyces pastorianus
gaggaagctggaccaatcatccgcc

SEQ ID NO: 51973 - DNA, 25 bp, Saccharomyces pastorianus
caagctgttggcgataagctagagg

SEQ ID NO: 51974 - DNA, 25 bp, Saccharomyces pastorianus
aaggcaagctgttggcgataagcta

SEQ ID NO: 51975 - DNA, 25 bp, Saccharomyces pastorianus
aggcaagctgttggcgataagctag

SEQ ID NO: 51976 - DNA, 25 bp, Saccharomyces pastorianus
gcaaatccttaaaattcaaactgaa

SEQ ID NO: 51977 - DNA, 25 bp, Saccharomyces pastorianus
ctgttggcgataagctagaggatac

SEQ ID NO: 51978 - DNA, 25 bp, Saccharomyces pastorianus
gatacgcaaatccttaaaattcaaa

SEQ ID NO: 51979 - DNA, 25 bp, Saccharomyces pastorianus
gaaaggcaagctgttggcgataagc

SEQ ID NO: 51980 - DNA, 25 bp, Saccharomyces pastorianus
agctagaggatacgcaaatccttaa

SEQ ID NO: 51981 - DNA, 25 bp, Saccharomyces pastorianus
aagaaaggcaagctgttggcgataa

SEQ ID NO: 51982 - DNA, 25 bp, Saccharomyces pastorianus
taagctagaggatacgcaaatcctt

SEQ ID NO: 51983 - DNA, 25 bp, Saccharomyces pastorianus
aaaagaaaggcaagctgttggcgat

SEQ ID NO: 51984 - DNA, 25 bp, Saccharomyces pastorianus
ctatatctactctctttccaaggtg

SEQ ID NO: 51985 - DNA, 25 bp, Saccharomyces pastorianus
agtggattggagactaccttgtaat

SEQ ID NO: 51986 - DNA, 25 bp, Saccharomyces pastorianus
gtaactctgtgcgtgtttccttgac

SEQ ID NO: 51987 - DNA, 25 bp, Saccharomyces pastorianus
ggtcgcccggaggagaattcatcat

SEQ ID NO: 51988 - DNA, 25 bp, Saccharomyces pastorianus
actggtcctgtccatgatttcacat

SEQ ID NO: 51989 - DNA, 25 bp, Saccharomyces pastorianus
tgacagccactacatcaccaagatt

SEQ ID NO: 51990 - DNA, 25 bp, Saccharomyces pastorianus
aatttggtgtcattgctggctatat

SEQ ID NO: 51991 - DNA, 25 bp, Saccharomyces pastorianus
cagctaccatttcctttttcgattt

SEQ ID NO: 51992 - DNA, 25 bp, Saccharomyces pastorianus
tgatttcacatggtccccaacttca

SEQ ID NO: 51993 - DNA, 25 bp, Saccharomyces pastorianus
ttctgtatgcaaatggtcgcccgga

SEQ ID NO: 51994 - DNA, 25 bp, Saccharomyces pastorianus
aaacacgatgctattttctccttcc

SEQ ID NO: 51995 - DNA, 25 bp, Saccharomyces pastorianus
aaggtaaagccaccttctcgcaagg

SEQ ID NO: 51996 - DNA, 25 bp, Saccharomyces pastorianus
tgctggtgcaggttgggctaaatct

SEQ ID NO: 51997 - DNA, 25 bp, Saccharomyces pastorianus
gataactctagcgaagaatccgttt

SEQ ID NO: 51998 - DNA, 25 bp, Saccharomyces pastorianus
tttcttgaacggcatggcgggatct

SEQ ID NO: 51999 - DNA, 25 bp, Saccharomyces pastorianus
tctcgcaaggcggtgaccagttgga

SEQ ID NO: 52000 - DNA, 25 bp, Saccharomyces pastorianus
ccattcaaccctaacggatctagta

SEQ ID NO: 52001 - DNA, 25 bp, Saccharomyces pastorianus
ggaggccaactcttggtacccagaa

SEQ ID NO: 52002 - DNA, 25 bp, Saccharomyces pastorianus
aggtgtccgttcacaattctctaaa

SEQ ID NO: 52003 - DNA, 25 bp, Saccharomyces pastorianus
ggcgggatctaaattaccaattgct

SEQ ID NO: 52004 - DNA, 25 bp, Saccharomyces pastorianus
gatgcctcaccctgagagagtttgc

SEQ ID NO: 52005 - DNA, 25 bp, Saccharomyces pastorianus
tagagttcttgccatgatgcctcac

SEQ ID NO: 52006 - DNA, 25 bp, Saccharomyces pastorianus
ggtgcagttttccaagtctctagta

SEQ ID NO: 52007 - DNA, 25 bp, Saccharomyces pastorianus
cctttgcctctagatgtggtttgga

SEQ ID NO: 52008 - DNA, 25 bp, Saccharomyces pastorianus
ctttactagaaatggcctttgcctc

SEQ ID NO: 52009 - DNA, 25 bp, Saccharomyces pastorianus
ggtggtttacttgtcactttactag

SEQ ID NO: 52010 - DNA, 25 bp, Saccharomyces pastorianus
ggtaggtaagccatctttccaaagt

SEQ ID NO: 52011 - DNA, 25 bp, Saccharomyces pastorianus
taaatcattgggtgcctctgctttg

SEQ ID NO: 52012 - DNA, 25 bp, Saccharomyces pastorianus
ggtaacaaatcacccactgttcatg

SEQ ID NO: 52013 - DNA, 25 bp, Saccharomyces pastorianus
aaagattctgtccttgtattggttg

SEQ ID NO: 52014 - DNA, 25 bp, Saccharomyces pastorianus
accgcggaagaagagtttgccacaa

SEQ ID NO: 52015 - DNA, 25 bp, Saccharomyces pastorianus
gagagacaatccaaagaccgcggaa

SEQ ID NO: 52016 - DNA, 25 bp, Saccharomyces pastorianus
gagtttgattcaattgcaccaagaa

SEQ ID NO: 52017 - DNA, 25 bp, Saccharomyces pastorianus
catgttgcgggcatgtacgccatca

SEQ ID NO: 52018 - DNA, 25 bp, Saccharomyces pastorianus
agctgtcgatcacatgttgcgggca

SEQ ID NO: 52019 - DNA, 25 bp, Saccharomyces pastorianus
cgatcacatgttgcgggcatgtacg

SEQ ID NO: 52020 - DNA, 25 bp, Saccharomyces pastorianus
tgttgcgggcatgtacgccatcaag

SEQ ID NO: 52021 - DNA, 25 bp, Saccharomyces pastorianus
atgttgcgggcatgtacgccatcaa

SEQ ID NO: 52022 - DNA, 25 bp, Saccharomyces pastorianus
gttgcgggcatgtacgccatcaagt

SEQ ID NO: 52023 - DNA, 25 bp, Saccharomyces pastorianus
ctgtcgatcacatgttgcgggcatg

SEQ ID NO: 52024 - DNA, 25 bp, Saccharomyces pastorianus
gctgtcgatcacatgttgcgggcat

SEQ ID NO: 52025 - DNA, 25 bp, Saccharomyces pastorianus
tcagctgtcgatcacatgttgcggg

SEQ ID NO: 52026 - DNA, 25 bp, Saccharomyces pastorianus
gtcgatcacatgttgcgggcatgta

SEQ ID NO: 52027 - DNA, 25 bp, Saccharomyces pastorianus
ttgcgggcatgtacgccatcaagtc

SEQ ID NO: 52028 - DNA, 25 bp, Saccharomyces pastorianus
atgaaaaccacccatctggcagatt

SEQ ID NO: 52029 - DNA, 25 bp, Saccharomyces pastorianus
aaacttgacgtggactgtcccttca

SEQ ID NO: 52030 - DNA, 25 bp, Saccharomyces pastorianus
acaaactgcaggtgcgtatcctatt

SEQ ID NO: 52031 - DNA, 25 bp, Saccharomyces pastorianus
atctacgacgacgagttggccgtga

SEQ ID NO: 52032 - DNA, 25 bp, Saccharomyces pastorianus
aagggccgcttggttctgttcgaca

SEQ ID NO: 52033 - DNA, 25 bp, Saccharomyces pastorianus
tgaaagacggcagcgcgcagatcta

SEQ ID NO: 52034 - DNA, 25 bp, Saccharomyces pastorianus
tatcccggacaacctgaagcagatc

SEQ ID NO: 52035 - DNA, 25 bp, Saccharomyces pastorianus
gtatcctattgcagcgccaagtaga

SEQ ID NO: 52036 - DNA, 25 bp, Saccharomyces pastorianus
tgatccgcgtcatgcacaaactgca

SEQ ID NO: 52037 - DNA, 25 bp, Saccharomyces pastorianus
gatcaaggctcaattgcccgtgttg

SEQ ID NO: 52038 - DNA, 25 bp, Saccharomyces pastorianus
agatcactcaggactgctgcgtgca

SEQ ID NO: 52039 - DNA, 25 bp, Saccharomyces pastorianus
ttcgatatacgaataaactccccgt

SEQ ID NO: 52040 - DNA, 25 bp, Saccharomyces pastorianus
gataagctatttcgatatacgaata

SEQ ID NO: 52041 - DNA, 25 bp, Saccharomyces pastorianus
gttccttatctaatggtggtgggca

SEQ ID NO: 52042 - DNA, 25 bp, Saccharomyces pastorianus
cgatatacgaataaactccccgtat

SEQ ID NO: 52043 - DNA, 25 bp, Saccharomyces pastorianus
aagataagctatttcgatatacgaa

SEQ ID NO: 52044 - DNA, 25 bp, Saccharomyces pastorianus
tggtggtgggcattcagagcaaaaa

SEQ ID NO: 52045 - DNA, 25 bp, Saccharomyces pastorianus
agttccttatctaatggtggtgggc

SEQ ID NO: 52046 - DNA, 25 bp, Saccharomyces pastorianus
ttccttatctaatggtggtgggcat

SEQ ID NO: 52047 - DNA, 25 bp, Saccharomyces pastorianus
tatacgaataaactccccgtataag

SEQ ID NO: 52048 - DNA, 25 bp, Saccharomyces pastorianus
gaagataagctatttcgatatacga

SEQ ID NO: 52049 - DNA, 25 bp, Saccharomyces pastorianus
ggtgggcattcagagcaaaaagaaa

SEQ ID NO: 52050 - DNA, 25 bp, Saccharomyces pastorianus
aacagtctatccatgcaatttccgc

SEQ ID NO: 52051 - DNA, 25 bp, Saccharomyces pastorianus
acatttcaacagcttcctcgaggga

SEQ ID NO: 52052 - DNA, 25 bp, Saccharomyces pastorianus
gaggcatgactgaccctttggaaat

SEQ ID NO: 52053 - DNA, 25 bp, Saccharomyces pastorianus
ttaactatagatccctcccattctt

SEQ ID NO: 52054 - DNA, 25 bp, Saccharomyces pastorianus
acacacattggcaatcacttcctta

SEQ ID NO: 52055 - DNA, 25 bp, Saccharomyces pastorianus
aacatttgcttccatctgatcagtg

SEQ ID NO: 52056 - DNA, 25 bp, Saccharomyces pastorianus
actttttgtcaacgatccgcatcat

SEQ ID NO: 52057 - DNA, 25 bp, Saccharomyces pastorianus
attgcagaaagattgtcggcccctc

SEQ ID NO: 52058 - DNA, 25 bp, Saccharomyces pastorianus
tttggaattcatcgagcctctacta

SEQ ID NO: 52059 - DNA, 25 bp, Saccharomyces pastorianus
gcaagtgtcccgcattattaactat

SEQ ID NO: 52060 - DNA, 25 bp, Saccharomyces pastorianus
gttattattcatggcgcgtccattt

SEQ ID NO: 52061 - DNA, 25 bp, Saccharomyces pastorianus
agaactacctggcttggaacctgtc

SEQ ID NO: 52062 - DNA, 25 bp, Saccharomyces pastorianus
ggtgaatctcatgacccttacgaca

SEQ ID NO: 52063 - DNA, 25 bp, Saccharomyces pastorianus
atgcacatatggtgggactcttata

SEQ ID NO: 52064 - DNA, 25 bp, Saccharomyces pastorianus
aacacaacgctcaatatccggaatt

SEQ ID NO: 52065 - DNA, 25 bp, Saccharomyces pastorianus
aaacccatccgtgtttgacatcgaa

SEQ ID NO: 52066 - DNA, 25 bp, Saccharomyces pastorianus
ggaacctgtccaaattagcctacca

SEQ ID NO: 52067 - DNA, 25 bp, Saccharomyces pastorianus
gtgctccttgcaccgtaataagcta

SEQ ID NO: 52068 - DNA, 25 bp, Saccharomyces pastorianus
aatatcaatctcatgtgctccttgc

SEQ ID NO: 52069 - DNA, 25 bp, Saccharomyces pastorianus
ttagcctaccagaaatgcctacttc

SEQ ID NO: 52070 - DNA, 25 bp, Saccharomyces pastorianus
tagcaaacacccttgtggcgacatt

SEQ ID NO: 52071 - DNA, 25 bp, Saccharomyces pastorianus
ctatatctcaccaatccatgttcag

SEQ ID NO: 52072 - DNA, 25 bp, Saccharomyces pastorianus
ccaggtgccagagtcgccagaagaa

SEQ ID NO: 52073 - DNA, 25 bp, Saccharomyces pastorianus
aactctcaccaaaccactaaggaag

SEQ ID NO: 52074 - DNA, 25 bp, Saccharomyces pastorianus
agaccaggtgccagagtcgccagaa

SEQ ID NO: 52075 - DNA, 25 bp, Saccharomyces pastorianus
gccagagtcgccagaagaaagagat

SEQ ID NO: 52076 - DNA, 25 bp, Saccharomyces pastorianus
tggtaactctcaccaaaccactaag

SEQ ID NO: 52077 - DNA, 25 bp, Saccharomyces pastorianus
gtaactctcaccaaaccactaagga

SEQ ID NO: 52078 - DNA, 25 bp, Saccharomyces pastorianus
gaccaggtgccagagtcgccagaag

SEQ ID NO: 52079 - DNA, 25 bp, Saccharomyces pastorianus
accaggtgccagagtcgccagaaga

SEQ ID NO: 52080 - DNA, 25 bp, Saccharomyces pastorianus
actctcaccaaaccactaaggaaga

SEQ ID NO: 52081 - DNA, 25 bp, Saccharomyces pastorianus
aacagaccaggtgccagagtcgcca

SEQ ID NO: 52082 - DNA, 25 bp, Saccharomyces pastorianus
caggtgccagagtcgccagaagaaa

SEQ ID NO: 52083 - DNA, 25 bp, Saccharomyces pastorianus
actatgcgtgatcttaagatcgaga

SEQ ID NO: 52084 - DNA, 25 bp, Saccharomyces pastorianus
gatcgccgttcacgtcactgtcaga

SEQ ID NO: 52085 - DNA, 25 bp, Saccharomyces pastorianus
gaaaagatcgccgttcacgtcactg

SEQ ID NO: 52086 - DNA, 25 bp, Saccharomyces pastorianus
cgtcagaactttcggtatcagaaga

SEQ ID NO: 52087 - DNA, 25 bp, Saccharomyces pastorianus
tcgccgttcacgtcactgtcagagg

SEQ ID NO: 52088 - DNA, 25 bp, Saccharomyces pastorianus
aagatcgccgttcacgtcactgtca

SEQ ID NO: 52089 - DNA, 25 bp, Saccharomyces pastorianus
ccgttcacgtcactgtcagaggtcc

SEQ ID NO: 52090 - DNA, 25 bp, Saccharomyces pastorianus
aacactatgcgtgatcttaagatcg

SEQ ID NO: 52091 - DNA, 25 bp, Saccharomyces pastorianus
gccgttcacgtcactgtcagaggtc

SEQ ID NO: 52092 - DNA, 25 bp, Saccharomyces pastorianus
aaaagatcgccgttcacgtcactgt

SEQ ID NO: 52093 - DNA, 25 bp, Saccharomyces pastorianus
gatacaccgtcagaactttcggtat

SEQ ID NO: 52094 - DNA, 25 bp, Saccharomyces pastorianus
aaggaggactcccaatactctgccg

SEQ ID NO: 52095 - DNA, 25 bp, Saccharomyces pastorianus
gtgtccattcaaggctgctaacttt

SEQ ID NO: 52096 - DNA, 25 bp, Saccharomyces pastorianus
ctgaaccaaactatctctccagttt

SEQ ID NO: 52097 - DNA, 25 bp, Saccharomyces pastorianus
attacgtctacggtatgagtcccct

SEQ ID NO: 52098 - DNA, 25 bp, Saccharomyces pastorianus
taactttcaaagagacggcccaatg

SEQ ID NO: 52099 - DNA, 25 bp, Saccharomyces pastorianus
gacttcgaacaacctagagctttat

SEQ ID NO: 52100 - DNA, 25 bp, Saccharomyces pastorianus
gaaatcttggatgtccatactctaa

SEQ ID NO: 52101 - DNA, 25 bp, Saccharomyces pastorianus
gggccaactatcagcaactgcctgt

SEQ ID NO: 52102 - DNA, 25 bp, Saccharomyces pastorianus
gaatgggaacctgtcgaccttcaag

SEQ ID NO: 52103 - DNA, 25 bp, Saccharomyces pastorianus
tatgagtccccttgacttcgaacaa

SEQ ID NO: 52104 - DNA, 25 bp, Saccharomyces pastorianus
taaagtcatcgctgagggcctggag

SEQ ID NO: 52105 - DNA, 25 bp, Saccharomyces pastorianus
aaggagcttgacttggaagaggaat

SEQ ID NO: 52106 - DNA, 25 bp, Saccharomyces pastorianus
agaatatcacagaacgcaacaaatg

SEQ ID NO: 52107 - DNA, 25 bp, Saccharomyces pastorianus
acaggatattaatcgtttagaacac

SEQ ID NO: 52108 - DNA, 25 bp, Saccharomyces pastorianus
gagaagttcagtactctgttcatga

SEQ ID NO: 52109 - DNA, 25 bp, Saccharomyces pastorianus
gaagaaagcctatcaaatgagctga

SEQ ID NO: 52110 - DNA, 25 bp, Saccharomyces pastorianus
gagaagcaacttaagactcttaccg

SEQ ID NO: 52111 - DNA, 25 bp, Saccharomyces pastorianus
acgcaaatttatccgatgaaagagc

SEQ ID NO: 52112 - DNA, 25 bp, Saccharomyces pastorianus
caacagagcgaaactgcggtgaata

SEQ ID NO: 52113 - DNA, 25 bp, Saccharomyces pastorianus
aaaagttgctttacaacagagcgaa

SEQ ID NO: 52114 - DNA, 25 bp, Saccharomyces pastorianus
tggtcaattgacgtctaaactagat

SEQ ID NO: 52115 - DNA, 25 bp, Saccharomyces pastorianus
gactcttaccgagaaggagcttgac

SEQ ID NO: 52116 - DNA, 25 bp, Saccharomyces pastorianus
aagaaagcactatcaccatcgctgc

SEQ ID NO: 52117 - DNA, 25 bp, Saccharomyces pastorianus
gtatttttgagtttcaaccatttca

SEQ ID NO: 52118 - DNA, 25 bp, Saccharomyces pastorianus
gtttattggtgtctttcatcgtcgc

SEQ ID NO: 52119 - DNA, 25 bp, Saccharomyces pastorianus
taggttcaaagatacgcttgcgtta

SEQ ID NO: 52120 - DNA, 25 bp, Saccharomyces pastorianus
atcgctgccacccatggacgctgaa

SEQ ID NO: 52121 - DNA, 25 bp, Saccharomyces pastorianus
atggacgctgaatcgggtgaacaac

SEQ ID NO: 52122 - DNA, 25 bp, Saccharomyces pastorianus
atctaagaaaccttcgcgccatatt

SEQ ID NO: 52123 - DNA, 25 bp, Saccharomyces pastorianus
gatacgcttgcgttatttttggtat

SEQ ID NO: 52124 - DNA, 25 bp, Saccharomyces pastorianus
catcgtcgccaccaagtgcaaagat

SEQ ID NO: 52125 - DNA, 25 bp, Saccharomyces pastorianus
ggtgaacaaccaacagaatttgcca

SEQ ID NO: 52126 - DNA, 25 bp, Saccharomyces pastorianus
ggcaaattgcttcattgtacttttc

SEQ ID NO: 52127 - DNA, 25 bp, Saccharomyces pastorianus
gatgcctacgaattggtcttgaaca

SEQ ID NO: 52128 - DNA, 25 bp, Saccharomyces pastorianus
ggaagcccgttctttattatctgaa

SEQ ID NO: 52129 - DNA, 25 bp, Saccharomyces pastorianus
taccgttgtccatgagtcttctgaa

SEQ ID NO: 52130 - DNA, 25 bp, Saccharomyces pastorianus
ggattccatcgtttctttaattaag

SEQ ID NO: 52131 - DNA, 25 bp, Saccharomyces pastorianus
gttaaggctgcttatccagtacatg

SEQ ID NO: 52132 - DNA, 25 bp, Saccharomyces pastorianus
tagaaaaagccaaccagtcccagag

SEQ ID NO: 52133 - DNA, 25 bp, Saccharomyces pastorianus
ttgaacatcaccaaggaagcccgtt

SEQ ID NO: 52134 - DNA, 25 bp, Saccharomyces pastorianus
gttccaccgaaaaggctgccacaat

SEQ ID NO: 52135 - DNA, 25 bp, Saccharomyces pastorianus
tgacgttaaatctgccgatgcctac

SEQ ID NO: 52136 - DNA, 25 bp, Saccharomyces pastorianus
gaagctgattcatccattcatgcca

SEQ ID NO: 52137 - DNA, 25 bp, Saccharomyces pastorianus
acatcttttggtcaagggtcacgtt

SEQ ID NO: 52138 - DNA, 25 bp, Saccharomyces pastorianus
gaattcatcaacatttttaccgacg

SEQ ID NO: 52139 - DNA, 25 bp, Saccharomyces pastorianus
agaactttactatctgtcccaggct

SEQ ID NO: 52140 - DNA, 25 bp, Saccharomyces pastorianus
gtttattcaacatccattcttgcca

SEQ ID NO: 52141 - DNA, 25 bp, Saccharomyces pastorianus
gaatttggtgttctaacctcgttcg

SEQ ID NO: 52142 - DNA, 25 bp, Saccharomyces pastorianus
gttcgcttacccagttgttgattct

SEQ ID NO: 52143 - DNA, 25 bp, Saccharomyces pastorianus
tactagacctgaaactctattcggt

SEQ ID NO: 52144 - DNA, 25 bp, Saccharomyces pastorianus
gatcgttacaagcatttacacggta

SEQ ID NO: 52145 - DNA, 25 bp, Saccharomyces pastorianus
gcctccagattggttaattggtccg

SEQ ID NO: 52146 - DNA, 25 bp, Saccharomyces pastorianus
gggaaacgtcataacctagaattca

SEQ ID NO: 52147 - DNA, 25 bp, Saccharomyces pastorianus
attacaccagctcatgaccaaaacg

SEQ ID NO: 52148 - DNA, 25 bp, Saccharomyces pastorianus
tgccgttaagattacaccagctcat

SEQ ID NO: 52149 - DNA, 25 bp, Saccharomyces pastorianus
gaactacccacacagctagcattag

SEQ ID NO: 52150 - DNA, 25 bp, Saccharomyces pastorianus
gataagctacgtgcggtactgaccc

SEQ ID NO: 52151 - DNA, 25 bp, Saccharomyces pastorianus
ttgtcaaatcctggaatccggcgaa

SEQ ID NO: 52152 - DNA, 25 bp, Saccharomyces pastorianus
atgaaatcatcgacaatccttccgc

SEQ ID NO: 52153 - DNA, 25 bp, Saccharomyces pastorianus
gaagtaatcatacgtcccgcgaagg

SEQ ID NO: 52154 - DNA, 25 bp, Saccharomyces pastorianus
gatggttcgtctcaatttgtatcac

SEQ ID NO: 52155 - DNA, 25 bp, Saccharomyces pastorianus
atcgctatgaacagcatgtgcgcaa

SEQ ID NO: 52156 - DNA, 25 bp, Saccharomyces pastorianus
ggtactgacccctattatcaatcgt

SEQ ID NO: 52157 - DNA, 25 bp, Saccharomyces pastorianus
gtttgttctgtaacgggccccattg

SEQ ID NO: 52158 - DNA, 25 bp, Saccharomyces pastorianus
atgtgcgcaagcatacccattgcta

SEQ ID NO: 52159 - DNA, 25 bp, Saccharomyces pastorianus
aaatgctgcgttcttggctttagtc

SEQ ID NO: 52160 - DNA, 25 bp, Saccharomyces pastorianus
gtatttaccttgacttcattagctt

SEQ ID NO: 52161 - DNA, 25 bp, Saccharomyces pastorianus
ttagccgccatgtcaatgtatatcg

SEQ ID NO: 52162 - DNA, 25 bp, Saccharomyces pastorianus
gtgccgccaccgttgaagatatcaa

SEQ ID NO: 52163 - DNA, 25 bp, Saccharomyces pastorianus
aactggcaaacttcgcatacattac

SEQ ID NO: 52164 - DNA, 25 bp, Saccharomyces pastorianus
cacttgtttatttattgcctgcaaa

SEQ ID NO: 52165 - DNA, 25 bp, Saccharomyces pastorianus
attaaagacgaatcctcccaatggg

SEQ ID NO: 52166 - DNA, 25 bp, Saccharomyces pastorianus
ggatatcgccgtacccgaaacaaat

SEQ ID NO: 52167 - DNA, 25 bp, Saccharomyces pastorianus
ttgaaaccatcatacttagccgcca

SEQ ID NO: 52168 - DNA, 25 bp, Saccharomyces pastorianus
actttcattcattacagcggtggtg

SEQ ID NO: 52169 - DNA, 25 bp, Saccharomyces pastorianus
acctattggatcgttttctatctca

SEQ ID NO: 52170 - DNA, 25 bp, Saccharomyces pastorianus
gcatacattactgacggtgccgcca

SEQ ID NO: 52171 - DNA, 25 bp, Saccharomyces pastorianus
gaatatttctccatttacgctagtg

SEQ ID NO: 52172 - DNA, 25 bp, Saccharomyces pastorianus
ttgattctttgttccccggcaggcg

SEQ ID NO: 52173 - DNA, 25 bp, Saccharomyces pastorianus
aaaagcaatgttatcaccgtcccta

SEQ ID NO: 52174 - DNA, 25 bp, Saccharomyces pastorianus
ccggcaggcgtatctcacagagatt

SEQ ID NO: 52175 - DNA, 25 bp, Saccharomyces pastorianus
gcggtgaaccaagattatccctgga

SEQ ID NO: 52176 - DNA, 25 bp, Saccharomyces pastorianus
agtgagaaactctcgccagttcggt

SEQ ID NO: 52177 - DNA, 25 bp, Saccharomyces pastorianus
tcgccagttcggttccaaaatcaca

SEQ ID NO: 52178 - DNA, 25 bp, Saccharomyces pastorianus
tatcttgaacggtgatccggatcaa

SEQ ID NO: 52179 - DNA, 25 bp, Saccharomyces pastorianus
gaaaagtctccgtctttcaagaaat

SEQ ID NO: 52180 - DNA, 25 bp, Saccharomyces pastorianus
ttgctctgaagtgtggcggtgaacc

SEQ ID NO: 52181 - DNA, 25 bp, Saccharomyces pastorianus
aacgtggttcagtcgaatacctatt

SEQ ID NO: 52182 - DNA, 25 bp, Saccharomyces pastorianus
gtcttcatcttcgtcaatgtcttcg

SEQ ID NO: 52183 - DNA, 25 bp, Saccharomyces pastorianus
gaagagtcgaaaacgtcctcacctt

SEQ ID NO: 52184 - DNA, 25 bp, Saccharomyces pastorianus
gttcctaaatcttcgttttcatcat

SEQ ID NO: 52185 - DNA, 25 bp, Saccharomyces pastorianus
atgcttgttcctaaatcttcgtttt

SEQ ID NO: 52186 - DNA, 25 bp, Saccharomyces pastorianus
tatttcctcgtcgtccctagggact

SEQ ID NO: 52187 - DNA, 25 bp, Saccharomyces pastorianus
tcgttgtcattcactatttcctcgt

SEQ ID NO: 52188 - DNA, 25 bp, Saccharomyces pastorianus
ttcgtcctcctctgaagagtcgaaa

SEQ ID NO: 52189 - DNA, 25 bp, Saccharomyces pastorianus
ctaaatcttcgttttcatcatcatc

SEQ ID NO: 52190 - DNA, 25 bp, Saccharomyces pastorianus
ttgtcattcactatttcctcgtcgt

SEQ ID NO: 52191 - DNA, 25 bp, Saccharomyces pastorianus
aaaacgtcctcaccttcttcttcat

SEQ ID NO: 52192 - DNA, 25 bp, Saccharomyces pastorianus
aatgtcttcgtcctcctctgaagag

SEQ ID NO: 52193 - DNA, 25 bp, Saccharomyces pastorianus
agccaagaggtttgaactctgctag

SEQ ID NO: 52194 - DNA, 25 bp, Saccharomyces pastorianus
gccaagaggtttgaactctgctaga

SEQ ID NO: 52195 - DNA, 25 bp, Saccharomyces pastorianus
gaactctgctagaaaattgcgtgtc

SEQ ID NO: 52196 - DNA, 25 bp, Saccharomyces pastorianus
ggtaagccaagaggtttgaactctg

SEQ ID NO: 52197 - DNA, 25 bp, Saccharomyces pastorianus
aactctgctagaaaattgcgtgtcc

SEQ ID NO: 52198 - DNA, 25 bp, Saccharomyces pastorianus
ctctgctagaaaattgcgtgtccac

SEQ ID NO: 52199 - DNA, 25 bp, Saccharomyces pastorianus
actctgctagaaaattgcgtgtcca

SEQ ID NO: 52200 - DNA, 25 bp, Saccharomyces pastorianus
aagccaagaggtttgaactctgcta

SEQ ID NO: 52201 - DNA, 25 bp, Saccharomyces pastorianus
gtaagccaagaggtttgaactctgc

SEQ ID NO: 52202 - DNA, 25 bp, Saccharomyces pastorianus
aggtaagccaagaggtttgaactct

SEQ ID NO: 52203 - DNA, 25 bp, Saccharomyces pastorianus
taagccaagaggtttgaactctgct

SEQ ID NO: 52204 - DNA, 25 bp, Saccharomyces pastorianus
tctaacatttttacttacccatccg

SEQ ID NO: 52205 - DNA, 25 bp, Saccharomyces pastorianus
aacaggcgatcgtaacatgtccaaa

SEQ ID NO: 52206 - DNA, 25 bp, Saccharomyces pastorianus
ctggattccattgggctattttcat

SEQ ID NO: 52207 - DNA, 25 bp, Saccharomyces pastorianus
accacagtcaaagctctcagttatt

SEQ ID NO: 52208 - DNA, 25 bp, Saccharomyces pastorianus
gagaccaaccaaggctgttcaaaca

SEQ ID NO: 52209 - DNA, 25 bp, Saccharomyces pastorianus
cttttgtcactagttctggattcca

SEQ ID NO: 52210 - DNA, 25 bp, Saccharomyces pastorianus
ttagaaggtaccctcttggataatc

SEQ ID NO: 52211 - DNA, 25 bp, Saccharomyces pastorianus
gtacacataacttgctatcccgttt

SEQ ID NO: 52212 - DNA, 25 bp, Saccharomyces pastorianus
gaactctgatagtacaacttctcaa

SEQ ID NO: 52213 - DNA, 25 bp, Saccharomyces pastorianus
gctgtttccattgaaccgtacacat

SEQ ID NO: 52214 - DNA, 25 bp, Saccharomyces pastorianus
gggttctcaacatgggtttactaat

SEQ ID NO: 52215 - DNA, 25 bp, Saccharomyces pastorianus
cggacgacctcttatctcagtataa

SEQ ID NO: 52216 - DNA, 25 bp, Saccharomyces pastorianus
gaaagttcacccattaaagagctat

SEQ ID NO: 52217 - DNA, 25 bp, Saccharomyces pastorianus
aatttgtgttcgttctgtgtccatt

SEQ ID NO: 52218 - DNA, 25 bp, Saccharomyces pastorianus
agcttaatcattgccgtgttacaga

SEQ ID NO: 52219 - DNA, 25 bp, Saccharomyces pastorianus
gtgaataacatcgtctacttgcttg

SEQ ID NO: 52220 - DNA, 25 bp, Saccharomyces pastorianus
aatattcgtttactccctaccacat

SEQ ID NO: 52221 - DNA, 25 bp, Saccharomyces pastorianus
gatttcttttcagcctgtttcggta

SEQ ID NO: 52222 - DNA, 25 bp, Saccharomyces pastorianus
aagcttatacagatacggacgacct

SEQ ID NO: 52223 - DNA, 25 bp, Saccharomyces pastorianus
aacccactaccgaagatgatttgat

SEQ ID NO: 52224 - DNA, 25 bp, Saccharomyces pastorianus
atactcttttgacatctcatacggt

SEQ ID NO: 52225 - DNA, 25 bp, Saccharomyces pastorianus
agcacttgactgaggatggcactga

SEQ ID NO: 52226 - DNA, 25 bp, Saccharomyces pastorianus
aaaagctgctgtggcatttttctac

SEQ ID NO: 52227 - DNA, 25 bp, Saccharomyces pastorianus
aaagtggtggtatctatggccgcta

SEQ ID NO: 52228 - DNA, 25 bp, Saccharomyces pastorianus
tctatggccgctatgattcaaaacg

SEQ ID NO: 52229 - DNA, 25 bp, Saccharomyces pastorianus
gtggcatttttctacttttcctgtc

SEQ ID NO: 52230 - DNA, 25 bp, Saccharomyces pastorianus
ggccgtaggcattagatgtcattcg

SEQ ID NO: 52231 - DNA, 25 bp, Saccharomyces pastorianus
aagaataagatcacacagggctcag

SEQ ID NO: 52232 - DNA, 25 bp, Saccharomyces pastorianus
agcaggtactgctttggccgtaggc

SEQ ID NO: 52233 - DNA, 25 bp, Saccharomyces pastorianus
atttggctttggtagcagcttcggc

SEQ ID NO: 52234 - DNA, 25 bp, Saccharomyces pastorianus
acagggctcaggttcaaggtgccat

SEQ ID NO: 52235 - DNA, 25 bp, Saccharomyces pastorianus
ttttcctgtcttttgtttctgatca

SEQ ID NO: 52236 - DNA, 25 bp, Saccharomyces pastorianus
aaggtgccatcaagcaaaagctgct

SEQ ID NO: 52237 - DNA, 25 bp, Saccharomyces pastorianus
cgcagaccaagcacagttccagagt

SEQ ID NO: 52238 - DNA, 25 bp, Saccharomyces pastorianus
ataagcacgcagaccaagcacagtt

SEQ ID NO: 52239 - DNA, 25 bp, Saccharomyces pastorianus
tcattaacgctgttttcctgatcat

SEQ ID NO: 52240 - DNA, 25 bp, Saccharomyces pastorianus
tttcctgatcatatcaataggtctg

SEQ ID NO: 52241 - DNA, 25 bp, Saccharomyces pastorianus
ttccagagtgaacttttgcatgttt

SEQ ID NO: 52242 - DNA, 25 bp, Saccharomyces pastorianus
gtggcttgataagcacgcagaccaa

SEQ ID NO: 52243 - DNA, 25 bp, Saccharomyces pastorianus
ttttgcatgtttgccgcggcttacg

SEQ ID NO: 52244 - DNA, 25 bp, Saccharomyces pastorianus
aacgctgttttcctgatcatatcaa

SEQ ID NO: 52245 - DNA, 25 bp, Saccharomyces pastorianus
caataggtctgatcagtggcttgat

SEQ ID NO: 52246 - DNA, 25 bp, Saccharomyces pastorianus
gcggcttacggtctacttactgatt

SEQ ID NO: 52247 - DNA, 25 bp, Saccharomyces pastorianus
acggtctacttactgattcatttta

SEQ ID NO: 52248 - DNA, 25 bp, Saccharomyces pastorianus
ttgatatcctcaagctgcaagactg

SEQ ID NO: 52249 - DNA, 25 bp, Saccharomyces pastorianus
actggacgccggtatgggatatttt

SEQ ID NO: 52250 - DNA, 25 bp, Saccharomyces pastorianus
gggcaatataatacgctgtggcgat

SEQ ID NO: 52251 - DNA, 25 bp, Saccharomyces pastorianus
tggcaccgccgaagataatgtttga

SEQ ID NO: 52252 - DNA, 25 bp, Saccharomyces pastorianus
accgctggacgtggatatgggcaat

SEQ ID NO: 52253 - DNA, 25 bp, Saccharomyces pastorianus
tgcactgtaacgtcaagtcagccac

SEQ ID NO: 52254 - DNA, 25 bp, Saccharomyces pastorianus
acattgtgtacatgccgtttggagg

SEQ ID NO: 52255 - DNA, 25 bp, Saccharomyces pastorianus
agcgggacgctatactgcactgtaa

SEQ ID NO: 52256 - DNA, 25 bp, Saccharomyces pastorianus
aacccgtttgtgagtcaccgctgga

SEQ ID NO: 52257 - DNA, 25 bp, Saccharomyces pastorianus
tgatagacgtccctaattcttaccc

SEQ ID NO: 52258 - DNA, 25 bp, Saccharomyces pastorianus
agccacgggcgaaatatgtcttgat

SEQ ID NO: 52259 - DNA, 25 bp, Saccharomyces pastorianus
attgtgctgtctgatattgaaacca

SEQ ID NO: 52260 - DNA, 25 bp, Saccharomyces pastorianus
attccgctatcagtacattgcgtag

SEQ ID NO: 52261 - DNA, 25 bp, Saccharomyces pastorianus
ataaggtttctctatactccctggg

SEQ ID NO: 52262 - DNA, 25 bp, Saccharomyces pastorianus
gacaatgctgatgttaccgttcaac

SEQ ID NO: 52263 - DNA, 25 bp, Saccharomyces pastorianus
gattactctttcgacacgcaggtgg

SEQ ID NO: 52264 - DNA, 25 bp, Saccharomyces pastorianus
tttaccgttaccaaaggctgacaag

SEQ ID NO: 52265 - DNA, 25 bp, Saccharomyces pastorianus
acattgcgtagcttcataactgatt

SEQ ID NO: 52266 - DNA, 25 bp, Saccharomyces pastorianus
gacatggattggtatcctgcccgaa

SEQ ID NO: 52267 - DNA, 25 bp, Saccharomyces pastorianus
atattgagcctatttccttctaacc

SEQ ID NO: 52268 - DNA, 25 bp, Saccharomyces pastorianus
tatgaacgcagccattttcctatca

SEQ ID NO: 52269 - DNA, 25 bp, Saccharomyces pastorianus
ggtatcctgcccgaagctaaagatt

SEQ ID NO: 52270 - DNA, 25 bp, Saccharomyces pastorianus
cgtgtgttatacttctggctttgga

SEQ ID NO: 52271 - DNA, 25 bp, Saccharomyces pastorianus
gaaagttatgtcacggcgcattata

SEQ ID NO: 52272 - DNA, 25 bp, Saccharomyces pastorianus
ggagctgctgcattaagatctgtga

SEQ ID NO: 52273 - DNA, 25 bp, Saccharomyces pastorianus
ttaccgcacggtttaaacactcagg

SEQ ID NO: 52274 - DNA, 25 bp, Saccharomyces pastorianus
ggacgttactgatttgtttgctgat

SEQ ID NO: 52275 - DNA, 25 bp, Saccharomyces pastorianus
ttgagatcgcacactgcatctttac

SEQ ID NO: 52276 - DNA, 25 bp, Saccharomyces pastorianus
ccatttctgttttccttgttatcat

SEQ ID NO: 52277 - DNA, 25 bp, Saccharomyces pastorianus
gcatctttacttgccctaggagcaa

SEQ ID NO: 52278 - DNA, 25 bp, Saccharomyces pastorianus
gaggtgcccatacaactgaatccat

SEQ ID NO: 52279 - DNA, 25 bp, Saccharomyces pastorianus
aactgcatatatggttaccgcacgg

SEQ ID NO: 52280 - DNA, 25 bp, Saccharomyces pastorianus
gatctgtgatagctactgtactcaa

SEQ ID NO: 52281 - DNA, 25 bp, Saccharomyces pastorianus
atgattgctctaccttttgcattct

SEQ ID NO: 52282 - DNA, 25 bp, Saccharomyces pastorianus
actgctatgattgctctaccttttg

SEQ ID NO: 52283 - DNA, 25 bp, Saccharomyces pastorianus
ggaattgagacataaactgtccaag

SEQ ID NO: 52284 - DNA, 25 bp, Saccharomyces pastorianus
atctctactgctatgattgctctac

SEQ ID NO: 52285 - DNA, 25 bp, Saccharomyces pastorianus
gggttcttggttgttggctttcatc

SEQ ID NO: 52286 - DNA, 25 bp, Saccharomyces pastorianus
ggtaaggaattgagacataaactgt

SEQ ID NO: 52287 - DNA, 25 bp, Saccharomyces pastorianus
gtaccacaaattgaacttacactgg

SEQ ID NO: 52288 - DNA, 25 bp, Saccharomyces pastorianus
ttgctctaccttttgcattctctta

SEQ ID NO: 52289 - DNA, 25 bp, Saccharomyces pastorianus
cttggttgttggctttcatctctac

SEQ ID NO: 52290 - DNA, 25 bp, Saccharomyces pastorianus
ctaccttttgcattctcttactggg

SEQ ID NO: 52291 - DNA, 25 bp, Saccharomyces pastorianus
tgttggctttcatctctactgctat

SEQ ID NO: 52292 - DNA, 25 bp, Saccharomyces pastorianus
ccaaggtgttagtatgagcgaaatg

SEQ ID NO: 52293 - DNA, 25 bp, Saccharomyces pastorianus
gactgaacaagaagcccaaggtgtt

SEQ ID NO: 52294 - DNA, 25 bp, Saccharomyces pastorianus
acatacgctccagtcatcttgaaaa

SEQ ID NO: 52295 - DNA, 25 bp, Saccharomyces pastorianus
atacgctccagtcatcttgaaaaga

SEQ ID NO: 52296 - DNA, 25 bp, Saccharomyces pastorianus
agaagcccaaggtgttagtatgagc

SEQ ID NO: 52297 - DNA, 25 bp, Saccharomyces pastorianus
gtcatcttgaaaagaaaggccgcca

SEQ ID NO: 52298 - DNA, 25 bp, Saccharomyces pastorianus
gcccaaggtgttagtatgagcgaaa

SEQ ID NO: 52299 - DNA, 25 bp, Saccharomyces pastorianus
gaacaagaagcccaaggtgttagta

SEQ ID NO: 52300 - DNA, 25 bp, Saccharomyces pastorianus
aagcccaaggtgttagtatgagcga

SEQ ID NO: 52301 - DNA, 25 bp, Saccharomyces pastorianus
tcttgaaaagaaaggccgccagatt

SEQ ID NO: 52302 - DNA, 25 bp, Saccharomyces pastorianus
catacgctccagtcatcttgaaaag

SEQ ID NO: 52303 - DNA, 25 bp, Saccharomyces pastorianus
ccgaagatcgtctgttgggtgccaa

SEQ ID NO: 52304 - DNA, 25 bp, Saccharomyces pastorianus
gagcttgtttgttaagacctctata

SEQ ID NO: 52305 - DNA, 25 bp, Saccharomyces pastorianus
gccctttggattttaggtgccacct

SEQ ID NO: 52306 - DNA, 25 bp, Saccharomyces pastorianus
gatcttctgggtcaacatggccttc

SEQ ID NO: 52307 - DNA, 25 bp, Saccharomyces pastorianus
attcgctgctattgccctttggatt

SEQ ID NO: 52308 - DNA, 25 bp, Saccharomyces pastorianus
ggtgccacctcttacaaacatatta

SEQ ID NO: 52309 - DNA, 25 bp, Saccharomyces pastorianus
acctctatactttgctgtcaccgaa

SEQ ID NO: 52310 - DNA, 25 bp, Saccharomyces pastorianus
tgttatcggtgctctctgggcccta

SEQ ID NO: 52311 - DNA, 25 bp, Saccharomyces pastorianus
tagccaccaccttttactgtgaaaa

SEQ ID NO: 52312 - DNA, 25 bp, Saccharomyces pastorianus
gtgttatgtggatcgtggcctctgc

SEQ ID NO: 52313 - DNA, 25 bp, Saccharomyces pastorianus
gtggcctctgctattccagaaacat

SEQ ID NO: 52314 - DNA, 25 bp, Saccharomyces pastorianus
gatatctcgaagaagcctaggttca

SEQ ID NO: 52315 - DNA, 25 bp, Saccharomyces pastorianus
ctacgccactttcgactttgaagag

SEQ ID NO: 52316 - DNA, 25 bp, Saccharomyces pastorianus
tacggtatcaccagcgctcgaacaa

SEQ ID NO: 52317 - DNA, 25 bp, Saccharomyces pastorianus
ggcaatcaatgcgttcactcaatga

SEQ ID NO: 52318 - DNA, 25 bp, Saccharomyces pastorianus
tggagacacgaacatcacaattcat

SEQ ID NO: 52319 - DNA, 25 bp, Saccharomyces pastorianus
aaagttgctcgtatcattgaacaaa

SEQ ID NO: 52320 - DNA, 25 bp, Saccharomyces pastorianus
aatacatatgctacgccactttcga

SEQ ID NO: 52321 - DNA, 25 bp, Saccharomyces pastorianus
ataaggatgaccgtcaacccatctc

SEQ ID NO: 52322 - DNA, 25 bp, Saccharomyces pastorianus
gagttttatattcacttggtcaacc

SEQ ID NO: 52323 - DNA, 25 bp, Saccharomyces pastorianus
gttcagtggtaaatacgcggagcct

SEQ ID NO: 52324 - DNA, 25 bp, Saccharomyces pastorianus
gatgaacagcctttcatgctggaca

SEQ ID NO: 52325 - DNA, 25 bp, Saccharomyces pastorianus
tatttcacctgtattagaagacgtt

SEQ ID NO: 52326 - DNA, 25 bp, Saccharomyces pastorianus
caatgagctgttaactagatcgccc

SEQ ID NO: 52327 - DNA, 25 bp, Saccharomyces pastorianus
attcagattcctcaataacaagcaa

SEQ ID NO: 52328 - DNA, 25 bp, Saccharomyces pastorianus
caagaagagagtaggcaagcaaaaa

SEQ ID NO: 52329 - DNA, 25 bp, Saccharomyces pastorianus
caaaaagctaggagagcggagcaaa

SEQ ID NO: 52330 - DNA, 25 bp, Saccharomyces pastorianus
gaagtaaggcacaacattagcaatg

SEQ ID NO: 52331 - DNA, 25 bp, Saccharomyces pastorianus
aaaaacatatttcacctgtattaga

SEQ ID NO: 52332 - DNA, 25 bp, Saccharomyces pastorianus
gtcactggaagcgacaatgaaagta

SEQ ID NO: 52333 - DNA, 25 bp, Saccharomyces pastorianus
gattcctcaataacaagcaacgttt

SEQ ID NO: 52334 - DNA, 25 bp, Saccharomyces pastorianus
gcaatgttgatgtcactggaagcga

SEQ ID NO: 52335 - DNA, 25 bp, Saccharomyces pastorianus
gaggttgataggtacaatgagctgt

SEQ ID NO: 52336 - DNA, 25 bp, Saccharomyces pastorianus
attctatccctctctccaaaaagag

SEQ ID NO: 52337 - DNA, 25 bp, Saccharomyces pastorianus
cgccaaccggatataatctaagctt

SEQ ID NO: 52338 - DNA, 25 bp, Saccharomyces pastorianus
gactccagtgacaaatatgctcttt

SEQ ID NO: 52339 - DNA, 25 bp, Saccharomyces pastorianus
gaggatctagacttcaaagctattg

SEQ ID NO: 52340 - DNA, 25 bp, Saccharomyces pastorianus
gaagtacctcaagaacagcctcaag

SEQ ID NO: 52341 - DNA, 25 bp, Saccharomyces pastorianus
gaagttgaaccattctatccctctc

SEQ ID NO: 52342 - DNA, 25 bp, Saccharomyces pastorianus
gaccaacttaccacgtcgttgaaga

SEQ ID NO: 52343 - DNA, 25 bp, Saccharomyces pastorianus
tgaactctcagcaaccaaagatggt

SEQ ID NO: 52344 - DNA, 25 bp, Saccharomyces pastorianus
tatacactttcggaaacgccaaccg

SEQ ID NO: 52345 - DNA, 25 bp, Saccharomyces pastorianus
aggagagtcgctacagaccaactta

SEQ ID NO: 52346 - DNA, 25 bp, Saccharomyces pastorianus
tgttattggctgtggcgtcgaaaat

SEQ ID NO: 52347 - DNA, 25 bp, Saccharomyces pastorianus
tgttattttgtctaccactggtcac

SEQ ID NO: 52348 - DNA, 25 bp, Saccharomyces pastorianus
attcggtgcattctgtgccaagaga

SEQ ID NO: 52349 - DNA, 25 bp, Saccharomyces pastorianus
tggtcacgatggtccattcggtgca

SEQ ID NO: 52350 - DNA, 25 bp, Saccharomyces pastorianus
tatccactctggttcttacgaaggt

SEQ ID NO: 52351 - DNA, 25 bp, Saccharomyces pastorianus
aatgtcaaactattcaacgccacct

SEQ ID NO: 52352 - DNA, 25 bp, Saccharomyces pastorianus
ctggacattagtcaccatggctcat

SEQ ID NO: 52353 - DNA, 25 bp, Saccharomyces pastorianus
catggctcatggtactcaatgttgc

SEQ ID NO: 52354 - DNA, 25 bp, Saccharomyces pastorianus
tttgagccagaagcacggtgttatt

SEQ ID NO: 52355 - DNA, 25 bp, Saccharomyces pastorianus
ttcgccggtatggaagttgccgaat

SEQ ID NO: 52356 - DNA, 25 bp, Saccharomyces pastorianus
gacggtacccgtgatttgagccaga

SEQ ID NO: 52357 - DNA, 25 bp, Saccharomyces pastorianus
atgctgctttattcatctccactgt

SEQ ID NO: 52358 - DNA, 25 bp, Saccharomyces pastorianus
agtttgctcctatccgtgagtctac

SEQ ID NO: 52359 - DNA, 25 bp, Saccharomyces pastorianus
tattattgtcggtgctggttcttcc

SEQ ID NO: 52360 - DNA, 25 bp, Saccharomyces pastorianus
tacttccacttctcaattgcacttg

SEQ ID NO: 52361 - DNA, 25 bp, Saccharomyces pastorianus
atttcaagtttgctcctatccgtga

SEQ ID NO: 52362 - DNA, 25 bp, Saccharomyces pastorianus
tgaactctaccccagttactcattg

SEQ ID NO: 52363 - DNA, 25 bp, Saccharomyces pastorianus
gagtctaccgtctcccgtgccatga

SEQ ID NO: 52364 - DNA, 25 bp, Saccharomyces pastorianus
aagattggtctgatttcaagtttgc

SEQ ID NO: 52365 - DNA, 25 bp, Saccharomyces pastorianus
gacaagtttgccgtctctgatgtta

SEQ ID NO: 52366 - DNA, 25 bp, Saccharomyces pastorianus
tgccgtctctgatgttattattgtc

SEQ ID NO: 52367 - DNA, 25 bp, Saccharomyces pastorianus
gttactcattgcttatctgatattg

SEQ ID NO: 52368 - DNA, 25 bp, Saccharomyces pastorianus
tggttcttccggtttatctgctgct

SEQ ID NO: 52369 - DNA, 25 bp, Saccharomyces pastorianus
tggattcgttacaagctagctgcag

SEQ ID NO: 52370 - DNA, 25 bp, Saccharomyces pastorianus
aagttacaacctgattcggatgcgg

SEQ ID NO: 52371 - DNA, 25 bp, Saccharomyces pastorianus
catcatacctccttgtgtcatgtat

SEQ ID NO: 52372 - DNA, 25 bp, Saccharomyces pastorianus
catggattgccgcttgactacaagt

SEQ ID NO: 52373 - DNA, 25 bp, Saccharomyces pastorianus
gataggctacgtcttgaagtcgaaa

SEQ ID NO: 52374 - DNA, 25 bp, Saccharomyces pastorianus
tgcggtttctgatgcatctgtgaat

SEQ ID NO: 52375 - DNA, 25 bp, Saccharomyces pastorianus
gctgcagctctatttttaatcattg

SEQ ID NO: 52376 - DNA, 25 bp, Saccharomyces pastorianus
ggtgatttatacactctctcaatac

SEQ ID NO: 52377 - DNA, 25 bp, Saccharomyces pastorianus
gtacttaaccactcaccagttcaaa

SEQ ID NO: 52378 - DNA, 25 bp, Saccharomyces pastorianus
attgtattcctttgggcagcccata

SEQ ID NO: 52379 - DNA, 25 bp, Saccharomyces pastorianus
ggacatccctttactacttgatttg

SEQ ID NO: 52380 - DNA, 25 bp, Saccharomyces pastorianus
gatagcgtcaaaagtcgtttccaaa

SEQ ID NO: 52381 - DNA, 25 bp, Saccharomyces pastorianus
ttctcgatccgatagcgtcaaaagt

SEQ ID NO: 52382 - DNA, 25 bp, Saccharomyces pastorianus
agcgtcaaaagtcgtttccaaatat

SEQ ID NO: 52383 - DNA, 25 bp, Saccharomyces pastorianus
gtttccaaatattaccatggctcga

SEQ ID NO: 52384 - DNA, 25 bp, Saccharomyces pastorianus
ttagaatttctcgatccgatagcgt

SEQ ID NO: 52385 - DNA, 25 bp, Saccharomyces pastorianus
gatccgatagcgtcaaaagtcgttt

SEQ ID NO: 52386 - DNA, 25 bp, Saccharomyces pastorianus
ttaccatggctcgatctttcagagc

SEQ ID NO: 52387 - DNA, 25 bp, Saccharomyces pastorianus
gtctcactaacgagtcttttagaat

SEQ ID NO: 52388 - DNA, 25 bp, Saccharomyces pastorianus
tattaccatggctcgatctttcaga

SEQ ID NO: 52389 - DNA, 25 bp, Saccharomyces pastorianus
aattctgtctcactaacgagtcttt

SEQ ID NO: 52390 - DNA, 25 bp, Saccharomyces pastorianus
gaatttctcgatccgatagcgtcaa

SEQ ID NO: 52391 - DNA, 25 bp, Saccharomyces pastorianus
gattggcgttgagctttctactgaa

SEQ ID NO: 52392 - DNA, 25 bp, Saccharomyces pastorianus
aaactggaaactgcctatcgaactt

SEQ ID NO: 52393 - DNA, 25 bp, Saccharomyces pastorianus
gtgtcgcctgaaccaataactttaa

SEQ ID NO: 52394 - DNA, 25 bp, Saccharomyces pastorianus
ggagtgcgactttcaaaacctcata

SEQ ID NO: 52395 - DNA, 25 bp, Saccharomyces pastorianus
atctcgttgccggtattgaacactg

SEQ ID NO: 52396 - DNA, 25 bp, Saccharomyces pastorianus
cggtaaattttatcctctaggcaat

SEQ ID NO: 52397 - DNA, 25 bp, Saccharomyces pastorianus
ttaggtatcactccggaaactccca

SEQ ID NO: 52398 - DNA, 25 bp, Saccharomyces pastorianus
acctcatacatgaaccacggcttga

SEQ ID NO: 52399 - DNA, 25 bp, Saccharomyces pastorianus
tcatcgatacaagggctgaccgtga

SEQ ID NO: 52400 - DNA, 25 bp, Saccharomyces pastorianus
ggaaactcccataaggttctattga

SEQ ID NO: 52401 - DNA, 25 bp, Saccharomyces pastorianus
aacgttatctcgcatagggtctgga

SEQ ID NO: 52402 - DNA, 25 bp, Saccharomyces pastorianus
tatggcgatgactttggttccgaat

SEQ ID NO: 52403 - DNA, 25 bp, Saccharomyces pastorianus
gaattacgactactcaagaccacta

SEQ ID NO: 52404 - DNA, 25 bp, Saccharomyces pastorianus
acagagttcttttggtgtccgtatt

SEQ ID NO: 52405 - DNA, 25 bp, Saccharomyces pastorianus
aatatctcccctcatccaatgtatt

SEQ ID NO: 52406 - DNA, 25 bp, Saccharomyces pastorianus
gggttactatggtctatcgttgatt

SEQ ID NO: 52407 - DNA, 25 bp, Saccharomyces pastorianus
gtacactcaagtgcattcgtatgaa

SEQ ID NO: 52408 - DNA, 25 bp, Saccharomyces pastorianus
gacaattcaaactgggcttcaaatg

SEQ ID NO: 52409 - DNA, 25 bp, Saccharomyces pastorianus
agtggcgctcaccttgggagcaatc

SEQ ID NO: 52410 - DNA, 25 bp, Saccharomyces pastorianus
aatcggtttcctggctatttatctc

SEQ ID NO: 52411 - DNA, 25 bp, Saccharomyces pastorianus
ggctatttatctccactatactgta

SEQ ID NO: 52412 - DNA, 25 bp, Saccharomyces pastorianus
ctattggtactgtagtggcgctcac

SEQ ID NO: 52413 - DNA, 25 bp, Saccharomyces pastorianus
ataacacctacttgaatggcaccaa

SEQ ID NO: 52414 - DNA, 25 bp, Saccharomyces pastorianus
gccactctttctgggctcaaagtat

SEQ ID NO: 52415 - DNA, 25 bp, Saccharomyces pastorianus
ccggtatcaacatctacggtatgca

SEQ ID NO: 52416 - DNA, 25 bp, Saccharomyces pastorianus
tgtccggatattatgccactctttc

SEQ ID NO: 52417 - DNA, 25 bp, Saccharomyces pastorianus
tctcgactacgtccctagtgaacaa

SEQ ID NO: 52418 - DNA, 25 bp, Saccharomyces pastorianus
gaataggcgggatttcttcatcaag

SEQ ID NO: 52419 - DNA, 25 bp, Saccharomyces pastorianus
agattcagtcttggagccatctcga

SEQ ID NO: 52420 - DNA, 25 bp, Saccharomyces pastorianus
cgccgctggatcttgttgtatacta

SEQ ID NO: 52421 - DNA, 25 bp, Saccharomyces pastorianus
agtactctagcaccaacaacatcat

SEQ ID NO: 52422 - DNA, 25 bp, Saccharomyces pastorianus
gattataaagttccagtggtgcccc

SEQ ID NO: 52423 - DNA, 25 bp, Saccharomyces pastorianus
ggaggcatctccaatccgtcattaa

SEQ ID NO: 52424 - DNA, 25 bp, Saccharomyces pastorianus
gagattcatttatccccaagagcac

SEQ ID NO: 52425 - DNA, 25 bp, Saccharomyces pastorianus
aaccagtatttccaaggtgcataag

SEQ ID NO: 52426 - DNA, 25 bp, Saccharomyces pastorianus
aaaacagcccatctagatacttcta

SEQ ID NO: 52427 - DNA, 25 bp, Saccharomyces pastorianus
actcctcaccagtttcagacggtag

SEQ ID NO: 52428 - DNA, 25 bp, Saccharomyces pastorianus
ggcgaaactcttcaagcgaaccaag

SEQ ID NO: 52429 - DNA, 25 bp, Saccharomyces pastorianus
cagtttattcttggtcatcgacggc

SEQ ID NO: 52430 - DNA, 25 bp, Saccharomyces pastorianus
aagatgaccgctgctcaaaagctct

SEQ ID NO: 52431 - DNA, 25 bp, Saccharomyces pastorianus
tttactcaggttggcgagaagctct

SEQ ID NO: 52432 - DNA, 25 bp, Saccharomyces pastorianus
gacggccattacatcaaccagtatt

SEQ ID NO: 52433 - DNA, 25 bp, Saccharomyces pastorianus
gatgcagatctcagcaatcgcgact

SEQ ID NO: 52434 - DNA, 25 bp, Saccharomyces pastorianus
aaagctctcttcaaatcgaatgtgg

SEQ ID NO: 52435 - DNA, 25 bp, Saccharomyces pastorianus
ggcagtactgttgcacctactagta

SEQ ID NO: 52436 - DNA, 25 bp, Saccharomyces pastorianus
cggaattcgaaagcgtgccagccaa

SEQ ID NO: 52437 - DNA, 25 bp, Saccharomyces pastorianus
gtgccagccaaccagagtacagaat

SEQ ID NO: 52438 - DNA, 25 bp, Saccharomyces pastorianus
gaatccaccaaagaggaccgttctg

SEQ ID NO: 52439 - DNA, 25 bp, Saccharomyces pastorianus
agaagatgcttcaaaggatgccgaa

SEQ ID NO: 52440 - DNA, 25 bp, Saccharomyces pastorianus
acaacttgggatcgtgtactacaat

SEQ ID NO: 52441 - DNA, 25 bp, Saccharomyces pastorianus
atggaaccaacgtcgtgctacggaa

SEQ ID NO: 52442 - DNA, 25 bp, Saccharomyces pastorianus
atcggcgtcgatcaaacggcagtac

SEQ ID NO: 52443 - DNA, 25 bp, Saccharomyces pastorianus
ggatgccgaagctttcttgaaaaaa

SEQ ID NO: 52444 - DNA, 25 bp, Saccharomyces pastorianus
gacgaagccgttaaacatgttgaca

SEQ ID NO: 52445 - DNA, 25 bp, Saccharomyces pastorianus
agagcgacgatttctcggaattcga

SEQ ID NO: 52446 - DNA, 25 bp, Saccharomyces pastorianus
ggcaatggtgaaatcccaacgacaa

SEQ ID NO: 52447 - DNA, 25 bp, Saccharomyces pastorianus
gaagcttctcctgcggatgacgaaa

SEQ ID NO: 52448 - DNA, 25 bp, Saccharomyces pastorianus
acaattccctgatatcaactctggc

SEQ ID NO: 52449 - DNA, 25 bp, Saccharomyces pastorianus
ggaaaacgaagcttctcctgcggat

SEQ ID NO: 52450 - DNA, 25 bp, Saccharomyces pastorianus
agtcggagacgagttcaggactgaa

SEQ ID NO: 52451 - DNA, 25 bp, Saccharomyces pastorianus
cctgatatcaactctggcaatggtg

SEQ ID NO: 52452 - DNA, 25 bp, Saccharomyces pastorianus
tcaggactgaacaagacgacgaaat

SEQ ID NO: 52453 - DNA, 25 bp, Saccharomyces pastorianus
cctgcggatgacgaaattaaagatt

SEQ ID NO: 52454 - DNA, 25 bp, Saccharomyces pastorianus
gagaagctgaaatagtcggagacga

SEQ ID NO: 52455 - DNA, 25 bp, Saccharomyces pastorianus
gattttgaagaacaattccctgata

SEQ ID NO: 52456 - DNA, 25 bp, Saccharomyces pastorianus
ggaagacgataccagttttttgaga

SEQ ID NO: 52457 - DNA, 25 bp, Saccharomyces pastorianus
gactacaggccatttttaacggatt

SEQ ID NO: 52458 - DNA, 25 bp, Saccharomyces pastorianus
ggaattcgttatcgtttcgtgcact

SEQ ID NO: 52459 - DNA, 25 bp, Saccharomyces pastorianus
ttgcggtggattgtgatgcttctca

SEQ ID NO: 52460 - DNA, 25 bp, Saccharomyces pastorianus
agagtggctccaaccatgacattag

SEQ ID NO: 52461 - DNA, 25 bp, Saccharomyces pastorianus
ggtaattagcccactctttgtgaaa

SEQ ID NO: 52462 - DNA, 25 bp, Saccharomyces pastorianus
tttcgtgcacttttcgactacaggc

SEQ ID NO: 52463 - DNA, 25 bp, Saccharomyces pastorianus
gatgcttctcacatttactttgata

SEQ ID NO: 52464 - DNA, 25 bp, Saccharomyces pastorianus
atgacattaggaacttctcgcaatc

SEQ ID NO: 52465 - DNA, 25 bp, Saccharomyces pastorianus
ttctcgcaatcactcggtgtcaaaa

SEQ ID NO: 52466 - DNA, 25 bp, Saccharomyces pastorianus
gtgcatcgagtacttattcgcggcc

SEQ ID NO: 52467 - DNA, 25 bp, Saccharomyces pastorianus
attcgcggccaaaagacgtatgttg

SEQ ID NO: 52468 - DNA, 25 bp, Saccharomyces pastorianus
ggtaaggctgattccgtattcaaac

SEQ ID NO: 52469 - DNA, 25 bp, Saccharomyces pastorianus
ggctgattccgtattcaaacagata

SEQ ID NO: 52470 - DNA, 25 bp, Saccharomyces pastorianus
atactactacagctttcatctcttg

SEQ ID NO: 52471 - DNA, 25 bp, Saccharomyces pastorianus
gctttcatctcttgtgaaccggaaa

SEQ ID NO: 52472 - DNA, 25 bp, Saccharomyces pastorianus
acagctttcatctcttgtgaaccgg

SEQ ID NO: 52473 - DNA, 25 bp, Saccharomyces pastorianus
gcgcaaccgttcaaatgataatggt

SEQ ID NO: 52474 - DNA, 25 bp, Saccharomyces pastorianus
aaacagatactactacagctttcat

SEQ ID NO: 52475 - DNA, 25 bp, Saccharomyces pastorianus
taatggtaaggctgattccgtattc

SEQ ID NO: 52476 - DNA, 25 bp, Saccharomyces pastorianus
ctactacagctttcatctcttgtga

SEQ ID NO: 52477 - DNA, 25 bp, Saccharomyces pastorianus
gaagcgcaaccgttcaaatgataat

SEQ ID NO: 52478 - DNA, 25 bp, Saccharomyces pastorianus
ttcatctcttgtgaaccggaaaaga

SEQ ID NO: 52479 - DNA, 25 bp, Saccharomyces pastorianus
attctatgccaacccataatgccag

SEQ ID NO: 52480 - DNA, 25 bp, Saccharomyces pastorianus
gaggatggcgatttccaggaacaaa

SEQ ID NO: 52481 - DNA, 25 bp, Saccharomyces pastorianus
aaagtcttctcgaccgcattgatgt

SEQ ID NO: 52482 - DNA, 25 bp, Saccharomyces pastorianus
gaggaggactataactttcattgaa

SEQ ID NO: 52483 - DNA, 25 bp, Saccharomyces pastorianus
agaattctcaccattctatgccaac

SEQ ID NO: 52484 - DNA, 25 bp, Saccharomyces pastorianus
gtgttgcggctcgaagtttgatgtc

SEQ ID NO: 52485 - DNA, 25 bp, Saccharomyces pastorianus
atgccagctctttcacaaagtcttc

SEQ ID NO: 52486 - DNA, 25 bp, Saccharomyces pastorianus
taatgatgcgaacaccctagtccaa

SEQ ID NO: 52487 - DNA, 25 bp, Saccharomyces pastorianus
taaccctattccagtattcccaact

SEQ ID NO: 52488 - DNA, 25 bp, Saccharomyces pastorianus
gaggtggaccaacaagacgctataa

SEQ ID NO: 52489 - DNA, 25 bp, Saccharomyces pastorianus
tgaaccagagatctcccagcaaatt

SEQ ID NO: 52490 - DNA, 25 bp, Saccharomyces pastorianus
ttcccagagcgacgatcctatttgg

SEQ ID NO: 52491 - DNA, 25 bp, Saccharomyces pastorianus
agatcgtccaagagacttcccagag

SEQ ID NO: 52492 - DNA, 25 bp, Saccharomyces pastorianus
agccaactttctcctgaattacgtt

SEQ ID NO: 52493 - DNA, 25 bp, Saccharomyces pastorianus
ggagcattgcttttcaagtatacca

SEQ ID NO: 52494 - DNA, 25 bp, Saccharomyces pastorianus
ctatttggaaaacaggccctcttca

SEQ ID NO: 52495 - DNA, 25 bp, Saccharomyces pastorianus
agtagagaccatttcgccaaagtaa

SEQ ID NO: 52496 - DNA, 25 bp, Saccharomyces pastorianus
ttacgtcaggcagagcagcgggctt

SEQ ID NO: 52497 - DNA, 25 bp, Saccharomyces pastorianus
aggccctcttcaatcaccatgggaa

SEQ ID NO: 52498 - DNA, 25 bp, Saccharomyces pastorianus
tataccacaccaacagacgaacagc

SEQ ID NO: 52499 - DNA, 25 bp, Saccharomyces pastorianus
gaatcaggaacgaactttctcagtt

SEQ ID NO: 52500 - DNA, 25 bp, Saccharomyces pastorianus
ctacgcaatcggtggtgcagttatt

SEQ ID NO: 52501 - DNA, 25 bp, Saccharomyces pastorianus
tggaaggtatcatgatcttaatcac

SEQ ID NO: 52502 - DNA, 25 bp, Saccharomyces pastorianus
gggttgccaatggccttattggaag

SEQ ID NO: 52503 - DNA, 25 bp, Saccharomyces pastorianus
gttgccaatggccttattggaaggt

SEQ ID NO: 52504 - DNA, 25 bp, Saccharomyces pastorianus
agggttgccaatggccttattggaa

SEQ ID NO: 52505 - DNA, 25 bp, Saccharomyces pastorianus
tgccaatggccttattggaaggtat

SEQ ID NO: 52506 - DNA, 25 bp, Saccharomyces pastorianus
atgatcttaatcacagctattaggg

SEQ ID NO: 52507 - DNA, 25 bp, Saccharomyces pastorianus
cttaatcacagctattagggtattc

SEQ ID NO: 52508 - DNA, 25 bp, Saccharomyces pastorianus
ggtatcatgatcttaatcacagcta

SEQ ID NO: 52509 - DNA, 25 bp, Saccharomyces pastorianus
gtatcatgatcttaatcacagctat

SEQ ID NO: 52510 - DNA, 25 bp, Saccharomyces pastorianus
gaaggtatcatgatcttaatcacag

SEQ ID NO: 52511 - DNA, 25 bp, Saccharomyces pastorianus
gatcttaatcacagctattagggta

SEQ ID NO: 52512 - DNA, 25 bp, Saccharomyces pastorianus
taacggagaccacttgatcggcttg

SEQ ID NO: 52513 - DNA, 25 bp, Saccharomyces pastorianus
atcggcttgggcacactacaactag

SEQ ID NO: 52514 - DNA, 25 bp, Saccharomyces pastorianus
gtactaccacgactgcttcttaaag

SEQ ID NO: 52515 - DNA, 25 bp, Saccharomyces pastorianus
agaggcggtgccatcatcagcaaca

SEQ ID NO: 52516 - DNA, 25 bp, Saccharomyces pastorianus
acggcgcaaacgttggtggttcaca

SEQ ID NO: 52517 - DNA, 25 bp, Saccharomyces pastorianus
gttttcaccaagtccttccttgaat

SEQ ID NO: 52518 - DNA, 25 bp, Saccharomyces pastorianus
gagactcctacaaatacggcgcaaa

SEQ ID NO: 52519 - DNA, 25 bp, Saccharomyces pastorianus
attacacctatttgatctcctcttt

SEQ ID NO: 52520 - DNA, 25 bp, Saccharomyces pastorianus
tggccctcccaagtagcacaagaag

SEQ ID NO: 52521 - DNA, 25 bp, Saccharomyces pastorianus
acaagttctggcgtctcgtcgagta

SEQ ID NO: 52522 - DNA, 25 bp, Saccharomyces pastorianus
tgaatatgggttcgacgtggccctc

SEQ ID NO: 52523 - DNA, 25 bp, Saccharomyces pastorianus
agaagtgttttcgttgttgccgtct

SEQ ID NO: 52524 - DNA, 25 bp, Saccharomyces pastorianus
gacctccatccagtactcaataaag

SEQ ID NO: 52525 - DNA, 25 bp, Saccharomyces pastorianus
gtatgcaagcacgtcacatgacctt

SEQ ID NO: 52526 - DNA, 25 bp, Saccharomyces pastorianus
gaggcaatttatccagaaccgttat

SEQ ID NO: 52527 - DNA, 25 bp, Saccharomyces pastorianus
aaggaacgcttgctcgagacaatcg

SEQ ID NO: 52528 - DNA, 25 bp, Saccharomyces pastorianus
gaattggcggtatctacccatgaag

SEQ ID NO: 52529 - DNA, 25 bp, Saccharomyces pastorianus
tccactaatggatctgcacaggcag

SEQ ID NO: 52530 - DNA, 25 bp, Saccharomyces pastorianus
gaccctattaaaagcacgaccgatg

SEQ ID NO: 52531 - DNA, 25 bp, Saccharomyces pastorianus
gcaaaattcccctccagaatatcgg

SEQ ID NO: 52532 - DNA, 25 bp, Saccharomyces pastorianus
aaacctgatgtggaacgaccctatt

SEQ ID NO: 52533 - DNA, 25 bp, Saccharomyces pastorianus
gaccgatgtgggactcgacaacaaa

SEQ ID NO: 52534 - DNA, 25 bp, Saccharomyces pastorianus
gtatcttccaggctggtaactacgc

SEQ ID NO: 52535 - DNA, 25 bp, Saccharomyces pastorianus
gaaattgctactttgcccgaagtga

SEQ ID NO: 52536 - DNA, 25 bp, Saccharomyces pastorianus
aaagacttgtggctttcgctgccaa

SEQ ID NO: 52537 - DNA, 25 bp, Saccharomyces pastorianus
ttacaccgacttctcgtgcttgtta

SEQ ID NO: 52538 - DNA, 25 bp, Saccharomyces pastorianus
gaagtactactctaactctttgccc

SEQ ID NO: 52539 - DNA, 25 bp, Saccharomyces pastorianus
gctgatggtctattactcggtttcg

SEQ ID NO: 52540 - DNA, 25 bp, Saccharomyces pastorianus
gaaagaatcatcaccgaagccgtcg

SEQ ID NO: 52541 - DNA, 25 bp, Saccharomyces pastorianus
aggccgcctacgttcaaagatggat

SEQ ID NO: 52542 - DNA, 25 bp, Saccharomyces pastorianus
gtgcttgttattcgctcatttgaga

SEQ ID NO: 52543 - DNA, 25 bp, Saccharomyces pastorianus
aactacgcctccatgttctggttaa

SEQ ID NO: 52544 - DNA, 25 bp, Saccharomyces pastorianus
tagtgatgtgtccaagtcttctgcc

SEQ ID NO: 52545 - DNA, 25 bp, Saccharomyces pastorianus
ggagaaatcgttcccagcgtcaaag

SEQ ID NO: 52546 - DNA, 25 bp, Saccharomyces pastorianus
ataacgagagttgggaccgctataa

SEQ ID NO: 52547 - DNA, 25 bp, Saccharomyces pastorianus
gactacgacgaatctcctttacgtg

SEQ ID NO: 52548 - DNA, 25 bp, Saccharomyces pastorianus
tttgcggatttgacacacgatgcca

SEQ ID NO: 52549 - DNA, 25 bp, Saccharomyces pastorianus
agaactttctttgtgggtggagctt

SEQ ID NO: 52550 - DNA, 25 bp, Saccharomyces pastorianus
aaattcgctcaagtcatcggcgcta

SEQ ID NO: 52551 - DNA, 25 bp, Saccharomyces pastorianus
aagaatctctcctttactttcggat

SEQ ID NO: 52552 - DNA, 25 bp, Saccharomyces pastorianus
gaacgataatttcccatggcatgta

SEQ ID NO: 52553 - DNA, 25 bp, Saccharomyces pastorianus
gtgtgcccttggtggctgctacaag

SEQ ID NO: 52554 - DNA, 25 bp, Saccharomyces pastorianus
taggtgtatacttccctcttggaga

SEQ ID NO: 52555 - DNA, 25 bp, Saccharomyces pastorianus
ggccatgtggtcatttttgtacgat

SEQ ID NO: 52556 - DNA, 25 bp, Saccharomyces pastorianus
tcctctcgagaaagtggtagcagtt

SEQ ID NO: 52557 - DNA, 25 bp, Saccharomyces pastorianus
aggactcatactacctcggatttga

SEQ ID NO: 52558 - DNA, 25 bp, Saccharomyces pastorianus
gacgcagcagctgaaatgtctcgcc

SEQ ID NO: 52559 - DNA, 25 bp, Saccharomyces pastorianus
ggcgataccatcgaatgtcccgtgg

SEQ ID NO: 52560 - DNA, 25 bp, Saccharomyces pastorianus
tgcaaagcagggtttcctctcgaga

SEQ ID NO: 52561 - DNA, 25 bp, Saccharomyces pastorianus
aaggcgtttatatccgcggcgatac

SEQ ID NO: 52562 - DNA, 25 bp, Saccharomyces pastorianus
ttgtccattcggaaaccgtcgagtt

SEQ ID NO: 52563 - DNA, 25 bp, Saccharomyces pastorianus
acctcggatttgatctctcgacgca

SEQ ID NO: 52564 - DNA, 25 bp, Saccharomyces pastorianus
gtctcgccattgatcaggacctgaa

SEQ ID NO: 52565 - DNA, 25 bp, Saccharomyces pastorianus
ggttctctcgaagtactgcaaagca

SEQ ID NO: 52566 - DNA, 25 bp, Saccharomyces pastorianus
tggaggcgctagacctggttctctc

SEQ ID NO: 52567 - DNA, 25 bp, Saccharomyces pastorianus
gaggaggaaagtcttccagcattct

SEQ ID NO: 52568 - DNA, 25 bp, Saccharomyces pastorianus
gagcattcatgagcccagttctaaa

SEQ ID NO: 52569 - DNA, 25 bp, Saccharomyces pastorianus
ggtggcacgcgatgcatctttgaaa

SEQ ID NO: 52570 - DNA, 25 bp, Saccharomyces pastorianus
atacgcgaatgcagacgatttgagc

SEQ ID NO: 52571 - DNA, 25 bp, Saccharomyces pastorianus
ggtcgccagcgtcaatcagaatgtt

SEQ ID NO: 52572 - DNA, 25 bp, Saccharomyces pastorianus
gagtaatgtgcccaatctagacgta

SEQ ID NO: 52573 - DNA, 25 bp, Saccharomyces pastorianus
agcagggcgctatcacagggcgaaa

SEQ ID NO: 52574 - DNA, 25 bp, Saccharomyces pastorianus
atcatgtcagggaggcatacgcgaa

SEQ ID NO: 52575 - DNA, 25 bp, Saccharomyces pastorianus
acagttattaatacggtcgccagcg

SEQ ID NO: 52576 - DNA, 25 bp, Saccharomyces pastorianus
tattgatagtcaggtggcacgcgat

SEQ ID NO: 52577 - DNA, 25 bp, Saccharomyces pastorianus
acctttaccgacgattgcacacgaa

SEQ ID NO: 52578 - DNA, 25 bp, Saccharomyces pastorianus
gaattgaacagcacaggtcctaagt

SEQ ID NO: 52579 - DNA, 25 bp, Saccharomyces pastorianus
aaatggtctggatctttgctgcaaa

SEQ ID NO: 52580 - DNA, 25 bp, Saccharomyces pastorianus
gttactatacactgagcctcgacaa

SEQ ID NO: 52581 - DNA, 25 bp, Saccharomyces pastorianus
tcattccccggaggtatggtggtac

SEQ ID NO: 52582 - DNA, 25 bp, Saccharomyces pastorianus
tggacgctctgatcggatttgccga

SEQ ID NO: 52583 - DNA, 25 bp, Saccharomyces pastorianus
ccaagcgggctcaattaacgtttgt

SEQ ID NO: 52584 - DNA, 25 bp, Saccharomyces pastorianus
aggtctgcagcgtacgccaggttaa

SEQ ID NO: 52585 - DNA, 25 bp, Saccharomyces pastorianus
gacgaatataatctggacgctctga

SEQ ID NO: 52586 - DNA, 25 bp, Saccharomyces pastorianus
aaaacgactcggatgccaaggcagc

SEQ ID NO: 52587 - DNA, 25 bp, Saccharomyces pastorianus
gtcaatagaggcgtatcattccccg

SEQ ID NO: 52588 - DNA, 25 bp, Saccharomyces pastorianus
ggatttgccgaattaattttcccag

SEQ ID NO: 52589 - DNA, 25 bp, Saccharomyces pastorianus
tttgtcaccgcctccagagataaga

SEQ ID NO: 52590 - DNA, 25 bp, Saccharomyces pastorianus
gcaaacctgctacagctgtctctgt

SEQ ID NO: 52591 - DNA, 25 bp, Saccharomyces pastorianus
cggaaccaacagatgattacgtcat

SEQ ID NO: 52592 - DNA, 25 bp, Saccharomyces pastorianus
ggcaacttcgaactaatatcacact

SEQ ID NO: 52593 - DNA, 25 bp, Saccharomyces pastorianus
agaggacataacaccagcagataag

SEQ ID NO: 52594 - DNA, 25 bp, Saccharomyces pastorianus
agctgtctctgtgcatgatgccatg

SEQ ID NO: 52595 - DNA, 25 bp, Saccharomyces pastorianus
taaaaccagccttaccgttccacag

SEQ ID NO: 52596 - DNA, 25 bp, Saccharomyces pastorianus
gactgtcaagatctggagacaccaa

SEQ ID NO: 52597 - DNA, 25 bp, Saccharomyces pastorianus
tttgggacgcagattgggcaccatt

SEQ ID NO: 52598 - DNA, 25 bp, Saccharomyces pastorianus
gaaaattcctgctgagtgtttgtag

SEQ ID NO: 52599 - DNA, 25 bp, Saccharomyces pastorianus
gtacagctatttttccggcaacttc

SEQ ID NO: 52600 - DNA, 25 bp, Saccharomyces pastorianus
aaagttaggtacatcgggcgctacg

SEQ ID NO: 52601 - DNA, 25 bp, Saccharomyces pastorianus
gcaccatgggtgtataacgctaacg

SEQ ID NO: 52602 - DNA, 25 bp, Saccharomyces pastorianus
ggtatgggagcctgacgagacctca

SEQ ID NO: 52603 - DNA, 25 bp, Saccharomyces pastorianus
cccagcggtgagtacctattggcaa

SEQ ID NO: 52604 - DNA, 25 bp, Saccharomyces pastorianus
ttggcatgagttttctaggccccaa

SEQ ID NO: 52605 - DNA, 25 bp, Saccharomyces pastorianus
attggcaacttctctggaccagaca

SEQ ID NO: 52606 - DNA, 25 bp, Saccharomyces pastorianus
cacggctgacacttcactaatggta

SEQ ID NO: 52607 - DNA, 25 bp, Saccharomyces pastorianus
aatatcctcgaaaggtgcctcgacc

SEQ ID NO: 52608 - DNA, 25 bp, Saccharomyces pastorianus
tttcatctctccagtggcacgaatc

SEQ ID NO: 52609 - DNA, 25 bp, Saccharomyces pastorianus
gacgtgacggatgtcgcttggtctc

SEQ ID NO: 52610 - DNA, 25 bp, Saccharomyces pastorianus
cagcaagactgtacgcaccatgggt

SEQ ID NO: 52611 - DNA, 25 bp, Saccharomyces pastorianus
ctattacctaatccacctgtctaag

SEQ ID NO: 52612 - DNA, 25 bp, Saccharomyces pastorianus
ggctatggccattgactattaccta

SEQ ID NO: 52613 - DNA, 25 bp, Saccharomyces pastorianus
gaacattgacactatggtctccctc

SEQ ID NO: 52614 - DNA, 25 bp, Saccharomyces pastorianus
tgaaactctcgctgatctaatctct

SEQ ID NO: 52615 - DNA, 25 bp, Saccharomyces pastorianus
ggataaagccttacgatgccgccga

SEQ ID NO: 52616 - DNA, 25 bp, Saccharomyces pastorianus
ggtgatttcaaggtccgtgcggaca

SEQ ID NO: 52617 - DNA, 25 bp, Saccharomyces pastorianus
agacgctcaagtctcgcttttttga

SEQ ID NO: 52618 - DNA, 25 bp, Saccharomyces pastorianus
tggacgtcaagctcaaggaccccag

SEQ ID NO: 52619 - DNA, 25 bp, Saccharomyces pastorianus
acgagtggactctcacggaggctat

SEQ ID NO: 52620 - DNA, 25 bp, Saccharomyces pastorianus
gaacagcagtttctggcgtgcgatt

SEQ ID NO: 52621 - DNA, 25 bp, Saccharomyces pastorianus
aatctctgcgtctgttttttcattg

SEQ ID NO: 52622 - DNA, 25 bp, Saccharomyces pastorianus
gtttgccaatgagttcaccggtgaa

SEQ ID NO: 52623 - DNA, 25 bp, Saccharomyces pastorianus
cccagccacagagtttgccaatgag

SEQ ID NO: 52624 - DNA, 25 bp, Saccharomyces pastorianus
ataaatccattttcagccaagacga

SEQ ID NO: 52625 - DNA, 25 bp, Saccharomyces pastorianus
cagaatttcttggacgacccgctta

SEQ ID NO: 52626 - DNA, 25 bp, Saccharomyces pastorianus
atgcctccagagatttgtatttcga

SEQ ID NO: 52627 - DNA, 25 bp, Saccharomyces pastorianus
atttcgcaagaggagccactaggca

SEQ ID NO: 52628 - DNA, 25 bp, Saccharomyces pastorianus
gaaccaacggtgtctccacaagtga

SEQ ID NO: 52629 - DNA, 25 bp, Saccharomyces pastorianus
gacatcatcaccaagatcatcaggg

SEQ ID NO: 52630 - DNA, 25 bp, Saccharomyces pastorianus
gacccctcccagtgataacgatgat

SEQ ID NO: 52631 - DNA, 25 bp, Saccharomyces pastorianus
gaactcggagtctgattcaaacaca

SEQ ID NO: 52632 - DNA, 25 bp, Saccharomyces pastorianus
gtgaaaaggctaccaccacatcagc

SEQ ID NO: 52633 - DNA, 25 bp, Saccharomyces pastorianus
aggtttgaccgtgctgaccgacaaa

SEQ ID NO: 52634 - DNA, 25 bp, Saccharomyces pastorianus
gatgaagtcataccaaacgctcctg

SEQ ID NO: 52635 - DNA, 25 bp, Saccharomyces pastorianus
atagtcggcgtacccagcgacaaaa

SEQ ID NO: 52636 - DNA, 25 bp, Saccharomyces pastorianus
aacgtaacactcatagtcggcgtac

SEQ ID NO: 52637 - DNA, 25 bp, Saccharomyces pastorianus
acagcgttgcgaaactctgatgcat

SEQ ID NO: 52638 - DNA, 25 bp, Saccharomyces pastorianus
aaataaagacgctcagctcagccca

SEQ ID NO: 52639 - DNA, 25 bp, Saccharomyces pastorianus
aagatcgactatgtggcccacgacg

SEQ ID NO: 52640 - DNA, 25 bp, Saccharomyces pastorianus
agcgccgtcgcttagccaaagaatt

SEQ ID NO: 52641 - DNA, 25 bp, Saccharomyces pastorianus
ttcgatcttttccatctgggccata

SEQ ID NO: 52642 - DNA, 25 bp, Saccharomyces pastorianus
gaggcccgtttgaataccgaattgc

SEQ ID NO: 52643 - DNA, 25 bp, Saccharomyces pastorianus
tatgcggacggtgtgttcgatcttt

SEQ ID NO: 52644 - DNA, 25 bp, Saccharomyces pastorianus
ggactcgtactcgataacaaacgtg

SEQ ID NO: 52645 - DNA, 25 bp, Saccharomyces pastorianus
gcttctcgagttggcaagccgtgta

SEQ ID NO: 52646 - DNA, 25 bp, Saccharomyces pastorianus
atgttgtcacaacagcgcgggccgt

SEQ ID NO: 52647 - DNA, 25 bp, Saccharomyces pastorianus
ggtgttccattgcatgttgtcacaa

SEQ ID NO: 52648 - DNA, 25 bp, Saccharomyces pastorianus
gtacttgcgtgagcttaagcgcctt

SEQ ID NO: 52649 - DNA, 25 bp, Saccharomyces pastorianus
ggcgcgctcaacgtggtgttccatt

SEQ ID NO: 52650 - DNA, 25 bp, Saccharomyces pastorianus
aagagcccttccaggtcgtggacgt

SEQ ID NO: 52651 - DNA, 25 bp, Saccharomyces pastorianus
caaacgtgaagtacctggaccccag

SEQ ID NO: 52652 - DNA, 25 bp, Saccharomyces pastorianus
accgctggatggtcgagggccacac

SEQ ID NO: 52653 - DNA, 25 bp, Saccharomyces pastorianus
agggacggatggcatttcgcctact

SEQ ID NO: 52654 - DNA, 25 bp, Saccharomyces pastorianus
ttaagcgccttttgctggagaagca

SEQ ID NO: 52655 - DNA, 25 bp, Saccharomyces pastorianus
gatatcttgcccgaagctcaacaaa

SEQ ID NO: 52656 - DNA, 25 bp, Saccharomyces pastorianus
aattccaggtttggctacttatgct

SEQ ID NO: 52657 - DNA, 25 bp, Saccharomyces pastorianus
tacttgtacgctcttgctgctgaaa

SEQ ID NO: 52658 - DNA, 25 bp, Saccharomyces pastorianus
taagcaaccagtagacttccacttc

SEQ ID NO: 52659 - DNA, 25 bp, Saccharomyces pastorianus
tcaaggtgaaatcgccgccatcaaa

SEQ ID NO: 52660 - DNA, 25 bp, Saccharomyces pastorianus
tacaggatttaccttccccatcaga

SEQ ID NO: 52661 - DNA, 25 bp, Saccharomyces pastorianus
atcgatttggccaaggcggtctttt

SEQ ID NO: 52662 - DNA, 25 bp, Saccharomyces pastorianus
gatgccgtcacttcgaaccattggg

SEQ ID NO: 52663 - DNA, 25 bp, Saccharomyces pastorianus
attgccaagacccagtactctttat

SEQ ID NO: 52664 - DNA, 25 bp, Saccharomyces pastorianus
aagggtgctgctaacatgtgtaaac

SEQ ID NO: 52665 - DNA, 25 bp, Saccharomyces pastorianus
gaagctggcgcatttgatgccgtca

SEQ ID NO: 52666 - DNA, 25 bp, Saccharomyces pastorianus
attcaacttgcacttgaccggtgac

SEQ ID NO: 52667 - DNA, 25 bp, Saccharomyces pastorianus
agcgctaaccgcacatttgggcaag

SEQ ID NO: 52668 - DNA, 25 bp, Saccharomyces pastorianus
tatcggtgccgctaacaacttgctt

SEQ ID NO: 52669 - DNA, 25 bp, Saccharomyces pastorianus
gaaggtaaatccaccaccacgatgg

SEQ ID NO: 52670 - DNA, 25 bp, Saccharomyces pastorianus
agatcccagctttacccttgaagtt

SEQ ID NO: 52671 - DNA, 25 bp, Saccharomyces pastorianus
atagacatctctagggcgcagcaac

SEQ ID NO: 52672 - DNA, 25 bp, Saccharomyces pastorianus
aagaattgggcatctactcccacga

SEQ ID NO: 52673 - DNA, 25 bp, Saccharomyces pastorianus
ggtaaatacatcttggtctccggta

SEQ ID NO: 52674 - DNA, 25 bp, Saccharomyces pastorianus
gttactcccaggttatcccaatgga

SEQ ID NO: 52675 - DNA, 25 bp, Saccharomyces pastorianus
aacttgcttgctgcagctatcgata

SEQ ID NO: 52676 - DNA, 25 bp, Saccharomyces pastorianus
accacgatgggtcttgttcaagcgc

SEQ ID NO: 52677 - DNA, 25 bp, Saccharomyces pastorianus
ctctggcgacaaactggtcgtcgtt

SEQ ID NO: 52678 - DNA, 25 bp, Saccharomyces pastorianus
gaacgactttcaacaattgtcttct

SEQ ID NO: 52679 - DNA, 25 bp, Saccharomyces pastorianus
tccgcttctgaatatgacaacgctt

SEQ ID NO: 52680 - DNA, 25 bp, Saccharomyces pastorianus
aaaatcaacaatggtcactcaatta

SEQ ID NO: 52681 - DNA, 25 bp, Saccharomyces pastorianus
attgtcttctcaatttggcggtgaa

SEQ ID NO: 52682 - DNA, 25 bp, Saccharomyces pastorianus
ggaagctgccaagggaacgactttc

SEQ ID NO: 52683 - DNA, 25 bp, Saccharomyces pastorianus
gaaggaatttataacgcacacatac

SEQ ID NO: 52684 - DNA, 25 bp, Saccharomyces pastorianus
gctacacacctgctaacaaaatcaa

SEQ ID NO: 52685 - DNA, 25 bp, Saccharomyces pastorianus
ggtcgtcgttgactttttcgccaca

SEQ ID NO: 52686 - DNA, 25 bp, Saccharomyces pastorianus
tgacaacgctttggcctctggcgac

SEQ ID NO: 52687 - DNA, 25 bp, Saccharomyces pastorianus
taacgcacacatacacagctacaca

SEQ ID NO: 52688 - DNA, 25 bp, Saccharomyces pastorianus
gatggaaaagttccctaccgtgctg

SEQ ID NO: 52689 - DNA, 25 bp, Saccharomyces pastorianus
aaggctgtgctgactagtgccgtga

SEQ ID NO: 52690 - DNA, 25 bp, Saccharomyces pastorianus
ttgaacaagatcgaccacccggatg

SEQ ID NO: 52691 - DNA, 25 bp, Saccharomyces pastorianus
aggtgtcgtccaggtgctgcaagca

SEQ ID NO: 52692 - DNA, 25 bp, Saccharomyces pastorianus
ggtcctgtacaggtttgggtccaca

SEQ ID NO: 52693 - DNA, 25 bp, Saccharomyces pastorianus
cacccgagtggtgaagtccttcatg

SEQ ID NO: 52694 - DNA, 25 bp, Saccharomyces pastorianus
gtttcctggtcaagagaggcacccc

SEQ ID NO: 52695 - DNA, 25 bp, Saccharomyces pastorianus
agtgccgtgactgaagtgttcctaa

SEQ ID NO: 52696 - DNA, 25 bp, Saccharomyces pastorianus
gggcacggaattcgtcgacacgtac

SEQ ID NO: 52697 - DNA, 25 bp, Saccharomyces pastorianus
acatccttgggctgataccggtgta

SEQ ID NO: 52698 - DNA, 25 bp, Saccharomyces pastorianus
tgaagtaccctgacaccaaggctgt

SEQ ID NO: 52699 - DNA, 25 bp, Saccharomyces pastorianus
aaccttgtactgtgatgacgctgca

SEQ ID NO: 52700 - DNA, 25 bp, Saccharomyces pastorianus
attggccggctcgtacatacagaat

SEQ ID NO: 52701 - DNA, 25 bp, Saccharomyces pastorianus
gacccgttgggtagagttctttgca

SEQ ID NO: 52702 - DNA, 25 bp, Saccharomyces pastorianus
aaacctctgactccatggacgaagc

SEQ ID NO: 52703 - DNA, 25 bp, Saccharomyces pastorianus
aaggatgccattgccggtaaagtca

SEQ ID NO: 52704 - DNA, 25 bp, Saccharomyces pastorianus
ggttgtccctgaattacatctcgat

SEQ ID NO: 52705 - DNA, 25 bp, Saccharomyces pastorianus
aaccggttgatattccgcatttcaa

SEQ ID NO: 52706 - DNA, 25 bp, Saccharomyces pastorianus
aaccggtggcgccattccagaaaag

SEQ ID NO: 52707 - DNA, 25 bp, Saccharomyces pastorianus
gaagtcatcatcatgtccacggtgt

SEQ ID NO: 52708 - DNA, 25 bp, Saccharomyces pastorianus
gctgcagacctatcccgtgatattt

SEQ ID NO: 52709 - DNA, 25 bp, Saccharomyces pastorianus
ggtgtgtgaccactgcggttacaaa

SEQ ID NO: 52710 - DNA, 25 bp, Saccharomyces pastorianus
aaacaactttatgtggtctccaaga

SEQ ID NO: 52711 - DNA, 25 bp, Saccharomyces pastorianus
cttcaccacttattccgcaagagag

SEQ ID NO: 52712 - DNA, 25 bp, Saccharomyces pastorianus
ggaatccgttccagaaactgcaatg

SEQ ID NO: 52713 - DNA, 25 bp, Saccharomyces pastorianus
tatcgggacacctaggatgaactat

SEQ ID NO: 52714 - DNA, 25 bp, Saccharomyces pastorianus
ggtaaacccagaggatccatatgat

SEQ ID NO: 52715 - DNA, 25 bp, Saccharomyces pastorianus
ttactacagatacctctcttcacca

SEQ ID NO: 52716 - DNA, 25 bp, Saccharomyces pastorianus
aattgaccaagcgtccacgatggaa

SEQ ID NO: 52717 - DNA, 25 bp, Saccharomyces pastorianus
ctgcaatgacagaacctatcgggac

SEQ ID NO: 52718 - DNA, 25 bp, Saccharomyces pastorianus
ggtatcgatcaatacgtgcattact

SEQ ID NO: 52719 - DNA, 25 bp, Saccharomyces pastorianus
ggttttcggacctattactacagat

SEQ ID NO: 52720 - DNA, 25 bp, Saccharomyces pastorianus
aacgtgctattgaacccgattggga

SEQ ID NO: 52721 - DNA, 25 bp, Saccharomyces pastorianus
atttcgaaggtgtcgttccaccaga

SEQ ID NO: 52722 - DNA, 25 bp, Saccharomyces pastorianus
gacaaaacccagctacgtgtacgat

SEQ ID NO: 52723 - DNA, 25 bp, Saccharomyces pastorianus
aggtgacaacttccgcacattatgc

SEQ ID NO: 52724 - DNA, 25 bp, Saccharomyces pastorianus
gtgtacgatcttatcatctcgatta

SEQ ID NO: 52725 - DNA, 25 bp, Saccharomyces pastorianus
acatgcatatgcttggctgtccata

SEQ ID NO: 52726 - DNA, 25 bp, Saccharomyces pastorianus
attagttgccttgctgtcgaaggag

SEQ ID NO: 52727 - DNA, 25 bp, Saccharomyces pastorianus
atctcgattatcactctggttatta

SEQ ID NO: 52728 - DNA, 25 bp, Saccharomyces pastorianus
ggaatttcaatcgttcttttcatcg

SEQ ID NO: 52729 - DNA, 25 bp, Saccharomyces pastorianus
agatggcagaccagccgttcggaat

SEQ ID NO: 52730 - DNA, 25 bp, Saccharomyces pastorianus
ggctgtccatatttcagatatccag

SEQ ID NO: 52731 - DNA, 25 bp, Saccharomyces pastorianus
tatgcgtgcctctgtgaaggtgaca

SEQ ID NO: 52732 - DNA, 25 bp, Saccharomyces pastorianus
ctctcagacccttaaatccatatct

SEQ ID NO: 52733 - DNA, 25 bp, Saccharomyces pastorianus
tgctctcagacccttaaatccatat

SEQ ID NO: 52734 - DNA, 25 bp, Saccharomyces pastorianus
gctctcagacccttaaatccatatc

SEQ ID NO: 52735 - DNA, 25 bp, Saccharomyces pastorianus
cagacccttaaatccatatctcttc

SEQ ID NO: 52736 - DNA, 25 bp, Saccharomyces pastorianus
gacccttaaatccatatctcttcat

SEQ ID NO: 52737 - DNA, 25 bp, Saccharomyces pastorianus
agatgtaccatgagatgctctcaga

SEQ ID NO: 52738 - DNA, 25 bp, Saccharomyces pastorianus
ctcagacccttaaatccatatctct

SEQ ID NO: 52739 - DNA, 25 bp, Saccharomyces pastorianus
gatagatgtaccatgagatgctctc

SEQ ID NO: 52740 - DNA, 25 bp, Saccharomyces pastorianus
tcagacccttaaatccatatctctt

SEQ ID NO: 52741 - DNA, 25 bp, Saccharomyces pastorianus
tctcagacccttaaatccatatctc

SEQ ID NO: 52742 - DNA, 25 bp, Saccharomyces pastorianus
agacccttaaatccatatctcttca

SEQ ID NO: 52743 - DNA, 25 bp, Saccharomyces pastorianus
aagggcagtacgtcgatgtcagatc

SEQ ID NO: 52744 - DNA, 25 bp, Saccharomyces pastorianus
gatgcggtttgattacccgtaagaa

SEQ ID NO: 52745 - DNA, 25 bp, Saccharomyces pastorianus
gatccaggaagagtgctaccgggta

SEQ ID NO: 52746 - DNA, 25 bp, Saccharomyces pastorianus
agaactgccgcaaccatattagaag

SEQ ID NO: 52747 - DNA, 25 bp, Saccharomyces pastorianus
atgacaacggattgctaccacctgg

SEQ ID NO: 52748 - DNA, 25 bp, Saccharomyces pastorianus
catgccaggttggatttggctccaa

SEQ ID NO: 52749 - DNA, 25 bp, Saccharomyces pastorianus
ttggctccaagcatctgtccaaagt

SEQ ID NO: 52750 - DNA, 25 bp, Saccharomyces pastorianus
aaatgcccggccatatgggtaatga

SEQ ID NO: 52751 - DNA, 25 bp, Saccharomyces pastorianus
gatgccctatttcgatcaatctacg

SEQ ID NO: 52752 - DNA, 25 bp, Saccharomyces pastorianus
aatgctgggacattttgcttccaaa

SEQ ID NO: 52753 - DNA, 25 bp, Saccharomyces pastorianus
gctaccacctggcactttattgaag

SEQ ID NO: 52754 - DNA, 25 bp, Saccharomyces pastorianus
gactctgatgttttacaacctccga

SEQ ID NO: 52755 - DNA, 25 bp, Saccharomyces pastorianus
ggaagcatcttcagcagcatcctta

SEQ ID NO: 52756 - DNA, 25 bp, Saccharomyces pastorianus
gtgggctattggacgactctgatgt

SEQ ID NO: 52757 - DNA, 25 bp, Saccharomyces pastorianus
aatgtctctttcacagcagcggtca

SEQ ID NO: 52758 - DNA, 25 bp, Saccharomyces pastorianus
attagcatattcgacttcctcacat

SEQ ID NO: 52759 - DNA, 25 bp, Saccharomyces pastorianus
attatagtcatagcccgtcatcatt

SEQ ID NO: 52760 - DNA, 25 bp, Saccharomyces pastorianus
aaacccatccgatctttctatcaaa

SEQ ID NO: 52761 - DNA, 25 bp, Saccharomyces pastorianus
gacggctttgaacccgatggaccat

SEQ ID NO: 52762 - DNA, 25 bp, Saccharomyces pastorianus
acgttataaacctgcgggctctttg

SEQ ID NO: 52763 - DNA, 25 bp, Saccharomyces pastorianus
ctgctagactaaacgggacggcttt

SEQ ID NO: 52764 - DNA, 25 bp, Saccharomyces pastorianus
aagcaatcgtgcattcctttgccat

SEQ ID NO: 52765 - DNA, 25 bp, Saccharomyces pastorianus
gaaatctccagtttatatcttttga

SEQ ID NO: 52766 - DNA, 25 bp, Saccharomyces pastorianus
atggcgcgttcttgattcagtacgt

SEQ ID NO: 52767 - DNA, 25 bp, Saccharomyces pastorianus
ggaaagcacactcgagacggactct

SEQ ID NO: 52768 - DNA, 25 bp, Saccharomyces pastorianus
aaactcaaacgatgcgtaccgcttt

SEQ ID NO: 52769 - DNA, 25 bp, Saccharomyces pastorianus
aaatctacataacgcattccagtcg

SEQ ID NO: 52770 - DNA, 25 bp, Saccharomyces pastorianus
aacgcattccagtcgtctgagaaat

SEQ ID NO: 52771 - DNA, 25 bp, Saccharomyces pastorianus
cgagacggactctgttatagacgat

SEQ ID NO: 52772 - DNA, 25 bp, Saccharomyces pastorianus
gcagcccttacccaatttgatgaca

SEQ ID NO: 52773 - DNA, 25 bp, Saccharomyces pastorianus
tagacgtgacccaactatggcgcgt

SEQ ID NO: 52774 - DNA, 25 bp, Saccharomyces pastorianus
atgacaccattgatgcagcccttac

SEQ ID NO: 52775 - DNA, 25 bp, Saccharomyces pastorianus
tggaacttacccactgaactacagt

SEQ ID NO: 52776 - DNA, 25 bp, Saccharomyces pastorianus
ttccgccaaccgcaagcaggttaga

SEQ ID NO: 52777 - DNA, 25 bp, Saccharomyces pastorianus
gaaatatcccacaaactgcaggagt

SEQ ID NO: 52778 - DNA, 25 bp, Saccharomyces pastorianus
ttctttactggtttatctaagtttg

SEQ ID NO: 52779 - DNA, 25 bp, Saccharomyces pastorianus
ttatctaagtttgaaatatcccaca

SEQ ID NO: 52780 - DNA, 25 bp, Saccharomyces pastorianus
gccttcactgctgctttatggggaa

SEQ ID NO: 52781 - DNA, 25 bp, Saccharomyces pastorianus
gcacaaacttctttactggtttatc

SEQ ID NO: 52782 - DNA, 25 bp, Saccharomyces pastorianus
aactgcaggagttatcgtttccgcc

SEQ ID NO: 52783 - DNA, 25 bp, Saccharomyces pastorianus
ccgcaagcaggttagaatgttcatt

SEQ ID NO: 52784 - DNA, 25 bp, Saccharomyces pastorianus
gagttatcgtttccgccaaccgcaa

SEQ ID NO: 52785 - DNA, 25 bp, Saccharomyces pastorianus
tgcaggagttatcgtttccgccaac

SEQ ID NO: 52786 - DNA, 25 bp, Saccharomyces pastorianus
gggaagcacaaacttctttactggt

SEQ ID NO: 52787 - DNA, 25 bp, Saccharomyces pastorianus
gaccagtccacgaaggatagctcga

SEQ ID NO: 52788 - DNA, 25 bp, Saccharomyces pastorianus
aaagactcgactttgcacacagcaa

SEQ ID NO: 52789 - DNA, 25 bp, Saccharomyces pastorianus
actacgtcgatgtcttgcgcagaga

SEQ ID NO: 52790 - DNA, 25 bp, Saccharomyces pastorianus
ttcacaggtgcgtcttcaagaagcc

SEQ ID NO: 52791 - DNA, 25 bp, Saccharomyces pastorianus
gagatgtgcaaactacgtcgatgtc

SEQ ID NO: 52792 - DNA, 25 bp, Saccharomyces pastorianus
ggatagctcgaaacatgcacatctt

SEQ ID NO: 52793 - DNA, 25 bp, Saccharomyces pastorianus
ttcaaaggtggttgccgaatccgat

SEQ ID NO: 52794 - DNA, 25 bp, Saccharomyces pastorianus
agaggttatttcgaccagtccacga

SEQ ID NO: 52795 - DNA, 25 bp, Saccharomyces pastorianus
aatgcaaagcactcacttcacaggt

SEQ ID NO: 52796 - DNA, 25 bp, Saccharomyces pastorianus
attcatttcgccatcagacaacttg

SEQ ID NO: 52797 - DNA, 25 bp, Saccharomyces pastorianus
gaacaaccttaccagagatgtgcaa

SEQ ID NO: 52798 - DNA, 25 bp, Saccharomyces pastorianus
tttcgcctgagtttaccaatgctgt

SEQ ID NO: 52799 - DNA, 25 bp, Saccharomyces pastorianus
caatgcgtcgcaactaatcactcaa

SEQ ID NO: 52800 - DNA, 25 bp, Saccharomyces pastorianus
cagagagcggcatttgtggttgata

SEQ ID NO: 52801 - DNA, 25 bp, Saccharomyces pastorianus
ttacatacatgaccttttcgcctga

SEQ ID NO: 52802 - DNA, 25 bp, Saccharomyces pastorianus
atcctggccaactctcctaatagag

SEQ ID NO: 52803 - DNA, 25 bp, Saccharomyces pastorianus
tggatactgccagggacattgccaa

SEQ ID NO: 52804 - DNA, 25 bp, Saccharomyces pastorianus
agtgctttctagaccagacgtggga

SEQ ID NO: 52805 - DNA, 25 bp, Saccharomyces pastorianus
acctcgtaatgttgcgtctttgacg

SEQ ID NO: 52806 - DNA, 25 bp, Saccharomyces pastorianus
tgtcgtagcccaattcaatgcgtcg

SEQ ID NO: 52807 - DNA, 25 bp, Saccharomyces pastorianus
agttctaccctctattgtcaacgaa

SEQ ID NO: 52808 - DNA, 25 bp, Saccharomyces pastorianus
gggacaactgcctaccatatataga

SEQ ID NO: 52809 - DNA, 25 bp, Saccharomyces pastorianus
gatatgcccctcattgaccaaaaat

SEQ ID NO: 52810 - DNA, 25 bp, Saccharomyces pastorianus
tttgaaagagctggccgtgaaccct

SEQ ID NO: 52811 - DNA, 25 bp, Saccharomyces pastorianus
ataacttgctgggtgttactatccc

SEQ ID NO: 52812 - DNA, 25 bp, Saccharomyces pastorianus
tggcactattccgttaaattcccct

SEQ ID NO: 52813 - DNA, 25 bp, Saccharomyces pastorianus
ccaactttccggtattattgcaaat

SEQ ID NO: 52814 - DNA, 25 bp, Saccharomyces pastorianus
ggccgtgaaccctcaaaagatgtca

SEQ ID NO: 52815 - DNA, 25 bp, Saccharomyces pastorianus
attgggaggcttgttcgattttgaa

SEQ ID NO: 52816 - DNA, 25 bp, Saccharomyces pastorianus
ggatactgcgcctttgaacatacat

SEQ ID NO: 52817 - DNA, 25 bp, Saccharomyces pastorianus
gggtgttactatcccacatgaaaca

SEQ ID NO: 52818 - DNA, 25 bp, Saccharomyces pastorianus
agcggcttgttgttaattgcttcaa

SEQ ID NO: 52819 - DNA, 25 bp, Saccharomyces pastorianus
tccggtttttcctacgatgaagaat

SEQ ID NO: 52820 - DNA, 25 bp, Saccharomyces pastorianus
tactttgtcttccaatttacctgaa

SEQ ID NO: 52821 - DNA, 25 bp, Saccharomyces pastorianus
aatctacccttgtttgatacaggac

SEQ ID NO: 52822 - DNA, 25 bp, Saccharomyces pastorianus
attggatgtcttactttcgactatc

SEQ ID NO: 52823 - DNA, 25 bp, Saccharomyces pastorianus
gtgatatgatgacctcttctagcag

SEQ ID NO: 52824 - DNA, 25 bp, Saccharomyces pastorianus
gacgacggtgaactcatctttcaag

SEQ ID NO: 52825 - DNA, 25 bp, Saccharomyces pastorianus
gttgattccatcaaggatttttcca

SEQ ID NO: 52826 - DNA, 25 bp, Saccharomyces pastorianus
ctattggaaatctaccggaggtgat

SEQ ID NO: 52827 - DNA, 25 bp, Saccharomyces pastorianus
ttcccatatccaggaaacccattta

SEQ ID NO: 52828 - DNA, 25 bp, Saccharomyces pastorianus
ctaaaaccaggtcttgaatccatca

SEQ ID NO: 52829 - DNA, 25 bp, Saccharomyces pastorianus
tggattttgaaatatttcccgcttt

SEQ ID NO: 52830 - DNA, 25 bp, Saccharomyces pastorianus
tatttcccgcttttggtacaagaat

SEQ ID NO: 52831 - DNA, 25 bp, Saccharomyces pastorianus
tcatgctagggctagtcggtgctgc

SEQ ID NO: 52832 - DNA, 25 bp, Saccharomyces pastorianus
ccccacacagcttagataggataaa

SEQ ID NO: 52833 - DNA, 25 bp, Saccharomyces pastorianus
ggataaacggcatggacacaactaa

SEQ ID NO: 52834 - DNA, 25 bp, Saccharomyces pastorianus
gcacaacgagtggtaagaactccga

SEQ ID NO: 52835 - DNA, 25 bp, Saccharomyces pastorianus
gaactccgaaatttaggtacatcat

SEQ ID NO: 52836 - DNA, 25 bp, Saccharomyces pastorianus
taccgactgcatacatgaggaggaa

SEQ ID NO: 52837 - DNA, 25 bp, Saccharomyces pastorianus
catgaggaggaactatactgtcccc

SEQ ID NO: 52838 - DNA, 25 bp, Saccharomyces pastorianus
gattcaggcatatattcagaagcac

SEQ ID NO: 52839 - DNA, 25 bp, Saccharomyces pastorianus
tagccggtgtagaccagaggactgt

SEQ ID NO: 52840 - DNA, 25 bp, Saccharomyces pastorianus
caactaagatgtctgtagccggtgt

SEQ ID NO: 52841 - DNA, 25 bp, Saccharomyces pastorianus
aggtacatcatgctagggctagtcg

SEQ ID NO: 52842 - DNA, 25 bp, Saccharomyces pastorianus
tgggcattctgcaagcgagctattc

SEQ ID NO: 52843 - DNA, 25 bp, Saccharomyces pastorianus
gaaagctggctggaccaagaccaat

SEQ ID NO: 52844 - DNA, 25 bp, Saccharomyces pastorianus
gaatcagcagtggtgacgtgacttt

SEQ ID NO: 52845 - DNA, 25 bp, Saccharomyces pastorianus
gactcaaagctctccgaatcgaaat

SEQ ID NO: 52846 - DNA, 25 bp, Saccharomyces pastorianus
ctggattccccaattttcttcaatg

SEQ ID NO: 52847 - DNA, 25 bp, Saccharomyces pastorianus
ggatgccttcaaattcgacgcggaa

SEQ ID NO: 52848 - DNA, 25 bp, Saccharomyces pastorianus
atagtaaaatgctgcactcctccac

SEQ ID NO: 52849 - DNA, 25 bp, Saccharomyces pastorianus
aacagttccccattacgagttctat

SEQ ID NO: 52850 - DNA, 25 bp, Saccharomyces pastorianus
aacatgtttcgacaacagcgccaag

SEQ ID NO: 52851 - DNA, 25 bp, Saccharomyces pastorianus
aagccatcttccgtcacgaaacatg

SEQ ID NO: 52852 - DNA, 25 bp, Saccharomyces pastorianus
actgtttcctctatcgactcaaagc

SEQ ID NO: 52853 - DNA, 25 bp, Saccharomyces pastorianus
gagattcaaattcgatacccatggt

SEQ ID NO: 52854 - DNA, 25 bp, Saccharomyces pastorianus
atacccatggtgaaaaggtgccaac

SEQ ID NO: 52855 - DNA, 25 bp, Saccharomyces pastorianus
gagttacttgctgacattatttctg

SEQ ID NO: 52856 - DNA, 25 bp, Saccharomyces pastorianus
aaggatcgtgttactgcttctagat

SEQ ID NO: 52857 - DNA, 25 bp, Saccharomyces pastorianus
gtttaattaccggtgccgtctctgt

SEQ ID NO: 52858 - DNA, 25 bp, Saccharomyces pastorianus
tactgcttctagattcgctgttaaa

SEQ ID NO: 52859 - DNA, 25 bp, Saccharomyces pastorianus
tgttccatcttctaaggatcgtgtt

SEQ ID NO: 52860 - DNA, 25 bp, Saccharomyces pastorianus
tcatgaggttcattgggccgaatat

SEQ ID NO: 52861 - DNA, 25 bp, Saccharomyces pastorianus
tgccgtctctgtgtacactccagaa

SEQ ID NO: 52862 - DNA, 25 bp, Saccharomyces pastorianus
aacgaagcctctccaaacactgatg

SEQ ID NO: 52863 - DNA, 25 bp, Saccharomyces pastorianus
gcctctatcagagaagacataactt

SEQ ID NO: 52864 - DNA, 25 bp, Saccharomyces pastorianus
gatttcccaaggtatcgatgctttg

SEQ ID NO: 52865 - DNA, 25 bp, Saccharomyces pastorianus
tcactctcgtgctttcgttgttgaa

SEQ ID NO: 52866 - DNA, 25 bp, Saccharomyces pastorianus
gtgccttggatgatcaattgaacct

SEQ ID NO: 52867 - DNA, 25 bp, Saccharomyces pastorianus
ggccttaatggctggtattgccact

SEQ ID NO: 52868 - DNA, 25 bp, Saccharomyces pastorianus
gatgctacagctaagtctcactctc

SEQ ID NO: 52869 - DNA, 25 bp, Saccharomyces pastorianus
atggtcgactacatcgatgctacag

SEQ ID NO: 52870 - DNA, 25 bp, Saccharomyces pastorianus
gctgttcctcatggtaaatggcaag

SEQ ID NO: 52871 - DNA, 25 bp, Saccharomyces pastorianus
tgctttgattgtttgcggtggtgat

SEQ ID NO: 52872 - DNA, 25 bp, Saccharomyces pastorianus
tggtaccctaattggtactgctcgt

SEQ ID NO: 52873 - DNA, 25 bp, Saccharomyces pastorianus
cattgttggtcttgttggttctatt

SEQ ID NO: 52874 - DNA, 25 bp, Saccharomyces pastorianus
agcagcaggcaatttgatttcccaa

SEQ ID NO: 52875 - DNA, 25 bp, Saccharomyces pastorianus
aggaacttaacgctcacttattgaa

SEQ ID NO: 52876 - DNA, 25 bp, Saccharomyces pastorianus
gataaatcagggttgcatgcagcat

SEQ ID NO: 52877 - DNA, 25 bp, Saccharomyces pastorianus
atatcgtcctcgtaatttgcattta

SEQ ID NO: 52878 - DNA, 25 bp, Saccharomyces pastorianus
acatcagacgcatacctttctaagg

SEQ ID NO: 52879 - DNA, 25 bp, Saccharomyces pastorianus
ttgcatttattacccacatcagacg

SEQ ID NO: 52880 - DNA, 25 bp, Saccharomyces pastorianus
gcagctgcagctattgggttgatgt

SEQ ID NO: 52881 - DNA, 25 bp, Saccharomyces pastorianus
cattgctacaggtaacacctcggta

SEQ ID NO: 52882 - DNA, 25 bp, Saccharomyces pastorianus
aacggtgattttacaactgctgaca

SEQ ID NO: 52883 - DNA, 25 bp, Saccharomyces pastorianus
taaggtctgtgacgatcccgacaac

SEQ ID NO: 52884 - DNA, 25 bp, Saccharomyces pastorianus
gatggctactccctagaaacagatc

SEQ ID NO: 52885 - DNA, 25 bp, Saccharomyces pastorianus
gaaacagatccatatcgtcctcgta

SEQ ID NO: 52886 - DNA, 25 bp, Saccharomyces pastorianus
aattttgtgcaaggccggagatccc

SEQ ID NO: 52887 - DNA, 25 bp, Saccharomyces pastorianus
ttatgctttgcatatcccggaatat

SEQ ID NO: 52888 - DNA, 25 bp, Saccharomyces pastorianus
aaattgcgtgctgtctcttatgctt

SEQ ID NO: 52889 - DNA, 25 bp, Saccharomyces pastorianus
agcggatccattctttattcattca

SEQ ID NO: 52890 - DNA, 25 bp, Saccharomyces pastorianus
gctgctgtcgtccaaggttcattta

SEQ ID NO: 52891 - DNA, 25 bp, Saccharomyces pastorianus
gataaccctatcgtgtcggaagtga

SEQ ID NO: 52892 - DNA, 25 bp, Saccharomyces pastorianus
gatcccaaaacgtcattgcgtcatg

SEQ ID NO: 52893 - DNA, 25 bp, Saccharomyces pastorianus
tggttccagtgctctcgaatcgaga

SEQ ID NO: 52894 - DNA, 25 bp, Saccharomyces pastorianus
aaagccatgcctcgttcggtggttc

SEQ ID NO: 52895 - DNA, 25 bp, Saccharomyces pastorianus
aatatattaccgacgctgctttcca

SEQ ID NO: 52896 - DNA, 25 bp, Saccharomyces pastorianus
gagacctttccaacgctaataatga

SEQ ID NO: 52897 - DNA, 25 bp, Saccharomyces pastorianus
tggtaacttaccttctggcgacgat

SEQ ID NO: 52898 - DNA, 25 bp, Saccharomyces pastorianus
ggcgacgatgacgatctatctcaaa

SEQ ID NO: 52899 - DNA, 25 bp, Saccharomyces pastorianus
atcgtttggcttcattccacaagtg

SEQ ID NO: 52900 - DNA, 25 bp, Saccharomyces pastorianus
tttgaaagcccgttggatgcagcca

SEQ ID NO: 52901 - DNA, 25 bp, Saccharomyces pastorianus
tgcagccaaggccatttcgaataca

SEQ ID NO: 52902 - DNA, 25 bp, Saccharomyces pastorianus
gaacgccttgatgaaccagaaccac

SEQ ID NO: 52903 - DNA, 25 bp, Saccharomyces pastorianus
ttatccgtctcgttcgcacaaaaac

SEQ ID NO: 52904 - DNA, 25 bp, Saccharomyces pastorianus
gatgccaatgtttccatcgtttggc

SEQ ID NO: 52905 - DNA, 25 bp, Saccharomyces pastorianus
agtgacttaccggtgggatcatcaa

SEQ ID NO: 52906 - DNA, 25 bp, Saccharomyces pastorianus
tatcaaggttcccagccacagaatg

SEQ ID NO: 52907 - DNA, 25 bp, Saccharomyces pastorianus
agatcaagtgttatccgtctcgttc

SEQ ID NO: 52908 - DNA, 25 bp, Saccharomyces pastorianus
gtagccctgaggtcatttggtttga

SEQ ID NO: 52909 - DNA, 25 bp, Saccharomyces pastorianus
ttataccatacaagtttcccacctg

SEQ ID NO: 52910 - DNA, 25 bp, Saccharomyces pastorianus
gcatgccgatcgttattgtacagat

SEQ ID NO: 52911 - DNA, 25 bp, Saccharomyces pastorianus
acaacacatcctttggctggacaag

SEQ ID NO: 52912 - DNA, 25 bp, Saccharomyces pastorianus
tgttatcgttacctgcagaatcgtt

SEQ ID NO: 52913 - DNA, 25 bp, Saccharomyces pastorianus
gtcaacgcagcctttgttttggaag

SEQ ID NO: 52914 - DNA, 25 bp, Saccharomyces pastorianus
tggagacgctgcacacacaacacat

SEQ ID NO: 52915 - DNA, 25 bp, Saccharomyces pastorianus
tttgactgacaagcttggcccaatt

SEQ ID NO: 52916 - DNA, 25 bp, Saccharomyces pastorianus
cagaatcgtttaccgcacttgtcaa

SEQ ID NO: 52917 - DNA, 25 bp, Saccharomyces pastorianus
gaggcttagacattggttcttcgtt

SEQ ID NO: 52918 - DNA, 25 bp, Saccharomyces pastorianus
tgaagagatttacccgccaagagtg

SEQ ID NO: 52919 - DNA, 25 bp, Saccharomyces pastorianus
tagatccgagagattacctgctaat

SEQ ID NO: 52920 - DNA, 25 bp, Saccharomyces pastorianus
tagggttttgcctgaatgtgcttct

SEQ ID NO: 52921 - DNA, 25 bp, Saccharomyces pastorianus
taatcttctgcaagctcaacgtgac

SEQ ID NO: 52922 - DNA, 25 bp, Saccharomyces pastorianus
agctttctccacagcattagcattt

SEQ ID NO: 52923 - DNA, 25 bp, Saccharomyces pastorianus
gttattcaacgatttcttcgcctcc

SEQ ID NO: 52924 - DNA, 25 bp, Saccharomyces pastorianus
gtggagaaggtccattgcccttgcc

SEQ ID NO: 52925 - DNA, 25 bp, Saccharomyces pastorianus
tttaccggtagacagggacattcat

SEQ ID NO: 52926 - DNA, 25 bp, Saccharomyces pastorianus
atcagatctgtcttcttggcagaga

SEQ ID NO: 52927 - DNA, 25 bp, Saccharomyces pastorianus
atgtgcttctgctaatttaccggta

SEQ ID NO: 52928 - DNA, 25 bp, Saccharomyces pastorianus
ctttggtgcacatacatttagggtt

SEQ ID NO: 52929 - DNA, 25 bp, Saccharomyces pastorianus
gctactaaggcccaatctgggtgga

SEQ ID NO: 52930 - DNA, 25 bp, Saccharomyces pastorianus
tgaccatgatactacgccgttcgtt

SEQ ID NO: 52931 - DNA, 25 bp, Saccharomyces pastorianus
gacgacgattttccaagtgtcatgg

SEQ ID NO: 52932 - DNA, 25 bp, Saccharomyces pastorianus
ggctggccatacgaaaagtccgatg

SEQ ID NO: 52933 - DNA, 25 bp, Saccharomyces pastorianus
gcagcttttgggaagtgactacaca

SEQ ID NO: 52934 - DNA, 25 bp, Saccharomyces pastorianus
tgaggccagaagttgaccatgatac

SEQ ID NO: 52935 - DNA, 25 bp, Saccharomyces pastorianus
gatgaaatccttattcctctgataa

SEQ ID NO: 52936 - DNA, 25 bp, Saccharomyces pastorianus
gacctggatatgctacgttcattca

SEQ ID NO: 52937 - DNA, 25 bp, Saccharomyces pastorianus
gaataatcaattaggctggccatac

SEQ ID NO: 52938 - DNA, 25 bp, Saccharomyces pastorianus
acatgattgaattggcgcagctttt

SEQ ID NO: 52939 - DNA, 25 bp, Saccharomyces pastorianus
tgcggaattcggcaacttggaaaat

SEQ ID NO: 52940 - DNA, 25 bp, Saccharomyces pastorianus
gaatcaacgagttttttccaagaga

SEQ ID NO: 52941 - DNA, 25 bp, Saccharomyces pastorianus
atgcgcctcatcttcctggaaggtg

SEQ ID NO: 52942 - DNA, 25 bp, Saccharomyces pastorianus
gtatatgtccatcttgcgcaaaact

SEQ ID NO: 52943 - DNA, 25 bp, Saccharomyces pastorianus
tccgacttcttgtcgtggttacgat

SEQ ID NO: 52944 - DNA, 25 bp, Saccharomyces pastorianus
tctttcgagggctaggtccgacttc

SEQ ID NO: 52945 - DNA, 25 bp, Saccharomyces pastorianus
gtatagcagtcccatgagcggaatt

SEQ ID NO: 52946 - DNA, 25 bp, Saccharomyces pastorianus
atgggatcccatcatcatctgtggt

SEQ ID NO: 52947 - DNA, 25 bp, Saccharomyces pastorianus
ttgtgcaagtcagcatcatgcgcct

SEQ ID NO: 52948 - DNA, 25 bp, Saccharomyces pastorianus
tggtggccattatttctctttcgag

SEQ ID NO: 52949 - DNA, 25 bp, Saccharomyces pastorianus
ggtgattgtcgtgggtttttcttct

SEQ ID NO: 52950 - DNA, 25 bp, Saccharomyces pastorianus
gcaaaacttgcttttccattgggtg

SEQ ID NO: 52951 - DNA, 25 bp, Saccharomyces pastorianus
tcatcatctgtggtggtggccatta

SEQ ID NO: 52952 - DNA, 25 bp, Saccharomyces pastorianus
aagcacctaaacctgcagcgagaaa

SEQ ID NO: 52953 - DNA, 25 bp, Saccharomyces pastorianus
atgcggtcctctatctggcgaaata

SEQ ID NO: 52954 - DNA, 25 bp, Saccharomyces pastorianus
agccctaattcaacaaggtcattta

SEQ ID NO: 52955 - DNA, 25 bp, Saccharomyces pastorianus
tcatctcaatctttcataagcccta

SEQ ID NO: 52956 - DNA, 25 bp, Saccharomyces pastorianus
gactttagcagttctcgaatctctc

SEQ ID NO: 52957 - DNA, 25 bp, Saccharomyces pastorianus
ttatcaactctctcagactggaaac

SEQ ID NO: 52958 - DNA, 25 bp, Saccharomyces pastorianus
acaatagcacatttgcgtctcaaaa

SEQ ID NO: 52959 - DNA, 25 bp, Saccharomyces pastorianus
aaggtcatttacatctacttccaat

SEQ ID NO: 52960 - DNA, 25 bp, Saccharomyces pastorianus
gaatctctcaaatgtacaatgcggt

SEQ ID NO: 52961 - DNA, 25 bp, Saccharomyces pastorianus
gtgctatcagcaaaactgttgtcat

SEQ ID NO: 52962 - DNA, 25 bp, Saccharomyces pastorianus
gagtttttcaaaatgcttccttgga

SEQ ID NO: 52963 - DNA, 25 bp, Saccharomyces pastorianus
cctggctattttaggaggtcacaat

SEQ ID NO: 52964 - DNA, 25 bp, Saccharomyces pastorianus
tgctcgcggtaaccaattcttgcaa

SEQ ID NO: 52965 - DNA, 25 bp, Saccharomyces pastorianus
gttgaatgcaccagctttgaggatt

SEQ ID NO: 52966 - DNA, 25 bp, Saccharomyces pastorianus
ttgccatgtcactaagtgctcgcgg

SEQ ID NO: 52967 - DNA, 25 bp, Saccharomyces pastorianus
aagctcgacaatactttattctctc

SEQ ID NO: 52968 - DNA, 25 bp, Saccharomyces pastorianus
ctttattctctcaatccccagaaaa

SEQ ID NO: 52969 - DNA, 25 bp, Saccharomyces pastorianus
attatcacaccatacatgcctgaga

SEQ ID NO: 52970 - DNA, 25 bp, Saccharomyces pastorianus
gggatgaattccacctggctatttt

SEQ ID NO: 52971 - DNA, 25 bp, Saccharomyces pastorianus
caataaggctgaatacttgttccaa

SEQ ID NO: 52972 - DNA, 25 bp, Saccharomyces pastorianus
gtcgcggtcggcttgaatattattt

SEQ ID NO: 52973 - DNA, 25 bp, Saccharomyces pastorianus
tacgcagtcagttctattatcacac

SEQ ID NO: 52974 - DNA, 25 bp, Saccharomyces pastorianus
tacgtttggttcgacgctaccattg

SEQ ID NO: 52975 - DNA, 25 bp, Saccharomyces pastorianus
ttggttacgtttccatcactgccaa

SEQ ID NO: 52976 - DNA, 25 bp, Saccharomyces pastorianus
gaactggaccatgttacaccatcta

SEQ ID NO: 52977 - DNA, 25 bp, Saccharomyces pastorianus
gttggtgtctttggtaacaatgctc

SEQ ID NO: 52978 - DNA, 25 bp, Saccharomyces pastorianus
tcactgccaactacactaaggaatg

SEQ ID NO: 52979 - DNA, 25 bp, Saccharomyces pastorianus
gattctcacttttcatgggacgatt

SEQ ID NO: 52980 - DNA, 25 bp, Saccharomyces pastorianus
gacccgaatccagtgattctcactt

SEQ ID NO: 52981 - DNA, 25 bp, Saccharomyces pastorianus
tggtctaaaaccacgttgtattaca

SEQ ID NO: 52982 - DNA, 25 bp, Saccharomyces pastorianus
aatgctcaagactctggtatctctc

SEQ ID NO: 52983 - DNA, 25 bp, Saccharomyces pastorianus
gctaccattggttacgtttccatca

SEQ ID NO: 52984 - DNA, 25 bp, Saccharomyces pastorianus
caacggtgttgttccagattcgatc

SEQ ID NO: 52985 - DNA, 25 bp, Saccharomyces pastorianus
gcgacagacttgattgtgtttgcca

SEQ ID NO: 52986 - DNA, 25 bp, Saccharomyces pastorianus
tttgcattggcatctctacaaaatt

SEQ ID NO: 52987 - DNA, 25 bp, Saccharomyces pastorianus
tttactttgtttgatgctaatgcca

SEQ ID NO: 52988 - DNA, 25 bp, Saccharomyces pastorianus
aagagtcatcctgctcatttgcagt

SEQ ID NO: 52989 - DNA, 25 bp, Saccharomyces pastorianus
gattctgacaagtaccaatttgcat

SEQ ID NO: 52990 - DNA, 25 bp, Saccharomyces pastorianus
ggccatcgaaaactacttatctcag

SEQ ID NO: 52991 - DNA, 25 bp, Saccharomyces pastorianus
gaaggttgccttggcgctagaattt

SEQ ID NO: 52992 - DNA, 25 bp, Saccharomyces pastorianus
gaaagaaccttcaactgcgacagac

SEQ ID NO: 52993 - DNA, 25 bp, Saccharomyces pastorianus
gctcatttgcagttggccaataatt

SEQ ID NO: 52994 - DNA, 25 bp, Saccharomyces pastorianus
acatctatggaattgcatcacgcaa

SEQ ID NO: 52995 - DNA, 25 bp, Saccharomyces pastorianus
aagtcttgacaaacaaggccatcga

SEQ ID NO: 52996 - DNA, 25 bp, Saccharomyces pastorianus
agagagtctacccatcaacaacagt

SEQ ID NO: 52997 - DNA, 25 bp, Saccharomyces pastorianus
gaatcactccaatctagctgcataa

SEQ ID NO: 52998 - DNA, 25 bp, Saccharomyces pastorianus
taaacagactgtagcgccactaaat

SEQ ID NO: 52999 - DNA, 25 bp, Saccharomyces pastorianus
agacgggcctagtgaatcagctttc

SEQ ID NO: 53000 - DNA, 25 bp, Saccharomyces pastorianus
atgaggcaatcctaacaccttctac

SEQ ID NO: 53001 - DNA, 25 bp, Saccharomyces pastorianus
aagtgatccacttttgctgtcagaa

SEQ ID NO: 53002 - DNA, 25 bp, Saccharomyces pastorianus
caccttctactgttggtacgggaga

SEQ ID NO: 53003 - DNA, 25 bp, Saccharomyces pastorianus
ggagaagtcccagcaccaattgata

SEQ ID NO: 53004 - DNA, 25 bp, Saccharomyces pastorianus
gatgttcattcctctattgcaaaaa

SEQ ID NO: 53005 - DNA, 25 bp, Saccharomyces pastorianus
agacggtggcgcacacgaacaacgt

SEQ ID NO: 53006 - DNA, 25 bp, Saccharomyces pastorianus
agaagtactcactccgaaagacggt

SEQ ID NO: 53007 - DNA, 25 bp, Saccharomyces pastorianus
tagacgcgatagtgacgacaaacgt

SEQ ID NO: 53008 - DNA, 25 bp, Saccharomyces pastorianus
tgaaaatggcataattcatactact

SEQ ID NO: 53009 - DNA, 25 bp, Saccharomyces pastorianus
ggttatgaaacccagatcaaagatg

SEQ ID NO: 53010 - DNA, 25 bp, Saccharomyces pastorianus
tagtgacgacaaacgtagcgatgct

SEQ ID NO: 53011 - DNA, 25 bp, Saccharomyces pastorianus
gaaacccagatcaaagatgaaaatg

SEQ ID NO: 53012 - DNA, 25 bp, Saccharomyces pastorianus
tcatactacttctcgttctttaaga

SEQ ID NO: 53013 - DNA, 25 bp, Saccharomyces pastorianus
gcaaacgttggttatgaaacccaga

SEQ ID NO: 53014 - DNA, 25 bp, Saccharomyces pastorianus
gacgacaaacgtagcgatgctgaag

SEQ ID NO: 53015 - DNA, 25 bp, Saccharomyces pastorianus
cgtagcgatgctgaagatacaaata

SEQ ID NO: 53016 - DNA, 25 bp, Saccharomyces pastorianus
ggaatagacgcgatagtgacgacaa

SEQ ID NO: 53017 - DNA, 25 bp, Saccharomyces pastorianus
aattcatactacttctcgttcttta

SEQ ID NO: 53018 - DNA, 25 bp, Saccharomyces pastorianus
gacgataaagatctgcaagctcaat

SEQ ID NO: 53019 - DNA, 25 bp, Saccharomyces pastorianus
ccatatggtgaggttttttgagaaa

SEQ ID NO: 53020 - DNA, 25 bp, Saccharomyces pastorianus
gggccactaaagttgaactatgtta

SEQ ID NO: 53021 - DNA, 25 bp, Saccharomyces pastorianus
tctcagataatggacgcaggtgcaa

SEQ ID NO: 53022 - DNA, 25 bp, Saccharomyces pastorianus
gatatattgccttctactgtgataa

SEQ ID NO: 53023 - DNA, 25 bp, Saccharomyces pastorianus
gaaatagggcccttgggtcatcttt

SEQ ID NO: 53024 - DNA, 25 bp, Saccharomyces pastorianus
aaagcaaacgaatctgactcagacg

SEQ ID NO: 53025 - DNA, 25 bp, Saccharomyces pastorianus
gggcccttgggtcatctttagagat

SEQ ID NO: 53026 - DNA, 25 bp, Saccharomyces pastorianus
ttgcagaacaacgagctaaagaaca

SEQ ID NO: 53027 - DNA, 25 bp, Saccharomyces pastorianus
caagccttgcgattggagttgcaga

SEQ ID NO: 53028 - DNA, 25 bp, Saccharomyces pastorianus
tgcaagctcaattaagggccactaa

SEQ ID NO: 53029 - DNA, 25 bp, Saccharomyces pastorianus
gatgaaaggcccatggacactataa

SEQ ID NO: 53030 - DNA, 25 bp, Saccharomyces pastorianus
gcttcagtaaatctacctcaactag

SEQ ID NO: 53031 - DNA, 25 bp, Saccharomyces pastorianus
gacacatagcacttcaatacgtaac

SEQ ID NO: 53032 - DNA, 25 bp, Saccharomyces pastorianus
aaagacccacgctggttacaagagt

SEQ ID NO: 53033 - DNA, 25 bp, Saccharomyces pastorianus
agatattgcaataccagacatgtca

SEQ ID NO: 53034 - DNA, 25 bp, Saccharomyces pastorianus
aattacggtcgtcctcattaacagc

SEQ ID NO: 53035 - DNA, 25 bp, Saccharomyces pastorianus
aacttgcaatgcctatactgtatat

SEQ ID NO: 53036 - DNA, 25 bp, Saccharomyces pastorianus
atcaatcgagattcacaagcttcag

SEQ ID NO: 53037 - DNA, 25 bp, Saccharomyces pastorianus
gaagctcagcctttcgaagaagcaa

SEQ ID NO: 53038 - DNA, 25 bp, Saccharomyces pastorianus
ccccgattctcgaagctgttcaaga

SEQ ID NO: 53039 - DNA, 25 bp, Saccharomyces pastorianus
gtcagatctggattctcagccatca

SEQ ID NO: 53040 - DNA, 25 bp, Saccharomyces pastorianus
tggcagcgaggctattcctgggcta

SEQ ID NO: 53041 - DNA, 25 bp, Saccharomyces pastorianus
taagctccacaaagcagcaaccaca

SEQ ID NO: 53042 - DNA, 25 bp, Saccharomyces pastorianus
aggaaagagtcccaaaccgcatcgc

SEQ ID NO: 53043 - DNA, 25 bp, Saccharomyces pastorianus
ggcaaagccctaagtgtggatgata

SEQ ID NO: 53044 - DNA, 25 bp, Saccharomyces pastorianus
tactacggcggtgctaccagcggag

SEQ ID NO: 53045 - DNA, 25 bp, Saccharomyces pastorianus
ggattctcagacattaattcacaag

SEQ ID NO: 53046 - DNA, 25 bp, Saccharomyces pastorianus
tcctgggctatctgcaggtgcgaat

SEQ ID NO: 53047 - DNA, 25 bp, Saccharomyces pastorianus
atacccgttcaggtacaagacgtgg

SEQ ID NO: 53048 - DNA, 25 bp, Saccharomyces pastorianus
agagtcctggaggtacgattggtac

SEQ ID NO: 53049 - DNA, 25 bp, Saccharomyces pastorianus
aaagtgtcatactacggcggtgcta

SEQ ID NO: 53050 - DNA, 25 bp, Saccharomyces pastorianus
tactaccgaaggaggcaaagcccta

SEQ ID NO: 53051 - DNA, 25 bp, Saccharomyces pastorianus
taatctgcggtatcacatgcgatga

SEQ ID NO: 53052 - DNA, 25 bp, Saccharomyces pastorianus
gaatcttacgagacacggtgcagcc

SEQ ID NO: 53053 - DNA, 25 bp, Saccharomyces pastorianus
actttcgacacgtggcagctggaac

SEQ ID NO: 53054 - DNA, 25 bp, Saccharomyces pastorianus
atgaattccgtgtaactgcgttagg

SEQ ID NO: 53055 - DNA, 25 bp, Saccharomyces pastorianus
ggtggaactcgtccctctgaaggat

SEQ ID NO: 53056 - DNA, 25 bp, Saccharomyces pastorianus
atattgttgagtatcgctgcgttca

SEQ ID NO: 53057 - DNA, 25 bp, Saccharomyces pastorianus
taggcgggacatttgaccatattca

SEQ ID NO: 53058 - DNA, 25 bp, Saccharomyces pastorianus
tctgaaggatgtctgtgggcccact

SEQ ID NO: 53059 - DNA, 25 bp, Saccharomyces pastorianus
agtgcctgagattgaatgccttgtt

SEQ ID NO: 53060 - DNA, 25 bp, Saccharomyces pastorianus
aatacagaacactattccctacacg

SEQ ID NO: 53061 - DNA, 25 bp, Saccharomyces pastorianus
tgggtttattgccacacggttccac

SEQ ID NO: 53062 - DNA, 25 bp, Saccharomyces pastorianus
aactgaacagttgcgcatcttgggt

SEQ ID NO: 53063 - DNA, 25 bp, Saccharomyces pastorianus
ttctccccatgaagtgtctcacgat

SEQ ID NO: 53064 - DNA, 25 bp, Saccharomyces pastorianus
gagtcacaactatctcaaggaccaa

SEQ ID NO: 53065 - DNA, 25 bp, Saccharomyces pastorianus
gatttcttatgagtttctccccatg

SEQ ID NO: 53066 - DNA, 25 bp, Saccharomyces pastorianus
gatgctgaccacatcagatactcta

SEQ ID NO: 53067 - DNA, 25 bp, Saccharomyces pastorianus
gaagcgtgccagatcaaggaccccg

SEQ ID NO: 53068 - DNA, 25 bp, Saccharomyces pastorianus
atcgtctgctgaccggaagcgtgcc

SEQ ID NO: 53069 - DNA, 25 bp, Saccharomyces pastorianus
gactagcttccattaatctcgaggg

SEQ ID NO: 53070 - DNA, 25 bp, Saccharomyces pastorianus
aaccgtaacagatccagaactccgc

SEQ ID NO: 53071 - DNA, 25 bp, Saccharomyces pastorianus
aatttcttcactgctattggattag

SEQ ID NO: 53072 - DNA, 25 bp, Saccharomyces pastorianus
cgaggaagactcgtgtccgcaagga

SEQ ID NO: 53073 - DNA, 25 bp, Saccharomyces pastorianus
gcgtgtccgacactttggatgaagt

SEQ ID NO: 53074 - DNA, 25 bp, Saccharomyces pastorianus
agcccattgggatatcacgttcgcg

SEQ ID NO: 53075 - DNA, 25 bp, Saccharomyces pastorianus
tgtctattgcacaagattcctcagc

SEQ ID NO: 53076 - DNA, 25 bp, Saccharomyces pastorianus
gatctagaatcgtcagcgttgcacc

SEQ ID NO: 53077 - DNA, 25 bp, Saccharomyces pastorianus
gcttatcttcggcaaatgggaccac

SEQ ID NO: 53078 - DNA, 25 bp, Saccharomyces pastorianus
gactaccactacgacgaagctttgt

SEQ ID NO: 53079 - DNA, 25 bp, Saccharomyces pastorianus
gtaacggttgacacacagcgcaaag

SEQ ID NO: 53080 - DNA, 25 bp, Saccharomyces pastorianus
accactacttctcagggcaactaga

SEQ ID NO: 53081 - DNA, 25 bp, Saccharomyces pastorianus
tattcccaagactgtacgtgtaacg

SEQ ID NO: 53082 - DNA, 25 bp, Saccharomyces pastorianus
tagtatcgcccagagatgcctacaa

SEQ ID NO: 53083 - DNA, 25 bp, Saccharomyces pastorianus
atgggaccacttgaagcgttgtttc

SEQ ID NO: 53084 - DNA, 25 bp, Saccharomyces pastorianus
tccaacccaacctgtgcaaatttat

SEQ ID NO: 53085 - DNA, 25 bp, Saccharomyces pastorianus
atacgctgagaatttccgtgtcaat

SEQ ID NO: 53086 - DNA, 25 bp, Saccharomyces pastorianus
aaccatattgaccaactctcgaatg

SEQ ID NO: 53087 - DNA, 25 bp, Saccharomyces pastorianus
atcactgcaatctgcgagtgcgtta

SEQ ID NO: 53088 - DNA, 25 bp, Saccharomyces pastorianus
ctgacatagagcttcatgggcacat

SEQ ID NO: 53089 - DNA, 25 bp, Saccharomyces pastorianus
aaatccgttccctgacagtatcaga

SEQ ID NO: 53090 - DNA, 25 bp, Saccharomyces pastorianus
gacgacttacgatcaacttttttgg

SEQ ID NO: 53091 - DNA, 25 bp, Saccharomyces pastorianus
gttcccgaaacattcaagacgttgt

SEQ ID NO: 53092 - DNA, 25 bp, Saccharomyces pastorianus
tgtcaatagacccaaccaaatccgt

SEQ ID NO: 53093 - DNA, 25 bp, Saccharomyces pastorianus
cagttctccatcttccataatgaca

SEQ ID NO: 53094 - DNA, 25 bp, Saccharomyces pastorianus
aaacggtagagcctagcttcacaaa

SEQ ID NO: 53095 - DNA, 25 bp, Saccharomyces pastorianus
tctgaaggtacctctgaaaccgcct

SEQ ID NO: 53096 - DNA, 25 bp, Saccharomyces pastorianus
ttggccattaaaaccacccctggca

SEQ ID NO: 53097 - DNA, 25 bp, Saccharomyces pastorianus
cctgaagttacctctacctctggca

SEQ ID NO: 53098 - DNA, 25 bp, Saccharomyces pastorianus
acctctggcaccacctctgaaggta

SEQ ID NO: 53099 - DNA, 25 bp, Saccharomyces pastorianus
atggagtcggcgttagcaccgaaga

SEQ ID NO: 53100 - DNA, 25 bp, Saccharomyces pastorianus
tgaaaccgcctctgaaaccagctct

SEQ ID NO: 53101 - DNA, 25 bp, Saccharomyces pastorianus
gttattgacgtataaggtatccttt

SEQ ID NO: 53102 - DNA, 25 bp, Saccharomyces pastorianus
gaaaccagctctgcctctgaaggcg

SEQ ID NO: 53103 - DNA, 25 bp, Saccharomyces pastorianus
agaattcggcaacttcttccttggt

SEQ ID NO: 53104 - DNA, 25 bp, Saccharomyces pastorianus
tccttggtggccttgaatggaacgt

SEQ ID NO: 53105 - DNA, 25 bp, Saccharomyces pastorianus
ggccttgaatggaacgttattgacg

SEQ ID NO: 53106 - DNA, 25 bp, Saccharomyces pastorianus
aggaagcgcttcattgtagactact

SEQ ID NO: 53107 - DNA, 25 bp, Saccharomyces pastorianus
gtcattgcgttggtatgcaccccag

SEQ ID NO: 53108 - DNA, 25 bp, Saccharomyces pastorianus
aagagctcttggtcgggttcgatga

SEQ ID NO: 53109 - DNA, 25 bp, Saccharomyces pastorianus
agctcccgctctaagtttgtgaact

SEQ ID NO: 53110 - DNA, 25 bp, Saccharomyces pastorianus
gaaaggctttcttgcatctcaattc

SEQ ID NO: 53111 - DNA, 25 bp, Saccharomyces pastorianus
tacccgctaccgcaagttatgaagt

SEQ ID NO: 53112 - DNA, 25 bp, Saccharomyces pastorianus
atttccaatcaaagcgctctctata

SEQ ID NO: 53113 - DNA, 25 bp, Saccharomyces pastorianus
tggctattcgcctttctagaggtta

SEQ ID NO: 53114 - DNA, 25 bp, Saccharomyces pastorianus
tgttcatcgtaatttggcccatcag

SEQ ID NO: 53115 - DNA, 25 bp, Saccharomyces pastorianus
tcagatccatgattctagccgtgcc

SEQ ID NO: 53116 - DNA, 25 bp, Saccharomyces pastorianus
ttgatttccggtgttgtcattgcgt

SEQ ID NO: 53117 - DNA, 25 bp, Saccharomyces pastorianus
accgtcaagaaggtttactcgctga

SEQ ID NO: 53118 - DNA, 25 bp, Saccharomyces pastorianus
agatggaagtggtcggcaccgtcaa

SEQ ID NO: 53119 - DNA, 25 bp, Saccharomyces pastorianus
tatcgaagtttacggccaactcgct

SEQ ID NO: 53120 - DNA, 25 bp, Saccharomyces pastorianus
gtccaacgccaacgaagcagatcta

SEQ ID NO: 53121 - DNA, 25 bp, Saccharomyces pastorianus
gaaatgatccgagaacgcttcctgc

SEQ ID NO: 53122 - DNA, 25 bp, Saccharomyces pastorianus
agcccgcaaggtcccaggtacgaga

SEQ ID NO: 53123 - DNA, 25 bp, Saccharomyces pastorianus
gtaccactacgctcacaggcaggaa

SEQ ID NO: 53124 - DNA, 25 bp, Saccharomyces pastorianus
gcagcagtacagacaacgccaacag

SEQ ID NO: 53125 - DNA, 25 bp, Saccharomyces pastorianus
agaaagtttactgaacctgcccacg

SEQ ID NO: 53126 - DNA, 25 bp, Saccharomyces pastorianus
gttcgatagcgtccatagcacgtca

SEQ ID NO: 53127 - DNA, 25 bp, Saccharomyces pastorianus
ggaaagtactaatcctcgcgaagga

SEQ ID NO: 53128 - DNA, 25 bp, Saccharomyces pastorianus
ataaacaccaccaagagaccgctga

SEQ ID NO: 53129 - DNA, 25 bp, Saccharomyces pastorianus
gtccgacaaagtttcgtgcttgcag

SEQ ID NO: 53130 - DNA, 25 bp, Saccharomyces pastorianus
agaaaaggagcaggcgcaccctatg

SEQ ID NO: 53131 - DNA, 25 bp, Saccharomyces pastorianus
agaccgctgaagtcgatcgggagac

SEQ ID NO: 53132 - DNA, 25 bp, Saccharomyces pastorianus
tgcctgcaccttttgaaactagcca

SEQ ID NO: 53133 - DNA, 25 bp, Saccharomyces pastorianus
tcgtgcttgcaggatctcgtagaaa

SEQ ID NO: 53134 - DNA, 25 bp, Saccharomyces pastorianus
gattacgactataacgaccgggagt

SEQ ID NO: 53135 - DNA, 25 bp, Saccharomyces pastorianus
caacgtcgtgacgttctacgacgaa

SEQ ID NO: 53136 - DNA, 25 bp, Saccharomyces pastorianus
tagccaacaagcagctgtccgacaa

SEQ ID NO: 53137 - DNA, 25 bp, Saccharomyces pastorianus
gaagaggctcattacgtgcctgcac

SEQ ID NO: 53138 - DNA, 25 bp, Saccharomyces pastorianus
acgacgagcacgacgattacgacta

SEQ ID NO: 53139 - DNA, 25 bp, Saccharomyces pastorianus
acggtggcccttcatagtttctatt

SEQ ID NO: 53140 - DNA, 25 bp, Saccharomyces pastorianus
gacgctgaccagcttatctcgaggg

SEQ ID NO: 53141 - DNA, 25 bp, Saccharomyces pastorianus
ttgtacagttcctctagcttgggtc

SEQ ID NO: 53142 - DNA, 25 bp, Saccharomyces pastorianus
gacgctcttcgtgtacctgtttgta

SEQ ID NO: 53143 - DNA, 25 bp, Saccharomyces pastorianus
gcagtgccagtgttgcgttcacggt

SEQ ID NO: 53144 - DNA, 25 bp, Saccharomyces pastorianus
gggatctcgaaatcgacgctgacca

SEQ ID NO: 53145 - DNA, 25 bp, Saccharomyces pastorianus
agaagtcgtcgctcaggttgaacac

SEQ ID NO: 53146 - DNA, 25 bp, Saccharomyces pastorianus
agttcttcttgcatccggtcatatt

SEQ ID NO: 53147 - DNA, 25 bp, Saccharomyces pastorianus
atagtttctatttcccagagcaaga

SEQ ID NO: 53148 - DNA, 25 bp, Saccharomyces pastorianus
acacgactttgcctaagttggcctt

SEQ ID NO: 53149 - DNA, 25 bp, Saccharomyces pastorianus
agaggttttcagttcttcttgcatc

SEQ ID NO: 53150 - DNA, 25 bp, Saccharomyces pastorianus
atactctttccccaccaaagatgaa

SEQ ID NO: 53151 - DNA, 25 bp, Saccharomyces pastorianus
tcgaaaactcctccactttatagtg

SEQ ID NO: 53152 - DNA, 25 bp, Saccharomyces pastorianus
aagacccagtacaccgacgaaacag

SEQ ID NO: 53153 - DNA, 25 bp, Saccharomyces pastorianus
ggataactcttcaggttcgaaaact

SEQ ID NO: 53154 - DNA, 25 bp, Saccharomyces pastorianus
gtgacaatcttccaggtgactccaa

SEQ ID NO: 53155 - DNA, 25 bp, Saccharomyces pastorianus
ggaccggcttatccaaggactttga

SEQ ID NO: 53156 - DNA, 25 bp, Saccharomyces pastorianus
ggaagcccgacttaaagagctggaa

SEQ ID NO: 53157 - DNA, 25 bp, Saccharomyces pastorianus
aaggcacagaacagggctgcccaaa

SEQ ID NO: 53158 - DNA, 25 bp, Saccharomyces pastorianus
gaatgttgccatagctacggaccgg

SEQ ID NO: 53159 - DNA, 25 bp, Saccharomyces pastorianus
gaaaaagccacgaagtcctctagag

SEQ ID NO: 53160 - DNA, 25 bp, Saccharomyces pastorianus
agatgaattctccacttccatgatc

SEQ ID NO: 53161 - DNA, 25 bp, Saccharomyces pastorianus
tgaagaacgactacagcaactggtg

SEQ ID NO: 53162 - DNA, 25 bp, Saccharomyces pastorianus
ggagcacgtgatcccaaagacgatc

SEQ ID NO: 53163 - DNA, 25 bp, Saccharomyces pastorianus
ctacagcaactggtggcagaggagt

SEQ ID NO: 53164 - DNA, 25 bp, Saccharomyces pastorianus
aagtacgtggaatctggagcgctgc

SEQ ID NO: 53165 - DNA, 25 bp, Saccharomyces pastorianus
acgcagaagtgctggtgatagtcct

SEQ ID NO: 53166 - DNA, 25 bp, Saccharomyces pastorianus
gggtccggaacagtcagacgcagaa

SEQ ID NO: 53167 - DNA, 25 bp, Saccharomyces pastorianus
atcgcaggtcacgtggccagccgtg

SEQ ID NO: 53168 - DNA, 25 bp, Saccharomyces pastorianus
tgatagtcctgggagacgccgccag

SEQ ID NO: 53169 - DNA, 25 bp, Saccharomyces pastorianus
agacgccgccaggaagtacgtggaa

SEQ ID NO: 53170 - DNA, 25 bp, Saccharomyces pastorianus
aaagacgatcgcaggtcacgtggcc

SEQ ID NO: 53171 - DNA, 25 bp, Saccharomyces pastorianus
agcgctgcgggagcacgtgatccca

SEQ ID NO: 53172 - DNA, 25 bp, Saccharomyces pastorianus
gatcaacaaaggtcactccgcaggc

SEQ ID NO: 53173 - DNA, 25 bp, Saccharomyces pastorianus
ctattgttaaagcttccaactggag

SEQ ID NO: 53174 - DNA, 25 bp, Saccharomyces pastorianus
tcaacaaaggtcactccgcaggcaa

SEQ ID NO: 53175 - DNA, 25 bp, Saccharomyces pastorianus
aaggtcactccgcaggcaaattggc

SEQ ID NO: 53176 - DNA, 25 bp, Saccharomyces pastorianus
agtcggccgtgtcgttttgatcaac

SEQ ID NO: 53177 - DNA, 25 bp, Saccharomyces pastorianus
acaaaggtcactccgcaggcaaatt

SEQ ID NO: 53178 - DNA, 25 bp, Saccharomyces pastorianus
gtccactgattctattgttaaagct

SEQ ID NO: 53179 - DNA, 25 bp, Saccharomyces pastorianus
tttgatcaacaaaggtcactccgca

SEQ ID NO: 53180 - DNA, 25 bp, Saccharomyces pastorianus
aggtcactccgcaggcaaattggct

SEQ ID NO: 53181 - DNA, 25 bp, Saccharomyces pastorianus
gattctattgttaaagcttccaact

SEQ ID NO: 53182 - DNA, 25 bp, Saccharomyces pastorianus
taaagcttccaactggagattagtc

SEQ ID NO: 53183 - DNA, 25 bp, Saccharomyces pastorianus
attccaagacgccatatacaaaaag

SEQ ID NO: 53184 - DNA, 25 bp, Saccharomyces pastorianus
ggtggcccaaattccaagacgccat

SEQ ID NO: 53185 - DNA, 25 bp, Saccharomyces pastorianus
atttgtgttcactgaagggtggccc

SEQ ID NO: 53186 - DNA, 25 bp, Saccharomyces pastorianus
cagtatgttcgctttatttgtgttc

SEQ ID NO: 53187 - DNA, 25 bp, Saccharomyces pastorianus
ccaagacgccatatacaaaaagatt

SEQ ID NO: 53188 - DNA, 25 bp, Saccharomyces pastorianus
tgtgttcactgaagggtggcccaaa

SEQ ID NO: 53189 - DNA, 25 bp, Saccharomyces pastorianus
gcccaaattccaagacgccatatac

SEQ ID NO: 53190 - DNA, 25 bp, Saccharomyces pastorianus
gaagggtggcccaaattccaagacg

SEQ ID NO: 53191 - DNA, 25 bp, Saccharomyces pastorianus
ttcactgaagggtggcccaaattcc

SEQ ID NO: 53192 - DNA, 25 bp, Saccharomyces pastorianus
gggccagtatgttcgctttatttgt

SEQ ID NO: 53193 - DNA, 25 bp, Saccharomyces pastorianus
ggccagtatgttcgctttatttgtg

SEQ ID NO: 53194 - DNA, 25 bp, Saccharomyces pastorianus
ctgcgtttgacctcacttcaagtaa

SEQ ID NO: 53195 - DNA, 25 bp, Saccharomyces pastorianus
gttcccatcgtatgcaaattcctgt

SEQ ID NO: 53196 - DNA, 25 bp, Saccharomyces pastorianus
ggctcgctcactttttattattaac

SEQ ID NO: 53197 - DNA, 25 bp, Saccharomyces pastorianus
accatgattctggaaggctcgctca

SEQ ID NO: 53198 - DNA, 25 bp, Saccharomyces pastorianus
gcagcaaccttcttaccagatggga

SEQ ID NO: 53199 - DNA, 25 bp, Saccharomyces pastorianus
aatgaaacctcatcctgcgtttgac

SEQ ID NO: 53200 - DNA, 25 bp, Saccharomyces pastorianus
atgaactctcttgtagcgacgccaa

SEQ ID NO: 53201 - DNA, 25 bp, Saccharomyces pastorianus
gcgttttcattatccacagcagcaa

SEQ ID NO: 53202 - DNA, 25 bp, Saccharomyces pastorianus
aagactcatcggaagtagcctggtt

SEQ ID NO: 53203 - DNA, 25 bp, Saccharomyces pastorianus
atgggactaccatcacagcttctat

SEQ ID NO: 53204 - DNA, 25 bp, Saccharomyces pastorianus
acactagctctatgatgcgttttca

SEQ ID NO: 53205 - DNA, 25 bp, Saccharomyces pastorianus
ttgaatctgctaagttatgtcgcga

SEQ ID NO: 53206 - DNA, 25 bp, Saccharomyces pastorianus
gcgatgtccaccgaaacacaagaac

SEQ ID NO: 53207 - DNA, 25 bp, Saccharomyces pastorianus
gaattaaaggccagacacatttcaa

SEQ ID NO: 53208 - DNA, 25 bp, Saccharomyces pastorianus
aaaccgaccgtcactgaggaaatgt

SEQ ID NO: 53209 - DNA, 25 bp, Saccharomyces pastorianus
ggtagataatcctcaactgacgaca

SEQ ID NO: 53210 - DNA, 25 bp, Saccharomyces pastorianus
gttatgtcgcgattttctcaccaag

SEQ ID NO: 53211 - DNA, 25 bp, Saccharomyces pastorianus
ggttagttcacttttcattgggaag

SEQ ID NO: 53212 - DNA, 25 bp, Saccharomyces pastorianus
caaagggcatcaaaggttagttcac

SEQ ID NO: 53213 - DNA, 25 bp, Saccharomyces pastorianus
aaagcctgtctctaatattcataat

SEQ ID NO: 53214 - DNA, 25 bp, Saccharomyces pastorianus
aactatacgttattctttggccaag

SEQ ID NO: 53215 - DNA, 25 bp, Saccharomyces pastorianus
tgggaagttgaaaccgaccgtcact

SEQ ID NO: 53216 - DNA, 25 bp, Saccharomyces pastorianus
gatagaggcactaaaccgcgcacta

SEQ ID NO: 53217 - DNA, 25 bp, Saccharomyces pastorianus
cagctgttgctctgtataactttgc

SEQ ID NO: 53218 - DNA, 25 bp, Saccharomyces pastorianus
gtgactacggaaggtctcccgataa

SEQ ID NO: 53219 - DNA, 25 bp, Saccharomyces pastorianus
agactcctttgattctgctgatgaa

SEQ ID NO: 53220 - DNA, 25 bp, Saccharomyces pastorianus
gacatggccaagactatttcagcgg

SEQ ID NO: 53221 - DNA, 25 bp, Saccharomyces pastorianus
tatcacaaggatctcgcagtcgtta

SEQ ID NO: 53222 - DNA, 25 bp, Saccharomyces pastorianus
aaccgcgcactaatactcgatggga

SEQ ID NO: 53223 - DNA, 25 bp, Saccharomyces pastorianus
tagccacaatataggcccgcatgta

SEQ ID NO: 53224 - DNA, 25 bp, Saccharomyces pastorianus
gacagtgccgatgacgagcgtgact

SEQ ID NO: 53225 - DNA, 25 bp, Saccharomyces pastorianus
ttcactcgacttcacaaacagctgt

SEQ ID NO: 53226 - DNA, 25 bp, Saccharomyces pastorianus
gcaatctggcgatctagctttcaag

SEQ ID NO: 53227 - DNA, 25 bp, Saccharomyces pastorianus
ggccgtttgcgtcattcatatttaa

SEQ ID NO: 53228 - DNA, 25 bp, Saccharomyces pastorianus
cgtgtgactcattagaatccgaaat

SEQ ID NO: 53229 - DNA, 25 bp, Saccharomyces pastorianus
attgattctatttgacccgtcttta

SEQ ID NO: 53230 - DNA, 25 bp, Saccharomyces pastorianus
gttggccagcgcataccgtaatatt

SEQ ID NO: 53231 - DNA, 25 bp, Saccharomyces pastorianus
ggaattctacaaatcgggtctcagc

SEQ ID NO: 53232 - DNA, 25 bp, Saccharomyces pastorianus
gttcagatatacacaaggccctaca

SEQ ID NO: 53233 - DNA, 25 bp, Saccharomyces pastorianus
tggaatactgtttaccattgcggtc

SEQ ID NO: 53234 - DNA, 25 bp, Saccharomyces pastorianus
tataaattcctgaacacatccggtt

SEQ ID NO: 53235 - DNA, 25 bp, Saccharomyces pastorianus
ggtcggtttagttacttggccacat

SEQ ID NO: 53236 - DNA, 25 bp, Saccharomyces pastorianus
accgtaatattatcgccattctgcc

SEQ ID NO: 53237 - DNA, 25 bp, Saccharomyces pastorianus
tcgggtctcagccatcaaactataa

SEQ ID NO: 53238 - DNA, 25 bp, Saccharomyces pastorianus
cgagcgtatcttggcctggttatgt

SEQ ID NO: 53239 - DNA, 25 bp, Saccharomyces pastorianus
aaggacgccatcacttggttgcaag

SEQ ID NO: 53240 - DNA, 25 bp, Saccharomyces pastorianus
gaactagctttcttgactttcgaag

SEQ ID NO: 53241 - DNA, 25 bp, Saccharomyces pastorianus
atgaagcgttgctctgatgacccac

SEQ ID NO: 53242 - DNA, 25 bp, Saccharomyces pastorianus
atcggtgtcccaatcttgctgacaa

SEQ ID NO: 53243 - DNA, 25 bp, Saccharomyces pastorianus
tttggtgacgacattgccgaggctg

SEQ ID NO: 53244 - DNA, 25 bp, Saccharomyces pastorianus
tgactttcgaagacctactacacca

SEQ ID NO: 53245 - DNA, 25 bp, Saccharomyces pastorianus
aaggcccctttcatgagactacaat

SEQ ID NO: 53246 - DNA, 25 bp, Saccharomyces pastorianus
attaatggccggcttcaaccgtgaa

SEQ ID NO: 53247 - DNA, 25 bp, Saccharomyces pastorianus
atacggtacttgtccacacggtggc

SEQ ID NO: 53248 - DNA, 25 bp, Saccharomyces pastorianus
cacacggtggctatggtctcggtac

SEQ ID NO: 53249 - DNA, 25 bp, Saccharomyces pastorianus
gcaagatagcagcaatgtattcaga

SEQ ID NO: 53250 - DNA, 25 bp, Saccharomyces pastorianus
ggacagattgtctgacacttctgaa

SEQ ID NO: 53251 - DNA, 25 bp, Saccharomyces pastorianus
gcttattaccgacttacagtctcat

SEQ ID NO: 53252 - DNA, 25 bp, Saccharomyces pastorianus
atgaggcacaaatttctgagttgga

SEQ ID NO: 53253 - DNA, 25 bp, Saccharomyces pastorianus
tatatttcccagcaagaacttgaca

SEQ ID NO: 53254 - DNA, 25 bp, Saccharomyces pastorianus
gagatggcgcaagaaatcgagtttt

SEQ ID NO: 53255 - DNA, 25 bp, Saccharomyces pastorianus
atggctagccaagatacatgagctg

SEQ ID NO: 53256 - DNA, 25 bp, Saccharomyces pastorianus
agaactctcaacaatcagacgtcat

SEQ ID NO: 53257 - DNA, 25 bp, Saccharomyces pastorianus
caatcgtcgcaaaagcttattaccg

SEQ ID NO: 53258 - DNA, 25 bp, Saccharomyces pastorianus
agacgtcattgaactagcgaacaga

SEQ ID NO: 53259 - DNA, 25 bp, Saccharomyces pastorianus
tagcgaacagaaacagagccgaatt

SEQ ID NO: 53260 - DNA, 25 bp, Saccharomyces pastorianus
tacaaaaccttgaaagagccgagca

SEQ ID NO: 53261 - DNA, 25 bp, Saccharomyces pastorianus
gcaagcatacgtgggtgcattataa

SEQ ID NO: 53262 - DNA, 25 bp, Saccharomyces pastorianus
gagccgagcaaacgatccaagaact

SEQ ID NO: 53263 - DNA, 25 bp, Saccharomyces pastorianus
aaacctctcttaatatcgtccaatg

SEQ ID NO: 53264 - DNA, 25 bp, Saccharomyces pastorianus
tgattaaaatcacagcaagcatacg

SEQ ID NO: 53265 - DNA, 25 bp, Saccharomyces pastorianus
atgcgagggcaattggtggtacttt

SEQ ID NO: 53266 - DNA, 25 bp, Saccharomyces pastorianus
gaaggaaataacttctcatttacaa

SEQ ID NO: 53267 - DNA, 25 bp, Saccharomyces pastorianus
aagatccctggttcaacttgttcat

SEQ ID NO: 53268 - DNA, 25 bp, Saccharomyces pastorianus
gtccaatgatatgtcacgaaccaaa

SEQ ID NO: 53269 - DNA, 25 bp, Saccharomyces pastorianus
ctggagtattagctgatctggaaaa

SEQ ID NO: 53270 - DNA, 25 bp, Saccharomyces pastorianus
ggtggtactttcagactatacaatc

SEQ ID NO: 53271 - DNA, 25 bp, Saccharomyces pastorianus
tatatcaacctgtttgccttctact

SEQ ID NO: 53272 - DNA, 25 bp, Saccharomyces pastorianus
aaacatgttcgtgatctgccggtac

SEQ ID NO: 53273 - DNA, 25 bp, Saccharomyces pastorianus
tctcctcagagaacggtgtggtcca

SEQ ID NO: 53274 - DNA, 25 bp, Saccharomyces pastorianus
tgcccatggcttacgtgctgacttt

SEQ ID NO: 53275 - DNA, 25 bp, Saccharomyces pastorianus
gagttcctcggcttcgaagtgctca

SEQ ID NO: 53276 - DNA, 25 bp, Saccharomyces pastorianus
tcatgcagctgttcgacgcgttcaa

SEQ ID NO: 53277 - DNA, 25 bp, Saccharomyces pastorianus
acgcggtgttccatggcgacaagcg

SEQ ID NO: 53278 - DNA, 25 bp, Saccharomyces pastorianus
aaatcgcagagctgttctcctcaga

SEQ ID NO: 53279 - DNA, 25 bp, Saccharomyces pastorianus
tggcataccaggtacctttctccat

SEQ ID NO: 53280 - DNA, 25 bp, Saccharomyces pastorianus
gtgtccttgctactatcctttgtgt

SEQ ID NO: 53281 - DNA, 25 bp, Saccharomyces pastorianus
atcctttgtgtgttcgtcgctaaac

SEQ ID NO: 53282 - DNA, 25 bp, Saccharomyces pastorianus
ggtaacggctcgcagcagcagttcc

SEQ ID NO: 53283 - DNA, 25 bp, Saccharomyces pastorianus
aaggacaagactagcttggccccgg

SEQ ID NO: 53284 - DNA, 25 bp, Saccharomyces pastorianus
caagttcctggctaacgacaccaac

SEQ ID NO: 53285 - DNA, 25 bp, Saccharomyces pastorianus
atcgtcatcgaccagaacagctacg

SEQ ID NO: 53286 - DNA, 25 bp, Saccharomyces pastorianus
aggcggcatgcgcaccaagctcata

SEQ ID NO: 53287 - DNA, 25 bp, Saccharomyces pastorianus
ggccatcgtcgactacattcagcat

SEQ ID NO: 53288 - DNA, 25 bp, Saccharomyces pastorianus
aacgccggcatcgagactatcgtga

SEQ ID NO: 53289 - DNA, 25 bp, Saccharomyces pastorianus
agctggagtgtgtcgacctcgagat

SEQ ID NO: 53290 - DNA, 25 bp, Saccharomyces pastorianus
gcgacaacttccacgagctggagtg

SEQ ID NO: 53291 - DNA, 25 bp, Saccharomyces pastorianus
acgaccggcttctgtgcaaggacaa

SEQ ID NO: 53292 - DNA, 25 bp, Saccharomyces pastorianus
agttctggattctgcacgggctcat

SEQ ID NO: 53293 - DNA, 25 bp, Saccharomyces pastorianus
agctcgttggatcaaatcggtttgc

SEQ ID NO: 53294 - DNA, 25 bp, Saccharomyces pastorianus
gaagaatctttctctaccggtagaa

SEQ ID NO: 53295 - DNA, 25 bp, Saccharomyces pastorianus
gtagaaatctcactggacaaccgtt

SEQ ID NO: 53296 - DNA, 25 bp, Saccharomyces pastorianus
taccagcgcaaccaaagaccgattt

SEQ ID NO: 53297 - DNA, 25 bp, Saccharomyces pastorianus
taaccgctgaaaacacttcgattgt

SEQ ID NO: 53298 - DNA, 25 bp, Saccharomyces pastorianus
aaattcatcaatggcggtttctcag

SEQ ID NO: 53299 - DNA, 25 bp, Saccharomyces pastorianus
gggtgatttcgattactcatccaaa

SEQ ID NO: 53300 - DNA, 25 bp, Saccharomyces pastorianus
atcgaaacatttgtgctaccagcgc

SEQ ID NO: 53301 - DNA, 25 bp, Saccharomyces pastorianus
acttcgattgtgtatgagattcctg

SEQ ID NO: 53302 - DNA, 25 bp, Saccharomyces pastorianus
atgtttccagaaatacttgcgtttg

SEQ ID NO: 53303 - DNA, 25 bp, Saccharomyces pastorianus
aaaatggcttctcaaatcacgggtg

SEQ ID NO: 53304 - DNA, 25 bp, Saccharomyces pastorianus
gtgatgttatcgataagaccagtca

SEQ ID NO: 53305 - DNA, 25 bp, Saccharomyces pastorianus
aacatcaaggaaaacttctacgagt

SEQ ID NO: 53306 - DNA, 25 bp, Saccharomyces pastorianus
agaccagtcagtacgctttgaccgg

SEQ ID NO: 53307 - DNA, 25 bp, Saccharomyces pastorianus
ttttggccctatattgtcagtttat

SEQ ID NO: 53308 - DNA, 25 bp, Saccharomyces pastorianus
cagtttatgaataccctgatcaaga

SEQ ID NO: 53309 - DNA, 25 bp, Saccharomyces pastorianus
ttacgttaacgacaagtgcactggt

SEQ ID NO: 53310 - DNA, 25 bp, Saccharomyces pastorianus
tactgatgataaagctggtggtcca

SEQ ID NO: 53311 - DNA, 25 bp, Saccharomyces pastorianus
gtgcactggtgcagttgtctctcaa

SEQ ID NO: 53312 - DNA, 25 bp, Saccharomyces pastorianus
ggtggtccaaatatcttgagcagat

SEQ ID NO: 53313 - DNA, 25 bp, Saccharomyces pastorianus
tgtctctcaacaatggtttggtggt

SEQ ID NO: 53314 - DNA, 25 bp, Saccharomyces pastorianus
cgctttgaccggtgcaatttttgct

SEQ ID NO: 53315 - DNA, 25 bp, Saccharomyces pastorianus
tgctctgccacctctagaatatatt

SEQ ID NO: 53316 - DNA, 25 bp, Saccharomyces pastorianus
tggaaaccatctcaaacggctgcct

SEQ ID NO: 53317 - DNA, 25 bp, Saccharomyces pastorianus
tgcacttcacaggttctactaatgt

SEQ ID NO: 53318 - DNA, 25 bp, Saccharomyces pastorianus
gagactacccacgtattgttggtga

SEQ ID NO: 53319 - DNA, 25 bp, Saccharomyces pastorianus
aaacatctctcatgcagtactctct

SEQ ID NO: 53320 - DNA, 25 bp, Saccharomyces pastorianus
acggctgccttgtcgaactatttat

SEQ ID NO: 53321 - DNA, 25 bp, Saccharomyces pastorianus
aaagatttcggagctctgcacttca

SEQ ID NO: 53322 - DNA, 25 bp, Saccharomyces pastorianus
atccgatatgtttggcatcctgcag

SEQ ID NO: 53323 - DNA, 25 bp, Saccharomyces pastorianus
gtttgtttacgcagtttcaccattt

SEQ ID NO: 53324 - DNA, 25 bp, Saccharomyces pastorianus
ttaatttcatcccaggtgacccagt

SEQ ID NO: 53325 - DNA, 25 bp, Saccharomyces pastorianus
tttgtacggcaaaatccagagcggt

SEQ ID NO: 53326 - DNA, 25 bp, Saccharomyces pastorianus
taccggattcaaaggcctgctcata

SEQ ID NO: 53327 - DNA, 25 bp, Saccharomyces pastorianus
atcctgtcttcaaagctgtccaaca

SEQ ID NO: 53328 - DNA, 25 bp, Saccharomyces pastorianus
ggtgttcaatggctcgtccacaggt

SEQ ID NO: 53329 - DNA, 25 bp, Saccharomyces pastorianus
accgtgctcatcaaggacaagtccg

SEQ ID NO: 53330 - DNA, 25 bp, Saccharomyces pastorianus
aaggactacaagacctcttcggact

SEQ ID NO: 53331 - DNA, 25 bp, Saccharomyces pastorianus
gccggactcggacaactacatatgc

SEQ ID NO: 53332 - DNA, 25 bp, Saccharomyces pastorianus
gacgttgctcatggacgggctcaca

SEQ ID NO: 53333 - DNA, 25 bp, Saccharomyces pastorianus
gaggccgccaactttgaggccaaga

SEQ ID NO: 53334 - DNA, 25 bp, Saccharomyces pastorianus
aagatcgcagacatcgaggcccatc

SEQ ID NO: 53335 - DNA, 25 bp, Saccharomyces pastorianus
catctctctgagatccaggtcaagg

SEQ ID NO: 53336 - DNA, 25 bp, Saccharomyces pastorianus
acaggtgttccggagtccatcgact

SEQ ID NO: 53337 - DNA, 25 bp, Saccharomyces pastorianus
cattttcgcctttacttgctacaaa

SEQ ID NO: 53338 - DNA, 25 bp, Saccharomyces pastorianus
gtattttgtagcattcccgtacgta

SEQ ID NO: 53339 - DNA, 25 bp, Saccharomyces pastorianus
ttgctacaaacacgtccactggata

SEQ ID NO: 53340 - DNA, 25 bp, Saccharomyces pastorianus
ggatggcctgcaacacgttcgtgag

SEQ ID NO: 53341 - DNA, 25 bp, Saccharomyces pastorianus
gaaactctacgattttgggcccatg

SEQ ID NO: 53342 - DNA, 25 bp, Saccharomyces pastorianus
atcttcaccggtgttttcgcataca

SEQ ID NO: 53343 - DNA, 25 bp, Saccharomyces pastorianus
ataatggccggtgttttcccactct

SEQ ID NO: 53344 - DNA, 25 bp, Saccharomyces pastorianus
ggttcaggcgtgtatttcatcttca

SEQ ID NO: 53345 - DNA, 25 bp, Saccharomyces pastorianus
ggtggcatgctcatatatcggtatc

SEQ ID NO: 53346 - DNA, 25 bp, Saccharomyces pastorianus
aatgcggttcgagccattgttctac

SEQ ID NO: 53347 - DNA, 25 bp, Saccharomyces pastorianus
tgtgctttgtttctacactggccta

SEQ ID NO: 53348 - DNA, 25 bp, Saccharomyces pastorianus
tactgaactgggtgcaatcttctct

SEQ ID NO: 53349 - DNA, 25 bp, Saccharomyces pastorianus
tttgatggaaatcgctaaccctact

SEQ ID NO: 53350 - DNA, 25 bp, Saccharomyces pastorianus
cctatctactttcaacaagggtttg

SEQ ID NO: 53351 - DNA, 25 bp, Saccharomyces pastorianus
aagagaacttctgatgaacttgaga

SEQ ID NO: 53352 - DNA, 25 bp, Saccharomyces pastorianus
agttcacctatctactttcaacaag

SEQ ID NO: 53353 - DNA, 25 bp, Saccharomyces pastorianus
aactgggtgcaatcttctctagaca

SEQ ID NO: 53354 - DNA, 25 bp, Saccharomyces pastorianus
tctctagacaggtcaatagcgctaa

SEQ ID NO: 53355 - DNA, 25 bp, Saccharomyces pastorianus
ggaaatcgctaaccctactgaactg

SEQ ID NO: 53356 - DNA, 25 bp, Saccharomyces pastorianus
ggtgcaatcttctctagacaggtca

SEQ ID NO: 53357 - DNA, 25 bp, Saccharomyces pastorianus
tagcgctaaaaagagaacttctgat

SEQ ID NO: 53358 - DNA, 25 bp, Saccharomyces pastorianus
gatggtgttcaagttcacctatcta

SEQ ID NO: 53359 - DNA, 25 bp, Saccharomyces pastorianus
atttgtcatcactgtcacagccagt

SEQ ID NO: 53360 - DNA, 25 bp, Saccharomyces pastorianus
ggttttttcagacttgttgccacag

SEQ ID NO: 53361 - DNA, 25 bp, Saccharomyces pastorianus
gttgcacgatttttgacactgttca

SEQ ID NO: 53362 - DNA, 25 bp, Saccharomyces pastorianus
acagccagttggacagttgcacgat

SEQ ID NO: 53363 - DNA, 25 bp, Saccharomyces pastorianus
gcacgatttttgacactgttcattg

SEQ ID NO: 53364 - DNA, 25 bp, Saccharomyces pastorianus
tggacagttgcacgatttttgacac

SEQ ID NO: 53365 - DNA, 25 bp, Saccharomyces pastorianus
gtcatcactgtcacagccagttgga

SEQ ID NO: 53366 - DNA, 25 bp, Saccharomyces pastorianus
cactgttcattggttttgcaactac

SEQ ID NO: 53367 - DNA, 25 bp, Saccharomyces pastorianus
gggcatttgtcatcactgtcacagc

SEQ ID NO: 53368 - DNA, 25 bp, Saccharomyces pastorianus
ttttttcagacttgttgccacaggg

SEQ ID NO: 53369 - DNA, 25 bp, Saccharomyces pastorianus
gccagttggacagttgcacgatttt

SEQ ID NO: 53370 - DNA, 25 bp, Saccharomyces pastorianus
gataacttttgccattttccaacgt

SEQ ID NO: 53371 - DNA, 25 bp, Saccharomyces pastorianus
gaatcatccttaccaatggcagctc

SEQ ID NO: 53372 - DNA, 25 bp, Saccharomyces pastorianus
ggagacttcaaatctatcaaaggct

SEQ ID NO: 53373 - DNA, 25 bp, Saccharomyces pastorianus
acaaagctttggattctatcaagta

SEQ ID NO: 53374 - DNA, 25 bp, Saccharomyces pastorianus
tggcagctcaacagccgtctaacaa

SEQ ID NO: 53375 - DNA, 25 bp, Saccharomyces pastorianus
aacatcattagttccatgcacattt

SEQ ID NO: 53376 - DNA, 25 bp, Saccharomyces pastorianus
ttcattcaactttatttttcccatt

SEQ ID NO: 53377 - DNA, 25 bp, Saccharomyces pastorianus
gtaatgagtttttgtccaccgacca

SEQ ID NO: 53378 - DNA, 25 bp, Saccharomyces pastorianus
aaatggcaatcagcgtttccacgca

SEQ ID NO: 53379 - DNA, 25 bp, Saccharomyces pastorianus
gtttccacgcaaacggtaatgagtt

SEQ ID NO: 53380 - DNA, 25 bp, Saccharomyces pastorianus
gaccagtttgttcgaatcttgcaga

SEQ ID NO: 53381 - DNA, 25 bp, Saccharomyces pastorianus
ggatagaaacaatccggcttattgt

SEQ ID NO: 53382 - DNA, 25 bp, Saccharomyces pastorianus
ggcccgtccggatagaaacaatccg

SEQ ID NO: 53383 - DNA, 25 bp, Saccharomyces pastorianus
gaaggcacagctaccatcttaccgg

SEQ ID NO: 53384 - DNA, 25 bp, Saccharomyces pastorianus
aatccggcttattgtacttgacgca

SEQ ID NO: 53385 - DNA, 25 bp, Saccharomyces pastorianus
acagctaccatcttaccgggcccgt

SEQ ID NO: 53386 - DNA, 25 bp, Saccharomyces pastorianus
gaaacaatccggcttattgtacttg

SEQ ID NO: 53387 - DNA, 25 bp, Saccharomyces pastorianus
caatccggcttattgtacttgacgc

SEQ ID NO: 53388 - DNA, 25 bp, Saccharomyces pastorianus
aaggcacagctaccatcttaccggg

SEQ ID NO: 53389 - DNA, 25 bp, Saccharomyces pastorianus
aacaatccggcttattgtacttgac

SEQ ID NO: 53390 - DNA, 25 bp, Saccharomyces pastorianus
aggcacagctaccatcttaccgggc

SEQ ID NO: 53391 - DNA, 25 bp, Saccharomyces pastorianus
agaaggcacagctaccatcttaccg

SEQ ID NO: 53392 - DNA, 25 bp, Saccharomyces pastorianus
tgacgcaattcccacatatcggttt

SEQ ID NO: 53393 - DNA, 25 bp, Saccharomyces pastorianus
tcacttttctcacttgcatgtccat

SEQ ID NO: 53394 - DNA, 25 bp, Saccharomyces pastorianus
gcaagcaggcggcttcctcactttt

SEQ ID NO: 53395 - DNA, 25 bp, Saccharomyces pastorianus
cgcaattcccacatatcggttttgc

SEQ ID NO: 53396 - DNA, 25 bp, Saccharomyces pastorianus
tgtcgcacccgatctttctcttcct

SEQ ID NO: 53397 - DNA, 25 bp, Saccharomyces pastorianus
tgggtgcaagcaggcggcttcctca

SEQ ID NO: 53398 - DNA, 25 bp, Saccharomyces pastorianus
tacttgacgcaattcccacatatcg

SEQ ID NO: 53399 - DNA, 25 bp, Saccharomyces pastorianus
aagcaggcggcttcctcacttttct

SEQ ID NO: 53400 - DNA, 25 bp, Saccharomyces pastorianus
ttcctcacttttctcacttgcatgt

SEQ ID NO: 53401 - DNA, 25 bp, Saccharomyces pastorianus
acgcaattcccacatatcggttttg

SEQ ID NO: 53402 - DNA, 25 bp, Saccharomyces pastorianus
cttttctcacttgcatgtccatcat

SEQ ID NO: 53403 - DNA, 25 bp, Saccharomyces pastorianus
ggatagaaacaatccggcttattgt

SEQ ID NO: 53404 - DNA, 25 bp, Saccharomyces pastorianus
ggcccgtccggatagaaacaatccg

SEQ ID NO: 53405 - DNA, 25 bp, Saccharomyces pastorianus
aatccggcttattgtacttgacgca

SEQ ID NO: 53406 - DNA, 25 bp, Saccharomyces pastorianus
gaaacaatccggcttattgtacttg

SEQ ID NO: 53407 - DNA, 25 bp, Saccharomyces pastorianus
aaggcacagctaccatcttaccggg

SEQ ID NO: 53408 - DNA, 25 bp, Saccharomyces pastorianus
tgtacttgacgcaattcccacatat

SEQ ID NO: 53409 - DNA, 25 bp, Saccharomyces pastorianus
aggcacagctaccatcttaccgggc

SEQ ID NO: 53410 - DNA, 25 bp, Saccharomyces pastorianus
tggagatcccggacgcagaaggcac

SEQ ID NO: 53411 - DNA, 25 bp, Saccharomyces pastorianus
gatctttctcttcctgcactgggtg

SEQ ID NO: 53412 - DNA, 25 bp, Saccharomyces pastorianus
agaaggcacagctaccatcttaccg

SEQ ID NO: 53413 - DNA, 25 bp, Saccharomyces pastorianus
cacatatcggttttgctctgtcgca

SEQ ID NO: 53414 - DNA, 25 bp, Saccharomyces pastorianus
gagacagtcgcagacaagcttcaga

SEQ ID NO: 53415 - DNA, 25 bp, Saccharomyces pastorianus
aagcttcagaggctgtattccctta

SEQ ID NO: 53416 - DNA, 25 bp, Saccharomyces pastorianus
tgaacgcctcagatggacagcactt

SEQ ID NO: 53417 - DNA, 25 bp, Saccharomyces pastorianus
gtaaagcaacgacggcccaggacat

SEQ ID NO: 53418 - DNA, 25 bp, Saccharomyces pastorianus
ggcagactacgattccactttagag

SEQ ID NO: 53419 - DNA, 25 bp, Saccharomyces pastorianus
gattgcttgaactactggcagacta

SEQ ID NO: 53420 - DNA, 25 bp, Saccharomyces pastorianus
gtattcccttaatggttcagttgat

SEQ ID NO: 53421 - DNA, 25 bp, Saccharomyces pastorianus
gaaaccctcaagaagaccaagtggc

SEQ ID NO: 53422 - DNA, 25 bp, Saccharomyces pastorianus
agggcaaagccctaaacctgtgcag

SEQ ID NO: 53423 - DNA, 25 bp, Saccharomyces pastorianus
tggacagcacttgcgattgcttgaa

SEQ ID NO: 53424 - DNA, 25 bp, Saccharomyces pastorianus
acctgtgcagaattatgacccgatt

SEQ ID NO: 53425 - DNA, 25 bp, Saccharomyces pastorianus
gatcgtttacgggtacgcactgcgt

SEQ ID NO: 53426 - DNA, 25 bp, Saccharomyces pastorianus
gtagcggccttaccgatcagtgaga

SEQ ID NO: 53427 - DNA, 25 bp, Saccharomyces pastorianus
gccatgtcgccattagagtgtcgta

SEQ ID NO: 53428 - DNA, 25 bp, Saccharomyces pastorianus
ggatattgacctactgacctttcag

SEQ ID NO: 53429 - DNA, 25 bp, Saccharomyces pastorianus
gctggttctactgaatgggcgctta

SEQ ID NO: 53430 - DNA, 25 bp, Saccharomyces pastorianus
gcactgcgtgacgtacaggctcgga

SEQ ID NO: 53431 - DNA, 25 bp, Saccharomyces pastorianus
acaagtgctctaaggccatgggcga

SEQ ID NO: 53432 - DNA, 25 bp, Saccharomyces pastorianus
aagaacctgggtcttccgagcgaca

SEQ ID NO: 53433 - DNA, 25 bp, Saccharomyces pastorianus
agaagggtcttactctctcaacgac

SEQ ID NO: 53434 - DNA, 25 bp, Saccharomyces pastorianus
aggttcagaggcattgtcatcggta

SEQ ID NO: 53435 - DNA, 25 bp, Saccharomyces pastorianus
aaagggccagtctctctccaagata

SEQ ID NO: 53436 - DNA, 25 bp, Saccharomyces pastorianus
gcataaatccagttaccgcaacgct

SEQ ID NO: 53437 - DNA, 25 bp, Saccharomyces pastorianus
gtttccgaagtcaccaggattggtt

SEQ ID NO: 53438 - DNA, 25 bp, Saccharomyces pastorianus
taccgcaacgctcgattgtatcaat

SEQ ID NO: 53439 - DNA, 25 bp, Saccharomyces pastorianus
ccaagaaatgctatctggccaatta

SEQ ID NO: 53440 - DNA, 25 bp, Saccharomyces pastorianus
tggcccaattttcagatccatcatt

SEQ ID NO: 53441 - DNA, 25 bp, Saccharomyces pastorianus
actaccgacaatatggtttccgaag

SEQ ID NO: 53442 - DNA, 25 bp, Saccharomyces pastorianus
gtatggaacactctacctaccaaga

SEQ ID NO: 53443 - DNA, 25 bp, Saccharomyces pastorianus
gatttggccaataactcgttggtga

SEQ ID NO: 53444 - DNA, 25 bp, Saccharomyces pastorianus
ttacaagccgctgtttgagtaccgc

SEQ ID NO: 53445 - DNA, 25 bp, Saccharomyces pastorianus
ataaaggactcctgtggcccaattt

SEQ ID NO: 53446 - DNA, 25 bp, Saccharomyces pastorianus
aagtttttagtcaacgcgtgcataa

SEQ ID NO: 53447 - DNA, 25 bp, Saccharomyces pastorianus
ccgttttggcagtagatcttttgag

SEQ ID NO: 53448 - DNA, 25 bp, Saccharomyces pastorianus
tttacgaatgcccttgtcgtgcctc

SEQ ID NO: 53449 - DNA, 25 bp, Saccharomyces pastorianus
taccgttttggcagtagatcttttg

SEQ ID NO: 53450 - DNA, 25 bp, Saccharomyces pastorianus
gttttggcagtagatcttttgagat

SEQ ID NO: 53451 - DNA, 25 bp, Saccharomyces pastorianus
gatcttttgagatttacgaatgccc

SEQ ID NO: 53452 - DNA, 25 bp, Saccharomyces pastorianus
aatgcccttgtcgtgcctctattca

SEQ ID NO: 53453 - DNA, 25 bp, Saccharomyces pastorianus
tggcagtagatcttttgagatttac

SEQ ID NO: 53454 - DNA, 25 bp, Saccharomyces pastorianus
tgcccttgtcgtgcctctattcaga

SEQ ID NO: 53455 - DNA, 25 bp, Saccharomyces pastorianus
tcttttgagatttacgaatgccctt

SEQ ID NO: 53456 - DNA, 25 bp, Saccharomyces pastorianus
cgaatgcccttgtcgtgcctctatt

SEQ ID NO: 53457 - DNA, 25 bp, Saccharomyces pastorianus
tacgaatgcccttgtcgtgcctcta

SEQ ID NO: 53458 - DNA, 25 bp, Saccharomyces pastorianus
ccgttttggcagtagatcttttgag

SEQ ID NO: 53459 - DNA, 25 bp, Saccharomyces pastorianus
tttacgaatgcccttgtcgtgcctc

SEQ ID NO: 53460 - DNA, 25 bp, Saccharomyces pastorianus
attgggtgccatgggtaccgttttg

SEQ ID NO: 53461 - DNA, 25 bp, Saccharomyces pastorianus
taccgttttggcagtagatcttttg

SEQ ID NO: 53462 - DNA, 25 bp, Saccharomyces pastorianus
gttttggcagtagatcttttgagat

SEQ ID NO: 53463 - DNA, 25 bp, Saccharomyces pastorianus
gatcttttgagatttacgaatgccc

SEQ ID NO: 53464 - DNA, 25 bp, Saccharomyces pastorianus
tgcccttgtcgtgcctctattcaga

SEQ ID NO: 53465 - DNA, 25 bp, Saccharomyces pastorianus
tcttttgagatttacgaatgccctt

SEQ ID NO: 53466 - DNA, 25 bp, Saccharomyces pastorianus
tacgaatgcccttgtcgtgcctcta

SEQ ID NO: 53467 - DNA, 25 bp, Saccharomyces pastorianus
gaatgcccttgtcgtgcctctattc

SEQ ID NO: 53468 - DNA, 25 bp, Saccharomyces pastorianus
catatccttggattgggtgccatgg

SEQ ID NO: 53469 - DNA, 25 bp, Saccharomyces pastorianus
ggcgttcttgatacctaattccatc

SEQ ID NO: 53470 - DNA, 25 bp, Saccharomyces pastorianus
gccgttggcgttcttgatacctaat

SEQ ID NO: 53471 - DNA, 25 bp, Saccharomyces pastorianus
tacccagagtgtacagtttttccct

SEQ ID NO: 53472 - DNA, 25 bp, Saccharomyces pastorianus
gtcttcttcagcgttttcttccttt

SEQ ID NO: 53473 - DNA, 25 bp, Saccharomyces pastorianus
atcgtcttcttcagcgttttcttcc

SEQ ID NO: 53474 - DNA, 25 bp, Saccharomyces pastorianus
tgacaacttctggttcgtcgtcgga

SEQ ID NO: 53475 - DNA, 25 bp, Saccharomyces pastorianus
aacttctggttcgtcgtcggaccat

SEQ ID NO: 53476 - DNA, 25 bp, Saccharomyces pastorianus
gagtgtacagtttttccctgacaac

SEQ ID NO: 53477 - DNA, 25 bp, Saccharomyces pastorianus
aattccatcaatttagtacccagag

SEQ ID NO: 53478 - DNA, 25 bp, Saccharomyces pastorianus
acagtttttccctgacaacttctgg

SEQ ID NO: 53479 - DNA, 25 bp, Saccharomyces pastorianus
gaaaatgatttcaacgccgttggcg

SEQ ID NO: 53480 - DNA, 25 bp, Saccharomyces pastorianus
tgttgaaattctcggtccacaggac

SEQ ID NO: 53481 - DNA, 25 bp, Saccharomyces pastorianus
gacggtgcgctaagagtcactgcta

SEQ ID NO: 53482 - DNA, 25 bp, Saccharomyces pastorianus
attcactccaaagttgaccaccaat

SEQ ID NO: 53483 - DNA, 25 bp, Saccharomyces pastorianus
ggtgccgctttacaagccagactag

SEQ ID NO: 53484 - DNA, 25 bp, Saccharomyces pastorianus
aaagccattggtttggtcggtgcca

SEQ ID NO: 53485 - DNA, 25 bp, Saccharomyces pastorianus
tttgctagctgaaacttcctaccca

SEQ ID NO: 53486 - DNA, 25 bp, Saccharomyces pastorianus
gactagtcagcgactacgatgccga

SEQ ID NO: 53487 - DNA, 25 bp, Saccharomyces pastorianus
ggtccgacgacgaaccagaagttgt

SEQ ID NO: 53488 - DNA, 25 bp, Saccharomyces pastorianus
tgaattccatccagttttgctagct

SEQ ID NO: 53489 - DNA, 25 bp, Saccharomyces pastorianus
tcggtgccaagggtgaattccatcc

SEQ ID NO: 53490 - DNA, 25 bp, Saccharomyces pastorianus
ttaggtatcaagaacgccaacggcg

SEQ ID NO: 53491 - DNA, 25 bp, Saccharomyces pastorianus
gaatgggtgctctggatctgtttaa

SEQ ID NO: 53492 - DNA, 25 bp, Saccharomyces pastorianus
taaatcctacattcaccgtgtgggt

SEQ ID NO: 53493 - DNA, 25 bp, Saccharomyces pastorianus
agcgccactgctctacatggtgact

SEQ ID NO: 53494 - DNA, 25 bp, Saccharomyces pastorianus
ttatattaaccctgagagactctgt

SEQ ID NO: 53495 - DNA, 25 bp, Saccharomyces pastorianus
aagagagctatccttgtcgctacag

SEQ ID NO: 53496 - DNA, 25 bp, Saccharomyces pastorianus
aacttgctggagttcagcgccactg

SEQ ID NO: 53497 - DNA, 25 bp, Saccharomyces pastorianus
ggaaatctgtttcgctggtgtcaca

SEQ ID NO: 53498 - DNA, 25 bp, Saccharomyces pastorianus
cattgatggttgtgccaggcggtct

SEQ ID NO: 53499 - DNA, 25 bp, Saccharomyces pastorianus
ttatcgggattgtgcaacttgctgg

SEQ ID NO: 53500 - DNA, 25 bp, Saccharomyces pastorianus
gatattcctgttgactctaaatcct

SEQ ID NO: 53501 - DNA, 25 bp, Saccharomyces pastorianus
gccaggcggtctcaaaaacacttat

SEQ ID NO: 53502 - DNA, 25 bp, Saccharomyces pastorianus
atgcaatctttgaagttctcggaga

SEQ ID NO: 53503 - DNA, 25 bp, Saccharomyces pastorianus
gctcaatttcacaacgtgcgggata

SEQ ID NO: 53504 - DNA, 25 bp, Saccharomyces pastorianus
ggcttggcggcgctcaatttcacaa

SEQ ID NO: 53505 - DNA, 25 bp, Saccharomyces pastorianus
tttgcacgcttgtgggttcctccga

SEQ ID NO: 53506 - DNA, 25 bp, Saccharomyces pastorianus
ggtctttagcttcttgttttgcacg

SEQ ID NO: 53507 - DNA, 25 bp, Saccharomyces pastorianus
attgtcgctatctgcggtctttagc

SEQ ID NO: 53508 - DNA, 25 bp, Saccharomyces pastorianus
aacgtgctgatgttcttgggctcgg

SEQ ID NO: 53509 - DNA, 25 bp, Saccharomyces pastorianus
tgcgggatacgtggcacccttagaa

SEQ ID NO: 53510 - DNA, 25 bp, Saccharomyces pastorianus
tcgagattgtgccattgtcgctatc

SEQ ID NO: 53511 - DNA, 25 bp, Saccharomyces pastorianus
cttgggctcgggaaacttcactgca

SEQ ID NO: 53512 - DNA, 25 bp, Saccharomyces pastorianus
gtggcacccttagaatgcaatcttt

SEQ ID NO: 53513 - DNA, 25 bp, Saccharomyces pastorianus
cttcgctgtccattagtagcataca

SEQ ID NO: 53514 - DNA, 25 bp, Saccharomyces pastorianus
tcatattcttcgctgtccattagta

SEQ ID NO: 53515 - DNA, 25 bp, Saccharomyces pastorianus
tattcttcgctgtccattagtagca

SEQ ID NO: 53516 - DNA, 25 bp, Saccharomyces pastorianus
ttcgctgtccattagtagcatacag

SEQ ID NO: 53517 - DNA, 25 bp, Saccharomyces pastorianus
agcagcaatctcaagaaataccttt

SEQ ID NO: 53518 - DNA, 25 bp, Saccharomyces pastorianus
catattcttcgctgtccattagtag

SEQ ID NO: 53519 - DNA, 25 bp, Saccharomyces pastorianus
ttcttcgctgtccattagtagcata

SEQ ID NO: 53520 - DNA, 25 bp, Saccharomyces pastorianus
gctgtccattagtagcatacagcag

SEQ ID NO: 53521 - DNA, 25 bp, Saccharomyces pastorianus
atattcttcgctgtccattagtagc

SEQ ID NO: 53522 - DNA, 25 bp, Saccharomyces pastorianus
cagcaatctcaagaaatacctttac

SEQ ID NO: 53523 - DNA, 25 bp, Saccharomyces pastorianus
attcttcgctgtccattagtagcat

SEQ ID NO: 53524 - DNA, 25 bp, Saccharomyces pastorianus
tatcagctgtcaattataccggaaa

SEQ ID NO: 53525 - DNA, 25 bp, Saccharomyces pastorianus
gggtttaatgcaccttatcagctgt

SEQ ID NO: 53526 - DNA, 25 bp, Saccharomyces pastorianus
tgactcctggtgtggtgtctttaga

SEQ ID NO: 53527 - DNA, 25 bp, Saccharomyces pastorianus
catagttatgttagccaccgacggt

SEQ ID NO: 53528 - DNA, 25 bp, Saccharomyces pastorianus
gagattccaaacttgtgttccaaac

SEQ ID NO: 53529 - DNA, 25 bp, Saccharomyces pastorianus
ccaccgacggtgtaactgataatat

SEQ ID NO: 53530 - DNA, 25 bp, Saccharomyces pastorianus
cccgccgatgctgatgagtatactt

SEQ ID NO: 53531 - DNA, 25 bp, Saccharomyces pastorianus
actacattggcggaagactcatcta

SEQ ID NO: 53532 - DNA, 25 bp, Saccharomyces pastorianus
taaagatcctaattaccctagcgtt

SEQ ID NO: 53533 - DNA, 25 bp, Saccharomyces pastorianus
aagtcgccaacttgggtgactcctg

SEQ ID NO: 53534 - DNA, 25 bp, Saccharomyces pastorianus
ttgacgctgcttatgctaaaattaa

SEQ ID NO: 53535 - DNA, 25 bp, Saccharomyces pastorianus
gtagccaagttatcaatttctccaa

SEQ ID NO: 53536 - DNA, 25 bp, Saccharomyces pastorianus
ttttgctattgggtgtgcttattgc

SEQ ID NO: 53537 - DNA, 25 bp, Saccharomyces pastorianus
attgccaattttgctggacatttac

SEQ ID NO: 53538 - DNA, 25 bp, Saccharomyces pastorianus
agacaggcccattcacttataagac

SEQ ID NO: 53539 - DNA, 25 bp, Saccharomyces pastorianus
cgttgctttccagccaaaggacaga

SEQ ID NO: 53540 - DNA, 25 bp, Saccharomyces pastorianus
aagaaccttctattcaagtgccaaa

SEQ ID NO: 53541 - DNA, 25 bp, Saccharomyces pastorianus
agtgccaaggcacagacaggcccat

SEQ ID NO: 53542 - DNA, 25 bp, Saccharomyces pastorianus
acctccagaggttccatttatggta

SEQ ID NO: 53543 - DNA, 25 bp, Saccharomyces pastorianus
gtttaggactttgagaacctccaga

SEQ ID NO: 53544 - DNA, 25 bp, Saccharomyces pastorianus
tcacttataagaccgccgttgcttt

SEQ ID NO: 53545 - DNA, 25 bp, Saccharomyces pastorianus
gactcagagtccaatatttctcgta

SEQ ID NO: 53546 - DNA, 25 bp, Saccharomyces pastorianus
gtgaagttcgtttctgatgttcttg

SEQ ID NO: 53547 - DNA, 25 bp, Saccharomyces pastorianus
ggaagctgaccaaaaattatctaag

SEQ ID NO: 53548 - DNA, 25 bp, Saccharomyces pastorianus
aagaatctatggacgcgagaaagag

SEQ ID NO: 53549 - DNA, 25 bp, Saccharomyces pastorianus
taatgttcaaaaacccttattattg

SEQ ID NO: 53550 - DNA, 25 bp, Saccharomyces pastorianus
gaccttgatgcggatagagatattg

SEQ ID NO: 53551 - DNA, 25 bp, Saccharomyces pastorianus
atatcgaaacccattaatgttcaaa

SEQ ID NO: 53552 - DNA, 25 bp, Saccharomyces pastorianus
tgaggagctttcttcaaaggtggaa

SEQ ID NO: 53553 - DNA, 25 bp, Saccharomyces pastorianus
gttaccaacagatgtgaagttcgtt

SEQ ID NO: 53554 - DNA, 25 bp, Saccharomyces pastorianus
tcaagagttttacagttaccaacag

SEQ ID NO: 53555 - DNA, 25 bp, Saccharomyces pastorianus
aatatggtggtgaccttgatgcgga

SEQ ID NO: 53556 - DNA, 25 bp, Saccharomyces pastorianus
aataccagtaatatcgaaacccatt

SEQ ID NO: 53557 - DNA, 25 bp, Saccharomyces pastorianus
caacccaaccctttctatttgaatg

SEQ ID NO: 53558 - DNA, 25 bp, Saccharomyces pastorianus
agtccgacgttttgttggatacaat

SEQ ID NO: 53559 - DNA, 25 bp, Saccharomyces pastorianus
gttaagctagttcgtaaagcccatt

SEQ ID NO: 53560 - DNA, 25 bp, Saccharomyces pastorianus
gatccggccatcaagaaaacactat

SEQ ID NO: 53561 - DNA, 25 bp, Saccharomyces pastorianus
tattctctctgttttcgaagccaca

SEQ ID NO: 53562 - DNA, 25 bp, Saccharomyces pastorianus
acagttaccatcgtgactttgtcat

SEQ ID NO: 53563 - DNA, 25 bp, Saccharomyces pastorianus
tatcaataggacaccagcagcattt

SEQ ID NO: 53564 - DNA, 25 bp, Saccharomyces pastorianus
gctgagctatcaaaacatccccgtt

SEQ ID NO: 53565 - DNA, 25 bp, Saccharomyces pastorianus
cagttggttactacgattctactaa

SEQ ID NO: 53566 - DNA, 25 bp, Saccharomyces pastorianus
ccacattatcaggtttggtcacata

SEQ ID NO: 53567 - DNA, 25 bp, Saccharomyces pastorianus
aaagcccattggacagatccggcca

SEQ ID NO: 53568 - DNA, 25 bp, Saccharomyces pastorianus
ttataagattgtcaaggagaacttg

SEQ ID NO: 53569 - DNA, 25 bp, Saccharomyces pastorianus
tagggatttataagattgtcaagga

SEQ ID NO: 53570 - DNA, 25 bp, Saccharomyces pastorianus
cctactaatagggatttataagatt

SEQ ID NO: 53571 - DNA, 25 bp, Saccharomyces pastorianus
atagggatttataagattgtcaagg

SEQ ID NO: 53572 - DNA, 25 bp, Saccharomyces pastorianus
gattgtcaaggagaacttgagcgac

SEQ ID NO: 53573 - DNA, 25 bp, Saccharomyces pastorianus
gggatttataagattgtcaaggaga

SEQ ID NO: 53574 - DNA, 25 bp, Saccharomyces pastorianus
gattactttatcaagcgtttcccaa

SEQ ID NO: 53575 - DNA, 25 bp, Saccharomyces pastorianus
tatcaagcgtttcccaaacctacta

SEQ ID NO: 53576 - DNA, 25 bp, Saccharomyces pastorianus
ttatcaagcgtttcccaaacctact

SEQ ID NO: 53577 - DNA, 25 bp, Saccharomyces pastorianus
tcaagcgtttcccaaacctactaat

SEQ ID NO: 53578 - DNA, 25 bp, Saccharomyces pastorianus
gatttataagattgtcaaggagaac

SEQ ID NO: 53579 - DNA, 25 bp, Saccharomyces pastorianus
gcgtaatcattctagcaccacaatt

SEQ ID NO: 53580 - DNA, 25 bp, Saccharomyces pastorianus
aagacacctgacaatatgcctgcat

SEQ ID NO: 53581 - DNA, 25 bp, Saccharomyces pastorianus
gcggattccaacaatgatgccataa

SEQ ID NO: 53582 - DNA, 25 bp, Saccharomyces pastorianus
tgaagatgtattcgcggattccaac

SEQ ID NO: 53583 - DNA, 25 bp, Saccharomyces pastorianus
agaattcatttgctgggttccctaa

SEQ ID NO: 53584 - DNA, 25 bp, Saccharomyces pastorianus
aatttatgcgcaaactttcaccggc

SEQ ID NO: 53585 - DNA, 25 bp, Saccharomyces pastorianus
accggctccactcatgacaaaaaac

SEQ ID NO: 53586 - DNA, 25 bp, Saccharomyces pastorianus
atcaacttctccagatgaaaggcaa

SEQ ID NO: 53587 - DNA, 25 bp, Saccharomyces pastorianus
atgcctgcatctccaggagccaaga

SEQ ID NO: 53588 - DNA, 25 bp, Saccharomyces pastorianus
ggcaaatttttggaccatacgaaat

SEQ ID NO: 53589 - DNA, 25 bp, Saccharomyces pastorianus
tgctgggttccctaaaccattatta

SEQ ID NO: 53590 - DNA, 25 bp, Saccharomyces pastorianus
caatgattgtgacgatgacggcgat

SEQ ID NO: 53591 - DNA, 25 bp, Saccharomyces pastorianus
tgacggccactatgaaggagacgac

SEQ ID NO: 53592 - DNA, 25 bp, Saccharomyces pastorianus
ataccaaagttgatgcagacggcca

SEQ ID NO: 53593 - DNA, 25 bp, Saccharomyces pastorianus
aatgctgctacaaacaacgggtcaa

SEQ ID NO: 53594 - DNA, 25 bp, Saccharomyces pastorianus
tctcgttggctaaagacgtcaggga

SEQ ID NO: 53595 - DNA, 25 bp, Saccharomyces pastorianus
gaaggaggcatcttgaacaaccgat

SEQ ID NO: 53596 - DNA, 25 bp, Saccharomyces pastorianus
aggttcatatggttacgtctcgttg

SEQ ID NO: 53597 - DNA, 25 bp, Saccharomyces pastorianus
ggtagacacaacaatattgcagctt

SEQ ID NO: 53598 - DNA, 25 bp, Saccharomyces pastorianus
atgactttggactacgagatttata

SEQ ID NO: 53599 - DNA, 25 bp, Saccharomyces pastorianus
gcagctttactggattttttcgatt

SEQ ID NO: 53600 - DNA, 25 bp, Saccharomyces pastorianus
tgtccaacaacatctgtctcgaagc

SEQ ID NO: 53601 - DNA, 25 bp, Saccharomyces pastorianus
ttagcatcgctaatcaatcagacaa

SEQ ID NO: 53602 - DNA, 25 bp, Saccharomyces pastorianus
tacgattgcgctaaagttgacttgt

SEQ ID NO: 53603 - DNA, 25 bp, Saccharomyces pastorianus
cttgtgggctatgggtatcgttttc

SEQ ID NO: 53604 - DNA, 25 bp, Saccharomyces pastorianus
cacaagaacccatttagcatcgcta

SEQ ID NO: 53605 - DNA, 25 bp, Saccharomyces pastorianus
aatattgttttccacaagaacccat

SEQ ID NO: 53606 - DNA, 25 bp, Saccharomyces pastorianus
atgtcgccggaattgtttgatagca

SEQ ID NO: 53607 - DNA, 25 bp, Saccharomyces pastorianus
taatcaatcagacaaatcctttggt

SEQ ID NO: 53608 - DNA, 25 bp, Saccharomyces pastorianus
tcctttggttatttcgctgccaaca

SEQ ID NO: 53609 - DNA, 25 bp, Saccharomyces pastorianus
gatagcaacttggatatcgacgaaa

SEQ ID NO: 53610 - DNA, 25 bp, Saccharomyces pastorianus
gaaaggaaccttacgattgcgctaa

SEQ ID NO: 53611 - DNA, 25 bp, Saccharomyces pastorianus
atgggtatcgttttccttaatattg

SEQ ID NO: 53612 - DNA, 25 bp, Saccharomyces pastorianus
agaaacaagttccagctgcgtcatc

SEQ ID NO: 53613 - DNA, 25 bp, Saccharomyces pastorianus
gatgacacaggtacttttccgtatc

SEQ ID NO: 53614 - DNA, 25 bp, Saccharomyces pastorianus
atgcgttcccgggtgctcgaagatg

SEQ ID NO: 53615 - DNA, 25 bp, Saccharomyces pastorianus
aatgagtcgacatccaccttagtgg

SEQ ID NO: 53616 - DNA, 25 bp, Saccharomyces pastorianus
atggaactgtattcctcccagaagc

SEQ ID NO: 53617 - DNA, 25 bp, Saccharomyces pastorianus
aattgccgacagtatgcacgccatt

SEQ ID NO: 53618 - DNA, 25 bp, Saccharomyces pastorianus
tttccgtatctccaattcacaattc

SEQ ID NO: 53619 - DNA, 25 bp, Saccharomyces pastorianus
aagcaagtcctcttggatttccaaa

SEQ ID NO: 53620 - DNA, 25 bp, Saccharomyces pastorianus
tgaggtctacagacgccatcagcaa

SEQ ID NO: 53621 - DNA, 25 bp, Saccharomyces pastorianus
gatggtactatcacgtctgtccaac

SEQ ID NO: 53622 - DNA, 25 bp, Saccharomyces pastorianus
atatgcttctggacacggtgctcta

SEQ ID NO: 53623 - DNA, 25 bp, Saccharomyces pastorianus
atcgagactcgttagggcggctttc

SEQ ID NO: 53624 - DNA, 25 bp, Saccharomyces pastorianus
acatcgagactcgttagggcggctt

SEQ ID NO: 53625 - DNA, 25 bp, Saccharomyces pastorianus
ttagggcggctttcagcgaacaatt

SEQ ID NO: 53626 - DNA, 25 bp, Saccharomyces pastorianus
agggcggctttcagcgaacaattcc

SEQ ID NO: 53627 - DNA, 25 bp, Saccharomyces pastorianus
gcggctttcagcgaacaattcctgc

SEQ ID NO: 53628 - DNA, 25 bp, Saccharomyces pastorianus
attcctgcctgtcgtactcaagcaa

SEQ ID NO: 53629 - DNA, 25 bp, Saccharomyces pastorianus
aacaattcctgcctgtcgtactcaa

SEQ ID NO: 53630 - DNA, 25 bp, Saccharomyces pastorianus
acaattcctgcctgtcgtactcaag

SEQ ID NO: 53631 - DNA, 25 bp, Saccharomyces pastorianus
gggcggctttcagcgaacaattcct

SEQ ID NO: 53632 - DNA, 25 bp, Saccharomyces pastorianus
tagggcggctttcagcgaacaattc

SEQ ID NO: 53633 - DNA, 25 bp, Saccharomyces pastorianus
cggctttcagcgaacaattcctgcc

SEQ ID NO: 53634 - DNA, 25 bp, Saccharomyces pastorianus
atcgagactcgttagggcggctttc

SEQ ID NO: 53635 - DNA, 25 bp, Saccharomyces pastorianus
acatcgagactcgttagggcggctt

SEQ ID NO: 53636 - DNA, 25 bp, Saccharomyces pastorianus
ttagggcggctttcagcgaacaatt

SEQ ID NO: 53637 - DNA, 25 bp, Saccharomyces pastorianus
agggcggctttcagcgaacaattcc

SEQ ID NO: 53638 - DNA, 25 bp, Saccharomyces pastorianus
gcggctttcagcgaacaattcctgc

SEQ ID NO: 53639 - DNA, 25 bp, Saccharomyces pastorianus
attcctgcctgtcgtactcaagcaa

SEQ ID NO: 53640 - DNA, 25 bp, Saccharomyces pastorianus
aacaattcctgcctgtcgtactcaa

SEQ ID NO: 53641 - DNA, 25 bp, Saccharomyces pastorianus
gggcggctttcagcgaacaattcct

SEQ ID NO: 53642 - DNA, 25 bp, Saccharomyces pastorianus
aatgcgacgctgttgtcattggcta

SEQ ID NO: 53643 - DNA, 25 bp, Saccharomyces pastorianus
cattggctacacaggacatcgagac

SEQ ID NO: 53644 - DNA, 25 bp, Saccharomyces pastorianus
cggctttcagcgaacaattcctgcc

SEQ ID NO: 53645 - DNA, 25 bp, Saccharomyces pastorianus
gctgctaatggaaccaatgcgacgc

SEQ ID NO: 53646 - DNA, 25 bp, Saccharomyces pastorianus
gcagtgatttgcgaaacccatactt

SEQ ID NO: 53647 - DNA, 25 bp, Saccharomyces pastorianus
acccatacttaattccagactgtcc

SEQ ID NO: 53648 - DNA, 25 bp, Saccharomyces pastorianus
tacggctgtcaagatgagcgtgcta

SEQ ID NO: 53649 - DNA, 25 bp, Saccharomyces pastorianus
tccgcagccattcgagcatctgaaa

SEQ ID NO: 53650 - DNA, 25 bp, Saccharomyces pastorianus
ttaattccagactgtccgcagccat

SEQ ID NO: 53651 - DNA, 25 bp, Saccharomyces pastorianus
gacagtgatacagcagtttctttcg

SEQ ID NO: 53652 - DNA, 25 bp, Saccharomyces pastorianus
cgtgctagaggcgtcgacagtgata

SEQ ID NO: 53653 - DNA, 25 bp, Saccharomyces pastorianus
ttcgagcatctgaaactgtttacca

SEQ ID NO: 53654 - DNA, 25 bp, Saccharomyces pastorianus
gaaagtcaaggatccagctgctaat

SEQ ID NO: 53655 - DNA, 25 bp, Saccharomyces pastorianus
gtttctttcgaagacagcagtgatt

SEQ ID NO: 53656 - DNA, 25 bp, Saccharomyces pastorianus
gaagcagaagaaacaggattttttg

SEQ ID NO: 53657 - DNA, 25 bp, Saccharomyces pastorianus
gatctgacgaaacggttaactttat

SEQ ID NO: 53658 - DNA, 25 bp, Saccharomyces pastorianus
aaccagcatctagatcatgatcctc

SEQ ID NO: 53659 - DNA, 25 bp, Saccharomyces pastorianus
taatgccactaatacgtctttcgtt

SEQ ID NO: 53660 - DNA, 25 bp, Saccharomyces pastorianus
gccactaatacgtctttcgtttcca

SEQ ID NO: 53661 - DNA, 25 bp, Saccharomyces pastorianus
atttctattagaaaccagcatctag

SEQ ID NO: 53662 - DNA, 25 bp, Saccharomyces pastorianus
tagatcatgatcctcacgatctgac

SEQ ID NO: 53663 - DNA, 25 bp, Saccharomyces pastorianus
ttattaaaacaccacaacaccaacg

SEQ ID NO: 53664 - DNA, 25 bp, Saccharomyces pastorianus
aacaccacaacaccaacgtgagaaa

SEQ ID NO: 53665 - DNA, 25 bp, Saccharomyces pastorianus
ggaaagagcaagtaatgccactaat

SEQ ID NO: 53666 - DNA, 25 bp, Saccharomyces pastorianus
tcacgatctgacgaaacggttaact

SEQ ID NO: 53667 - DNA, 25 bp, Saccharomyces pastorianus
attacggcttcaatgcttccaggtt

SEQ ID NO: 53668 - DNA, 25 bp, Saccharomyces pastorianus
catctaccgctagcctaatgactaa

SEQ ID NO: 53669 - DNA, 25 bp, Saccharomyces pastorianus
gatgcccaaggccaacaacaggtta

SEQ ID NO: 53670 - DNA, 25 bp, Saccharomyces pastorianus
aacaatggtgccacgaacgcatcta

SEQ ID NO: 53671 - DNA, 25 bp, Saccharomyces pastorianus
gctttacagcaacctacgtacggat

SEQ ID NO: 53672 - DNA, 25 bp, Saccharomyces pastorianus
gattgtctacgtcaagatcccagta

SEQ ID NO: 53673 - DNA, 25 bp, Saccharomyces pastorianus
taacaacgactccatcagcgctatt

SEQ ID NO: 53674 - DNA, 25 bp, Saccharomyces pastorianus
ttcaatacgttgaccgactatccgc

SEQ ID NO: 53675 - DNA, 25 bp, Saccharomyces pastorianus
aagcagacggcattgctccagcaag

SEQ ID NO: 53676 - DNA, 25 bp, Saccharomyces pastorianus
attccctccacttcgtatgaaaatc

SEQ ID NO: 53677 - DNA, 25 bp, Saccharomyces pastorianus
ggatgagctccgtgcttatttccaa

SEQ ID NO: 53678 - DNA, 25 bp, Saccharomyces pastorianus
attaaactgggctacgtcgtcgtat

SEQ ID NO: 53679 - DNA, 25 bp, Saccharomyces pastorianus
aatcacagttattcgagctcttcat

SEQ ID NO: 53680 - DNA, 25 bp, Saccharomyces pastorianus
gcgaaaatcgtgcatgaccaggtca

SEQ ID NO: 53681 - DNA, 25 bp, Saccharomyces pastorianus
gagctcttcattaccagatatgctt

SEQ ID NO: 53682 - DNA, 25 bp, Saccharomyces pastorianus
acacatgcggcaaatgctcttttga

SEQ ID NO: 53683 - DNA, 25 bp, Saccharomyces pastorianus
aaatgtccaaggtgcatccgatata

SEQ ID NO: 53684 - DNA, 25 bp, Saccharomyces pastorianus
gggtattgctttatcgattttcctt

SEQ ID NO: 53685 - DNA, 25 bp, Saccharomyces pastorianus
tggtagttccagaccatcaatgggt

SEQ ID NO: 53686 - DNA, 25 bp, Saccharomyces pastorianus
atatgcttctgcgtctcacgcgaaa

SEQ ID NO: 53687 - DNA, 25 bp, Saccharomyces pastorianus
gacttagcgccaaatgttaccgaat

SEQ ID NO: 53688 - DNA, 25 bp, Saccharomyces pastorianus
gggcactaccgggaaccaattgtat

SEQ ID NO: 53689 - DNA, 25 bp, Saccharomyces pastorianus
ctaccgtaatcaagtatttctacaa

SEQ ID NO: 53690 - DNA, 25 bp, Saccharomyces pastorianus
tatttgctgcatctgaagaactcgt

SEQ ID NO: 53691 - DNA, 25 bp, Saccharomyces pastorianus
gtctttgaaattttcaccccgctag

SEQ ID NO: 53692 - DNA, 25 bp, Saccharomyces pastorianus
catcggtaagctttcggaagtggtt

SEQ ID NO: 53693 - DNA, 25 bp, Saccharomyces pastorianus
attttcaccccgctagatggtaggg

SEQ ID NO: 53694 - DNA, 25 bp, Saccharomyces pastorianus
aaatccatccatcggtaagctttcg

SEQ ID NO: 53695 - DNA, 25 bp, Saccharomyces pastorianus
cggaagtggttgaagtctttgaaat

SEQ ID NO: 53696 - DNA, 25 bp, Saccharomyces pastorianus
gcatctgaagaactcgtaaacgaat

SEQ ID NO: 53697 - DNA, 25 bp, Saccharomyces pastorianus
acaccgatttgattatatttgctgc

SEQ ID NO: 53698 - DNA, 25 bp, Saccharomyces pastorianus
ccgaaggtgaattgggcgctgcatc

SEQ ID NO: 53699 - DNA, 25 bp, Saccharomyces pastorianus
gtgaaccaaattccgttacttccag

SEQ ID NO: 53700 - DNA, 25 bp, Saccharomyces pastorianus
tcgcttccactttggttggtatctt

SEQ ID NO: 53701 - DNA, 25 bp, Saccharomyces pastorianus
tgctaatgacttggctgaggacgac

SEQ ID NO: 53702 - DNA, 25 bp, Saccharomyces pastorianus
tgtatgtctattgcccaagcctgta

SEQ ID NO: 53703 - DNA, 25 bp, Saccharomyces pastorianus
gaagttccgactataatgctaatga

SEQ ID NO: 53704 - DNA, 25 bp, Saccharomyces pastorianus
tccggtgccatcgatttctactacg

SEQ ID NO: 53705 - DNA, 25 bp, Saccharomyces pastorianus
gtgccgcttctatggtttgttgtat

SEQ ID NO: 53706 - DNA, 25 bp, Saccharomyces pastorianus
ttctttaccccatttatctccggtg

SEQ ID NO: 53707 - DNA, 25 bp, Saccharomyces pastorianus
tgcccaagcctgtaactggttgtgg

SEQ ID NO: 53708 - DNA, 25 bp, Saccharomyces pastorianus
gaaatcaactgaatgggtcccacca

SEQ ID NO: 53709 - DNA, 25 bp, Saccharomyces pastorianus
aggtattgtcaatttcgcttccact

SEQ ID NO: 53710 - DNA, 25 bp, Saccharomyces pastorianus
aggtgtcttaccatggaaatcaact

SEQ ID NO: 53711 - DNA, 25 bp, Saccharomyces pastorianus
ggagatgacttgaaagacttcgacg

SEQ ID NO: 53712 - DNA, 25 bp, Saccharomyces pastorianus
ctaacaaagctgagggagatgactt

SEQ ID NO: 53713 - DNA, 25 bp, Saccharomyces pastorianus
gtcttatccccaatgttaatctcag

SEQ ID NO: 53714 - DNA, 25 bp, Saccharomyces pastorianus
gaaattccaaaaaagccagcttccg

SEQ ID NO: 53715 - DNA, 25 bp, Saccharomyces pastorianus
gcttacattactgtctccatcatgt

SEQ ID NO: 53716 - DNA, 25 bp, Saccharomyces pastorianus
gttaatctcagaagtttctccaaag

SEQ ID NO: 53717 - DNA, 25 bp, Saccharomyces pastorianus
tgttgtcgttatttacattatcggt

SEQ ID NO: 53718 - DNA, 25 bp, Saccharomyces pastorianus
acatgtatggtcgtaaaatgggttt

SEQ ID NO: 53719 - DNA, 25 bp, Saccharomyces pastorianus
aaaaagccagcttccgcttacatta

SEQ ID NO: 53720 - DNA, 25 bp, Saccharomyces pastorianus
gaaagacttcgacgagaaccatgaa

SEQ ID NO: 53721 - DNA, 25 bp, Saccharomyces pastorianus
tgggtttaatcgttgttgtcgttat

SEQ ID NO: 53722 - DNA, 25 bp, Saccharomyces pastorianus
acaatgggtctaggctccacaacat

SEQ ID NO: 53723 - DNA, 25 bp, Saccharomyces pastorianus
tcgtcaagacgcatagtgggcactt

SEQ ID NO: 53724 - DNA, 25 bp, Saccharomyces pastorianus
agcactaccacgttggacgcgataa

SEQ ID NO: 53725 - DNA, 25 bp, Saccharomyces pastorianus
agcggctatgacgatgtcgccagaa

SEQ ID NO: 53726 - DNA, 25 bp, Saccharomyces pastorianus
attaaccatgcgcacgaatctcgta

SEQ ID NO: 53727 - DNA, 25 bp, Saccharomyces pastorianus
gcactaacacctacggaagcggcta

SEQ ID NO: 53728 - DNA, 25 bp, Saccharomyces pastorianus
aacattcttggatggagcgcctgca

SEQ ID NO: 53729 - DNA, 25 bp, Saccharomyces pastorianus
gtttccagcggacggtccaaacaat

SEQ ID NO: 53730 - DNA, 25 bp, Saccharomyces pastorianus
aataaagccaattccagcactacca

SEQ ID NO: 53731 - DNA, 25 bp, Saccharomyces pastorianus
caatacagtcggtggtggtaccagt

SEQ ID NO: 53732 - DNA, 25 bp, Saccharomyces pastorianus
aatctctcccaagaaggcatttgca

SEQ ID NO: 53733 - DNA, 25 bp, Saccharomyces pastorianus
aacctcgccttctgacgatagagta

SEQ ID NO: 53734 - DNA, 25 bp, Saccharomyces pastorianus
atgaaccactcaggtagaaaccttg

SEQ ID NO: 53735 - DNA, 25 bp, Saccharomyces pastorianus
tgaagggtcccaaaataggacaaat

SEQ ID NO: 53736 - DNA, 25 bp, Saccharomyces pastorianus
gcggtcaatccattcagaacctcgc

SEQ ID NO: 53737 - DNA, 25 bp, Saccharomyces pastorianus
agaacctcgccttctgacgatagag

SEQ ID NO: 53738 - DNA, 25 bp, Saccharomyces pastorianus
atcccgcggtcaatccattcagaac

SEQ ID NO: 53739 - DNA, 25 bp, Saccharomyces pastorianus
aataggacaaatcccgcggtcaatc

SEQ ID NO: 53740 - DNA, 25 bp, Saccharomyces pastorianus
aaatcccgcggtcaatccattcaga

SEQ ID NO: 53741 - DNA, 25 bp, Saccharomyces pastorianus
gaaccactcaggtagaaaccttgaa

SEQ ID NO: 53742 - DNA, 25 bp, Saccharomyces pastorianus
cactcaggtagaaaccttgaagggt

SEQ ID NO: 53743 - DNA, 25 bp, Saccharomyces pastorianus
gtcaatccattcagaacctcgcctt

SEQ ID NO: 53744 - DNA, 25 bp, Saccharomyces pastorianus
gctacaagaccgatattcactataa

SEQ ID NO: 53745 - DNA, 25 bp, Saccharomyces pastorianus
attccttttgccctttcatactata

SEQ ID NO: 53746 - DNA, 25 bp, Saccharomyces pastorianus
gaaagcgtcttttatgcaacttcca

SEQ ID NO: 53747 - DNA, 25 bp, Saccharomyces pastorianus
gtgcctacaagtatttaaccttcgt

SEQ ID NO: 53748 - DNA, 25 bp, Saccharomyces pastorianus
atctctcttaaacaaccttctggac

SEQ ID NO: 53749 - DNA, 25 bp, Saccharomyces pastorianus
gatatccatgttatagccgatttca

SEQ ID NO: 53750 - DNA, 25 bp, Saccharomyces pastorianus
gaagatgtcccactctcaataacac

SEQ ID NO: 53751 - DNA, 25 bp, Saccharomyces pastorianus
gttaatgacaaaatcttccgcggaa

SEQ ID NO: 53752 - DNA, 25 bp, Saccharomyces pastorianus
ggtatgccagaagatgtcccactct

SEQ ID NO: 53753 - DNA, 25 bp, Saccharomyces pastorianus
cttctggaccatttctgcttattac

SEQ ID NO: 53754 - DNA, 25 bp, Saccharomyces pastorianus
aacaccgggaattcaatctgcattg

SEQ ID NO: 53755 - DNA, 25 bp, Saccharomyces pastorianus
tcgcgatgatgatgctaccttacaa

SEQ ID NO: 53756 - DNA, 25 bp, Saccharomyces pastorianus
tacaggctgtagtacctttactttt

SEQ ID NO: 53757 - DNA, 25 bp, Saccharomyces pastorianus
acgcattggaggtactggagttctt

SEQ ID NO: 53758 - DNA, 25 bp, Saccharomyces pastorianus
gcaatttgccagtagatttcgcgat

SEQ ID NO: 53759 - DNA, 25 bp, Saccharomyces pastorianus
aggtattctacactatctgagttgt

SEQ ID NO: 53760 - DNA, 25 bp, Saccharomyces pastorianus
ggagttcttactttcaattctacca

SEQ ID NO: 53761 - DNA, 25 bp, Saccharomyces pastorianus
atggaactgttgaattctcctgagg

SEQ ID NO: 53762 - DNA, 25 bp, Saccharomyces pastorianus
aaacttttcagccttacgcattgga

SEQ ID NO: 53763 - DNA, 25 bp, Saccharomyces pastorianus
aaaactaagaaactcgatgctcgat

SEQ ID NO: 53764 - DNA, 25 bp, Saccharomyces pastorianus
gaaggaagtacccatctcattcgat

SEQ ID NO: 53765 - DNA, 25 bp, Saccharomyces pastorianus
ttcgatgcacactcaccagaacaaa

SEQ ID NO: 53766 - DNA, 25 bp, Saccharomyces pastorianus
atcgttcccattgatattttcccag

SEQ ID NO: 53767 - DNA, 25 bp, Saccharomyces pastorianus
tagagtcctacttcaactgatcttg

SEQ ID NO: 53768 - DNA, 25 bp, Saccharomyces pastorianus
taatcgggtttgtcctctttcaact

SEQ ID NO: 53769 - DNA, 25 bp, Saccharomyces pastorianus
aaaagagactacctcatcgtcacca

SEQ ID NO: 53770 - DNA, 25 bp, Saccharomyces pastorianus
aagtatctgagaaccgtcctcgcac

SEQ ID NO: 53771 - DNA, 25 bp, Saccharomyces pastorianus
ttttgacccggaattcatccaggac

SEQ ID NO: 53772 - DNA, 25 bp, Saccharomyces pastorianus
gagggtcgtcatcatcgagtatcca

SEQ ID NO: 53773 - DNA, 25 bp, Saccharomyces pastorianus
tacgatgaccttgcagactacttga

SEQ ID NO: 53774 - DNA, 25 bp, Saccharomyces pastorianus
aacagggtgttggatgttcctccac

SEQ ID NO: 53775 - DNA, 25 bp, Saccharomyces pastorianus
attcaatgattacgctccacggttc

SEQ ID NO: 53776 - DNA, 25 bp, Saccharomyces pastorianus
tgttcctccactgtcattcaatgat

SEQ ID NO: 53777 - DNA, 25 bp, Saccharomyces pastorianus
gggtacctgctgtttatggtatatg

SEQ ID NO: 53778 - DNA, 25 bp, Saccharomyces pastorianus
atgtgcttcggaggagttgcagaac

SEQ ID NO: 53779 - DNA, 25 bp, Saccharomyces pastorianus
ggaggagttgcagaaccagacaaat

SEQ ID NO: 53780 - DNA, 25 bp, Saccharomyces pastorianus
agcctatgtgcttcggaggagttgc

SEQ ID NO: 53781 - DNA, 25 bp, Saccharomyces pastorianus
atgtcagcctatgtgcttcggagga

SEQ ID NO: 53782 - DNA, 25 bp, Saccharomyces pastorianus
tatggtatatgtcagcctatgtgct

SEQ ID NO: 53783 - DNA, 25 bp, Saccharomyces pastorianus
gtatatgtcagcctatgtgcttcgg

SEQ ID NO: 53784 - DNA, 25 bp, Saccharomyces pastorianus
gtttatggtatatgtcagcctatgt

SEQ ID NO: 53785 - DNA, 25 bp, Saccharomyces pastorianus
ttcggaggagttgcagaaccagaca

SEQ ID NO: 53786 - DNA, 25 bp, Saccharomyces pastorianus
gtcagcctatgtgcttcggaggagt

SEQ ID NO: 53787 - DNA, 25 bp, Saccharomyces pastorianus
atatgtcagcctatgtgcttcggag

SEQ ID NO: 53788 - DNA, 25 bp, Saccharomyces pastorianus
aggggagggcaatgaagacttcact

SEQ ID NO: 53789 - DNA, 25 bp, Saccharomyces pastorianus
ttatcacataatcctaaatacaaag

SEQ ID NO: 53790 - DNA, 25 bp, Saccharomyces pastorianus
gagatccagggcaaagttaaaaaat

SEQ ID NO: 53791 - DNA, 25 bp, Saccharomyces pastorianus
gactagaaggtcacgaaaacacagg

SEQ ID NO: 53792 - DNA, 25 bp, Saccharomyces pastorianus
ggacttggaagagatccagggcaaa

SEQ ID NO: 53793 - DNA, 25 bp, Saccharomyces pastorianus
gctgaagaacaaagatttaggcaat

SEQ ID NO: 53794 - DNA, 25 bp, Saccharomyces pastorianus
atacttcactgaccaagttaaagct

SEQ ID NO: 53795 - DNA, 25 bp, Saccharomyces pastorianus
taaagaaatacttcactgaccaagt

SEQ ID NO: 53796 - DNA, 25 bp, Saccharomyces pastorianus
gaaatacttcactgaccaagttaaa

SEQ ID NO: 53797 - DNA, 25 bp, Saccharomyces pastorianus
agctattgcaccagcaagaaaatta

SEQ ID NO: 53798 - DNA, 25 bp, Saccharomyces pastorianus
actgaccaagttaaagctgaagaac

SEQ ID NO: 53799 - DNA, 25 bp, Saccharomyces pastorianus
gttccagtcattgctaagtccgata

SEQ ID NO: 53800 - DNA, 25 bp, Saccharomyces pastorianus
gcccactgggcacggtttgaaacca

SEQ ID NO: 53801 - DNA, 25 bp, Saccharomyces pastorianus
atgattcctacatgcgtcaagaaca

SEQ ID NO: 53802 - DNA, 25 bp, Saccharomyces pastorianus
aggtccagattcagcagccatcgaa

SEQ ID NO: 53803 - DNA, 25 bp, Saccharomyces pastorianus
cgtgtaaacgtcatcgacactccag

SEQ ID NO: 53804 - DNA, 25 bp, Saccharomyces pastorianus
atcaatacgctatttcagactgtct

SEQ ID NO: 53805 - DNA, 25 bp, Saccharomyces pastorianus
agcaacatcgtcaagaacccattag

SEQ ID NO: 53806 - DNA, 25 bp, Saccharomyces pastorianus
acctccattggacgctgaatctaag

SEQ ID NO: 53807 - DNA, 25 bp, Saccharomyces pastorianus
gggatcgatattacaagggctttgc

SEQ ID NO: 53808 - DNA, 25 bp, Saccharomyces pastorianus
tgttctttatttcatcaggcccact

SEQ ID NO: 53809 - DNA, 25 bp, Saccharomyces pastorianus
acaagagccaatttagttccagtca

SEQ ID NO: 53810 - DNA, 25 bp, Saccharomyces pastorianus
tgcgctgcccgtcaggacattagaa

SEQ ID NO: 53811 - DNA, 25 bp, Saccharomyces pastorianus
gacctctacatataaccaacctttt

SEQ ID NO: 53812 - DNA, 25 bp, Saccharomyces pastorianus
cgaggccttcaagcggcggaaatgc

SEQ ID NO: 53813 - DNA, 25 bp, Saccharomyces pastorianus
gtgacacgggattcaggttccggat

SEQ ID NO: 53814 - DNA, 25 bp, Saccharomyces pastorianus
gagaacacttccatttacactagcg

SEQ ID NO: 53815 - DNA, 25 bp, Saccharomyces pastorianus
tcctgaacgttgattcgaggccttc

SEQ ID NO: 53816 - DNA, 25 bp, Saccharomyces pastorianus
cgagtggcaacggaggacctctaca

SEQ ID NO: 53817 - DNA, 25 bp, Saccharomyces pastorianus
gaagccgcgtatgcgtatgaggcaa

SEQ ID NO: 53818 - DNA, 25 bp, Saccharomyces pastorianus
gaacaagactaggtgctgcatccag

SEQ ID NO: 53819 - DNA, 25 bp, Saccharomyces pastorianus
aaattagtatttcgccaggtgacaa

SEQ ID NO: 53820 - DNA, 25 bp, Saccharomyces pastorianus
gtacccactacatatgttcgcattt

SEQ ID NO: 53821 - DNA, 25 bp, Saccharomyces pastorianus
gtccctatctcggtgggtgatacac

SEQ ID NO: 53822 - DNA, 25 bp, Saccharomyces pastorianus
taagaaatcttcaaccacggtccct

SEQ ID NO: 53823 - DNA, 25 bp, Saccharomyces pastorianus
aattatctcgcttatcggctgacta

SEQ ID NO: 53824 - DNA, 25 bp, Saccharomyces pastorianus
tcgcttatcggctgactacttcaat

SEQ ID NO: 53825 - DNA, 25 bp, Saccharomyces pastorianus
tatcggctgactacttcaataagaa

SEQ ID NO: 53826 - DNA, 25 bp, Saccharomyces pastorianus
gagcagttctatcgagaaagggcta

SEQ ID NO: 53827 - DNA, 25 bp, Saccharomyces pastorianus
gtgaaaaattatctcgcttatcggc

SEQ ID NO: 53828 - DNA, 25 bp, Saccharomyces pastorianus
ggtgggtgatacacctgccaccaca

SEQ ID NO: 53829 - DNA, 25 bp, Saccharomyces pastorianus
atctcggtgggtgatacacctgcca

SEQ ID NO: 53830 - DNA, 25 bp, Saccharomyces pastorianus
tggttaaaggatattgagcagttct

SEQ ID NO: 53831 - DNA, 25 bp, Saccharomyces pastorianus
acggtccctatctcggtgggtgata

SEQ ID NO: 53832 - DNA, 25 bp, Saccharomyces pastorianus
ataagtacaagttcgcgctcaaggg

SEQ ID NO: 53833 - DNA, 25 bp, Saccharomyces pastorianus
gtcagtattacgatccctgcgagga

SEQ ID NO: 53834 - DNA, 25 bp, Saccharomyces pastorianus
cgctcaagggcgatagtcagtatta

SEQ ID NO: 53835 - DNA, 25 bp, Saccharomyces pastorianus
aacgacagcagcgacagcagcgaca

SEQ ID NO: 53836 - DNA, 25 bp, Saccharomyces pastorianus
agtgccaggactacttcgatgcgta

SEQ ID NO: 53837 - DNA, 25 bp, Saccharomyces pastorianus
aggtcaactacgttcctcagagcaa

SEQ ID NO: 53838 - DNA, 25 bp, Saccharomyces pastorianus
gacccgtcacggatagaaccaaggt

SEQ ID NO: 53839 - DNA, 25 bp, Saccharomyces pastorianus
gatgcgtaccgcgagtgcaagaagc

SEQ ID NO: 53840 - DNA, 25 bp, Saccharomyces pastorianus
cgaggagtcttccaagctcagcttt

SEQ ID NO: 53841 - DNA, 25 bp, Saccharomyces pastorianus
gctacgaccggactaagtgccagga

SEQ ID NO: 53842 - DNA, 25 bp, Saccharomyces pastorianus
gttccagtactatccagacgatccg

SEQ ID NO: 53843 - DNA, 25 bp, Saccharomyces pastorianus
gcgagatgccacatatgtgcgtaca

SEQ ID NO: 53844 - DNA, 25 bp, Saccharomyces pastorianus
ggacaatattcccttagagccaaaa

SEQ ID NO: 53845 - DNA, 25 bp, Saccharomyces pastorianus
gaagcagtttgcatggacaccgagt

SEQ ID NO: 53846 - DNA, 25 bp, Saccharomyces pastorianus
cctgacctgggctattacatggaca

SEQ ID NO: 53847 - DNA, 25 bp, Saccharomyces pastorianus
caacgttgcgtttcggaggtgcttc

SEQ ID NO: 53848 - DNA, 25 bp, Saccharomyces pastorianus
gaggtgcttcgactggatccacaag

SEQ ID NO: 53849 - DNA, 25 bp, Saccharomyces pastorianus
gcaaagcttgtctaattcgtcaccc

SEQ ID NO: 53850 - DNA, 25 bp, Saccharomyces pastorianus
gaaattgactaatgcgacctcgatc

SEQ ID NO: 53851 - DNA, 25 bp, Saccharomyces pastorianus
tgtctatgcgacaggtccaacgttg

SEQ ID NO: 53852 - DNA, 25 bp, Saccharomyces pastorianus
gacctcgatcctatacaatacttca

SEQ ID NO: 53853 - DNA, 25 bp, Saccharomyces pastorianus
attcgtcacccatgaagcagtttgc

SEQ ID NO: 53854 - DNA, 25 bp, Saccharomyces pastorianus
tatgcaatgattttgaactcccaag

SEQ ID NO: 53855 - DNA, 25 bp, Saccharomyces pastorianus
atcagaaaaccccaatccgaattga

SEQ ID NO: 53856 - DNA, 25 bp, Saccharomyces pastorianus
aactcccaagagaagtagcgtatca

SEQ ID NO: 53857 - DNA, 25 bp, Saccharomyces pastorianus
gaaatattgcaagatgaccacagaa

SEQ ID NO: 53858 - DNA, 25 bp, Saccharomyces pastorianus
attggtttgtccatggcaattggta

SEQ ID NO: 53859 - DNA, 25 bp, Saccharomyces pastorianus
gaggagaaacgccaaacaagtcaaa

SEQ ID NO: 53860 - DNA, 25 bp, Saccharomyces pastorianus
aagacccgcgtattgaccatttcat

SEQ ID NO: 53861 - DNA, 25 bp, Saccharomyces pastorianus
gcgggctagtattaaattgcacatt

SEQ ID NO: 53862 - DNA, 25 bp, Saccharomyces pastorianus
ggcaattggtatgcgggctagtatt

SEQ ID NO: 53863 - DNA, 25 bp, Saccharomyces pastorianus
agagttccaaattcattgttagcga

SEQ ID NO: 53864 - DNA, 25 bp, Saccharomyces pastorianus
aagaagacgcaaagacccgcgtatt

SEQ ID NO: 53865 - DNA, 25 bp, Saccharomyces pastorianus
gcaggatttccctatgttcaatgcg

SEQ ID NO: 53866 - DNA, 25 bp, Saccharomyces pastorianus
ttttatcacactcgcttttatccta

SEQ ID NO: 53867 - DNA, 25 bp, Saccharomyces pastorianus
ggattcagccacgttttatcacact

SEQ ID NO: 53868 - DNA, 25 bp, Saccharomyces pastorianus
atgttgtattctccttatctgtctt

SEQ ID NO: 53869 - DNA, 25 bp, Saccharomyces pastorianus
gcattgggcgtccatatcatgttta

SEQ ID NO: 53870 - DNA, 25 bp, Saccharomyces pastorianus
gttcaatgcgccaatgctaattccc

SEQ ID NO: 53871 - DNA, 25 bp, Saccharomyces pastorianus
taattcccttgtgccagttagttct

SEQ ID NO: 53872 - DNA, 25 bp, Saccharomyces pastorianus
tgtctatgccttatcttggcttggg

SEQ ID NO: 53873 - DNA, 25 bp, Saccharomyces pastorianus
atctttactcgtgtggattcagcca

SEQ ID NO: 53874 - DNA, 25 bp, Saccharomyces pastorianus
tatctgtcttcggtttggtgctaaa

SEQ ID NO: 53875 - DNA, 25 bp, Saccharomyces pastorianus
ttttatcctatccatcggcttcaca

SEQ ID NO: 53876 - DNA, 25 bp, Saccharomyces pastorianus
aacggttccttgtatcgctccaata

SEQ ID NO: 53877 - DNA, 25 bp, Saccharomyces pastorianus
cagcgggcctttgccgttagaaatt

SEQ ID NO: 53878 - DNA, 25 bp, Saccharomyces pastorianus
tagcactgcagtttctgaccatcat

SEQ ID NO: 53879 - DNA, 25 bp, Saccharomyces pastorianus
tcttcctacgaaggtgccggtatta

SEQ ID NO: 53880 - DNA, 25 bp, Saccharomyces pastorianus
gaagctgccgtttctcagattactg

SEQ ID NO: 53881 - DNA, 25 bp, Saccharomyces pastorianus
gcaacctctttaaccggattcgatg

SEQ ID NO: 53882 - DNA, 25 bp, Saccharomyces pastorianus
tggtgtacctgtttcattgaacgct

SEQ ID NO: 53883 - DNA, 25 bp, Saccharomyces pastorianus
gactaccatcaatttacctgcaact

SEQ ID NO: 53884 - DNA, 25 bp, Saccharomyces pastorianus
aacagcactttgaattcagccgcat

SEQ ID NO: 53885 - DNA, 25 bp, Saccharomyces pastorianus
atttcaactgcaactgctaccattc

SEQ ID NO: 53886 - DNA, 25 bp, Saccharomyces pastorianus
tattggtgaacctgctttaccgcaa

SEQ ID NO: 53887 - DNA, 25 bp, Saccharomyces pastorianus
aagatcgttactggtgctctagaca

SEQ ID NO: 53888 - DNA, 25 bp, Saccharomyces pastorianus
attgtagaaaccgacaccagcgaaa

SEQ ID NO: 53889 - DNA, 25 bp, Saccharomyces pastorianus
agacccaatgttggctactggtggt

SEQ ID NO: 53890 - DNA, 25 bp, Saccharomyces pastorianus
gctgctttcccagatgtcaagatcg

SEQ ID NO: 53891 - DNA, 25 bp, Saccharomyces pastorianus
accagctgttaggtttgtacactat

SEQ ID NO: 53892 - DNA, 25 bp, Saccharomyces pastorianus
gggactgttgtagatctgtacgtat

SEQ ID NO: 53893 - DNA, 25 bp, Saccharomyces pastorianus
ttgacaaatatcacgctgctttccc

SEQ ID NO: 53894 - DNA, 25 bp, Saccharomyces pastorianus
gagcacaagtatttggttccaggtt

SEQ ID NO: 53895 - DNA, 25 bp, Saccharomyces pastorianus
gctttgccaaagctgttctatgaaa

SEQ ID NO: 53896 - DNA, 25 bp, Saccharomyces pastorianus
aaaacagctagacccgatttcattt

SEQ ID NO: 53897 - DNA, 25 bp, Saccharomyces pastorianus
gatacgtcttcttattagacccaat

SEQ ID NO: 53898 - DNA, 25 bp, Saccharomyces pastorianus
ggactacatgtaccatcatagagct

SEQ ID NO: 53899 - DNA, 25 bp, Saccharomyces pastorianus
agagacacaggaaaccatgggttct

SEQ ID NO: 53900 - DNA, 25 bp, Saccharomyces pastorianus
tattccccgggcttggtgcgggctc

SEQ ID NO: 53901 - DNA, 25 bp, Saccharomyces pastorianus
caagcccgtgggtaaagaagcatat

SEQ ID NO: 53902 - DNA, 25 bp, Saccharomyces pastorianus
ttgggcattccaactgaagttaaga

SEQ ID NO: 53903 - DNA, 25 bp, Saccharomyces pastorianus
ggaaaccatgggttcttactgcctc

SEQ ID NO: 53904 - DNA, 25 bp, Saccharomyces pastorianus
tgggttcttactgcctccagaaaac

SEQ ID NO: 53905 - DNA, 25 bp, Saccharomyces pastorianus
aaagaagcatatgcggccttgaagt

SEQ ID NO: 53906 - DNA, 25 bp, Saccharomyces pastorianus
gggctccgccttggactacatgtac

SEQ ID NO: 53907 - DNA, 25 bp, Saccharomyces pastorianus
atttacgatgtaatttccgcatgta

SEQ ID NO: 53908 - DNA, 25 bp, Saccharomyces pastorianus
tcatagagctcattgggcattccaa

SEQ ID NO: 53909 - DNA, 25 bp, Saccharomyces pastorianus
aggtgcgctaatactcttttaggta

SEQ ID NO: 53910 - DNA, 25 bp, Saccharomyces pastorianus
tggtgcatggagcttgttgaatatc

SEQ ID NO: 53911 - DNA, 25 bp, Saccharomyces pastorianus
agttgcactcaatatgtctcgcaat

SEQ ID NO: 53912 - DNA, 25 bp, Saccharomyces pastorianus
tgaatggtcttcatccttgcaggca

SEQ ID NO: 53913 - DNA, 25 bp, Saccharomyces pastorianus
cttgatttcaggtctagtcgtcggt

SEQ ID NO: 53914 - DNA, 25 bp, Saccharomyces pastorianus
agtcgtcggtgcgattagtgcattt

SEQ ID NO: 53915 - DNA, 25 bp, Saccharomyces pastorianus
gttgggatcattcattaggtgcgct

SEQ ID NO: 53916 - DNA, 25 bp, Saccharomyces pastorianus
gtctcgcaattgtcgcagaccttat

SEQ ID NO: 53917 - DNA, 25 bp, Saccharomyces pastorianus
tggcaccctaactgtcttgatttca

SEQ ID NO: 53918 - DNA, 25 bp, Saccharomyces pastorianus
gtggttgttttttgatggcacccta

SEQ ID NO: 53919 - DNA, 25 bp, Saccharomyces pastorianus
gttgaatatcgtcttgtggttgttt

SEQ ID NO: 53920 - DNA, 25 bp, Saccharomyces pastorianus
gctaggtagtgcaagtttcacagct

SEQ ID NO: 53921 - DNA, 25 bp, Saccharomyces pastorianus
gagccaagtacgttctaatgacact

SEQ ID NO: 53922 - DNA, 25 bp, Saccharomyces pastorianus
ggttctcattttacgacgaagatat

SEQ ID NO: 53923 - DNA, 25 bp, Saccharomyces pastorianus
aacacactaacaaaacctgcatggt

SEQ ID NO: 53924 - DNA, 25 bp, Saccharomyces pastorianus
gctgccgcttctttcaaggaggcaa

SEQ ID NO: 53925 - DNA, 25 bp, Saccharomyces pastorianus
attgctgtccaatgcttctcagttg

SEQ ID NO: 53926 - DNA, 25 bp, Saccharomyces pastorianus
gaaggcgacgttcatgataagacat

SEQ ID NO: 53927 - DNA, 25 bp, Saccharomyces pastorianus
aacctgcatggttctcattttacga

SEQ ID NO: 53928 - DNA, 25 bp, Saccharomyces pastorianus
aggaggcaacatctttgccaccttt

SEQ ID NO: 53929 - DNA, 25 bp, Saccharomyces pastorianus
ttctcagttggaaatggttgcaccc

SEQ ID NO: 53930 - DNA, 25 bp, Saccharomyces pastorianus
taatgacactagtggcgctgccgct

SEQ ID NO: 53931 - DNA, 25 bp, Saccharomyces pastorianus
gcttcgagtaagtatcccatgacgg

SEQ ID NO: 53932 - DNA, 25 bp, Saccharomyces pastorianus
ggttcagtttctaccgatggaatct

SEQ ID NO: 53933 - DNA, 25 bp, Saccharomyces pastorianus
gagatggcagccttggcagccgaaa

SEQ ID NO: 53934 - DNA, 25 bp, Saccharomyces pastorianus
atgttacgactacgatgtcccacgg

SEQ ID NO: 53935 - DNA, 25 bp, Saccharomyces pastorianus
tctgagtctgggaggacagccgtct

SEQ ID NO: 53936 - DNA, 25 bp, Saccharomyces pastorianus
gtcttgtggaattttaccctcgcga

SEQ ID NO: 53937 - DNA, 25 bp, Saccharomyces pastorianus
tgggccccatgacaaaaagttttat

SEQ ID NO: 53938 - DNA, 25 bp, Saccharomyces pastorianus
cctacatgacgcgttcttgggtaac

SEQ ID NO: 53939 - DNA, 25 bp, Saccharomyces pastorianus
cgcgaccaacggcttttgggtatga

SEQ ID NO: 53940 - DNA, 25 bp, Saccharomyces pastorianus
aactcacaacttatttgggccccat

SEQ ID NO: 53941 - DNA, 25 bp, Saccharomyces pastorianus
atgtcccacggacgaggttcagttt

SEQ ID NO: 53942 - DNA, 25 bp, Saccharomyces pastorianus
gagtccaccttcaagcagtacaacg

SEQ ID NO: 53943 - DNA, 25 bp, Saccharomyces pastorianus
gttctgggagaacgactgcgcaatc

SEQ ID NO: 53944 - DNA, 25 bp, Saccharomyces pastorianus
aggaggctctccgaagagatcgcct

SEQ ID NO: 53945 - DNA, 25 bp, Saccharomyces pastorianus
gactgcgcaatcgatggagacatct

SEQ ID NO: 53946 - DNA, 25 bp, Saccharomyces pastorianus
aacagtagtcccacagcaagaacaa

SEQ ID NO: 53947 - DNA, 25 bp, Saccharomyces pastorianus
aagagtccaggagactcaacccggc

SEQ ID NO: 53948 - DNA, 25 bp, Saccharomyces pastorianus
acaagcttgcgcaccagttctggga

SEQ ID NO: 53949 - DNA, 25 bp, Saccharomyces pastorianus
agaaggacccgaacatgtcgcagca

SEQ ID NO: 53950 - DNA, 25 bp, Saccharomyces pastorianus
tcgcaatcgcagtcgctcagcgagt

SEQ ID NO: 53951 - DNA, 25 bp, Saccharomyces pastorianus
gcctcccttctcaggctgaaagagt

SEQ ID NO: 53952 - DNA, 25 bp, Saccharomyces pastorianus
atggccgtcacactgaacaagcttg

SEQ ID NO: 53953 - DNA, 25 bp, Saccharomyces pastorianus
tgattctaatgcaaagacgccttta

SEQ ID NO: 53954 - DNA, 25 bp, Saccharomyces pastorianus
ggaatctattgtggccaccgtttat

SEQ ID NO: 53955 - DNA, 25 bp, Saccharomyces pastorianus
gctatcggattatactgcgtggttt

SEQ ID NO: 53956 - DNA, 25 bp, Saccharomyces pastorianus
atattttcagtatctagctttccta

SEQ ID NO: 53957 - DNA, 25 bp, Saccharomyces pastorianus
aaccagcctggcattttcatatttt

SEQ ID NO: 53958 - DNA, 25 bp, Saccharomyces pastorianus
gtcagcttaattcttcatggcgttg

SEQ ID NO: 53959 - DNA, 25 bp, Saccharomyces pastorianus
atccagatccggctcaaagtttaag

SEQ ID NO: 53960 - DNA, 25 bp, Saccharomyces pastorianus
atttttatcgcggtttccaccatca

SEQ ID NO: 53961 - DNA, 25 bp, Saccharomyces pastorianus
tatccgtatccattcctagacgtga

SEQ ID NO: 53962 - DNA, 25 bp, Saccharomyces pastorianus
gcctttacccgtgacagttgatatg

SEQ ID NO: 53963 - DNA, 25 bp, Saccharomyces pastorianus
ggccgttaagattgtttttcgtcag

SEQ ID NO: 53964 - DNA, 25 bp, Saccharomyces pastorianus
gtctcgagctcagaaggcacttgtt

SEQ ID NO: 53965 - DNA, 25 bp, Saccharomyces pastorianus
caatctgttgatgcggccactacaa

SEQ ID NO: 53966 - DNA, 25 bp, Saccharomyces pastorianus
aacccaactcaatctgttgatgcgg

SEQ ID NO: 53967 - DNA, 25 bp, Saccharomyces pastorianus
tagtactgtctacctgaccaaccca

SEQ ID NO: 53968 - DNA, 25 bp, Saccharomyces pastorianus
tgcggccactacaataacgagtacg

SEQ ID NO: 53969 - DNA, 25 bp, Saccharomyces pastorianus
tgatgcggccactacaataacgagt

SEQ ID NO: 53970 - DNA, 25 bp, Saccharomyces pastorianus
gaaggcacttgttatgtatattatg

SEQ ID NO: 53971 - DNA, 25 bp, Saccharomyces pastorianus
aactcaatctgttgatgcggccact

SEQ ID NO: 53972 - DNA, 25 bp, Saccharomyces pastorianus
ggcacttgttatgtatattatgatg

SEQ ID NO: 53973 - DNA, 25 bp, Saccharomyces pastorianus
tatagtactgtctacctgaccaacc

SEQ ID NO: 53974 - DNA, 25 bp, Saccharomyces pastorianus
tgttgatgcggccactacaataacg

SEQ ID NO: 53975 - DNA, 25 bp, Saccharomyces pastorianus
tcctccaaggtaagcgcgatttcta

SEQ ID NO: 53976 - DNA, 25 bp, Saccharomyces pastorianus
aggtaagcgcgatttctagaacaac

SEQ ID NO: 53977 - DNA, 25 bp, Saccharomyces pastorianus
ctcaacgagaactacttccacattg

SEQ ID NO: 53978 - DNA, 25 bp, Saccharomyces pastorianus
gcaatcttcttctgttcagtcgata

SEQ ID NO: 53979 - DNA, 25 bp, Saccharomyces pastorianus
acattgacaccatcctccaaggtaa

SEQ ID NO: 53980 - DNA, 25 bp, Saccharomyces pastorianus
gtcgatatctgtctcgagctcagaa

SEQ ID NO: 53981 - DNA, 25 bp, Saccharomyces pastorianus
tagaacaacgacatctgcgccagcg

SEQ ID NO: 53982 - DNA, 25 bp, Saccharomyces pastorianus
acatccgtcgtcgaatcgactcaaa

SEQ ID NO: 53983 - DNA, 25 bp, Saccharomyces pastorianus
ttctgttcagtcgatatctgtctcg

SEQ ID NO: 53984 - DNA, 25 bp, Saccharomyces pastorianus
aaacagagtctttctcaacgagaac

SEQ ID NO: 53985 - DNA, 25 bp, Saccharomyces pastorianus
tgcgccagcgcaatcttcttctgtt

SEQ ID NO: 53986 - DNA, 25 bp, Saccharomyces pastorianus
agcgtaagcgccacaaattcaagaa

SEQ ID NO: 53987 - DNA, 25 bp, Saccharomyces pastorianus
tacaacccccaagtgttggcggtat

SEQ ID NO: 53988 - DNA, 25 bp, Saccharomyces pastorianus
tcgtatcagtatcttcagcagcagc

SEQ ID NO: 53989 - DNA, 25 bp, Saccharomyces pastorianus
tgcaggtcccagctggctctttcag

SEQ ID NO: 53990 - DNA, 25 bp, Saccharomyces pastorianus
gtctaaccacacaaaataactcgta

SEQ ID NO: 53991 - DNA, 25 bp, Saccharomyces pastorianus
gcattacaactctcgtgttagtggg

SEQ ID NO: 53992 - DNA, 25 bp, Saccharomyces pastorianus
agcagcattacaactctcgtgttag

SEQ ID NO: 53993 - DNA, 25 bp, Saccharomyces pastorianus
ccagctggctctttcagaagcgtaa

SEQ ID NO: 53994 - DNA, 25 bp, Saccharomyces pastorianus
ggctctttcagaagcgtaagcgcca

SEQ ID NO: 53995 - DNA, 25 bp, Saccharomyces pastorianus
taactcgtatcagtatcttcagcag

SEQ ID NO: 53996 - DNA, 25 bp, Saccharomyces pastorianus
tagaagaaaccgatgttgtacaacc

SEQ ID NO: 53997 - DNA, 25 bp, Saccharomyces pastorianus
aatacttgacacatgataccctcgc

SEQ ID NO: 53998 - DNA, 25 bp, Saccharomyces pastorianus
cactaccttctatccagattggcaa

SEQ ID NO: 53999 - DNA, 25 bp, Saccharomyces pastorianus
attggcaacgaagatcctactgatg

SEQ ID NO: 54000 - DNA, 25 bp, Saccharomyces pastorianus
gataccctcgccgtaaatggtacag

SEQ ID NO: 54001 - DNA, 25 bp, Saccharomyces pastorianus
atgtgtcacgcttatcagctaatga

SEQ ID NO: 54002 - DNA, 25 bp, Saccharomyces pastorianus
atgtgccagaggctgaccagtacca

SEQ ID NO: 54003 - DNA, 25 bp, Saccharomyces pastorianus
atgcgcatggcctagaaacagctca

SEQ ID NO: 54004 - DNA, 25 bp, Saccharomyces pastorianus
aaccttgcatggacagtgcgggtca

SEQ ID NO: 54005 - DNA, 25 bp, Saccharomyces pastorianus
acatgtggatgtcagtagctctaac

SEQ ID NO: 54006 - DNA, 25 bp, Saccharomyces pastorianus
gaatcgcccaataacgacgcattcg

SEQ ID NO: 54007 - DNA, 25 bp, Saccharomyces pastorianus
gtgcgggtcaaaatccactaccttc

SEQ ID NO: 54008 - DNA, 25 bp, Saccharomyces pastorianus
agagcacaacaagttccaccaggaa

SEQ ID NO: 54009 - DNA, 25 bp, Saccharomyces pastorianus
tcaatcgccgtcctaaaaatcctgt

SEQ ID NO: 54010 - DNA, 25 bp, Saccharomyces pastorianus
aatcctgtcacccttcgtaaattgg

SEQ ID NO: 54011 - DNA, 25 bp, Saccharomyces pastorianus
gaagttttttagattctccagtagc

SEQ ID NO: 54012 - DNA, 25 bp, Saccharomyces pastorianus
agcatatctgcctggtgtctattga

SEQ ID NO: 54013 - DNA, 25 bp, Saccharomyces pastorianus
agtagcatttttgatcctctggatt

SEQ ID NO: 54014 - DNA, 25 bp, Saccharomyces pastorianus
gacgctgacgtggaaacctgggtta

SEQ ID NO: 54015 - DNA, 25 bp, Saccharomyces pastorianus
taattttctccgaaaggcttctagt

SEQ ID NO: 54016 - DNA, 25 bp, Saccharomyces pastorianus
gtcatgccacctctaggatggatat

SEQ ID NO: 54017 - DNA, 25 bp, Saccharomyces pastorianus
gaggtttttcacaggcttcctttca

SEQ ID NO: 54018 - DNA, 25 bp, Saccharomyces pastorianus
gattcattgcaggacgtcatgccac

SEQ ID NO: 54019 - DNA, 25 bp, Saccharomyces pastorianus
gttttgtggcggaaggcagctccaa

SEQ ID NO: 54020 - DNA, 25 bp, Saccharomyces pastorianus
gacgtgctagacaaattgccctcgg

SEQ ID NO: 54021 - DNA, 25 bp, Saccharomyces pastorianus
caaatggcaggtgtacttctccgat

SEQ ID NO: 54022 - DNA, 25 bp, Saccharomyces pastorianus
gagaatcgtgcccttaacgcacaat

SEQ ID NO: 54023 - DNA, 25 bp, Saccharomyces pastorianus
tgatcaatgctctgtacgactgcct

SEQ ID NO: 54024 - DNA, 25 bp, Saccharomyces pastorianus
atatggacgattcattgcccttgga

SEQ ID NO: 54025 - DNA, 25 bp, Saccharomyces pastorianus
gagtacgaacagatcttgcccgagt

SEQ ID NO: 54026 - DNA, 25 bp, Saccharomyces pastorianus
tgcctggtggccgacaaaacgctag

SEQ ID NO: 54027 - DNA, 25 bp, Saccharomyces pastorianus
attgcccttggatggtgacgctcaa

SEQ ID NO: 54028 - DNA, 25 bp, Saccharomyces pastorianus
gagtccctcgacttggttctattgg

SEQ ID NO: 54029 - DNA, 25 bp, Saccharomyces pastorianus
attgccctcggctgttcaagtcagt

SEQ ID NO: 54030 - DNA, 25 bp, Saccharomyces pastorianus
accttgggttgattggcttgcctaa

SEQ ID NO: 54031 - DNA, 25 bp, Saccharomyces pastorianus
taggacattggcagttcaccacact

SEQ ID NO: 54032 - DNA, 25 bp, Saccharomyces pastorianus
agtgggattgccttccgataagcgc

SEQ ID NO: 54033 - DNA, 25 bp, Saccharomyces pastorianus
aagagcattgcagaccttgggttga

SEQ ID NO: 54034 - DNA, 25 bp, Saccharomyces pastorianus
atgtcttcactgtggctgatattcc

SEQ ID NO: 54035 - DNA, 25 bp, Saccharomyces pastorianus
taatcgagggcgcatcactagataa

SEQ ID NO: 54036 - DNA, 25 bp, Saccharomyces pastorianus
gacagtttcgttgggctttgggcaa

SEQ ID NO: 54037 - DNA, 25 bp, Saccharomyces pastorianus
tagaacgttccaagggctgggtctt

SEQ ID NO: 54038 - DNA, 25 bp, Saccharomyces pastorianus
atcattggccaagtacctacaagtg

SEQ ID NO: 54039 - DNA, 25 bp, Saccharomyces pastorianus
tgggtctttgttctaaacctagcta

SEQ ID NO: 54040 - DNA, 25 bp, Saccharomyces pastorianus
gtgtgcaacaaagccgatatcgatt

SEQ ID NO: 54041 - DNA, 25 bp, Saccharomyces pastorianus
ccaaccgtcgagcttgtagtcaatt

SEQ ID NO: 54042 - DNA, 25 bp, Saccharomyces pastorianus
caattacgatattccttcagacccg

SEQ ID NO: 54043 - DNA, 25 bp, Saccharomyces pastorianus
ttcattcatagatccggtcgtactg

SEQ ID NO: 54044 - DNA, 25 bp, Saccharomyces pastorianus
tcgtactgcgcgtgctggtagagac

SEQ ID NO: 54045 - DNA, 25 bp, Saccharomyces pastorianus
aaggtccatgacaccgccgttataa

SEQ ID NO: 54046 - DNA, 25 bp, Saccharomyces pastorianus
gctaatgcggccagagtcctaatcg

SEQ ID NO: 54047 - DNA, 25 bp, Saccharomyces pastorianus
gtagagacggtgacgccatatcctt

SEQ ID NO: 54048 - DNA, 25 bp, Saccharomyces pastorianus
gtcctaatcgctacagatgtcgcat

SEQ ID NO: 54049 - DNA, 25 bp, Saccharomyces pastorianus
aactcgttacacagatttcgcgcta

SEQ ID NO: 54050 - DNA, 25 bp, Saccharomyces pastorianus
atagaggccatcgaagaccgtatca

SEQ ID NO: 54051 - DNA, 25 bp, Saccharomyces pastorianus
tcacccaaagagacgtttccagaat

SEQ ID NO: 54052 - DNA, 25 bp, Saccharomyces pastorianus
gaacatgctattttcatggtcctac

SEQ ID NO: 54053 - DNA, 25 bp, Saccharomyces pastorianus
ggttttgttgcctaatagatcccag

SEQ ID NO: 54054 - DNA, 25 bp, Saccharomyces pastorianus
attcatgacttataacggctggttg

SEQ ID NO: 54055 - DNA, 25 bp, Saccharomyces pastorianus
gcctgggctaattttgagttgtcta

SEQ ID NO: 54056 - DNA, 25 bp, Saccharomyces pastorianus
gtctacaagtaggattctcattcat

SEQ ID NO: 54057 - DNA, 25 bp, Saccharomyces pastorianus
gcatatcaagacattgcctgggcta

SEQ ID NO: 54058 - DNA, 25 bp, Saccharomyces pastorianus
ggttggcgtacctttacgagtatct

SEQ ID NO: 54059 - DNA, 25 bp, Saccharomyces pastorianus
cggctggttgatgctagctgttgta

SEQ ID NO: 54060 - DNA, 25 bp, Saccharomyces pastorianus
ggaactatagctggagcgcctctta

SEQ ID NO: 54061 - DNA, 25 bp, Saccharomyces pastorianus
aggaagcactgatcacgagcatggt

SEQ ID NO: 54062 - DNA, 25 bp, Saccharomyces pastorianus
gtatctgaaatactgcatccataag

SEQ ID NO: 54063 - DNA, 25 bp, Saccharomyces pastorianus
ggctactattataatttccccttca

SEQ ID NO: 54064 - DNA, 25 bp, Saccharomyces pastorianus
cagtgactctctctgatgggcaagt

SEQ ID NO: 54065 - DNA, 25 bp, Saccharomyces pastorianus
ttgactacgtagtcttcgccacagg

SEQ ID NO: 54066 - DNA, 25 bp, Saccharomyces pastorianus
ggactgtatcccacatagagctggt

SEQ ID NO: 54067 - DNA, 25 bp, Saccharomyces pastorianus
catcaccgtcgaagtcttttgcaag

SEQ ID NO: 54068 - DNA, 25 bp, Saccharomyces pastorianus
gtgggacggaagactcaccgaccta

SEQ ID NO: 54069 - DNA, 25 bp, Saccharomyces pastorianus
tagacccctctatcagatcggatgt

SEQ ID NO: 54070 - DNA, 25 bp, Saccharomyces pastorianus
gtcaacctgcgtggcttatgggaac

SEQ ID NO: 54071 - DNA, 25 bp, Saccharomyces pastorianus
gaccttacattagcgtttgccctga

SEQ ID NO: 54072 - DNA, 25 bp, Saccharomyces pastorianus
agagctggtcactttgacccagtca

SEQ ID NO: 54073 - DNA, 25 bp, Saccharomyces pastorianus
agagctacagcgacttctggactgt

SEQ ID NO: 54074 - DNA, 25 bp, Saccharomyces pastorianus
aacaaattcactatctcccttcaaa

SEQ ID NO: 54075 - DNA, 25 bp, Saccharomyces pastorianus
ggacagtgacgcctggtttgacaaa

SEQ ID NO: 54076 - DNA, 25 bp, Saccharomyces pastorianus
gtatgccccgaatgccattggaaat

SEQ ID NO: 54077 - DNA, 25 bp, Saccharomyces pastorianus
tactggccgtacctcgtagtgactt

SEQ ID NO: 54078 - DNA, 25 bp, Saccharomyces pastorianus
aacgccacgagctcgattattcaac

SEQ ID NO: 54079 - DNA, 25 bp, Saccharomyces pastorianus
gacagaccagttctctttgtatgcc

SEQ ID NO: 54080 - DNA, 25 bp, Saccharomyces pastorianus
agaagagacccattacaacgccacg

SEQ ID NO: 54081 - DNA, 25 bp, Saccharomyces pastorianus
ttgagtaaactacgtgccgtccatc

SEQ ID NO: 54082 - DNA, 25 bp, Saccharomyces pastorianus
agtgactttgtttctatgcctaggt

SEQ ID NO: 54083 - DNA, 25 bp, Saccharomyces pastorianus
atgccatggttctcctagatgacga

SEQ ID NO: 54084 - DNA, 25 bp, Saccharomyces pastorianus
atgcctaggttcactgatcctggtg

SEQ ID NO: 54085 - DNA, 25 bp, Saccharomyces pastorianus
gcagtctcaaacacaatcgacaacg

SEQ ID NO: 54086 - DNA, 25 bp, Saccharomyces pastorianus
aagacacgaatgtggtcgtccagaa

SEQ ID NO: 54087 - DNA, 25 bp, Saccharomyces pastorianus
gatcttgctcgcgagatattcctgc

SEQ ID NO: 54088 - DNA, 25 bp, Saccharomyces pastorianus
gaagatgttattggtctgcaccagc

SEQ ID NO: 54089 - DNA, 25 bp, Saccharomyces pastorianus
gatattcctgcgcaaacacggtatt

SEQ ID NO: 54090 - DNA, 25 bp, Saccharomyces pastorianus
gaaccatcgtatgttgatcttcaat

SEQ ID NO: 54091 - DNA, 25 bp, Saccharomyces pastorianus
ggtgatgaacttaccgatcttgctc

SEQ ID NO: 54092 - DNA, 25 bp, Saccharomyces pastorianus
agcgaatccctctcggtgatatatt

SEQ ID NO: 54093 - DNA, 25 bp, Saccharomyces pastorianus
atcgacaacgagtcattcttggtga

SEQ ID NO: 54094 - DNA, 25 bp, Saccharomyces pastorianus
cccgtctatgttctggctcattaga

SEQ ID NO: 54095 - DNA, 25 bp, Saccharomyces pastorianus
caagttgcgtttgacctcaggagga

SEQ ID NO: 54096 - DNA, 25 bp, Saccharomyces pastorianus
gacatgtcacatttctaaggttcaa

SEQ ID NO: 54097 - DNA, 25 bp, Saccharomyces pastorianus
tttaaactgctaggatacggccaaa

SEQ ID NO: 54098 - DNA, 25 bp, Saccharomyces pastorianus
atgccttgggcctatatttagctga

SEQ ID NO: 54099 - DNA, 25 bp, Saccharomyces pastorianus
gcagaacctggctagatttttgaag

SEQ ID NO: 54100 - DNA, 25 bp, Saccharomyces pastorianus
gcgccttacagttttcgtaccaaga

SEQ ID NO: 54101 - DNA, 25 bp, Saccharomyces pastorianus
tctccttctcctcaggctaagaaaa

SEQ ID NO: 54102 - DNA, 25 bp, Saccharomyces pastorianus
gacgattccaagactcccaagcaga

SEQ ID NO: 54103 - DNA, 25 bp, Saccharomyces pastorianus
gagttactagctaacggcgccttac

SEQ ID NO: 54104 - DNA, 25 bp, Saccharomyces pastorianus
tatttccttgacgtggacgattcca

SEQ ID NO: 54105 - DNA, 25 bp, Saccharomyces pastorianus
ggatacggccaaagacatgtcacat

SEQ ID NO: 54106 - DNA, 25 bp, Saccharomyces pastorianus
aagtggcgacaaatctccttctcct

SEQ ID NO: 54107 - DNA, 25 bp, Saccharomyces pastorianus
gtcaatgacaccgtcaagatcgatt

SEQ ID NO: 54108 - DNA, 25 bp, Saccharomyces pastorianus
ggtaagatcaccgacttcatcaagt

SEQ ID NO: 54109 - DNA, 25 bp, Saccharomyces pastorianus
gacttcatcaagttcgacgctggta

SEQ ID NO: 54110 - DNA, 25 bp, Saccharomyces pastorianus
gacaccgtcaagatcgatttggcct

SEQ ID NO: 54111 - DNA, 25 bp, Saccharomyces pastorianus
cgacgtcaagggtagatttgccgtt

SEQ ID NO: 54112 - DNA, 25 bp, Saccharomyces pastorianus
ggtagatttgccgttcaccgtatca

SEQ ID NO: 54113 - DNA, 25 bp, Saccharomyces pastorianus
ccgttcaccgtatcaccgaagaaga

SEQ ID NO: 54114 - DNA, 25 bp, Saccharomyces pastorianus
ccgtcaagatcgatttggcctctgg

SEQ ID NO: 54115 - DNA, 25 bp, Saccharomyces pastorianus
catcaagttcgacgctggtaagcta

SEQ ID NO: 54116 - DNA, 25 bp, Saccharomyces pastorianus
gacgctggtaagctagtttacgtta

SEQ ID NO: 54117 - DNA, 25 bp, Saccharomyces pastorianus
ggcctctggtaagatcaccgacttc

SEQ ID NO: 54118 - DNA, 25 bp, Saccharomyces pastorianus
ggaactacatgaagcggtacttgaa

SEQ ID NO: 54119 - DNA, 25 bp, Saccharomyces pastorianus
gagtccgtgtacgactactctgttg

SEQ ID NO: 54120 - DNA, 25 bp, Saccharomyces pastorianus
ccgtgtacgactactctgttgccac

SEQ ID NO: 54121 - DNA, 25 bp, Saccharomyces pastorianus
ggagtccgtgtacgactactctgtt

SEQ ID NO: 54122 - DNA, 25 bp, Saccharomyces pastorianus
gtccgtgtacgactactctgttgcc

SEQ ID NO: 54123 - DNA, 25 bp, Saccharomyces pastorianus
gggagtccgtgtacgactactctgt

SEQ ID NO: 54124 - DNA, 25 bp, Saccharomyces pastorianus
tgtacgactactctgttgccacgtg

SEQ ID NO: 54125 - DNA, 25 bp, Saccharomyces pastorianus
gtacgactactctgttgccacgtgt

SEQ ID NO: 54126 - DNA, 25 bp, Saccharomyces pastorianus
tccgtgtacgactactctgttgcca

SEQ ID NO: 54127 - DNA, 25 bp, Saccharomyces pastorianus
agtccgtgtacgactactctgttgc

SEQ ID NO: 54128 - DNA, 25 bp, Saccharomyces pastorianus
gtgtacgactactctgttgccacgt

SEQ ID NO: 54129 - DNA, 25 bp, Saccharomyces pastorianus
cggtcctccatcatttgcgagtttt

SEQ ID NO: 54130 - DNA, 25 bp, Saccharomyces pastorianus
ataacaccatctattccaacgagga

SEQ ID NO: 54131 - DNA, 25 bp, Saccharomyces pastorianus
acaagggacatcaagctggccggag

SEQ ID NO: 54132 - DNA, 25 bp, Saccharomyces pastorianus
atggacgcagaactacgtggccctt

SEQ ID NO: 54133 - DNA, 25 bp, Saccharomyces pastorianus
atacgaatactgcagaacccctttg

SEQ ID NO: 54134 - DNA, 25 bp, Saccharomyces pastorianus
atttcgacactttcaggtatccctt

SEQ ID NO: 54135 - DNA, 25 bp, Saccharomyces pastorianus
gtcttccaaaatgtccaactacctg

SEQ ID NO: 54136 - DNA, 25 bp, Saccharomyces pastorianus
gaggtcggcgggttccacaacttga

SEQ ID NO: 54137 - DNA, 25 bp, Saccharomyces pastorianus
gaagctttgaactctgtccatgcca

SEQ ID NO: 54138 - DNA, 25 bp, Saccharomyces pastorianus
agaactaccacttgtcttccaaaat

SEQ ID NO: 54139 - DNA, 25 bp, Saccharomyces pastorianus
ccctttggacttcctcttgagaaga

SEQ ID NO: 54140 - DNA, 25 bp, Saccharomyces pastorianus
aggtgctgcagaagttccccgtcgt

SEQ ID NO: 54141 - DNA, 25 bp, Saccharomyces pastorianus
agaatggtaccgatctgcccgtttt

SEQ ID NO: 54142 - DNA, 25 bp, Saccharomyces pastorianus
gccccgctggtctaaggtgtgcaaa

SEQ ID NO: 54143 - DNA, 25 bp, Saccharomyces pastorianus
gtacaggcttcttcccttggatcaa

SEQ ID NO: 54144 - DNA, 25 bp, Saccharomyces pastorianus
acaaggcgctggtccgggagtacaa

SEQ ID NO: 54145 - DNA, 25 bp, Saccharomyces pastorianus
tgtttctgctcttcaccaagtacta

SEQ ID NO: 54146 - DNA, 25 bp, Saccharomyces pastorianus
aagacacgaacttctactgccaggg

SEQ ID NO: 54147 - DNA, 25 bp, Saccharomyces pastorianus
agcactcgcccattttgtacgacat

SEQ ID NO: 54148 - DNA, 25 bp, Saccharomyces pastorianus
atctggtctacattctgggctcgtc

SEQ ID NO: 54149 - DNA, 25 bp, Saccharomyces pastorianus
aaatgtattccgtcgaggtgctgca

SEQ ID NO: 54150 - DNA, 25 bp, Saccharomyces pastorianus
cgtgcagcatttctggttcggtaca

SEQ ID NO: 54151 - DNA, 25 bp, Saccharomyces pastorianus
agaaacagcagtggcctggctttaa

SEQ ID NO: 54152 - DNA, 25 bp, Saccharomyces pastorianus
agggatccctctcaacgtggaaaag

SEQ ID NO: 54153 - DNA, 25 bp, Saccharomyces pastorianus
aggcgtggctactgtcgtgaccaaa

SEQ ID NO: 54154 - DNA, 25 bp, Saccharomyces pastorianus
aacactcgatgagctgtctcttgtt

SEQ ID NO: 54155 - DNA, 25 bp, Saccharomyces pastorianus
gatagactacatttcgttggcagat

SEQ ID NO: 54156 - DNA, 25 bp, Saccharomyces pastorianus
acagccacttgtgatcagttgtgcc

SEQ ID NO: 54157 - DNA, 25 bp, Saccharomyces pastorianus
cagagagggccttttgtcagtgttc

SEQ ID NO: 54158 - DNA, 25 bp, Saccharomyces pastorianus
atatctctgcccaaagtctctaaag

SEQ ID NO: 54159 - DNA, 25 bp, Saccharomyces pastorianus
gggctcgtctctctagatcagaaat

SEQ ID NO: 54160 - DNA, 25 bp, Saccharomyces pastorianus
attgacatcgtcacccaaatttggg

SEQ ID NO: 54161 - DNA, 25 bp, Saccharomyces pastorianus
aggacatccagcaattcatcgttct

SEQ ID NO: 54162 - DNA, 25 bp, Saccharomyces pastorianus
gatagcattacataccagcaattat

SEQ ID NO: 54163 - DNA, 25 bp, Saccharomyces pastorianus
gcaattattacccaaaggatccgga

SEQ ID NO: 54164 - DNA, 25 bp, Saccharomyces pastorianus
attccagataatctgctagacgcag

SEQ ID NO: 54165 - DNA, 25 bp, Saccharomyces pastorianus
ggatccggaatctgcgaatctatta

SEQ ID NO: 54166 - DNA, 25 bp, Saccharomyces pastorianus
gaattggtgacttcgacagagctaa

SEQ ID NO: 54167 - DNA, 25 bp, Saccharomyces pastorianus
ctcgagttggagttatctgaagcaa

SEQ ID NO: 54168 - DNA, 25 bp, Saccharomyces pastorianus
gaaaaccaaaatatcagacgctgaa

SEQ ID NO: 54169 - DNA, 25 bp, Saccharomyces pastorianus
gttatctgaagcaaactccaaattt

SEQ ID NO: 54170 - DNA, 25 bp, Saccharomyces pastorianus
gaaacgatacaagctgcatcaaaaa

SEQ ID NO: 54171 - DNA, 25 bp, Saccharomyces pastorianus
gactactagtagcacagagaatcga

SEQ ID NO: 54172 - DNA, 25 bp, Saccharomyces pastorianus
gacgcagaacttcacgatagcatta

SEQ ID NO: 54173 - DNA, 25 bp, Saccharomyces pastorianus
atgcactctgcaacaacttgtccat

SEQ ID NO: 54174 - DNA, 25 bp, Saccharomyces pastorianus
gggcccaacgtgcttttcactaaat

SEQ ID NO: 54175 - DNA, 25 bp, Saccharomyces pastorianus
ggttgtccaacggaatcgacttcag

SEQ ID NO: 54176 - DNA, 25 bp, Saccharomyces pastorianus
cattcgtcaccatgcaagtattgct

SEQ ID NO: 54177 - DNA, 25 bp, Saccharomyces pastorianus
gcactttagcagctgggttgtccaa

SEQ ID NO: 54178 - DNA, 25 bp, Saccharomyces pastorianus
aatggctcccacgaaagccgacaaa

SEQ ID NO: 54179 - DNA, 25 bp, Saccharomyces pastorianus
caacaacttgtccatccccttaggg

SEQ ID NO: 54180 - DNA, 25 bp, Saccharomyces pastorianus
atgttcaccagcactttagcagctg

SEQ ID NO: 54181 - DNA, 25 bp, Saccharomyces pastorianus
aggatcgttgcaccatcattcgtca

SEQ ID NO: 54182 - DNA, 25 bp, Saccharomyces pastorianus
aagtattgctcgatgcactctgcaa

SEQ ID NO: 54183 - DNA, 25 bp, Saccharomyces pastorianus
atcgacttcaggatcgttgcaccat

SEQ ID NO: 54184 - DNA, 25 bp, Saccharomyces pastorianus
atctgctaacgctaccgttgctgaa

SEQ ID NO: 54185 - DNA, 25 bp, Saccharomyces pastorianus
taacgctaccgttgctgaatctgat

SEQ ID NO: 54186 - DNA, 25 bp, Saccharomyces pastorianus
aacattgttgctaaattggaagcta

SEQ ID NO: 54187 - DNA, 25 bp, Saccharomyces pastorianus
aagaaggtcacatctgctaacgcta

SEQ ID NO: 54188 - DNA, 25 bp, Saccharomyces pastorianus
ggtagaaagtacactactctagcta

SEQ ID NO: 54189 - DNA, 25 bp, Saccharomyces pastorianus
gaaggtcacatctgctaacgctacc

SEQ ID NO: 54190 - DNA, 25 bp, Saccharomyces pastorianus
gtcacatctgctaacgctaccgttg

SEQ ID NO: 54191 - DNA, 25 bp, Saccharomyces pastorianus
tattccacctccatatgacaagaaa

SEQ ID NO: 54192 - DNA, 25 bp, Saccharomyces pastorianus
agagctttcactaagaaggtcacat

SEQ ID NO: 54193 - DNA, 25 bp, Saccharomyces pastorianus
gaaagtacactactctagctaaatt

SEQ ID NO: 54194 - DNA, 25 bp, Saccharomyces pastorianus
cactactctagctaaattatcctct

SEQ ID NO: 54195 - DNA, 25 bp, Saccharomyces pastorianus
cgctactactacgttgtttggtttg

SEQ ID NO: 54196 - DNA, 25 bp, Saccharomyces pastorianus
gacacatttggctgattcgtttgca

SEQ ID NO: 54197 - DNA, 25 bp, Saccharomyces pastorianus
gacatgggaattcctcacggacgtt

SEQ ID NO: 54198 - DNA, 25 bp, Saccharomyces pastorianus
gaacgccgtctaatgtttcattcaa

SEQ ID NO: 54199 - DNA, 25 bp, Saccharomyces pastorianus
tcacggacgttcagactcaatcgaa

SEQ ID NO: 54200 - DNA, 25 bp, Saccharomyces pastorianus
ggagcttgtcaagaacgccgtctaa

SEQ ID NO: 54201 - DNA, 25 bp, Saccharomyces pastorianus
atgactgcggctacaacaagacaca

SEQ ID NO: 54202 - DNA, 25 bp, Saccharomyces pastorianus
gaatgattccatttctgtcacagaa

SEQ ID NO: 54203 - DNA, 25 bp, Saccharomyces pastorianus
aatctgctccacagctgtacgataa

SEQ ID NO: 54204 - DNA, 25 bp, Saccharomyces pastorianus
gaaatctctgctcatggatcggatg

SEQ ID NO: 54205 - DNA, 25 bp, Saccharomyces pastorianus
gacacaacgttcacgcagtgtttat

SEQ ID NO: 54206 - DNA, 25 bp, Saccharomyces pastorianus
tccaggttgccgcagattctttaat

SEQ ID NO: 54207 - DNA, 25 bp, Saccharomyces pastorianus
gattgcgatcttcgaattccttgga

SEQ ID NO: 54208 - DNA, 25 bp, Saccharomyces pastorianus
gactctaggctattgtttgcattga

SEQ ID NO: 54209 - DNA, 25 bp, Saccharomyces pastorianus
aatcagtttcccacagttgttctgg

SEQ ID NO: 54210 - DNA, 25 bp, Saccharomyces pastorianus
ggtccatcacggcatgcttaagcag

SEQ ID NO: 54211 - DNA, 25 bp, Saccharomyces pastorianus
gtaaagattttacggccatccaggt

SEQ ID NO: 54212 - DNA, 25 bp, Saccharomyces pastorianus
gattcgccggatactgtgcaatgtt

SEQ ID NO: 54213 - DNA, 25 bp, Saccharomyces pastorianus
aaacgcgtacgagcaaccttcatta

SEQ ID NO: 54214 - DNA, 25 bp, Saccharomyces pastorianus
tttggttgccattttcccttcgaat

SEQ ID NO: 54215 - DNA, 25 bp, Saccharomyces pastorianus
atcccgcttgattgattctttggca

SEQ ID NO: 54216 - DNA, 25 bp, Saccharomyces pastorianus
tggcggaacttgatccaaccaattt

SEQ ID NO: 54217 - DNA, 25 bp, Saccharomyces pastorianus
agcattcgggtggtgtatttctgtg

SEQ ID NO: 54218 - DNA, 25 bp, Saccharomyces pastorianus
aattgggctttgctttttgccagca

SEQ ID NO: 54219 - DNA, 25 bp, Saccharomyces pastorianus
actgagtgctttgacttcatcttcg

SEQ ID NO: 54220 - DNA, 25 bp, Saccharomyces pastorianus
tgcattttgtcagctgttttcattg

SEQ ID NO: 54221 - DNA, 25 bp, Saccharomyces pastorianus
ggaggcgttttcacactactgagtg

SEQ ID NO: 54222 - DNA, 25 bp, Saccharomyces pastorianus
gcaggaatttccacactgacgagtg

SEQ ID NO: 54223 - DNA, 25 bp, Saccharomyces pastorianus
attgcattctgaccttttctactac

SEQ ID NO: 54224 - DNA, 25 bp, Saccharomyces pastorianus
atttctgtgaaagcacctcttgctg

SEQ ID NO: 54225 - DNA, 25 bp, Saccharomyces pastorianus
tcttgctgctgttttgtgtacgagt

SEQ ID NO: 54226 - DNA, 25 bp, Saccharomyces pastorianus
gaagcaagactacatccagcatttg

SEQ ID NO: 54227 - DNA, 25 bp, Saccharomyces pastorianus
gttttcattgcagccctaagtagga

SEQ ID NO: 54228 - DNA, 25 bp, Saccharomyces pastorianus
ggctacgttgtcctataagcaaaac

SEQ ID NO: 54229 - DNA, 25 bp, Saccharomyces pastorianus
aagatcaccgattcgggcctggcta

SEQ ID NO: 54230 - DNA, 25 bp, Saccharomyces pastorianus
gagttcgttactaagtacctgcccg

SEQ ID NO: 54231 - DNA, 25 bp, Saccharomyces pastorianus
gggcctggctacgttgtcctataag

SEQ ID NO: 54232 - DNA, 25 bp, Saccharomyces pastorianus
tgcccgattccacatcacagatcaa

SEQ ID NO: 54233 - DNA, 25 bp, Saccharomyces pastorianus
gattccacatcacagatcaaggcaa

SEQ ID NO: 54234 - DNA, 25 bp, Saccharomyces pastorianus
gttactaagtacctgcccgattcca

SEQ ID NO: 54235 - DNA, 25 bp, Saccharomyces pastorianus
atcaaggcaaagatcaccgattcgg

SEQ ID NO: 54236 - DNA, 25 bp, Saccharomyces pastorianus
gcaaaacttgaaaaaaggcatctct

SEQ ID NO: 54237 - DNA, 25 bp, Saccharomyces pastorianus
taatgcgctagagttggccgagccg

SEQ ID NO: 54238 - DNA, 25 bp, Saccharomyces pastorianus
gatgggcatgtcatttaatgcgcta

SEQ ID NO: 54239 - DNA, 25 bp, Saccharomyces pastorianus
accttttttcaacgacatctccaga

SEQ ID NO: 54240 - DNA, 25 bp, Saccharomyces pastorianus
atggcaccaccttttttcaacgaca

SEQ ID NO: 54241 - DNA, 25 bp, Saccharomyces pastorianus
atctccagagatattaacggtcttt

SEQ ID NO: 54242 - DNA, 25 bp, Saccharomyces pastorianus
gatattaacggtcttttgaacaggg

SEQ ID NO: 54243 - DNA, 25 bp, Saccharomyces pastorianus
gaacagggactttttccataccagc

SEQ ID NO: 54244 - DNA, 25 bp, Saccharomyces pastorianus
ttttttcaacgacatctccagagat

SEQ ID NO: 54245 - DNA, 25 bp, Saccharomyces pastorianus
gaacatatctaccacgacgcaaaat

SEQ ID NO: 54246 - DNA, 25 bp, Saccharomyces pastorianus
gggactttttccataccagcccgct

SEQ ID NO: 54247 - DNA, 25 bp, Saccharomyces pastorianus
gcaccaccttttttcaacgacatct

SEQ ID NO: 54248 - DNA, 25 bp, Saccharomyces pastorianus
agcccgctctctttgaacatatcta

SEQ ID NO: 54249 - DNA, 25 bp, Saccharomyces pastorianus
ttttcaacgacatctccagagatat

SEQ ID NO: 54250 - DNA, 25 bp, Saccharomyces pastorianus
gtatgaatacctttgggctttccag

SEQ ID NO: 54251 - DNA, 25 bp, Saccharomyces pastorianus
agtttgacgatgaatctctcttccc

SEQ ID NO: 54252 - DNA, 25 bp, Saccharomyces pastorianus
aatggttggccgttcattgtgtgga

SEQ ID NO: 54253 - DNA, 25 bp, Saccharomyces pastorianus
tcaacgtgttattcagcctatcctg

SEQ ID NO: 54254 - DNA, 25 bp, Saccharomyces pastorianus
gaattctgttctccacaaacttgcc

SEQ ID NO: 54255 - DNA, 25 bp, Saccharomyces pastorianus
aagctgtgaaattgcctcgtggtga

SEQ ID NO: 54256 - DNA, 25 bp, Saccharomyces pastorianus
gactgttcagggtttatgctcacat

SEQ ID NO: 54257 - DNA, 25 bp, Saccharomyces pastorianus
tttcagtgagcgcacccaagtatgt

SEQ ID NO: 54258 - DNA, 25 bp, Saccharomyces pastorianus
acacttttgccttttcgctcaagaa

SEQ ID NO: 54259 - DNA, 25 bp, Saccharomyces pastorianus
aagaccggctgatttcggcccattg

SEQ ID NO: 54260 - DNA, 25 bp, Saccharomyces pastorianus
aaaggtcaacctcctgtttcagtga

SEQ ID NO: 54261 - DNA, 25 bp, Saccharomyces pastorianus
aaaaataccctctgcctgcgtcagg

SEQ ID NO: 54262 - DNA, 25 bp, Saccharomyces pastorianus
aagcttgtcatcgaagacgccttgc

SEQ ID NO: 54263 - DNA, 25 bp, Saccharomyces pastorianus
taccacttcctcaaatatgccaacg

SEQ ID NO: 54264 - DNA, 25 bp, Saccharomyces pastorianus
ttgtggagaacctgggtctttcgtc

SEQ ID NO: 54265 - DNA, 25 bp, Saccharomyces pastorianus
cctcgttcgactcgtttgtggagaa

SEQ ID NO: 54266 - DNA, 25 bp, Saccharomyces pastorianus
aacgctaatacggacaccacttctt

SEQ ID NO: 54267 - DNA, 25 bp, Saccharomyces pastorianus
actcctacccgggaaacatctatat

SEQ ID NO: 54268 - DNA, 25 bp, Saccharomyces pastorianus
gggtctttcgtccagcgacaagaac

SEQ ID NO: 54269 - DNA, 25 bp, Saccharomyces pastorianus
acggtgcaaatcctttccaacttgg

SEQ ID NO: 54270 - DNA, 25 bp, Saccharomyces pastorianus
tcgcaataccagtctccaaggcaat

SEQ ID NO: 54271 - DNA, 25 bp, Saccharomyces pastorianus
gggcagcagaactacacctatgacc

SEQ ID NO: 54272 - DNA, 25 bp, Saccharomyces pastorianus
atgcgttctctttacccgatcaata

SEQ ID NO: 54273 - DNA, 25 bp, Saccharomyces pastorianus
aacctcgaatgcattttgggaccag

SEQ ID NO: 54274 - DNA, 25 bp, Saccharomyces pastorianus
gtggttgtccccatgcacaatgaaa

SEQ ID NO: 54275 - DNA, 25 bp, Saccharomyces pastorianus
tttgcacaacctgatgttccgcatg

SEQ ID NO: 54276 - DNA, 25 bp, Saccharomyces pastorianus
cacgctttacaaactcatccattgg

SEQ ID NO: 54277 - DNA, 25 bp, Saccharomyces pastorianus
aaatctttcagctggcggattcgtt

SEQ ID NO: 54278 - DNA, 25 bp, Saccharomyces pastorianus
tgggaccagctgattttctccaatc

SEQ ID NO: 54279 - DNA, 25 bp, Saccharomyces pastorianus
gcggattcgttcctggtgaaactga

SEQ ID NO: 54280 - DNA, 25 bp, Saccharomyces pastorianus
atcgctcatgacacgccaaaggctt

SEQ ID NO: 54281 - DNA, 25 bp, Saccharomyces pastorianus
gaacagttcaacaagcacacgggct

SEQ ID NO: 54282 - DNA, 25 bp, Saccharomyces pastorianus
gatcaatagcaacgccacgggcatt

SEQ ID NO: 54283 - DNA, 25 bp, Saccharomyces pastorianus
gggactaactttgctgagaccaata

SEQ ID NO: 54284 - DNA, 25 bp, Saccharomyces pastorianus
ataagccaggctatttcattgatct

SEQ ID NO: 54285 - DNA, 25 bp, Saccharomyces pastorianus
atcgtcaaatggctcgtcgatccca

SEQ ID NO: 54286 - DNA, 25 bp, Saccharomyces pastorianus
gccatccaccctttatctttaagga

SEQ ID NO: 54287 - DNA, 25 bp, Saccharomyces pastorianus
gaccgtccttctaactatacatcag

SEQ ID NO: 54288 - DNA, 25 bp, Saccharomyces pastorianus
ccaacaaccctataacttccatgaa

SEQ ID NO: 54289 - DNA, 25 bp, Saccharomyces pastorianus
gcatggcacgatccaattgggacta

SEQ ID NO: 54290 - DNA, 25 bp, Saccharomyces pastorianus
ggcgcacatttcttcacattcaaac

SEQ ID NO: 54291 - DNA, 25 bp, Saccharomyces pastorianus
attcaatgtttgtccaggcctggta

SEQ ID NO: 54292 - DNA, 25 bp, Saccharomyces pastorianus
gaagtacattcacccaagatgacag

SEQ ID NO: 54293 - DNA, 25 bp, Saccharomyces pastorianus
catggaaacttgaacgccatccacc

SEQ ID NO: 54294 - DNA, 25 bp, Saccharomyces pastorianus
gggtctccctctaaatggtcaatgt

SEQ ID NO: 54295 - DNA, 25 bp, Saccharomyces pastorianus
gacggctcactttcatcttgggaaa

SEQ ID NO: 54296 - DNA, 25 bp, Saccharomyces pastorianus
ataacgatttcgaagccgctcagcc

SEQ ID NO: 54297 - DNA, 25 bp, Saccharomyces pastorianus
aaatgtcgctggtcggtccatgtat

SEQ ID NO: 54298 - DNA, 25 bp, Saccharomyces pastorianus
gacttttagatctagggtctccctc

SEQ ID NO: 54299 - DNA, 25 bp, Saccharomyces pastorianus
aagaccggcgtcttcagtggttcgc

SEQ ID NO: 54300 - DNA, 25 bp, Saccharomyces pastorianus
aaagagatcctatcgggctgtaccg

SEQ ID NO: 54301 - DNA, 25 bp, Saccharomyces pastorianus
ggaaaaccttcctctgatgacggat

SEQ ID NO: 54302 - DNA, 25 bp, Saccharomyces pastorianus
gaccggttccctgaaggacagtcat

SEQ ID NO: 54303 - DNA, 25 bp, Saccharomyces pastorianus
gtgtgtttagctccggattatccga

SEQ ID NO: 54304 - DNA, 25 bp, Saccharomyces pastorianus
agagagaagactgcccgatccgaaa

SEQ ID NO: 54305 - DNA, 25 bp, Saccharomyces pastorianus
tgttgaacaatcaagcctccacggc

SEQ ID NO: 54306 - DNA, 25 bp, Saccharomyces pastorianus
gaattacaccttttggccagtgccc

SEQ ID NO: 54307 - DNA, 25 bp, Saccharomyces pastorianus
attttgaaccttgccgaatcgtata

SEQ ID NO: 54308 - DNA, 25 bp, Saccharomyces pastorianus
tgccctcatgcaaggtgctgatact

SEQ ID NO: 54309 - DNA, 25 bp, Saccharomyces pastorianus
gccagtgcccaagctatttttggta

SEQ ID NO: 54310 - DNA, 25 bp, Saccharomyces pastorianus
acggcttccgtcatctttgataatt

SEQ ID NO: 54311 - DNA, 25 bp, Saccharomyces pastorianus
aaacagcgacttccaacttctacta

SEQ ID NO: 54312 - DNA, 25 bp, Saccharomyces pastorianus
ttatctcaaacttttcccacttgga

SEQ ID NO: 54313 - DNA, 25 bp, Saccharomyces pastorianus
gaaggaaccacggaactgctgttac

SEQ ID NO: 54314 - DNA, 25 bp, Saccharomyces pastorianus
ggaactgctgttacttgccattgaa

SEQ ID NO: 54315 - DNA, 25 bp, Saccharomyces pastorianus
tgtacaaacctaacttcctggcaaa

SEQ ID NO: 54316 - DNA, 25 bp, Saccharomyces pastorianus
atttcgaaatttagctgtcccgaca

SEQ ID NO: 54317 - DNA, 25 bp, Saccharomyces pastorianus
gtgccgttttttccaatctcgttga

SEQ ID NO: 54318 - DNA, 25 bp, Saccharomyces pastorianus
caggattgagctatcctcaaagtgt

SEQ ID NO: 54319 - DNA, 25 bp, Saccharomyces pastorianus
tagttagttcttctttaatatcctc

SEQ ID NO: 54320 - DNA, 25 bp, Saccharomyces pastorianus
gccttgttgattatggtgccgtttt

SEQ ID NO: 54321 - DNA, 25 bp, Saccharomyces pastorianus
tgttttcatttttcagctcacctat

SEQ ID NO: 54322 - DNA, 25 bp, Saccharomyces pastorianus
aatctcgttgataatactttgcagg

SEQ ID NO: 54323 - DNA, 25 bp, Saccharomyces pastorianus
aagtgtatcacgtcatcatcaattt

SEQ ID NO: 54324 - DNA, 25 bp, Saccharomyces pastorianus
tcagctcacctatggccttgttgat

SEQ ID NO: 54325 - DNA, 25 bp, Saccharomyces pastorianus
gctgtcccgacactatcagattagt

SEQ ID NO: 54326 - DNA, 25 bp, Saccharomyces pastorianus
taatactttgcaggattgagctatc

SEQ ID NO: 54327 - DNA, 25 bp, Saccharomyces pastorianus
cgttttcggcttcagaactcaattc

SEQ ID NO: 54328 - DNA, 25 bp, Saccharomyces pastorianus
tcggcttcagaactcaattcggtgg

SEQ ID NO: 54329 - DNA, 25 bp, Saccharomyces pastorianus
tttcggcttcagaactcaattcggt

SEQ ID NO: 54330 - DNA, 25 bp, Saccharomyces pastorianus
cttcagaactcaattcggtggtggt

SEQ ID NO: 54331 - DNA, 25 bp, Saccharomyces pastorianus
tgacgccgtcactattcgtaccaga

SEQ ID NO: 54332 - DNA, 25 bp, Saccharomyces pastorianus
tcgtaccagaaaggtcatctccaac

SEQ ID NO: 54333 - DNA, 25 bp, Saccharomyces pastorianus
ggcttcagaactcaattcggtggtg

SEQ ID NO: 54334 - DNA, 25 bp, Saccharomyces pastorianus
ttcggcttcagaactcaattcggtg

SEQ ID NO: 54335 - DNA, 25 bp, Saccharomyces pastorianus
gaagatcttcggtaccggtaagaga

SEQ ID NO: 54336 - DNA, 25 bp, Saccharomyces pastorianus
gttttcggcttcagaactcaattcg

SEQ ID NO: 54337 - DNA, 25 bp, Saccharomyces pastorianus
cggcttcagaactcaattcggtggt

SEQ ID NO: 54338 - DNA, 25 bp, Saccharomyces pastorianus
tctactggttcacagcttagatcca

SEQ ID NO: 54339 - DNA, 25 bp, Saccharomyces pastorianus
actggttcacagcttagatccatga

SEQ ID NO: 54340 - DNA, 25 bp, Saccharomyces pastorianus
gcttagatccatgaaaaactccatc

SEQ ID NO: 54341 - DNA, 25 bp, Saccharomyces pastorianus
ctggttcacagcttagatccatgaa

SEQ ID NO: 54342 - DNA, 25 bp, Saccharomyces pastorianus
ctactggttcacagcttagatccat

SEQ ID NO: 54343 - DNA, 25 bp, Saccharomyces pastorianus
tactggttcacagcttagatccatg

SEQ ID NO: 54344 - DNA, 25 bp, Saccharomyces pastorianus
atccatgaaaaactccatcacagta

SEQ ID NO: 54345 - DNA, 25 bp, Saccharomyces pastorianus
ttatctactggttcacagcttagat

SEQ ID NO: 54346 - DNA, 25 bp, Saccharomyces pastorianus
ggttcacagcttagatccatgaaaa

SEQ ID NO: 54347 - DNA, 25 bp, Saccharomyces pastorianus
gttcacagcttagatccatgaaaaa

SEQ ID NO: 54348 - DNA, 25 bp, Saccharomyces pastorianus
gatccatgaaaaactccatcacagt

SEQ ID NO: 54349 - DNA, 25 bp, Saccharomyces pastorianus
gaaccatcttctgtctctagtggta

SEQ ID NO: 54350 - DNA, 25 bp, Saccharomyces pastorianus
ttgaatcgtcccgtttatatcccaa

SEQ ID NO: 54351 - DNA, 25 bp, Saccharomyces pastorianus
gaaactggaagacggagcttgccct

SEQ ID NO: 54352 - DNA, 25 bp, Saccharomyces pastorianus
gctgctgatcgttccatttacattg

SEQ ID NO: 54353 - DNA, 25 bp, Saccharomyces pastorianus
aaaaagtgattgcttgcagtgcccc

SEQ ID NO: 54354 - DNA, 25 bp, Saccharomyces pastorianus
aactggtaccaaattctccgataag

SEQ ID NO: 54355 - DNA, 25 bp, Saccharomyces pastorianus
tttacattgatcaatcccactcctt

SEQ ID NO: 54356 - DNA, 25 bp, Saccharomyces pastorianus
ccactccttgaatttgttcctacaa

SEQ ID NO: 54357 - DNA, 25 bp, Saccharomyces pastorianus
cttgcccttcagttccaacagaaaa

SEQ ID NO: 54358 - DNA, 25 bp, Saccharomyces pastorianus
cttctgcagccattcaatttaccat

SEQ ID NO: 54359 - DNA, 25 bp, Saccharomyces pastorianus
tacacatgttgcatccactgcagaa

SEQ ID NO: 54360 - DNA, 25 bp, Saccharomyces pastorianus
aatttagcttccattgctctaccag

SEQ ID NO: 54361 - DNA, 25 bp, Saccharomyces pastorianus
atattccacttttgaaggctctcct

SEQ ID NO: 54362 - DNA, 25 bp, Saccharomyces pastorianus
aactattatccagtgccagaggcta

SEQ ID NO: 54363 - DNA, 25 bp, Saccharomyces pastorianus
aaatcgtcgagtattcttccccaga

SEQ ID NO: 54364 - DNA, 25 bp, Saccharomyces pastorianus
gatgctgcgtttaccatttgaatgt

SEQ ID NO: 54365 - DNA, 25 bp, Saccharomyces pastorianus
acctgggtaccatcaaatcgtcaaa

SEQ ID NO: 54366 - DNA, 25 bp, Saccharomyces pastorianus
atgctacccttgaagcttcttgtga

SEQ ID NO: 54367 - DNA, 25 bp, Saccharomyces pastorianus
caaacttgtgttgcgaaatcgtcga

SEQ ID NO: 54368 - DNA, 25 bp, Saccharomyces pastorianus
gctctaccagcattcgttgagactt

SEQ ID NO: 54369 - DNA, 25 bp, Saccharomyces pastorianus
ctctcctgcctctaagggtatttta

SEQ ID NO: 54370 - DNA, 25 bp, Saccharomyces pastorianus
tgaaacatagacctattgccctggg

SEQ ID NO: 54371 - DNA, 25 bp, Saccharomyces pastorianus
aggctcgccactagcatagctgagg

SEQ ID NO: 54372 - DNA, 25 bp, Saccharomyces pastorianus
gccaccggcgtggaagagttcgtca

SEQ ID NO: 54373 - DNA, 25 bp, Saccharomyces pastorianus
gacaacatcggtgcgcacaggatta

SEQ ID NO: 54374 - DNA, 25 bp, Saccharomyces pastorianus
gtccgggcaaattcgacatcgtgct

SEQ ID NO: 54375 - DNA, 25 bp, Saccharomyces pastorianus
gatcacgtcttgcaattttacgcag

SEQ ID NO: 54376 - DNA, 25 bp, Saccharomyces pastorianus
taaagggaccttggacgccatttcg

SEQ ID NO: 54377 - DNA, 25 bp, Saccharomyces pastorianus
taaactatcccgtcttccagtttgg

SEQ ID NO: 54378 - DNA, 25 bp, Saccharomyces pastorianus
actgggaatggccacttgctgttcg

SEQ ID NO: 54379 - DNA, 25 bp, Saccharomyces pastorianus
gttcgtcagtttcgagcaagcggat

SEQ ID NO: 54380 - DNA, 25 bp, Saccharomyces pastorianus
ttaacggcgagcttgacgtggtcga

SEQ ID NO: 54381 - DNA, 25 bp, Saccharomyces pastorianus
gcggatatctttagcgccgattgga

SEQ ID NO: 54382 - DNA, 25 bp, Saccharomyces pastorianus
ttcaaggtctcggtcgaagtcacgt

SEQ ID NO: 54383 - DNA, 25 bp, Saccharomyces pastorianus
aagcccgaattgaagttccacgaca

SEQ ID NO: 54384 - DNA, 25 bp, Saccharomyces pastorianus
agtactatccgccatttgtgttgca

SEQ ID NO: 54385 - DNA, 25 bp, Saccharomyces pastorianus
acgcccaatggaagtactatccgcc

SEQ ID NO: 54386 - DNA, 25 bp, Saccharomyces pastorianus
actccaagaagttcgtgcgccatct

SEQ ID NO: 54387 - DNA, 25 bp, Saccharomyces pastorianus
caagatcatctggaattatggcgaa

SEQ ID NO: 54388 - DNA, 25 bp, Saccharomyces pastorianus
acgcgcatgacgaccctgagaagat

SEQ ID NO: 54389 - DNA, 25 bp, Saccharomyces pastorianus
atttgtgttgcacgacgcgcatgac

SEQ ID NO: 54390 - DNA, 25 bp, Saccharomyces pastorianus
ggagaagcacctgctcatggacatc

SEQ ID NO: 54391 - DNA, 25 bp, Saccharomyces pastorianus
aagactgccatcaacaagcccgaat

SEQ ID NO: 54392 - DNA, 25 bp, Saccharomyces pastorianus
gaagtcacgtgcaaccacgacggtg

SEQ ID NO: 54393 - DNA, 25 bp, Saccharomyces pastorianus
agaaggcaaagggcccaaagatgtc

SEQ ID NO: 54394 - DNA, 25 bp, Saccharomyces pastorianus
ggcaaagggcccaaagatgtccact

SEQ ID NO: 54395 - DNA, 25 bp, Saccharomyces pastorianus
caagaaggcaaagggcccaaagatg

SEQ ID NO: 54396 - DNA, 25 bp, Saccharomyces pastorianus
caaagggcccaaagatgtccactat

SEQ ID NO: 54397 - DNA, 25 bp, Saccharomyces pastorianus
gcaaagggcccaaagatgtccacta

SEQ ID NO: 54398 - DNA, 25 bp, Saccharomyces pastorianus
gaaggcaaagggcccaaagatgtcc

SEQ ID NO: 54399 - DNA, 25 bp, Saccharomyces pastorianus
acaagaaggcaaagggcccaaagat

SEQ ID NO: 54400 - DNA, 25 bp, Saccharomyces pastorianus
aagaaggcaaagggcccaaagatgt

SEQ ID NO: 54401 - DNA, 25 bp, Saccharomyces pastorianus
gacaagaaggcaaagggcccaaaga

SEQ ID NO: 54402 - DNA, 25 bp, Saccharomyces pastorianus
aggcaaagggcccaaagatgtccac

SEQ ID NO: 54403 - DNA, 25 bp, Saccharomyces pastorianus
aaagggcccaaagatgtccactatt

SEQ ID NO: 54404 - DNA, 25 bp, Saccharomyces pastorianus
tgctgccactgaggacaacgttcaa

SEQ ID NO: 54405 - DNA, 25 bp, Saccharomyces pastorianus
tatacgcccacttcgttggacgagg

SEQ ID NO: 54406 - DNA, 25 bp, Saccharomyces pastorianus
gccttcccagcttaaaattgttcat

SEQ ID NO: 54407 - DNA, 25 bp, Saccharomyces pastorianus
gggcggtactggtatttcacccatg

SEQ ID NO: 54408 - DNA, 25 bp, Saccharomyces pastorianus
tagtcaagtcataccccacagggaa

SEQ ID NO: 54409 - DNA, 25 bp, Saccharomyces pastorianus
gagagaaactgtcgttcccatctgg

SEQ ID NO: 54410 - DNA, 25 bp, Saccharomyces pastorianus
ccgcaatggtggcttccgttagaag

SEQ ID NO: 54411 - DNA, 25 bp, Saccharomyces pastorianus
attgttcattacttggactcgccag

SEQ ID NO: 54412 - DNA, 25 bp, Saccharomyces pastorianus
caaggagtatttgcctgctgccact

SEQ ID NO: 54413 - DNA, 25 bp, Saccharomyces pastorianus
tgggattcagacgttccaagccact

SEQ ID NO: 54414 - DNA, 25 bp, Saccharomyces pastorianus
tggcgtcgggtacatcactaaagat

SEQ ID NO: 54415 - DNA, 25 bp, Saccharomyces pastorianus
aaagaatctcactccaatcccagtt

SEQ ID NO: 54416 - DNA, 25 bp, Saccharomyces pastorianus
atggatcttgttggtgataaactca

SEQ ID NO: 54417 - DNA, 25 bp, Saccharomyces pastorianus
gcatctcacatggatttagcaaata

SEQ ID NO: 54418 - DNA, 25 bp, Saccharomyces pastorianus
gtttctcctcaagatcacaagcatc

SEQ ID NO: 54419 - DNA, 25 bp, Saccharomyces pastorianus
tcaagaggagccaacccctggtact

SEQ ID NO: 54420 - DNA, 25 bp, Saccharomyces pastorianus
gcacgactgtggactcattaaaaat

SEQ ID NO: 54421 - DNA, 25 bp, Saccharomyces pastorianus
gaaccgtattctcaacgtttcgata

SEQ ID NO: 54422 - DNA, 25 bp, Saccharomyces pastorianus
tgcagcttcgaagtgtaggcaaaga

SEQ ID NO: 54423 - DNA, 25 bp, Saccharomyces pastorianus
gtatcaagagcgaaagcacgactgt

SEQ ID NO: 54424 - DNA, 25 bp, Saccharomyces pastorianus
aaaaggttgctcagttgcagttgca

SEQ ID NO: 54425 - DNA, 25 bp, Saccharomyces pastorianus
aattcggacgataatggtagtacaa

SEQ ID NO: 54426 - DNA, 25 bp, Saccharomyces pastorianus
tatttcttcacgatgttcctgctaa

SEQ ID NO: 54427 - DNA, 25 bp, Saccharomyces pastorianus
agggaattcttcatacaccattggt

SEQ ID NO: 54428 - DNA, 25 bp, Saccharomyces pastorianus
attgacgtcaggcaggaatccagaa

SEQ ID NO: 54429 - DNA, 25 bp, Saccharomyces pastorianus
gcttaatgaatctttccccacatgg

SEQ ID NO: 54430 - DNA, 25 bp, Saccharomyces pastorianus
ccagaagttttgctctatcgcttaa

SEQ ID NO: 54431 - DNA, 25 bp, Saccharomyces pastorianus
tggattgttttaaccgacggcattc

SEQ ID NO: 54432 - DNA, 25 bp, Saccharomyces pastorianus
ggagtcatttacgttcctcttcaag

SEQ ID NO: 54433 - DNA, 25 bp, Saccharomyces pastorianus
caacctgatggtggctattgcaatc

SEQ ID NO: 54434 - DNA, 25 bp, Saccharomyces pastorianus
gacaaggtatcctacacatggcaat

SEQ ID NO: 54435 - DNA, 25 bp, Saccharomyces pastorianus
attgcctattattactctttccttc

SEQ ID NO: 54436 - DNA, 25 bp, Saccharomyces pastorianus
gacggcattctagcctgttacaact

SEQ ID NO: 54437 - DNA, 25 bp, Saccharomyces pastorianus
gtgaccatgtagatccgaatccaat

SEQ ID NO: 54438 - DNA, 25 bp, Saccharomyces pastorianus
cgagaatctccgtcatgttgatgaa

SEQ ID NO: 54439 - DNA, 25 bp, Saccharomyces pastorianus
ataaataggccgaacgctccagtct

SEQ ID NO: 54440 - DNA, 25 bp, Saccharomyces pastorianus
aacatcaaccgtcccgaaggtgttg

SEQ ID NO: 54441 - DNA, 25 bp, Saccharomyces pastorianus
gagccggcaatgtcgaccaagatga

SEQ ID NO: 54442 - DNA, 25 bp, Saccharomyces pastorianus
gatttcggcgcagctattggtgtac

SEQ ID NO: 54443 - DNA, 25 bp, Saccharomyces pastorianus
aaccaccgtgcccagaatgaatttg

SEQ ID NO: 54444 - DNA, 25 bp, Saccharomyces pastorianus
tagactggacatgccagctgctggt

SEQ ID NO: 54445 - DNA, 25 bp, Saccharomyces pastorianus
tcaaggccccttggtgataaatctg

SEQ ID NO: 54446 - DNA, 25 bp, Saccharomyces pastorianus
gcaatatagccgagcccctaagtga

SEQ ID NO: 54447 - DNA, 25 bp, Saccharomyces pastorianus
acgattcggataatagtctgccact

SEQ ID NO: 54448 - DNA, 25 bp, Saccharomyces pastorianus
tgacagtgcgtcaaaagtccttttg

SEQ ID NO: 54449 - DNA, 25 bp, Saccharomyces pastorianus
taatgatttgccagaaaccggtttt

SEQ ID NO: 54450 - DNA, 25 bp, Saccharomyces pastorianus
gaaaaacttggctcactattcaaca

SEQ ID NO: 54451 - DNA, 25 bp, Saccharomyces pastorianus
gaacagttcccatattaccttcatg

SEQ ID NO: 54452 - DNA, 25 bp, Saccharomyces pastorianus
attttggatggacgacttgcttctc

SEQ ID NO: 54453 - DNA, 25 bp, Saccharomyces pastorianus
ttagcaccgattgaggaacatccta

SEQ ID NO: 54454 - DNA, 25 bp, Saccharomyces pastorianus
attccttttgttcacggtcaaactg

SEQ ID NO: 54455 - DNA, 25 bp, Saccharomyces pastorianus
gagtcttttcgctaaacagcttgac

SEQ ID NO: 54456 - DNA, 25 bp, Saccharomyces pastorianus
gatatcgaaacccaattccttttgt

SEQ ID NO: 54457 - DNA, 25 bp, Saccharomyces pastorianus
gatattcccatgacagatgacctag

SEQ ID NO: 54458 - DNA, 25 bp, Saccharomyces pastorianus
gacttgcttctcgtatggcattgaa

SEQ ID NO: 54459 - DNA, 25 bp, Saccharomyces pastorianus
tgtcctcattctctgtctgtaagat

SEQ ID NO: 54460 - DNA, 25 bp, Saccharomyces pastorianus
gatgctttagatacatttcaacact

SEQ ID NO: 54461 - DNA, 25 bp, Saccharomyces pastorianus
gaaaagctcgaaagcaccattgctg

SEQ ID NO: 54462 - DNA, 25 bp, Saccharomyces pastorianus
gattcaattcgttctgagtccatgt

SEQ ID NO: 54463 - DNA, 25 bp, Saccharomyces pastorianus
gactacttgactgaacaagctgtaa

SEQ ID NO: 54464 - DNA, 25 bp, Saccharomyces pastorianus
atagtcacgggcaacctggtcctgg

SEQ ID NO: 54465 - DNA, 25 bp, Saccharomyces pastorianus
ggtacaaggacatatccgattcaat

SEQ ID NO: 54466 - DNA, 25 bp, Saccharomyces pastorianus
tggtcctggacttactgacttggct

SEQ ID NO: 54467 - DNA, 25 bp, Saccharomyces pastorianus
agttgtgtttcgtgcacaggtacaa

SEQ ID NO: 54468 - DNA, 25 bp, Saccharomyces pastorianus
acttactgacttggctgtcctcatt

SEQ ID NO: 54469 - DNA, 25 bp, Saccharomyces pastorianus
gcaccattgctgaaactcaaggtag

SEQ ID NO: 54470 - DNA, 25 bp, Saccharomyces pastorianus
acatcatcacgtcttcgttggttcc

SEQ ID NO: 54471 - DNA, 25 bp, Saccharomyces pastorianus
ttcgttggttcccagcatgtttgag

SEQ ID NO: 54472 - DNA, 25 bp, Saccharomyces pastorianus
atcatcacgtcttcgttggttccca

SEQ ID NO: 54473 - DNA, 25 bp, Saccharomyces pastorianus
tcatcacgtcttcgttggttcccag

SEQ ID NO: 54474 - DNA, 25 bp, Saccharomyces pastorianus
atcacgtcttcgttggttcccagca

SEQ ID NO: 54475 - DNA, 25 bp, Saccharomyces pastorianus
gacatcatcacgtcttcgttggttc

SEQ ID NO: 54476 - DNA, 25 bp, Saccharomyces pastorianus
acgtcttcgttggttcccagcatgt

SEQ ID NO: 54477 - DNA, 25 bp, Saccharomyces pastorianus
cgacatcatcacgtcttcgttggtt

SEQ ID NO: 54478 - DNA, 25 bp, Saccharomyces pastorianus
atcttgctcagcacccgacatcatc

SEQ ID NO: 54479 - DNA, 25 bp, Saccharomyces pastorianus
tcgttggttcccagcatgtttgagg

SEQ ID NO: 54480 - DNA, 25 bp, Saccharomyces pastorianus
gtcttcgttggttcccagcatgttt

SEQ ID NO: 54481 - DNA, 25 bp, Saccharomyces pastorianus
tcgttcgcttgtttgtttggttgtt

SEQ ID NO: 54482 - DNA, 25 bp, Saccharomyces pastorianus
ttccctcttatatgcccacttcaaa

SEQ ID NO: 54483 - DNA, 25 bp, Saccharomyces pastorianus
ttgttcgttcgcttgtttgtttggt

SEQ ID NO: 54484 - DNA, 25 bp, Saccharomyces pastorianus
gcccacttcaaaatcaccaagcatt

SEQ ID NO: 54485 - DNA, 25 bp, Saccharomyces pastorianus
tatgcccacttcaaaatcaccaagc

SEQ ID NO: 54486 - DNA, 25 bp, Saccharomyces pastorianus
agtgcaaaattagccgtatttccct

SEQ ID NO: 54487 - DNA, 25 bp, Saccharomyces pastorianus
cttatatgcccacttcaaaatcacc

SEQ ID NO: 54488 - DNA, 25 bp, Saccharomyces pastorianus
tttgttccctcttatatgcccactt

SEQ ID NO: 54489 - DNA, 25 bp, Saccharomyces pastorianus
tttggttgtttgttccctcttatat

SEQ ID NO: 54490 - DNA, 25 bp, Saccharomyces pastorianus
caaaatcaccaagcattgtcatacc

SEQ ID NO: 54491 - DNA, 25 bp, Saccharomyces pastorianus
ttgtttgttccctcttatatgccca

SEQ ID NO: 54492 - DNA, 25 bp, Saccharomyces pastorianus
ctcacggtggtggtaaccatcaaca

SEQ ID NO: 54493 - DNA, 25 bp, Saccharomyces pastorianus
acggtggtggtaaccatcaacatat

SEQ ID NO: 54494 - DNA, 25 bp, Saccharomyces pastorianus
ggtaaccatcaacatattggtaagg

SEQ ID NO: 54495 - DNA, 25 bp, Saccharomyces pastorianus
cacggtggtggtaaccatcaacata

SEQ ID NO: 54496 - DNA, 25 bp, Saccharomyces pastorianus
catcaacatattggtaaggcttcta

SEQ ID NO: 54497 - DNA, 25 bp, Saccharomyces pastorianus
ggtggtaaccatcaacatattggta

SEQ ID NO: 54498 - DNA, 25 bp, Saccharomyces pastorianus
cctcacggtggtggtaaccatcaac

SEQ ID NO: 54499 - DNA, 25 bp, Saccharomyces pastorianus
tcacggtggtggtaaccatcaacat

SEQ ID NO: 54500 - DNA, 25 bp, Saccharomyces pastorianus
cggtggtggtaaccatcaacatatt

SEQ ID NO: 54501 - DNA, 25 bp, Saccharomyces pastorianus
atcaacatattggtaaggcttctac

SEQ ID NO: 54502 - DNA, 25 bp, Saccharomyces pastorianus
gtggtggtaaccatcaacatattgg

SEQ ID NO: 54503 - DNA, 25 bp, Saccharomyces pastorianus
aaggagtgctccaattacatgtatt

SEQ ID NO: 54504 - DNA, 25 bp, Saccharomyces pastorianus
aaactctgaacttgatgcgggtcgc

SEQ ID NO: 54505 - DNA, 25 bp, Saccharomyces pastorianus
tgcgggtcgcgtaatcaggttcgat

SEQ ID NO: 54506 - DNA, 25 bp, Saccharomyces pastorianus
acggtagtgttattggtcctgtcga

SEQ ID NO: 54507 - DNA, 25 bp, Saccharomyces pastorianus
gttctgcccagattgctcacagtga

SEQ ID NO: 54508 - DNA, 25 bp, Saccharomyces pastorianus
gattattccatcaatcctgttgacg

SEQ ID NO: 54509 - DNA, 25 bp, Saccharomyces pastorianus
gatatatgacgctccattacacgtg

SEQ ID NO: 54510 - DNA, 25 bp, Saccharomyces pastorianus
gactaattgtccctgatgtttctgt

SEQ ID NO: 54511 - DNA, 25 bp, Saccharomyces pastorianus
ggcgaatcttcgaacagtaactact

SEQ ID NO: 54512 - DNA, 25 bp, Saccharomyces pastorianus
gtaactactatatctgttctgccca

SEQ ID NO: 54513 - DNA, 25 bp, Saccharomyces pastorianus
aatgacttccagagagagccagatt

SEQ ID NO: 54514 - DNA, 25 bp, Saccharomyces pastorianus
gcatcaactaaatcgaacggccacg

SEQ ID NO: 54515 - DNA, 25 bp, Saccharomyces pastorianus
gaacggccacgaggacgagagaact

SEQ ID NO: 54516 - DNA, 25 bp, Saccharomyces pastorianus
gattgctcataagacgatccgcgat

SEQ ID NO: 54517 - DNA, 25 bp, Saccharomyces pastorianus
attatactttctgcatgccggaacc

SEQ ID NO: 54518 - DNA, 25 bp, Saccharomyces pastorianus
cgatacttctgctttccgtattttt

SEQ ID NO: 54519 - DNA, 25 bp, Saccharomyces pastorianus
gccggaaccatgcatcaactaaatc

SEQ ID NO: 54520 - DNA, 25 bp, Saccharomyces pastorianus
aagacgatccgcgatacttctgctt

SEQ ID NO: 54521 - DNA, 25 bp, Saccharomyces pastorianus
acaacgaattgcctctgacagtcca

SEQ ID NO: 54522 - DNA, 25 bp, Saccharomyces pastorianus
aagtggattgagaagcggcaacaac

SEQ ID NO: 54523 - DNA, 25 bp, Saccharomyces pastorianus
gaactgcggttgaatcatctgtgta

SEQ ID NO: 54524 - DNA, 25 bp, Saccharomyces pastorianus
ctctgacagtccaatgaagcgatta

SEQ ID NO: 54525 - DNA, 25 bp, Saccharomyces pastorianus
gcgtcaagaagtgcattccgtcaat

SEQ ID NO: 54526 - DNA, 25 bp, Saccharomyces pastorianus
accgtttgcgcctattgtatgtaca

SEQ ID NO: 54527 - DNA, 25 bp, Saccharomyces pastorianus
atggttattgtactcagctcctgat

SEQ ID NO: 54528 - DNA, 25 bp, Saccharomyces pastorianus
atttggccttcagtgatcagcagcg

SEQ ID NO: 54529 - DNA, 25 bp, Saccharomyces pastorianus
tggagtgggttttcgtctgcttcaa

SEQ ID NO: 54530 - DNA, 25 bp, Saccharomyces pastorianus
tagttttacagcttccttctgtggt

SEQ ID NO: 54531 - DNA, 25 bp, Saccharomyces pastorianus
aatggtcccaagtcaacctgtagtg

SEQ ID NO: 54532 - DNA, 25 bp, Saccharomyces pastorianus
tgatttacaaactgctgccgtcttt

SEQ ID NO: 54533 - DNA, 25 bp, Saccharomyces pastorianus
cttacgcattattcccacgattttg

SEQ ID NO: 54534 - DNA, 25 bp, Saccharomyces pastorianus
gttggcttctacttaacctacatta

SEQ ID NO: 54535 - DNA, 25 bp, Saccharomyces pastorianus
ccgtctttgttgcattcctgtatag

SEQ ID NO: 54536 - DNA, 25 bp, Saccharomyces pastorianus
gaccaacccatatcattttgcaaga

SEQ ID NO: 54537 - DNA, 25 bp, Saccharomyces pastorianus
tcatcaacttccttctgatcatgtg

SEQ ID NO: 54538 - DNA, 25 bp, Saccharomyces pastorianus
acaagattctataacgtttgcgatt

SEQ ID NO: 54539 - DNA, 25 bp, Saccharomyces pastorianus
gggcaagtggactcaatattcttac

SEQ ID NO: 54540 - DNA, 25 bp, Saccharomyces pastorianus
aagacttggcacttccgcacatgtg

SEQ ID NO: 54541 - DNA, 25 bp, Saccharomyces pastorianus
gataattccgatcatcatcatcatc

SEQ ID NO: 54542 - DNA, 25 bp, Saccharomyces pastorianus
tgatcatgtgattccggccttggcc

SEQ ID NO: 54543 - DNA, 25 bp, Saccharomyces pastorianus
acatgtgcccacaaatcctgaccaa

SEQ ID NO: 54544 - DNA, 25 bp, Saccharomyces pastorianus
ggccttggcccagcaagacttggca

SEQ ID NO: 54545 - DNA, 25 bp, Saccharomyces pastorianus
agagtagttctagaatccaattcgg

SEQ ID NO: 54546 - DNA, 25 bp, Saccharomyces pastorianus
tattcttacaaccatggataaagcc

SEQ ID NO: 54547 - DNA, 25 bp, Saccharomyces pastorianus
ggcatacgtaacaagcactcaagcg

SEQ ID NO: 54548 - DNA, 25 bp, Saccharomyces pastorianus
atcctaactatcaatcaagccacga

SEQ ID NO: 54549 - DNA, 25 bp, Saccharomyces pastorianus
acagtgccgatcctaactatcaatc

SEQ ID NO: 54550 - DNA, 25 bp, Saccharomyces pastorianus
ggccgttttatggttcgcttgagca

SEQ ID NO: 54551 - DNA, 25 bp, Saccharomyces pastorianus
gcttgagcagtatttcaacgaacga

SEQ ID NO: 54552 - DNA, 25 bp, Saccharomyces pastorianus
cgatattgaccaggtcggatcccta

SEQ ID NO: 54553 - DNA, 25 bp, Saccharomyces pastorianus
ggtgatgctgatttggcatacgtaa

SEQ ID NO: 54554 - DNA, 25 bp, Saccharomyces pastorianus
agcactcaagcgatgggccgtttta

SEQ ID NO: 54555 - DNA, 25 bp, Saccharomyces pastorianus
ggttcgcttgagcagtatttcaacg

SEQ ID NO: 54556 - DNA, 25 bp, Saccharomyces pastorianus
aagccacgatattcgatattgacca

SEQ ID NO: 54557 - DNA, 25 bp, Saccharomyces pastorianus
aacgaacgaaacagtgccgatccta

SEQ ID NO: 54558 - DNA, 25 bp, Saccharomyces pastorianus
ggcacgttcgatgcgctcaagaaaa

SEQ ID NO: 54559 - DNA, 25 bp, Saccharomyces pastorianus
gacttcatcgctcaatcgtgtgctg

SEQ ID NO: 54560 - DNA, 25 bp, Saccharomyces pastorianus
tacaacggctgatcatggcgtcatc

SEQ ID NO: 54561 - DNA, 25 bp, Saccharomyces pastorianus
tggcgtcatccgtgtccaaaatgat

SEQ ID NO: 54562 - DNA, 25 bp, Saccharomyces pastorianus
aacggaacatccattgacctacaac

SEQ ID NO: 54563 - DNA, 25 bp, Saccharomyces pastorianus
cggttgttcccgttgatcaaggcaa

SEQ ID NO: 54564 - DNA, 25 bp, Saccharomyces pastorianus
gaaattcttccatggcgttttcacc

SEQ ID NO: 54565 - DNA, 25 bp, Saccharomyces pastorianus
tggtcccctcattgttaggattgtt

SEQ ID NO: 54566 - DNA, 25 bp, Saccharomyces pastorianus
ggagagcatcctacccattacaggg

SEQ ID NO: 54567 - DNA, 25 bp, Saccharomyces pastorianus
aaagtcggacgtaccagactccatt

SEQ ID NO: 54568 - DNA, 25 bp, Saccharomyces pastorianus
ataagattccattgctattcccggg

SEQ ID NO: 54569 - DNA, 25 bp, Saccharomyces pastorianus
atcattatcattaaggatgggcgac

SEQ ID NO: 54570 - DNA, 25 bp, Saccharomyces pastorianus
gatcagcttggtgacaatttccaca

SEQ ID NO: 54571 - DNA, 25 bp, Saccharomyces pastorianus
aagaaccttcagcagtatgatggaa

SEQ ID NO: 54572 - DNA, 25 bp, Saccharomyces pastorianus
gggagccatgggtcaaaggataaaa

SEQ ID NO: 54573 - DNA, 25 bp, Saccharomyces pastorianus
gaaatggccaggagatcaggaatta

SEQ ID NO: 54574 - DNA, 25 bp, Saccharomyces pastorianus
ttcagcagtatgatggaaatggcca

SEQ ID NO: 54575 - DNA, 25 bp, Saccharomyces pastorianus
atcattaaggatgggcgacgaaatt

SEQ ID NO: 54576 - DNA, 25 bp, Saccharomyces pastorianus
atacgattgatcagcttggtgacaa

SEQ ID NO: 54577 - DNA, 25 bp, Saccharomyces pastorianus
tgggcgacgaaattagaggaagtaa

SEQ ID NO: 54578 - DNA, 25 bp, Saccharomyces pastorianus
gtaatcatacgattgatcagcttgg

SEQ ID NO: 54579 - DNA, 25 bp, Saccharomyces pastorianus
gtgacaatttccacaacacctccgt

SEQ ID NO: 54580 - DNA, 25 bp, Saccharomyces pastorianus
gttccaccggttctcttagtgtaat

SEQ ID NO: 54581 - DNA, 25 bp, Saccharomyces pastorianus
aacacatttcaattgcggaggagct

SEQ ID NO: 54582 - DNA, 25 bp, Saccharomyces pastorianus
tcgtagtgactacaccgcagggtgt

SEQ ID NO: 54583 - DNA, 25 bp, Saccharomyces pastorianus
aaagcagttcatctcagacgtcgcc

SEQ ID NO: 54584 - DNA, 25 bp, Saccharomyces pastorianus
gattacctgttagttgatacgcccc

SEQ ID NO: 54585 - DNA, 25 bp, Saccharomyces pastorianus
cagggtgtggcaactgctgatgtca

SEQ ID NO: 54586 - DNA, 25 bp, Saccharomyces pastorianus
gattcatatgcccatactgtgcaga

SEQ ID NO: 54587 - DNA, 25 bp, Saccharomyces pastorianus
caaagaatcccctttatgccctatt

SEQ ID NO: 54588 - DNA, 25 bp, Saccharomyces pastorianus
aattctctgttccatatctaggcaa

SEQ ID NO: 54589 - DNA, 25 bp, Saccharomyces pastorianus
gatattctaacccagatggtggcat

SEQ ID NO: 54590 - DNA, 25 bp, Saccharomyces pastorianus
gaaagttgagactggttccaccggt

SEQ ID NO: 54591 - DNA, 25 bp, Saccharomyces pastorianus
gatgcaggagcaaaagatattctag

SEQ ID NO: 54592 - DNA, 25 bp, Saccharomyces pastorianus
gagaagatatcggaagtcgagctta

SEQ ID NO: 54593 - DNA, 25 bp, Saccharomyces pastorianus
gtatgactcgtgaaacacctgaaga

SEQ ID NO: 54594 - DNA, 25 bp, Saccharomyces pastorianus
tcaggaagaggtattaagtgggcaa

SEQ ID NO: 54595 - DNA, 25 bp, Saccharomyces pastorianus
tattaagtgggcaagagtttattca

SEQ ID NO: 54596 - DNA, 25 bp, Saccharomyces pastorianus
gtgaaacacctgaagatgtcaatga

SEQ ID NO: 54597 - DNA, 25 bp, Saccharomyces pastorianus
aagagtttattcattggtcgatagt

SEQ ID NO: 54598 - DNA, 25 bp, Saccharomyces pastorianus
gatagtatgactcgtgaaacacctg

SEQ ID NO: 54599 - DNA, 25 bp, Saccharomyces pastorianus
ttcattggtcgatagtatgactcgt

SEQ ID NO: 54600 - DNA, 25 bp, Saccharomyces pastorianus
gaagatgtcaatgatgcaggagcaa

SEQ ID NO: 54601 - DNA, 25 bp, Saccharomyces pastorianus
tatcggaagtcgagcttaagctgga

SEQ ID NO: 54602 - DNA, 25 bp, Saccharomyces pastorianus
tacgctgatagcacgaacattccat

SEQ ID NO: 54603 - DNA, 25 bp, Saccharomyces pastorianus
gagttatctaacgacccggagctta

SEQ ID NO: 54604 - DNA, 25 bp, Saccharomyces pastorianus
acattccatggacgtatgccgttga

SEQ ID NO: 54605 - DNA, 25 bp, Saccharomyces pastorianus
gcgactggaattatttgctgctaaa

SEQ ID NO: 54606 - DNA, 25 bp, Saccharomyces pastorianus
gcaacttacacttcctgactgtgaa

SEQ ID NO: 54607 - DNA, 25 bp, Saccharomyces pastorianus
gaccgtctaaaaactattgcttcaa

SEQ ID NO: 54608 - DNA, 25 bp, Saccharomyces pastorianus
aatgctctcgatgtgctctatctat

SEQ ID NO: 54609 - DNA, 25 bp, Saccharomyces pastorianus
cgccaggaaaccgacactattgagt

SEQ ID NO: 54610 - DNA, 25 bp, Saccharomyces pastorianus
ggagctatttgagacccaggatgat

SEQ ID NO: 54611 - DNA, 25 bp, Saccharomyces pastorianus
gaaaatattccttcgatccggatga

SEQ ID NO: 54612 - DNA, 25 bp, Saccharomyces pastorianus
aagttcagaacgaatctcgctccgc

SEQ ID NO: 54613 - DNA, 25 bp, Saccharomyces pastorianus
atgttgaaccaatacctctttctcc

SEQ ID NO: 54614 - DNA, 25 bp, Saccharomyces pastorianus
taccttctaaagttgccgctgtgga

SEQ ID NO: 54615 - DNA, 25 bp, Saccharomyces pastorianus
tggtatggtaaaccccggccagctt

SEQ ID NO: 54616 - DNA, 25 bp, Saccharomyces pastorianus
ggcgtccaccgtgcgtaagaacgaa

SEQ ID NO: 54617 - DNA, 25 bp, Saccharomyces pastorianus
aaagagcttactgccaatgttgaac

SEQ ID NO: 54618 - DNA, 25 bp, Saccharomyces pastorianus
ccagagggcctcgtggacgtaaatt

SEQ ID NO: 54619 - DNA, 25 bp, Saccharomyces pastorianus
gaaaaaagttgtcctcacctagcac

SEQ ID NO: 54620 - DNA, 25 bp, Saccharomyces pastorianus
atttggcatgtttactctatcccct

SEQ ID NO: 54621 - DNA, 25 bp, Saccharomyces pastorianus
ggagcacacctttaagtggcactag

SEQ ID NO: 54622 - DNA, 25 bp, Saccharomyces pastorianus
tgaatgctattcatcccatcgatct

SEQ ID NO: 54623 - DNA, 25 bp, Saccharomyces pastorianus
ggaagaatcgttgtccccagcggag

SEQ ID NO: 54624 - DNA, 25 bp, Saccharomyces pastorianus
aacatgtcgcccgagacaggctaat

SEQ ID NO: 54625 - DNA, 25 bp, Saccharomyces pastorianus
gacaggctaatcctcttggcagata

SEQ ID NO: 54626 - DNA, 25 bp, Saccharomyces pastorianus
ggctggaaaacttacacgcatcgtt

SEQ ID NO: 54627 - DNA, 25 bp, Saccharomyces pastorianus
agagacgatcatttaccaccacgat

SEQ ID NO: 54628 - DNA, 25 bp, Saccharomyces pastorianus
ataacatcccaccacggctggaaaa

SEQ ID NO: 54629 - DNA, 25 bp, Saccharomyces pastorianus
gaacggattattggaacgccctctt

SEQ ID NO: 54630 - DNA, 25 bp, Saccharomyces pastorianus
ggtgcacgctcattgaacatgtcgc

SEQ ID NO: 54631 - DNA, 25 bp, Saccharomyces pastorianus
gccctcttcaactgttcaagtcatt

SEQ ID NO: 54632 - DNA, 25 bp, Saccharomyces pastorianus
cacgaggattactggactggatttt

SEQ ID NO: 54633 - DNA, 25 bp, Saccharomyces pastorianus
tggacgactacgcatttgtgagaat

SEQ ID NO: 54634 - DNA, 25 bp, Saccharomyces pastorianus
attatcgcacgtatggtgcacgctc

SEQ ID NO: 54635 - DNA, 25 bp, Saccharomyces pastorianus
atactcctggagacggcgtactgca

SEQ ID NO: 54636 - DNA, 25 bp, Saccharomyces pastorianus
ataagagagtttacgtgcccggcgc

SEQ ID NO: 54637 - DNA, 25 bp, Saccharomyces pastorianus
tcaagttcaacacctggcacacgga

SEQ ID NO: 54638 - DNA, 25 bp, Saccharomyces pastorianus
gggttcgtcgtgatgctgctgataa

SEQ ID NO: 54639 - DNA, 25 bp, Saccharomyces pastorianus
gaagaactacctgcaggcggaccgt

SEQ ID NO: 54640 - DNA, 25 bp, Saccharomyces pastorianus
aagttcgtttattgctgtctgtaca

SEQ ID NO: 54641 - DNA, 25 bp, Saccharomyces pastorianus
tagtgtaccacatcaggctggacgt

SEQ ID NO: 54642 - DNA, 25 bp, Saccharomyces pastorianus
aggatgacgacgaaagcctggccat

SEQ ID NO: 54643 - DNA, 25 bp, Saccharomyces pastorianus
ttaaagacggatcggtgctcctgat

SEQ ID NO: 54644 - DNA, 25 bp, Saccharomyces pastorianus
tcgctgtgcgagttcgtccaagaat

SEQ ID NO: 54645 - DNA, 25 bp, Saccharomyces pastorianus
ttttcggccagcttctgatcatgaa

SEQ ID NO: 54646 - DNA, 25 bp, Saccharomyces pastorianus
aacagcacgcccagagatcagtaca

SEQ ID NO: 54647 - DNA, 25 bp, Saccharomyces pastorianus
tgtacgcccgggtgatcgcaaactt

SEQ ID NO: 54648 - DNA, 25 bp, Saccharomyces pastorianus
gagatgtcttcgttgtgctccagcc

SEQ ID NO: 54649 - DNA, 25 bp, Saccharomyces pastorianus
agcggccgggcttcttcgcaaaggc

SEQ ID NO: 54650 - DNA, 25 bp, Saccharomyces pastorianus
ccagggcgctggagatgtcttcgtt

SEQ ID NO: 54651 - DNA, 25 bp, Saccharomyces pastorianus
atcttcttccgcagaaacagcacgc

SEQ ID NO: 54652 - DNA, 25 bp, Saccharomyces pastorianus
aaacttccgcgccatagggtggtgc

SEQ ID NO: 54653 - DNA, 25 bp, Saccharomyces pastorianus
gcagcagctcgaggacggactgtac

SEQ ID NO: 54654 - DNA, 25 bp, Saccharomyces pastorianus
aaacggtctttgatcaatgcgcagt

SEQ ID NO: 54655 - DNA, 25 bp, Saccharomyces pastorianus
tggtgctcctctcgcgaaatagagt

SEQ ID NO: 54656 - DNA, 25 bp, Saccharomyces pastorianus
atgcgcagtgggacgagaagatctc

SEQ ID NO: 54657 - DNA, 25 bp, Saccharomyces pastorianus
agagcctgatctcgaacgactcgga

SEQ ID NO: 54658 - DNA, 25 bp, Saccharomyces pastorianus
atggcctgaacgtgcagatcaacaa

SEQ ID NO: 54659 - DNA, 25 bp, Saccharomyces pastorianus
ggaaggcgaagctcaacgacatcaa

SEQ ID NO: 54660 - DNA, 25 bp, Saccharomyces pastorianus
gaccgcatcgcgcagctgaacaagg

SEQ ID NO: 54661 - DNA, 25 bp, Saccharomyces pastorianus
agcggttccgcgtgcgcaagaagca

SEQ ID NO: 54662 - DNA, 25 bp, Saccharomyces pastorianus
tatccgaacatctacagagcctgat

SEQ ID NO: 54663 - DNA, 25 bp, Saccharomyces pastorianus
gaacctgaacaagctgcatggcctg

SEQ ID NO: 54664 - DNA, 25 bp, Saccharomyces pastorianus
aacagcggccaagacgtgtcgcaat

SEQ ID NO: 54665 - DNA, 25 bp, Saccharomyces pastorianus
aggcgcccgtgaacgagctggacaa

SEQ ID NO: 54666 - DNA, 25 bp, Saccharomyces pastorianus
gaacgtgaacaatctatccgaacat

SEQ ID NO: 54667 - DNA, 25 bp, Saccharomyces pastorianus
gcgtctactatcattgctactggtt

SEQ ID NO: 54668 - DNA, 25 bp, Saccharomyces pastorianus
aaaaccgtgcgctgcagtcgaaact

SEQ ID NO: 54669 - DNA, 25 bp, Saccharomyces pastorianus
aactccgcgaagtgcggcttttgta

SEQ ID NO: 54670 - DNA, 25 bp, Saccharomyces pastorianus
aactccacctgcgtgtgcaaagagc

SEQ ID NO: 54671 - DNA, 25 bp, Saccharomyces pastorianus
gcaagacagcaactccgaaaaccgt

SEQ ID NO: 54672 - DNA, 25 bp, Saccharomyces pastorianus
aaggacaactccagtgggctctgca

SEQ ID NO: 54673 - DNA, 25 bp, Saccharomyces pastorianus
aatacccataaaataccagcaccgc

SEQ ID NO: 54674 - DNA, 25 bp, Saccharomyces pastorianus
aggaccccattctgcagaacctgat

SEQ ID NO: 54675 - DNA, 25 bp, Saccharomyces pastorianus
agagctggaaactggcgccgacaaa

SEQ ID NO: 54676 - DNA, 25 bp, Saccharomyces pastorianus
aatggcgccgcgctaaaggattcct

SEQ ID NO: 54677 - DNA, 25 bp, Saccharomyces pastorianus
aaacgccagaatagggacgcccaga

SEQ ID NO: 54678 - DNA, 25 bp, Saccharomyces pastorianus
tgcaagcgctcgaggacaccataga

SEQ ID NO: 54679 - DNA, 25 bp, Saccharomyces pastorianus
aagagcgtatcggtgggcaccaacc

SEQ ID NO: 54680 - DNA, 25 bp, Saccharomyces pastorianus
attggtcattttgggtgatacccca

SEQ ID NO: 54681 - DNA, 25 bp, Saccharomyces pastorianus
aactggcaccagaaggcattgatga

SEQ ID NO: 54682 - DNA, 25 bp, Saccharomyces pastorianus
gggtgataccccaagaagagatatg

SEQ ID NO: 54683 - DNA, 25 bp, Saccharomyces pastorianus
gagatatgatcttttcggtcgcgaa

SEQ ID NO: 54684 - DNA, 25 bp, Saccharomyces pastorianus
gtagcttgtctgtgaagtccattag

SEQ ID NO: 54685 - DNA, 25 bp, Saccharomyces pastorianus
gttccaggatgtttgattgtagctt

SEQ ID NO: 54686 - DNA, 25 bp, Saccharomyces pastorianus
atggctgcaaacagacgaggttttt

SEQ ID NO: 54687 - DNA, 25 bp, Saccharomyces pastorianus
gttcggtacctctctatggagacaa

SEQ ID NO: 54688 - DNA, 25 bp, Saccharomyces pastorianus
taccccttggcatttggcgtataga

SEQ ID NO: 54689 - DNA, 25 bp, Saccharomyces pastorianus
ctgtagaagaaagccgtaccccttg

SEQ ID NO: 54690 - DNA, 25 bp, Saccharomyces pastorianus
tgcggcaatacaagtcaatggcggg

SEQ ID NO: 54691 - DNA, 25 bp, Saccharomyces pastorianus
cgttttcaagtttgccttgcggcaa

SEQ ID NO: 54692 - DNA, 25 bp, Saccharomyces pastorianus
aaaacggcacaacgagccaccataa

SEQ ID NO: 54693 - DNA, 25 bp, Saccharomyces pastorianus
accataaagcttcgcaccggtgttt

SEQ ID NO: 54694 - DNA, 25 bp, Saccharomyces pastorianus
caaacgggtcctcaattgctcaaaa

SEQ ID NO: 54695 - DNA, 25 bp, Saccharomyces pastorianus
aaacaggttgattttgccctcgtca

SEQ ID NO: 54696 - DNA, 25 bp, Saccharomyces pastorianus
agacatgtattttagcgttttcaag

SEQ ID NO: 54697 - DNA, 25 bp, Saccharomyces pastorianus
ttttgccctcgtcaatcaaacgggt

SEQ ID NO: 54698 - DNA, 25 bp, Saccharomyces pastorianus
accggtgtttttctatcatgcgaac

SEQ ID NO: 54699 - DNA, 25 bp, Saccharomyces pastorianus
gcgaactcttattgcacaggatcaa

SEQ ID NO: 54700 - DNA, 25 bp, Saccharomyces pastorianus
tgctctgccaattgaccaaactggt

SEQ ID NO: 54701 - DNA, 25 bp, Saccharomyces pastorianus
gaaaaatcgctttgttgctgtgcct

SEQ ID NO: 54702 - DNA, 25 bp, Saccharomyces pastorianus
gacctcgatttctgcctaaaggatt

SEQ ID NO: 54703 - DNA, 25 bp, Saccharomyces pastorianus
aaaaacctcgtctgtttgcagccat

SEQ ID NO: 54704 - DNA, 25 bp, Saccharomyces pastorianus
ggatgcgtctgtactgactgctata

SEQ ID NO: 54705 - DNA, 25 bp, Saccharomyces pastorianus
ggtacggctttcttctacagacgaa

SEQ ID NO: 54706 - DNA, 25 bp, Saccharomyces pastorianus
ggaagcattcctctctaatatggct

SEQ ID NO: 54707 - DNA, 25 bp, Saccharomyces pastorianus
aaggattgtcttggcttggatacta

SEQ ID NO: 54708 - DNA, 25 bp, Saccharomyces pastorianus
attgcgatccgcttttgatggagac

SEQ ID NO: 54709 - DNA, 25 bp, Saccharomyces pastorianus
aagacttccaagctatctcgtcgga

SEQ ID NO: 54710 - DNA, 25 bp, Saccharomyces pastorianus
gaattcatcaatgccttctggtgcc

SEQ ID NO: 54711 - DNA, 25 bp, Saccharomyces pastorianus
tggaacatcttctatacgccaaatg

SEQ ID NO: 54712 - DNA, 25 bp, Saccharomyces pastorianus
gcatctaatacgtcttcgccaagag

SEQ ID NO: 54713 - DNA, 25 bp, Saccharomyces pastorianus
acacccttaccgttgatgctgaata

SEQ ID NO: 54714 - DNA, 25 bp, Saccharomyces pastorianus
gtgcggctgacaaccaaactataga

SEQ ID NO: 54715 - DNA, 25 bp, Saccharomyces pastorianus
gggtctcctgcgataactgagcaag

SEQ ID NO: 54716 - DNA, 25 bp, Saccharomyces pastorianus
ccattgcgaacgtgaactccagtac

SEQ ID NO: 54717 - DNA, 25 bp, Saccharomyces pastorianus
taccccaagaaatcctgcagcagtt

SEQ ID NO: 54718 - DNA, 25 bp, Saccharomyces pastorianus
ttgagctctatacacgaacccagac

SEQ ID NO: 54719 - DNA, 25 bp, Saccharomyces pastorianus
tacaaaaggactgctcactcttcac

SEQ ID NO: 54720 - DNA, 25 bp, Saccharomyces pastorianus
agcagttgaactcctttccaaacgg

SEQ ID NO: 54721 - DNA, 25 bp, Saccharomyces pastorianus
aatgaaccctactccaaggcaaacg

SEQ ID NO: 54722 - DNA, 25 bp, Saccharomyces pastorianus
gaacgttacaccttcgcatatgaat

SEQ ID NO: 54723 - DNA, 25 bp, Saccharomyces pastorianus
aaccggtcttttaatcttgcaatgc

SEQ ID NO: 54724 - DNA, 25 bp, Saccharomyces pastorianus
aatgccgcagcgagtgtcataacaa

SEQ ID NO: 54725 - DNA, 25 bp, Saccharomyces pastorianus
aacagtatcgcgctagacacgtttt

SEQ ID NO: 54726 - DNA, 25 bp, Saccharomyces pastorianus
caccctgctcttttaggatttccta

SEQ ID NO: 54727 - DNA, 25 bp, Saccharomyces pastorianus
gacacgttttacactcgagttggaa

SEQ ID NO: 54728 - DNA, 25 bp, Saccharomyces pastorianus
tccatctactcgctagcattacagt

SEQ ID NO: 54729 - DNA, 25 bp, Saccharomyces pastorianus
gttgaatttcgatgacttccctatc

SEQ ID NO: 54730 - DNA, 25 bp, Saccharomyces pastorianus
ggatttcctaaaccagatgtcgtat

SEQ ID NO: 54731 - DNA, 25 bp, Saccharomyces pastorianus
gttccagtgtagtagcccttgcaga

SEQ ID NO: 54732 - DNA, 25 bp, Saccharomyces pastorianus
gaactcacagcacctttattggcgt

SEQ ID NO: 54733 - DNA, 25 bp, Saccharomyces pastorianus
acagtattgggactttcaccctgct

SEQ ID NO: 54734 - DNA, 25 bp, Saccharomyces pastorianus
atcatgaaccaaccaggtgatttaa

SEQ ID NO: 54735 - DNA, 25 bp, Saccharomyces pastorianus
ccaaccaggtgatttaaatgaaatt

SEQ ID NO: 54736 - DNA, 25 bp, Saccharomyces pastorianus
gatcatgaaccaaccaggtgattta

SEQ ID NO: 54737 - DNA, 25 bp, Saccharomyces pastorianus
tgatcatgaaccaaccaggtgattt

SEQ ID NO: 54738 - DNA, 25 bp, Saccharomyces pastorianus
gaaccaaccaggtgatttaaatgaa

SEQ ID NO: 54739 - DNA, 25 bp, Saccharomyces pastorianus
catgaaccaaccaggtgatttaaat

SEQ ID NO: 54740 - DNA, 25 bp, Saccharomyces pastorianus
tgaaccaaccaggtgatttaaatga

SEQ ID NO: 54741 - DNA, 25 bp, Saccharomyces pastorianus
accaaccaggtgatttaaatgaaat

SEQ ID NO: 54742 - DNA, 25 bp, Saccharomyces pastorianus
accaggtgatttaaatgaaattgct

SEQ ID NO: 54743 - DNA, 25 bp, Saccharomyces pastorianus
tcatgaaccaaccaggtgatttaaa

SEQ ID NO: 54744 - DNA, 25 bp, Saccharomyces pastorianus
atgatcatgaaccaaccaggtgatt

SEQ ID NO: 54745 - DNA, 25 bp, Saccharomyces pastorianus
gttacgagtccgaacacaagcacaa

SEQ ID NO: 54746 - DNA, 25 bp, Saccharomyces pastorianus
gttgctggtactcataacgctgtga

SEQ ID NO: 54747 - DNA, 25 bp, Saccharomyces pastorianus
agtattgccccatattctacaggaa

SEQ ID NO: 54748 - DNA, 25 bp, Saccharomyces pastorianus
aaaatatattccctcattggcggcc

SEQ ID NO: 54749 - DNA, 25 bp, Saccharomyces pastorianus
ttggacgaatttatcatgctatcag

SEQ ID NO: 54750 - DNA, 25 bp, Saccharomyces pastorianus
gtttccttattatcctacatcgtct

SEQ ID NO: 54751 - DNA, 25 bp, Saccharomyces pastorianus
ggaacaggttcaagccaataggcat

SEQ ID NO: 54752 - DNA, 25 bp, Saccharomyces pastorianus
aacacggctctatagggcatgcagt

SEQ ID NO: 54753 - DNA, 25 bp, Saccharomyces pastorianus
gtttactcataacagcgctaataat

SEQ ID NO: 54754 - DNA, 25 bp, Saccharomyces pastorianus
gttgcccagaatacgtaagctagga

SEQ ID NO: 54755 - DNA, 25 bp, Saccharomyces pastorianus
cattggcggcctataacgttttcaa

SEQ ID NO: 54756 - DNA, 25 bp, Saccharomyces pastorianus
actggctcaccagaaaggcgctata

SEQ ID NO: 54757 - DNA, 25 bp, Saccharomyces pastorianus
ttccaagcaggtgggactggctcac

SEQ ID NO: 54758 - DNA, 25 bp, Saccharomyces pastorianus
attcaccttgcacgcctgagttaaa

SEQ ID NO: 54759 - DNA, 25 bp, Saccharomyces pastorianus
gaaggctgtcccgttgatcaaagaa

SEQ ID NO: 54760 - DNA, 25 bp, Saccharomyces pastorianus
ttacttcaaatgctgtccacctatc

SEQ ID NO: 54761 - DNA, 25 bp, Saccharomyces pastorianus
cagacggagccacttacttcaaatg

SEQ ID NO: 54762 - DNA, 25 bp, Saccharomyces pastorianus
tttacctttgatgttcacccagggc

SEQ ID NO: 54763 - DNA, 25 bp, Saccharomyces pastorianus
agggctgctccttagtagatatcgt

SEQ ID NO: 54764 - DNA, 25 bp, Saccharomyces pastorianus
atatcgtctgttgggctgggtttac

SEQ ID NO: 54765 - DNA, 25 bp, Saccharomyces pastorianus
tatccgttctgaatctaaccgccag

SEQ ID NO: 54766 - DNA, 25 bp, Saccharomyces pastorianus
agaagcccgtgcttcagggctacaa

SEQ ID NO: 54767 - DNA, 25 bp, Saccharomyces pastorianus
ccagggttctttgccgatttattga

SEQ ID NO: 54768 - DNA, 25 bp, Saccharomyces pastorianus
gatgatgaactcaaatcccttagaa

SEQ ID NO: 54769 - DNA, 25 bp, Saccharomyces pastorianus
gaactcaaatcccttagaaaatatt

SEQ ID NO: 54770 - DNA, 25 bp, Saccharomyces pastorianus
tggacgacaaattaggacagattaa

SEQ ID NO: 54771 - DNA, 25 bp, Saccharomyces pastorianus
gggttctttgccgatttattgatga

SEQ ID NO: 54772 - DNA, 25 bp, Saccharomyces pastorianus
ctttgccgatttattgatgatgaac

SEQ ID NO: 54773 - DNA, 25 bp, Saccharomyces pastorianus
gattaaaccagggttctttgccgat

SEQ ID NO: 54774 - DNA, 25 bp, Saccharomyces pastorianus
aatggtctggacgacaaattaggac

SEQ ID NO: 54775 - DNA, 25 bp, Saccharomyces pastorianus
aatattgagattttggatgaaccag

SEQ ID NO: 54776 - DNA, 25 bp, Saccharomyces pastorianus
taggacagattaaaccagggttctt

SEQ ID NO: 54777 - DNA, 25 bp, Saccharomyces pastorianus
ggatgaaccagagaccaatctattg

SEQ ID NO: 54778 - DNA, 25 bp, Saccharomyces pastorianus
atggagttcatacggcgactactgc

SEQ ID NO: 54779 - DNA, 25 bp, Saccharomyces pastorianus
gagccttcgttccattctaaatttc

SEQ ID NO: 54780 - DNA, 25 bp, Saccharomyces pastorianus
aaatgcagagtaccgccacaaaccg

SEQ ID NO: 54781 - DNA, 25 bp, Saccharomyces pastorianus
atataacgctacacagctaggcagt

SEQ ID NO: 54782 - DNA, 25 bp, Saccharomyces pastorianus
gcagcggcactttaagttcaccgtt

SEQ ID NO: 54783 - DNA, 25 bp, Saccharomyces pastorianus
gagaccgatttacgttttcaaactg

SEQ ID NO: 54784 - DNA, 25 bp, Saccharomyces pastorianus
agagtgctgccagatgtcatcgatt

SEQ ID NO: 54785 - DNA, 25 bp, Saccharomyces pastorianus
gcaacgtcaggaaagcagcggcact

SEQ ID NO: 54786 - DNA, 25 bp, Saccharomyces pastorianus
gaagggcaaggttgactcagacata

SEQ ID NO: 54787 - DNA, 25 bp, Saccharomyces pastorianus
taattggccctgatactgctgttaa

SEQ ID NO: 54788 - DNA, 25 bp, Saccharomyces pastorianus
aatttcccgcaacaagagaccgatt

SEQ ID NO: 54789 - DNA, 25 bp, Saccharomyces pastorianus
tatacttctatctaactctggcttg

SEQ ID NO: 54790 - DNA, 25 bp, Saccharomyces pastorianus
atcgagagcatctaccaatgtatct

SEQ ID NO: 54791 - DNA, 25 bp, Saccharomyces pastorianus
cctgctgctctaattttacgtttct

SEQ ID NO: 54792 - DNA, 25 bp, Saccharomyces pastorianus
ccttagacttcacctggtccagggc

SEQ ID NO: 54793 - DNA, 25 bp, Saccharomyces pastorianus
tcatattgggttgtactcttcgcag

SEQ ID NO: 54794 - DNA, 25 bp, Saccharomyces pastorianus
tttcttgttcttctttagccttgtc

SEQ ID NO: 54795 - DNA, 25 bp, Saccharomyces pastorianus
ctctggcttgttttacttatttctt

SEQ ID NO: 54796 - DNA, 25 bp, Saccharomyces pastorianus
tcattcactggactgacacggtcaa

SEQ ID NO: 54797 - DNA, 25 bp, Saccharomyces pastorianus
cgccttttgttcttcattcactgga

SEQ ID NO: 54798 - DNA, 25 bp, Saccharomyces pastorianus
ctttcagcgtgtatatacttctatc

SEQ ID NO: 54799 - DNA, 25 bp, Saccharomyces pastorianus
tcgcagcctcatctgggataaatcg

SEQ ID NO: 54800 - DNA, 25 bp, Saccharomyces pastorianus
ttgtcactaacttcccgttcaaata

SEQ ID NO: 54801 - DNA, 25 bp, Saccharomyces pastorianus
agatccgttacgtctccaatattcg

SEQ ID NO: 54802 - DNA, 25 bp, Saccharomyces pastorianus
agtagaagtcccagtccacagagat

SEQ ID NO: 54803 - DNA, 25 bp, Saccharomyces pastorianus
ccaatattcgcacctgtagcattac

SEQ ID NO: 54804 - DNA, 25 bp, Saccharomyces pastorianus
tagaaatgtttcctccccattaatt

SEQ ID NO: 54805 - DNA, 25 bp, Saccharomyces pastorianus
gaaaatcatccccaaccagatacag

SEQ ID NO: 54806 - DNA, 25 bp, Saccharomyces pastorianus
agataccttatcttcgccaacaaaa

SEQ ID NO: 54807 - DNA, 25 bp, Saccharomyces pastorianus
agccttgtcttctacagatacctta

SEQ ID NO: 54808 - DNA, 25 bp, Saccharomyces pastorianus
actccacagacacagatgcgttgat

SEQ ID NO: 54809 - DNA, 25 bp, Saccharomyces pastorianus
gttgcttaaccttacctagaagtag

SEQ ID NO: 54810 - DNA, 25 bp, Saccharomyces pastorianus
aagacacttctacaaccacagttgt

SEQ ID NO: 54811 - DNA, 25 bp, Saccharomyces pastorianus
gaccgttcacgttctcatgtattgg

SEQ ID NO: 54812 - DNA, 25 bp, Saccharomyces pastorianus
gttgtacttcgccatttgtgacatt

SEQ ID NO: 54813 - DNA, 25 bp, Saccharomyces pastorianus
ataagaggctgactttcctgcacac

SEQ ID NO: 54814 - DNA, 25 bp, Saccharomyces pastorianus
gtgacattagatcttggacccaacc

SEQ ID NO: 54815 - DNA, 25 bp, Saccharomyces pastorianus
aattggtcggttacacagcagtgca

SEQ ID NO: 54816 - DNA, 25 bp, Saccharomyces pastorianus
acagccctgttgtgctacactgaat

SEQ ID NO: 54817 - DNA, 25 bp, Saccharomyces pastorianus
agtgtctgggttcgttaaccgctat

SEQ ID NO: 54818 - DNA, 25 bp, Saccharomyces pastorianus
atttattctggtgcagccatcgtca

SEQ ID NO: 54819 - DNA, 25 bp, Saccharomyces pastorianus
gccgcatatttcatggactctggtc

SEQ ID NO: 54820 - DNA, 25 bp, Saccharomyces pastorianus
atggtgtatcgccacgggttgtact

SEQ ID NO: 54821 - DNA, 25 bp, Saccharomyces pastorianus
gccatcgtcacatcttatctgtttt

SEQ ID NO: 54822 - DNA, 25 bp, Saccharomyces pastorianus
catcacatgctcatattccttggtt

SEQ ID NO: 54823 - DNA, 25 bp, Saccharomyces pastorianus
atcatgtccatctgggcagttttgc

SEQ ID NO: 54824 - DNA, 25 bp, Saccharomyces pastorianus
gaagacggatcgcttagtgatatac

SEQ ID NO: 54825 - DNA, 25 bp, Saccharomyces pastorianus
ggttaccaactctgatgatttctgc

SEQ ID NO: 54826 - DNA, 25 bp, Saccharomyces pastorianus
gtaaagcaccgccattgttattcaa

SEQ ID NO: 54827 - DNA, 25 bp, Saccharomyces pastorianus
agactccagtctaccatcaggcaat

SEQ ID NO: 54828 - DNA, 25 bp, Saccharomyces pastorianus
tgggtgggccgaacttgacattgat

SEQ ID NO: 54829 - DNA, 25 bp, Saccharomyces pastorianus
agttaatactggtcaccgccacaga

SEQ ID NO: 54830 - DNA, 25 bp, Saccharomyces pastorianus
atattccttggttcttgctggtaaa

SEQ ID NO: 54831 - DNA, 25 bp, Saccharomyces pastorianus
acaggttctgcaagtgcgggttcgt

SEQ ID NO: 54832 - DNA, 25 bp, Saccharomyces pastorianus
ggtggccctgtgatgtatagcgaat

SEQ ID NO: 54833 - DNA, 25 bp, Saccharomyces pastorianus
taagactccaggtccaggtggtcaa

SEQ ID NO: 54834 - DNA, 25 bp, Saccharomyces pastorianus
tgcccaagatgtcgccgtcaagtgt

SEQ ID NO: 54835 - DNA, 25 bp, Saccharomyces pastorianus
cgccgtccacgtcaaaatcagagct

SEQ ID NO: 54836 - DNA, 25 bp, Saccharomyces pastorianus
aggaagttggtatcaccgccgtcca

SEQ ID NO: 54837 - DNA, 25 bp, Saccharomyces pastorianus
gtccacgtcaaaatcagagctactg

SEQ ID NO: 54838 - DNA, 25 bp, Saccharomyces pastorianus
agttccatctgactcaaccagaaag

SEQ ID NO: 54839 - DNA, 25 bp, Saccharomyces pastorianus
ggctgcccaagatgtcgccgtcaag

SEQ ID NO: 54840 - DNA, 25 bp, Saccharomyces pastorianus
tgtcgccgtcaagtgtaaggaagtt

SEQ ID NO: 54841 - DNA, 25 bp, Saccharomyces pastorianus
aagatgtcgccgtcaagtgtaagga

SEQ ID NO: 54842 - DNA, 25 bp, Saccharomyces pastorianus
aagttggtatcaccgccgtccacgt

SEQ ID NO: 54843 - DNA, 25 bp, Saccharomyces pastorianus
taaggaagttggtatcaccgccgtc

SEQ ID NO: 54844 - DNA, 25 bp, Saccharomyces pastorianus
gctaagaagcaaaacagaccattgc

SEQ ID NO: 54845 - DNA, 25 bp, Saccharomyces pastorianus
taagaagcaaaacagaccattgcca

SEQ ID NO: 54846 - DNA, 25 bp, Saccharomyces pastorianus
ggctaagaagcaaaacagaccattg

SEQ ID NO: 54847 - DNA, 25 bp, Saccharomyces pastorianus
aggctaagaagcaaaacagaccatt

SEQ ID NO: 54848 - DNA, 25 bp, Saccharomyces pastorianus
ctaagaagcaaaacagaccattgcc

SEQ ID NO: 54849 - DNA, 25 bp, Saccharomyces pastorianus
agaagcaaaacagaccattgccaca

SEQ ID NO: 54850 - DNA, 25 bp, Saccharomyces pastorianus
aagaagcaaaacagaccattgccac

SEQ ID NO: 54851 - DNA, 25 bp, Saccharomyces pastorianus
gcaaaacagaccattgccacaatgg

SEQ ID NO: 54852 - DNA, 25 bp, Saccharomyces pastorianus
aagcaaaacagaccattgccacaat

SEQ ID NO: 54853 - DNA, 25 bp, Saccharomyces pastorianus
gaagcaaaacagaccattgccacaa

SEQ ID NO: 54854 - DNA, 25 bp, Saccharomyces pastorianus
agcaaaacagaccattgccacaatg

SEQ ID NO: 54855 - DNA, 25 bp, Saccharomyces pastorianus
atcaccgatgaaaacactgtccttt

SEQ ID NO: 54856 - DNA, 25 bp, Saccharomyces pastorianus
atttcttacccttctacggatgtag

SEQ ID NO: 54857 - DNA, 25 bp, Saccharomyces pastorianus
tggtagctcatgaccctgagttcaa

SEQ ID NO: 54858 - DNA, 25 bp, Saccharomyces pastorianus
tgaagtttcctctgtttcatcagcg

SEQ ID NO: 54859 - DNA, 25 bp, Saccharomyces pastorianus
tgccatgcggaaactatgtcacatt

SEQ ID NO: 54860 - DNA, 25 bp, Saccharomyces pastorianus
attaatgtgcacctttaccggcatt

SEQ ID NO: 54861 - DNA, 25 bp, Saccharomyces pastorianus
aaaaaatctcttcggctcaactgca

SEQ ID NO: 54862 - DNA, 25 bp, Saccharomyces pastorianus
acatacaattacgtgtcccaccaaa

SEQ ID NO: 54863 - DNA, 25 bp, Saccharomyces pastorianus
tgagttcaagaatctccaccatttg

SEQ ID NO: 54864 - DNA, 25 bp, Saccharomyces pastorianus
aacttttatacgacatgccatgcgg

SEQ ID NO: 54865 - DNA, 25 bp, Saccharomyces pastorianus
gcaactcagtgttattcgactacgt

SEQ ID NO: 54866 - DNA, 25 bp, Saccharomyces pastorianus
taaagggtccctctggttgcttgaa

SEQ ID NO: 54867 - DNA, 25 bp, Saccharomyces pastorianus
tactcaatttttcacttccttacct

SEQ ID NO: 54868 - DNA, 25 bp, Saccharomyces pastorianus
gaagacgaactggtttccaccacat

SEQ ID NO: 54869 - DNA, 25 bp, Saccharomyces pastorianus
ataccctttggcgtcgaggaaactg

SEQ ID NO: 54870 - DNA, 25 bp, Saccharomyces pastorianus
atgctatgtggcctaacgagtgtta

SEQ ID NO: 54871 - DNA, 25 bp, Saccharomyces pastorianus
ttcacccaacgttctactcaatttt

SEQ ID NO: 54872 - DNA, 25 bp, Saccharomyces pastorianus
tcaagcggtgcttcatggtttactt

SEQ ID NO: 54873 - DNA, 25 bp, Saccharomyces pastorianus
acctgatggtcgtatcgttcttgaa

SEQ ID NO: 54874 - DNA, 25 bp, Saccharomyces pastorianus
atcgacgcagtcttggaattccagt

SEQ ID NO: 54875 - DNA, 25 bp, Saccharomyces pastorianus
gttcttgaacaccagaggcggctcc

SEQ ID NO: 54876 - DNA, 25 bp, Saccharomyces pastorianus
attcctatacgccttactgtttaca

SEQ ID NO: 54877 - DNA, 25 bp, Saccharomyces pastorianus
tccagctaaatctgcatctgctcgt

SEQ ID NO: 54878 - DNA, 25 bp, Saccharomyces pastorianus
aatctgcatctgctcgtggctctta

SEQ ID NO: 54879 - DNA, 25 bp, Saccharomyces pastorianus
aaccaatccagctaaatctgcatct

SEQ ID NO: 54880 - DNA, 25 bp, Saccharomyces pastorianus
taaatctgcatctgctcgtggctct

SEQ ID NO: 54881 - DNA, 25 bp, Saccharomyces pastorianus
aaatctgcatctgctcgtggctctt

SEQ ID NO: 54882 - DNA, 25 bp, Saccharomyces pastorianus
aatccagctaaatctgcatctgctc

SEQ ID NO: 54883 - DNA, 25 bp, Saccharomyces pastorianus
tgcatctgctcgtggctcttacttg

SEQ ID NO: 54884 - DNA, 25 bp, Saccharomyces pastorianus
atctgctcgtggctcttacttgcgt

SEQ ID NO: 54885 - DNA, 25 bp, Saccharomyces pastorianus
atccagctaaatctgcatctgctcg

SEQ ID NO: 54886 - DNA, 25 bp, Saccharomyces pastorianus
atctgcatctgctcgtggctcttac

SEQ ID NO: 54887 - DNA, 25 bp, Saccharomyces pastorianus
gctaaatctgcatctgctcgtggct

SEQ ID NO: 54888 - DNA, 25 bp, Saccharomyces pastorianus
tccagctaaatctgcatctgctcgt

SEQ ID NO: 54889 - DNA, 25 bp, Saccharomyces pastorianus
gagaaaccgctcaagccatcaatgg

SEQ ID NO: 54890 - DNA, 25 bp, Saccharomyces pastorianus
aatctgcatctgctcgtggctctta

SEQ ID NO: 54891 - DNA, 25 bp, Saccharomyces pastorianus
taaatctgcatctgctcgtggctct

SEQ ID NO: 54892 - DNA, 25 bp, Saccharomyces pastorianus
aaccaatccagctaaatctgcatct

SEQ ID NO: 54893 - DNA, 25 bp, Saccharomyces pastorianus
aactcctctattggtagaaccgctc

SEQ ID NO: 54894 - DNA, 25 bp, Saccharomyces pastorianus
tgcatctgctcgtggctcttacttg

SEQ ID NO: 54895 - DNA, 25 bp, Saccharomyces pastorianus
atctgctcgtggctcttacttgcgt

SEQ ID NO: 54896 - DNA, 25 bp, Saccharomyces pastorianus
atccagctaaatctgcatctgctcg

SEQ ID NO: 54897 - DNA, 25 bp, Saccharomyces pastorianus
gatacggtgctacttcaaccaatcc

SEQ ID NO: 54898 - DNA, 25 bp, Saccharomyces pastorianus
gctaaatctgcatctgctcgtggct

SEQ ID NO: 54899 - DNA, 25 bp, Saccharomyces pastorianus
acttcatcgaaatccaacggtattt

SEQ ID NO: 54900 - DNA, 25 bp, Saccharomyces pastorianus
gatgacactacttttggtcaaactg

SEQ ID NO: 54901 - DNA, 25 bp, Saccharomyces pastorianus
gctgctattcctcaagacgaaacct

SEQ ID NO: 54902 - DNA, 25 bp, Saccharomyces pastorianus
ctgcagacgctgttaatgagttgtt

SEQ ID NO: 54903 - DNA, 25 bp, Saccharomyces pastorianus
gagttgttagctgctattcctcaag

SEQ ID NO: 54904 - DNA, 25 bp, Saccharomyces pastorianus
gatgcaaaacggtgtatggtattac

SEQ ID NO: 54905 - DNA, 25 bp, Saccharomyces pastorianus
ggtcaaactgtttctgcagacgctg

SEQ ID NO: 54906 - DNA, 25 bp, Saccharomyces pastorianus
gacgaaacctactcttctcaattaa

SEQ ID NO: 54907 - DNA, 25 bp, Saccharomyces pastorianus
aatgagtatttctgctacggctcct

SEQ ID NO: 54908 - DNA, 25 bp, Saccharomyces pastorianus
gtgggaatgttgtctcttttatctc

SEQ ID NO: 54909 - DNA, 25 bp, Saccharomyces pastorianus
tacggctcctactacttcatcgaaa

SEQ ID NO: 54910 - DNA, 25 bp, Saccharomyces pastorianus
ctgttcatttccgtggtccattaaa

SEQ ID NO: 54911 - DNA, 25 bp, Saccharomyces pastorianus
agaagctcttccgattggagccgtt

SEQ ID NO: 54912 - DNA, 25 bp, Saccharomyces pastorianus
aagcgggcctcagtcgtatcagaag

SEQ ID NO: 54913 - DNA, 25 bp, Saccharomyces pastorianus
gccccattggctgaatacttgtctg

SEQ ID NO: 54914 - DNA, 25 bp, Saccharomyces pastorianus
agcttattatgggttcggcggtaca

SEQ ID NO: 54915 - DNA, 25 bp, Saccharomyces pastorianus
ataatctactctaacgtttcgtgtc

SEQ ID NO: 54916 - DNA, 25 bp, Saccharomyces pastorianus
aatgctttgtcgtatgctagttcca

SEQ ID NO: 54917 - DNA, 25 bp, Saccharomyces pastorianus
gtgtctgttacacacagtcgctgca

SEQ ID NO: 54918 - DNA, 25 bp, Saccharomyces pastorianus
tactatgactccagctcgaagacag

SEQ ID NO: 54919 - DNA, 25 bp, Saccharomyces pastorianus
atagtcctttccgtgtgtgtgtgtc

SEQ ID NO: 54920 - DNA, 25 bp, Saccharomyces pastorianus
tggttttctggtgtaaacgccccat

SEQ ID NO: 54921 - DNA, 25 bp, Saccharomyces pastorianus
gacgagtaccctggattctatgaac

SEQ ID NO: 54922 - DNA, 25 bp, Saccharomyces pastorianus
ttggcgacgcacgattcattacgta

SEQ ID NO: 54923 - DNA, 25 bp, Saccharomyces pastorianus
ggtggtacctgcaattttggcaacc

SEQ ID NO: 54924 - DNA, 25 bp, Saccharomyces pastorianus
gcttggcatcgtcatagattctgta

SEQ ID NO: 54925 - DNA, 25 bp, Saccharomyces pastorianus
gtggctcatgatatcttggcgacgc

SEQ ID NO: 54926 - DNA, 25 bp, Saccharomyces pastorianus
taccaaggtttttcattttcggcat

SEQ ID NO: 54927 - DNA, 25 bp, Saccharomyces pastorianus
gtaccgctacgctttcctgaagaaa

SEQ ID NO: 54928 - DNA, 25 bp, Saccharomyces pastorianus
gaatctgcgctctttgcttggcatc

SEQ ID NO: 54929 - DNA, 25 bp, Saccharomyces pastorianus
gcatctatgcatccttggttaccaa

SEQ ID NO: 54930 - DNA, 25 bp, Saccharomyces pastorianus
aagtttccgcgactggaatctgcgc

SEQ ID NO: 54931 - DNA, 25 bp, Saccharomyces pastorianus
gctacaagagatccgcaccattcaa

SEQ ID NO: 54932 - DNA, 25 bp, Saccharomyces pastorianus
taaatcatcgggtggtgctctcgat

SEQ ID NO: 54933 - DNA, 25 bp, Saccharomyces pastorianus
tctttaaccttatgctttttctctt

SEQ ID NO: 54934 - DNA, 25 bp, Saccharomyces pastorianus
ggtgctctcgataaatcttttttca

SEQ ID NO: 54935 - DNA, 25 bp, Saccharomyces pastorianus
gctctcgataaatcttttttcaatt

SEQ ID NO: 54936 - DNA, 25 bp, Saccharomyces pastorianus
ttttcaattcctttgtggttaacat

SEQ ID NO: 54937 - DNA, 25 bp, Saccharomyces pastorianus
ttcctttgtggttaacattttcaca

SEQ ID NO: 54938 - DNA, 25 bp, Saccharomyces pastorianus
aatcatcgggtggtgctctcgataa

SEQ ID NO: 54939 - DNA, 25 bp, Saccharomyces pastorianus
ttctctttgcttaaatcatcgggtg

SEQ ID NO: 54940 - DNA, 25 bp, Saccharomyces pastorianus
gggtggtgctctcgataaatctttt

SEQ ID NO: 54941 - DNA, 25 bp, Saccharomyces pastorianus
catcgggtggtgctctcgataaatc

SEQ ID NO: 54942 - DNA, 25 bp, Saccharomyces pastorianus
gctttttctctttgcttaaatcatc

SEQ ID NO: 54943 - DNA, 25 bp, Saccharomyces pastorianus
atcctaattgatgccgatgccgaga

SEQ ID NO: 54944 - DNA, 25 bp, Saccharomyces pastorianus
aagacatcctaattgatgccgatgc

SEQ ID NO: 54945 - DNA, 25 bp, Saccharomyces pastorianus
gaagacatcctaattgatgccgatg

SEQ ID NO: 54946 - DNA, 25 bp, Saccharomyces pastorianus
acgtgtcagtttgatgatgttgaag

SEQ ID NO: 54947 - DNA, 25 bp, Saccharomyces pastorianus
taattgatgccgatgccgagatcga

SEQ ID NO: 54948 - DNA, 25 bp, Saccharomyces pastorianus
aattgatgccgatgccgagatcgat

SEQ ID NO: 54949 - DNA, 25 bp, Saccharomyces pastorianus
ctaattgatgccgatgccgagatcg

SEQ ID NO: 54950 - DNA, 25 bp, Saccharomyces pastorianus
gagaagacatcctaattgatgccga

SEQ ID NO: 54951 - DNA, 25 bp, Saccharomyces pastorianus
acatcctaattgatgccgatgccga

SEQ ID NO: 54952 - DNA, 25 bp, Saccharomyces pastorianus
gacatcctaattgatgccgatgccg

SEQ ID NO: 54953 - DNA, 25 bp, Saccharomyces pastorianus
gggagaagacatcctaattgatgcc

SEQ ID NO: 54954 - DNA, 25 bp, Saccharomyces pastorianus
aggtcttgcgtcatgcttgttatcc

SEQ ID NO: 54955 - DNA, 25 bp, Saccharomyces pastorianus
gtttttgccctcttacaagcattga

SEQ ID NO: 54956 - DNA, 25 bp, Saccharomyces pastorianus
gatggtcgtcatagcgctaagtctc

SEQ ID NO: 54957 - DNA, 25 bp, Saccharomyces pastorianus
ctcgttttactgatcgtgtcgccaa

SEQ ID NO: 54958 - DNA, 25 bp, Saccharomyces pastorianus
ggagcaatggccctagtcaggtctt

SEQ ID NO: 54959 - DNA, 25 bp, Saccharomyces pastorianus
gtatgccggcactagttctattttc

SEQ ID NO: 54960 - DNA, 25 bp, Saccharomyces pastorianus
gtgccgcggcatactgttatattac

SEQ ID NO: 54961 - DNA, 25 bp, Saccharomyces pastorianus
agcattgagtgcgttctgttcaccc

SEQ ID NO: 54962 - DNA, 25 bp, Saccharomyces pastorianus
atattccgtttctggcaagcattgt

SEQ ID NO: 54963 - DNA, 25 bp, Saccharomyces pastorianus
ttaaccccggcctattcatatatat

SEQ ID NO: 54964 - DNA, 25 bp, Saccharomyces pastorianus
aagtctccttgtcatgatccaattc

SEQ ID NO: 54965 - DNA, 25 bp, Saccharomyces pastorianus
gatgtctccggatgagatggactat

SEQ ID NO: 54966 - DNA, 25 bp, Saccharomyces pastorianus
aaacaacgcgtttgatgtctccgga

SEQ ID NO: 54967 - DNA, 25 bp, Saccharomyces pastorianus
gaagggataattaaccaagatggca

SEQ ID NO: 54968 - DNA, 25 bp, Saccharomyces pastorianus
agagttcgcccagcgttgccaagag

SEQ ID NO: 54969 - DNA, 25 bp, Saccharomyces pastorianus
atggactatttgttggaaacgacag

SEQ ID NO: 54970 - DNA, 25 bp, Saccharomyces pastorianus
gagttctggtgcttacgttgatgcc

SEQ ID NO: 54971 - DNA, 25 bp, Saccharomyces pastorianus
gaatctatcaggcagagttcgccca

SEQ ID NO: 54972 - DNA, 25 bp, Saccharomyces pastorianus
ccaagatggcattgagagttctggt

SEQ ID NO: 54973 - DNA, 25 bp, Saccharomyces pastorianus
gttgccaagagcattgacggaggaa

SEQ ID NO: 54974 - DNA, 25 bp, Saccharomyces pastorianus
gaaacgacaggaattaacgccttgg

SEQ ID NO: 54975 - DNA, 25 bp, Saccharomyces pastorianus
acgttgatgccaatgatagtacaca

SEQ ID NO: 54976 - DNA, 25 bp, Saccharomyces pastorianus
ggcacagcgtacaataccgttggaa

SEQ ID NO: 54977 - DNA, 25 bp, Saccharomyces pastorianus
gccagtgtgcaactttttaacctcc

SEQ ID NO: 54978 - DNA, 25 bp, Saccharomyces pastorianus
gtacttcagcggcacactaatggaa

SEQ ID NO: 54979 - DNA, 25 bp, Saccharomyces pastorianus
cgtccttacagcgtctcagagcaga

SEQ ID NO: 54980 - DNA, 25 bp, Saccharomyces pastorianus
acaaagtgagcgtttgtcccaaaca

SEQ ID NO: 54981 - DNA, 25 bp, Saccharomyces pastorianus
agagcagacacgtacttcagcggca

SEQ ID NO: 54982 - DNA, 25 bp, Saccharomyces pastorianus
aaagacctctttttcctcaagaatg

SEQ ID NO: 54983 - DNA, 25 bp, Saccharomyces pastorianus
gaatcgttggactcgatctatctcc

SEQ ID NO: 54984 - DNA, 25 bp, Saccharomyces pastorianus
gaattattccaagcgtccttacagc

SEQ ID NO: 54985 - DNA, 25 bp, Saccharomyces pastorianus
gatctatctccccaaaaaacctaag

SEQ ID NO: 54986 - DNA, 25 bp, Saccharomyces pastorianus
gaggtcccagacttcgctacaatga

SEQ ID NO: 54987 - DNA, 25 bp, Saccharomyces pastorianus
gaaccgatattagatagaactacat

SEQ ID NO: 54988 - DNA, 25 bp, Saccharomyces pastorianus
gtcccaggtattagaaccgatatta

SEQ ID NO: 54989 - DNA, 25 bp, Saccharomyces pastorianus
cccaggtattagaaccgatattaga

SEQ ID NO: 54990 - DNA, 25 bp, Saccharomyces pastorianus
atgtcccaggtattagaaccgatat

SEQ ID NO: 54991 - DNA, 25 bp, Saccharomyces pastorianus
gaactacatattactccatattagg

SEQ ID NO: 54992 - DNA, 25 bp, Saccharomyces pastorianus
acatattactccatattaggtctaa

SEQ ID NO: 54993 - DNA, 25 bp, Saccharomyces pastorianus
attaggtctaacatcgaatgccaca

SEQ ID NO: 54994 - DNA, 25 bp, Saccharomyces pastorianus
atattaggtctaacatcgaatgcca

SEQ ID NO: 54995 - DNA, 25 bp, Saccharomyces pastorianus
caggtattagaaccgatattagata

SEQ ID NO: 54996 - DNA, 25 bp, Saccharomyces pastorianus
tattactccatattaggtctaacat

SEQ ID NO: 54997 - DNA, 25 bp, Saccharomyces pastorianus
tactccatattaggtctaacatcga

SEQ ID NO: 54998 - DNA, 25 bp, Saccharomyces pastorianus
tgatggccaggtgcaagccactact

SEQ ID NO: 54999 - DNA, 25 bp, Saccharomyces pastorianus
ctatttatgctggtggctggtcaat

SEQ ID NO: 55000 - DNA, 25 bp, Saccharomyces pastorianus
gcaaggtactctagccattggtaat

SEQ ID NO: 55001 - DNA, 25 bp, Saccharomyces pastorianus
gcagtaagctcgacccttcaaagag

SEQ ID NO: 55002 - DNA, 25 bp, Saccharomyces pastorianus
caaaacttttacctcaactgcaact

SEQ ID NO: 55003 - DNA, 25 bp, Saccharomyces pastorianus
taggcgacggtcagttacaagtaac

SEQ ID NO: 55004 - DNA, 25 bp, Saccharomyces pastorianus
tgcagggtggtgtactcattgattc

SEQ ID NO: 55005 - DNA, 25 bp, Saccharomyces pastorianus
caaaagttgccttcggtagtgtcaa

SEQ ID NO: 55006 - DNA, 25 bp, Saccharomyces pastorianus
gtccggtactttctataatctctac

SEQ ID NO: 55007 - DNA, 25 bp, Saccharomyces pastorianus
aattggaggccagtgcagcccggtt

SEQ ID NO: 55008 - DNA, 25 bp, Saccharomyces pastorianus
ctccaccacaggctggtactattta

SEQ ID NO: 55009 - DNA, 25 bp, Saccharomyces pastorianus
aactacttcagccaagtctagcgcc

SEQ ID NO: 55010 - DNA, 25 bp, Saccharomyces pastorianus
tggtaacttagctatcggtgacaac

SEQ ID NO: 55011 - DNA, 25 bp, Saccharomyces pastorianus
taagaactcgggtactttggaaatg

SEQ ID NO: 55012 - DNA, 25 bp, Saccharomyces pastorianus
atcaccccagatggtaacttagcta

SEQ ID NO: 55013 - DNA, 25 bp, Saccharomyces pastorianus
ccgctgctgtatctcaaatcactga

SEQ ID NO: 55014 - DNA, 25 bp, Saccharomyces pastorianus
tgctgtttcctgtaagaactcgggt

SEQ ID NO: 55015 - DNA, 25 bp, Saccharomyces pastorianus
gtccaagctaccaccggtactgcta

SEQ ID NO: 55016 - DNA, 25 bp, Saccharomyces pastorianus
aaacctctactactcaagctgccag

SEQ ID NO: 55017 - DNA, 25 bp, Saccharomyces pastorianus
aagctgccagccaagtaagtgacgg

SEQ ID NO: 55018 - DNA, 25 bp, Saccharomyces pastorianus
tgaagcttcttctacctctactgac

SEQ ID NO: 55019 - DNA, 25 bp, Saccharomyces pastorianus
tactgacccagtcgatgctgtttcc

SEQ ID NO: 55020 - DNA, 25 bp, Saccharomyces pastorianus
gtttgtctggtactttctacaactt

SEQ ID NO: 55021 - DNA, 25 bp, Saccharomyces pastorianus
atgtttgtctggtactttctacaac

SEQ ID NO: 55022 - DNA, 25 bp, Saccharomyces pastorianus
gtactttctacaacttgtacgacga

SEQ ID NO: 55023 - DNA, 25 bp, Saccharomyces pastorianus
tctggtactttctacaacttgtacg

SEQ ID NO: 55024 - DNA, 25 bp, Saccharomyces pastorianus
ttgtctggtactttctacaacttgt

SEQ ID NO: 55025 - DNA, 25 bp, Saccharomyces pastorianus
tgtctggtactttctacaacttgta

SEQ ID NO: 55026 - DNA, 25 bp, Saccharomyces pastorianus
tgtttgtctggtactttctacaact

SEQ ID NO: 55027 - DNA, 25 bp, Saccharomyces pastorianus
tttgtctggtactttctacaacttg

SEQ ID NO: 55028 - DNA, 25 bp, Saccharomyces pastorianus
ttctacaacttgtacgacgaacaca

SEQ ID NO: 55029 - DNA, 25 bp, Saccharomyces pastorianus
gtctggtactttctacaacttgtac

SEQ ID NO: 55030 - DNA, 25 bp, Saccharomyces pastorianus
tggtactttctacaacttgtacgac

SEQ ID NO: 55031 - DNA, 25 bp, Saccharomyces pastorianus
ttcttcggtgcgatggcattgccta

SEQ ID NO: 55032 - DNA, 25 bp, Saccharomyces pastorianus
tctgtggaatgaccgcatgtaaaaa

SEQ ID NO: 55033 - DNA, 25 bp, Saccharomyces pastorianus
cttcgcatttgaaacttcttcggtg

SEQ ID NO: 55034 - DNA, 25 bp, Saccharomyces pastorianus
ttttctgtggaatgaccgcatgtaa

SEQ ID NO: 55035 - DNA, 25 bp, Saccharomyces pastorianus
aacttcttcggtgcgatggcattgc

SEQ ID NO: 55036 - DNA, 25 bp, Saccharomyces pastorianus
gtgcgatggcattgcctatttcctt

SEQ ID NO: 55037 - DNA, 25 bp, Saccharomyces pastorianus
gcatttgaaacttcttcggtgcgat

SEQ ID NO: 55038 - DNA, 25 bp, Saccharomyces pastorianus
gtatttttctgtggaatgaccgcat

SEQ ID NO: 55039 - DNA, 25 bp, Saccharomyces pastorianus
ttttcgggtatttttctgtggaatg

SEQ ID NO: 55040 - DNA, 25 bp, Saccharomyces pastorianus
gaaacttcttcggtgcgatggcatt

SEQ ID NO: 55041 - DNA, 25 bp, Saccharomyces pastorianus
tcggtgcgatggcattgcctatttc

SEQ ID NO: 55042 - DNA, 25 bp, Saccharomyces pastorianus
aagcaagataccttcgcatttgaaa

SEQ ID NO: 55043 - DNA, 25 bp, Saccharomyces pastorianus
tctgtggaatgaccgcatgtaaaaa

SEQ ID NO: 55044 - DNA, 25 bp, Saccharomyces pastorianus
cttcgcatttgaaacttcttcggtg

SEQ ID NO: 55045 - DNA, 25 bp, Saccharomyces pastorianus
ttttctgtggaatgaccgcatgtaa

SEQ ID NO: 55046 - DNA, 25 bp, Saccharomyces pastorianus
cattgcctatttccttttcgggtat

SEQ ID NO: 55047 - DNA, 25 bp, Saccharomyces pastorianus
gtgcgatggcattgcctatttcctt

SEQ ID NO: 55048 - DNA, 25 bp, Saccharomyces pastorianus
gcatttgaaacttcttcggtgcgat

SEQ ID NO: 55049 - DNA, 25 bp, Saccharomyces pastorianus
gtatttttctgtggaatgaccgcat

SEQ ID NO: 55050 - DNA, 25 bp, Saccharomyces pastorianus
tcttcggtgcgatggcattgcctat

SEQ ID NO: 55051 - DNA, 25 bp, Saccharomyces pastorianus
ttttcgggtatttttctgtggaatg

SEQ ID NO: 55052 - DNA, 25 bp, Saccharomyces pastorianus
gaaacttcttcggtgcgatggcatt

SEQ ID NO: 55053 - DNA, 25 bp, Saccharomyces pastorianus
gattccggtgcatggattttaacca

SEQ ID NO: 55054 - DNA, 25 bp, Saccharomyces pastorianus
agcgaatttgttgtggcatctccaa

SEQ ID NO: 55055 - DNA, 25 bp, Saccharomyces pastorianus
tgatcaccgattgtcagattttgct

SEQ ID NO: 55056 - DNA, 25 bp, Saccharomyces pastorianus
aaattccttgcctgatccaactttg

SEQ ID NO: 55057 - DNA, 25 bp, Saccharomyces pastorianus
taggtgcttctacacgttacacttc

SEQ ID NO: 55058 - DNA, 25 bp, Saccharomyces pastorianus
acacttctggccaactgaattctac

SEQ ID NO: 55059 - DNA, 25 bp, Saccharomyces pastorianus
aagttagaagatcggccaggtttag

SEQ ID NO: 55060 - DNA, 25 bp, Saccharomyces pastorianus
agaatccgacagataccccgatgat

SEQ ID NO: 55061 - DNA, 25 bp, Saccharomyces pastorianus
gaaagagccatcgttgatcaccgat

SEQ ID NO: 55062 - DNA, 25 bp, Saccharomyces pastorianus
gcaagtgctggagattccggtgcat

SEQ ID NO: 55063 - DNA, 25 bp, Saccharomyces pastorianus
tccaactccattatttgcaagtgct

SEQ ID NO: 55064 - DNA, 25 bp, Saccharomyces pastorianus
atccacaacgtttgcgaggactcgt

SEQ ID NO: 55065 - DNA, 25 bp, Saccharomyces pastorianus
ggagatctccaagagttcggtcatt

SEQ ID NO: 55066 - DNA, 25 bp, Saccharomyces pastorianus
gaagcccgtgggtgattccaaagtc

SEQ ID NO: 55067 - DNA, 25 bp, Saccharomyces pastorianus
tttgaccttcttgagctactggcta

SEQ ID NO: 55068 - DNA, 25 bp, Saccharomyces pastorianus
tccattgcctcttataaccatctag

SEQ ID NO: 55069 - DNA, 25 bp, Saccharomyces pastorianus
attgctaattggattgccttctctg

SEQ ID NO: 55070 - DNA, 25 bp, Saccharomyces pastorianus
aattcttggtggacgccggtatcaa

SEQ ID NO: 55071 - DNA, 25 bp, Saccharomyces pastorianus
gggtggccatagcagaatctccatc

SEQ ID NO: 55072 - DNA, 25 bp, Saccharomyces pastorianus
aagtctgtcttagcccaattcttgg

SEQ ID NO: 55073 - DNA, 25 bp, Saccharomyces pastorianus
gaggactcgttattggctacgccct

SEQ ID NO: 55074 - DNA, 25 bp, Saccharomyces pastorianus
gcaagttcgagagcttttatccggt

SEQ ID NO: 55075 - DNA, 25 bp, Saccharomyces pastorianus
agcgcttatgcgtttttgaccgatt

SEQ ID NO: 55076 - DNA, 25 bp, Saccharomyces pastorianus
gacatagagccacacagttgcttga

SEQ ID NO: 55077 - DNA, 25 bp, Saccharomyces pastorianus
atgagcttggctatttccattcacc

SEQ ID NO: 55078 - DNA, 25 bp, Saccharomyces pastorianus
tacgaagagaccataccgactttat

SEQ ID NO: 55079 - DNA, 25 bp, Saccharomyces pastorianus
aaggctcgaccaacgttgtagatgc

SEQ ID NO: 55080 - DNA, 25 bp, Saccharomyces pastorianus
gtgatttcccgtatgatccattcag

SEQ ID NO: 55081 - DNA, 25 bp, Saccharomyces pastorianus
aatgggagcggcaaacactttctaa

SEQ ID NO: 55082 - DNA, 25 bp, Saccharomyces pastorianus
aagtactatcctgttgtcgaggcaa

SEQ ID NO: 55083 - DNA, 25 bp, Saccharomyces pastorianus
ggcatctcacgcagtaaggctcgac

SEQ ID NO: 55084 - DNA, 25 bp, Saccharomyces pastorianus
gtgtccctgttactaaggccagacg

SEQ ID NO: 55085 - DNA, 25 bp, Saccharomyces pastorianus
gtcgaggcaaactccgattacaatt

SEQ ID NO: 55086 - DNA, 25 bp, Saccharomyces pastorianus
cccgctaccgctatatcatggacag

SEQ ID NO: 55087 - DNA, 25 bp, Saccharomyces pastorianus
accgctatatcatggacagcttatg

SEQ ID NO: 55088 - DNA, 25 bp, Saccharomyces pastorianus
cgctatatcatggacagcttatgaa

SEQ ID NO: 55089 - DNA, 25 bp, Saccharomyces pastorianus
cgctaccgctatatcatggacagct

SEQ ID NO: 55090 - DNA, 25 bp, Saccharomyces pastorianus
ccgctaccgctatatcatggacagc

SEQ ID NO: 55091 - DNA, 25 bp, Saccharomyces pastorianus
taccgctatatcatggacagcttat

SEQ ID NO: 55092 - DNA, 25 bp, Saccharomyces pastorianus
gctaccgctatatcatggacagctt

SEQ ID NO: 55093 - DNA, 25 bp, Saccharomyces pastorianus
ctaccgctatatcatggacagctta

SEQ ID NO: 55094 - DNA, 25 bp, Saccharomyces pastorianus
ccgctatatcatggacagcttatga

SEQ ID NO: 55095 - DNA, 25 bp, Saccharomyces pastorianus
gaaacacggtagaactgtccattcg

SEQ ID NO: 55096 - DNA, 25 bp, Saccharomyces pastorianus
acggtatcactgttacatttatggg

SEQ ID NO: 55097 - DNA, 25 bp, Saccharomyces pastorianus
atgacccctcatataatctccaaaa

SEQ ID NO: 55098 - DNA, 25 bp, Saccharomyces pastorianus
ttctcctccggaattaagattgcca

SEQ ID NO: 55099 - DNA, 25 bp, Saccharomyces pastorianus
gtagaaagcgccgaaatgacccctc

SEQ ID NO: 55100 - DNA, 25 bp, Saccharomyces pastorianus
cccacacaggccttcttagatttat

SEQ ID NO: 55101 - DNA, 25 bp, Saccharomyces pastorianus
agtcctgaagagtaccaacgtttga

SEQ ID NO: 55102 - DNA, 25 bp, Saccharomyces pastorianus
aatggttctcgtgaacatcccacac

SEQ ID NO: 55103 - DNA, 25 bp, Saccharomyces pastorianus
attgctgctaagtattctcctgttc

SEQ ID NO: 55104 - DNA, 25 bp, Saccharomyces pastorianus
gaaatgtcagttcatattgctgcta

SEQ ID NO: 55105 - DNA, 25 bp, Saccharomyces pastorianus
gtccattcgttatgccgtttgttga

SEQ ID NO: 55106 - DNA, 25 bp, Saccharomyces pastorianus
gaagccatccaaaaagccatcagat

SEQ ID NO: 55107 - DNA, 25 bp, Saccharomyces pastorianus
tcctcatcaatgaaatccgtcggtg

SEQ ID NO: 55108 - DNA, 25 bp, Saccharomyces pastorianus
ttatcacgttcttctgctttagcat

SEQ ID NO: 55109 - DNA, 25 bp, Saccharomyces pastorianus
gaagttgttcgtgacgcttatgata

SEQ ID NO: 55110 - DNA, 25 bp, Saccharomyces pastorianus
gttatccattggcttataccgcagc

SEQ ID NO: 55111 - DNA, 25 bp, Saccharomyces pastorianus
gtcgtagctccttctcaaactttat

SEQ ID NO: 55112 - DNA, 25 bp, Saccharomyces pastorianus
gaaatttaccagagtgtctaccgaa

SEQ ID NO: 55113 - DNA, 25 bp, Saccharomyces pastorianus
gcatctaaagctactggttatccat

SEQ ID NO: 55114 - DNA, 25 bp, Saccharomyces pastorianus
atatgctctaaatccagtctccaag

SEQ ID NO: 55115 - DNA, 25 bp, Saccharomyces pastorianus
tactggtgactccattgtcgtagct

SEQ ID NO: 55116 - DNA, 25 bp, Saccharomyces pastorianus
tcagatctacagagtacgccaacct

SEQ ID NO: 55117 - DNA, 25 bp, Saccharomyces pastorianus
tactccgccggatactaacgtcgta

SEQ ID NO: 55118 - DNA, 25 bp, Saccharomyces pastorianus
gaacgacggttctcaaaatgctgca

SEQ ID NO: 55119 - DNA, 25 bp, Saccharomyces pastorianus
gaacacacccttgttggatgacgaa

SEQ ID NO: 55120 - DNA, 25 bp, Saccharomyces pastorianus
atgctgcaagcaccgtcaacgatag

SEQ ID NO: 55121 - DNA, 25 bp, Saccharomyces pastorianus
aatagtccagcctctaccagtgaat

SEQ ID NO: 55122 - DNA, 25 bp, Saccharomyces pastorianus
ggaagcctcacgcaacgatatcgat

SEQ ID NO: 55123 - DNA, 25 bp, Saccharomyces pastorianus
aacgagtaccttgcttcgatacaga

SEQ ID NO: 55124 - DNA, 25 bp, Saccharomyces pastorianus
aacgtcgtacgagctgcatttctaa

SEQ ID NO: 55125 - DNA, 25 bp, Saccharomyces pastorianus
aaatgatgcggagggccaacctact

SEQ ID NO: 55126 - DNA, 25 bp, Saccharomyces pastorianus
aaatacctggacgttgctacaaatg

SEQ ID NO: 55127 - DNA, 25 bp, Saccharomyces pastorianus
atgggatcgtaccacatttggcgaa

SEQ ID NO: 55128 - DNA, 25 bp, Saccharomyces pastorianus
ttttgatcttaagccggcataccct

SEQ ID NO: 55129 - DNA, 25 bp, Saccharomyces pastorianus
gacgaattggtaaacttcctgaagc

SEQ ID NO: 55130 - DNA, 25 bp, Saccharomyces pastorianus
gggagatagctttccctattatgag

SEQ ID NO: 55131 - DNA, 25 bp, Saccharomyces pastorianus
gtctggttccataacgatggccacg

SEQ ID NO: 55132 - DNA, 25 bp, Saccharomyces pastorianus
agtgccttggcatttttgatcttaa

SEQ ID NO: 55133 - DNA, 25 bp, Saccharomyces pastorianus
ggtgctaggcgaaatacccgaacta

SEQ ID NO: 55134 - DNA, 25 bp, Saccharomyces pastorianus
ttcctgaagcaggtattctcaaggg

SEQ ID NO: 55135 - DNA, 25 bp, Saccharomyces pastorianus
tggccacgtttgtatcatggtgcta

SEQ ID NO: 55136 - DNA, 25 bp, Saccharomyces pastorianus
tgtcccagtggattcgtttatgtat

SEQ ID NO: 55137 - DNA, 25 bp, Saccharomyces pastorianus
gaaaccatgaggcatacctctcaat

SEQ ID NO: 55138 - DNA, 25 bp, Saccharomyces pastorianus
ggcataccctggacgttcagcacat

SEQ ID NO: 55139 - DNA, 25 bp, Saccharomyces pastorianus
agagacacaagctccaaggtgtaga

SEQ ID NO: 55140 - DNA, 25 bp, Saccharomyces pastorianus
cattcggtaaaggttctcgtatcaa

SEQ ID NO: 55141 - DNA, 25 bp, Saccharomyces pastorianus
ttgcttttcgccttgtattgaacaa

SEQ ID NO: 55142 - DNA, 25 bp, Saccharomyces pastorianus
gacactacgtcttatgaatttatca

SEQ ID NO: 55143 - DNA, 25 bp, Saccharomyces pastorianus
cacacctcatatttaacttttgcgt

SEQ ID NO: 55144 - DNA, 25 bp, Saccharomyces pastorianus
ggattccgtcattgccacagaagaa

SEQ ID NO: 55145 - DNA, 25 bp, Saccharomyces pastorianus
aaagttggcctgtgttgcttttcgc

SEQ ID NO: 55146 - DNA, 25 bp, Saccharomyces pastorianus
gtatttctggacttaccagcacctt

SEQ ID NO: 55147 - DNA, 25 bp, Saccharomyces pastorianus
tatacctcacctggattccgtcatt

SEQ ID NO: 55148 - DNA, 25 bp, Saccharomyces pastorianus
taccagcaccttgggatgctatacc

SEQ ID NO: 55149 - DNA, 25 bp, Saccharomyces pastorianus
tgagacagctgcctcattgaatgct

SEQ ID NO: 55150 - DNA, 25 bp, Saccharomyces pastorianus
gtggatgccgactctaaaaactcga

SEQ ID NO: 55151 - DNA, 25 bp, Saccharomyces pastorianus
tgtttatatccattctcccaattgc

SEQ ID NO: 55152 - DNA, 25 bp, Saccharomyces pastorianus
agaagtcttctgttgtggatgccga

SEQ ID NO: 55153 - DNA, 25 bp, Saccharomyces pastorianus
ggaaaacgccctcaagttattcaat

SEQ ID NO: 55154 - DNA, 25 bp, Saccharomyces pastorianus
agacgggctaagcttatcctttggg

SEQ ID NO: 55155 - DNA, 25 bp, Saccharomyces pastorianus
gaagctggcgatgacacgaatcaac

SEQ ID NO: 55156 - DNA, 25 bp, Saccharomyces pastorianus
gatgagattgttgaccctagcgaat

SEQ ID NO: 55157 - DNA, 25 bp, Saccharomyces pastorianus
tagcattcgctaacctggaaaacgc

SEQ ID NO: 55158 - DNA, 25 bp, Saccharomyces pastorianus
gagctccatcagcagtaacggcaat

SEQ ID NO: 55159 - DNA, 25 bp, Saccharomyces pastorianus
aagatcgcaaggtttcccagtgaaa

SEQ ID NO: 55160 - DNA, 25 bp, Saccharomyces pastorianus
aattggctagaaggctccatcgaaa

SEQ ID NO: 55161 - DNA, 25 bp, Saccharomyces pastorianus
gaactggtggtcttcctctgggtct

SEQ ID NO: 55162 - DNA, 25 bp, Saccharomyces pastorianus
agaggaagctccgttacatgaccca

SEQ ID NO: 55163 - DNA, 25 bp, Saccharomyces pastorianus
aattgcgtctatctcgaactggtgg

SEQ ID NO: 55164 - DNA, 25 bp, Saccharomyces pastorianus
ggcccgtagtgaactggctagtaag

SEQ ID NO: 55165 - DNA, 25 bp, Saccharomyces pastorianus
tcctctgggtctgccaaagtgacaa

SEQ ID NO: 55166 - DNA, 25 bp, Saccharomyces pastorianus
gagcaacttgagcttgactgacaaa

SEQ ID NO: 55167 - DNA, 25 bp, Saccharomyces pastorianus
aactgcagaacaagcttcccaaata

SEQ ID NO: 55168 - DNA, 25 bp, Saccharomyces pastorianus
gtcttgcacaagaacagctcgacct

SEQ ID NO: 55169 - DNA, 25 bp, Saccharomyces pastorianus
caggatggttctgattctgcagcag

SEQ ID NO: 55170 - DNA, 25 bp, Saccharomyces pastorianus
agctcgacctctcttcgaaaattag

SEQ ID NO: 55171 - DNA, 25 bp, Saccharomyces pastorianus
gaagaggtactacgaatccatttag

SEQ ID NO: 55172 - DNA, 25 bp, Saccharomyces pastorianus
gagccaagttccctcatttgaacat

SEQ ID NO: 55173 - DNA, 25 bp, Saccharomyces pastorianus
ttccgtggacgttttgttcgagcta

SEQ ID NO: 55174 - DNA, 25 bp, Saccharomyces pastorianus
taccagtgttttctctgcggctgat

SEQ ID NO: 55175 - DNA, 25 bp, Saccharomyces pastorianus
aaatgggtcgacgacttcgccaagt

SEQ ID NO: 55176 - DNA, 25 bp, Saccharomyces pastorianus
gccaagtgcggtgctgaccaattca

SEQ ID NO: 55177 - DNA, 25 bp, Saccharomyces pastorianus
gatcccttgtccttggtcaaacaga

SEQ ID NO: 55178 - DNA, 25 bp, Saccharomyces pastorianus
tgcggctgatccacacgatgttatc

SEQ ID NO: 55179 - DNA, 25 bp, Saccharomyces pastorianus
atcacattaggccaaccaatcgtca

SEQ ID NO: 55180 - DNA, 25 bp, Saccharomyces pastorianus
cggattggttgcacatcgatgtcat

SEQ ID NO: 55181 - DNA, 25 bp, Saccharomyces pastorianus
ggagaccattcctaaggctgccaaa

SEQ ID NO: 55182 - DNA, 25 bp, Saccharomyces pastorianus
aacgtcattgttgcaggtaccagtg

SEQ ID NO: 55183 - DNA, 25 bp, Saccharomyces pastorianus
gtgcggccaaaaccgtcgtcaaatg

SEQ ID NO: 55184 - DNA, 25 bp, Saccharomyces pastorianus
ataggctttgcaatttcgggcgtgc

SEQ ID NO: 55185 - DNA, 25 bp, Saccharomyces pastorianus
ggtttattatcgtcgacccattgat

SEQ ID NO: 55186 - DNA, 25 bp, Saccharomyces pastorianus
gtctgcgaatcgtggccatcaagag

SEQ ID NO: 55187 - DNA, 25 bp, Saccharomyces pastorianus
gtatatacatgggtcgcttcccgca

SEQ ID NO: 55188 - DNA, 25 bp, Saccharomyces pastorianus
gcagcagcggaatcatccttggtat

SEQ ID NO: 55189 - DNA, 25 bp, Saccharomyces pastorianus
gatccgacattctgtatcaactgta

SEQ ID NO: 55190 - DNA, 25 bp, Saccharomyces pastorianus
ttcttctcgtccagttttgttgatc

SEQ ID NO: 55191 - DNA, 25 bp, Saccharomyces pastorianus
ggcgcacagcatatatactctagga

SEQ ID NO: 55192 - DNA, 25 bp, Saccharomyces pastorianus
ttggtatgatctgccgctgtcggaa

SEQ ID NO: 55193 - DNA, 25 bp, Saccharomyces pastorianus
atggaggtccaaatgatcgccgttc

SEQ ID NO: 55194 - DNA, 25 bp, Saccharomyces pastorianus
aggcgcgtttgatatgcgagaaaaa

SEQ ID NO: 55195 - DNA, 25 bp, Saccharomyces pastorianus
gcgcgtttgatatgcgagaaaaaaa

SEQ ID NO: 55196 - DNA, 25 bp, Saccharomyces pastorianus
ataggcgcgtttgatatgcgagaaa

SEQ ID NO: 55197 - DNA, 25 bp, Saccharomyces pastorianus
aagataggcgcgtttgatatgcgag

SEQ ID NO: 55198 - DNA, 25 bp, Saccharomyces pastorianus
taagataggcgcgtttgatatgcga

SEQ ID NO: 55199 - DNA, 25 bp, Saccharomyces pastorianus
gataggcgcgtttgatatgcgagaa

SEQ ID NO: 55200 - DNA, 25 bp, Saccharomyces pastorianus
ggcgcgtttgatatgcgagaaaaaa

SEQ ID NO: 55201 - DNA, 25 bp, Saccharomyces pastorianus
cgcgtttgatatgcgagaaaaaaaa

SEQ ID NO: 55202 - DNA, 25 bp, Saccharomyces pastorianus
tgcgagaaaaaaaaactttacagag

SEQ ID NO: 55203 - DNA, 25 bp, Saccharomyces pastorianus
agataggcgcgtttgatatgcgaga

SEQ ID NO: 55204 - DNA, 25 bp, Saccharomyces pastorianus
taggcgcgtttgatatgcgagaaaa

SEQ ID NO: 55205 - DNA, 25 bp, Saccharomyces pastorianus
gagacagtttccagctgcaacaatg

SEQ ID NO: 55206 - DNA, 25 bp, Saccharomyces pastorianus
ttaccgcacctatcaatgctacttg

SEQ ID NO: 55207 - DNA, 25 bp, Saccharomyces pastorianus
ggtggtcatccaactgagagcctaa

SEQ ID NO: 55208 - DNA, 25 bp, Saccharomyces pastorianus
gtagcgcgaaaaccgatgccaccgt

SEQ ID NO: 55209 - DNA, 25 bp, Saccharomyces pastorianus
aatggaatagtctcaaccgccgcaa

SEQ ID NO: 55210 - DNA, 25 bp, Saccharomyces pastorianus
tatccttccatatggcgtctatcaa

SEQ ID NO: 55211 - DNA, 25 bp, Saccharomyces pastorianus
gccaccgtatctcattttaaaccgt

SEQ ID NO: 55212 - DNA, 25 bp, Saccharomyces pastorianus
cagccaattcttcagcgacgtttaa

SEQ ID NO: 55213 - DNA, 25 bp, Saccharomyces pastorianus
gcgactatcctttatccgctaaatt

SEQ ID NO: 55214 - DNA, 25 bp, Saccharomyces pastorianus
gagagcctaactggcgactatcctt

SEQ ID NO: 55215 - DNA, 25 bp, Saccharomyces pastorianus
aaatcagatccacgatgtcttcacc

SEQ ID NO: 55216 - DNA, 25 bp, Saccharomyces pastorianus
tcatgctacaacacttgacagctat

SEQ ID NO: 55217 - DNA, 25 bp, Saccharomyces pastorianus
gaaataatgtgttcgagtcaaattc

SEQ ID NO: 55218 - DNA, 25 bp, Saccharomyces pastorianus
gcatctcatgctacaacacttgaca

SEQ ID NO: 55219 - DNA, 25 bp, Saccharomyces pastorianus
gacagctatgacactaggaaaagaa

SEQ ID NO: 55220 - DNA, 25 bp, Saccharomyces pastorianus
acttgacagctatgacactaggaaa

SEQ ID NO: 55221 - DNA, 25 bp, Saccharomyces pastorianus
atggcatctcatgctacaacacttg

SEQ ID NO: 55222 - DNA, 25 bp, Saccharomyces pastorianus
attcaaatgaaaccctaacaatcca

SEQ ID NO: 55223 - DNA, 25 bp, Saccharomyces pastorianus
tacaacacttgacagctatgacact

SEQ ID NO: 55224 - DNA, 25 bp, Saccharomyces pastorianus
aacacttgacagctatgacactagg

SEQ ID NO: 55225 - DNA, 25 bp, Saccharomyces pastorianus
aatgtgttcgagtcaaattcaaatg

SEQ ID NO: 55226 - DNA, 25 bp, Saccharomyces pastorianus
gaaaccctaacaatccaaatcaaag

SEQ ID NO: 55227 - DNA, 25 bp, Saccharomyces pastorianus
gctagcgtttttcaagttcttcaat

SEQ ID NO: 55228 - DNA, 25 bp, Saccharomyces pastorianus
gaaagctggttggttcttcttccac

SEQ ID NO: 55229 - DNA, 25 bp, Saccharomyces pastorianus
ggcttcctgtacctcgactgaaaag

SEQ ID NO: 55230 - DNA, 25 bp, Saccharomyces pastorianus
tgtcgaacacatgaaggcttcctgt

SEQ ID NO: 55231 - DNA, 25 bp, Saccharomyces pastorianus
gagaggtatcatcacttcctacttc

SEQ ID NO: 55232 - DNA, 25 bp, Saccharomyces pastorianus
gagcccaccgatatcttattaaaga

SEQ ID NO: 55233 - DNA, 25 bp, Saccharomyces pastorianus
ggtgattaattctttgacctcctca

SEQ ID NO: 55234 - DNA, 25 bp, Saccharomyces pastorianus
gacctcctcattgaagtttgacaga

SEQ ID NO: 55235 - DNA, 25 bp, Saccharomyces pastorianus
taaggcaattggagctttagcgtct

SEQ ID NO: 55236 - DNA, 25 bp, Saccharomyces pastorianus
acttgttcctgttatagccgagctg

SEQ ID NO: 55237 - DNA, 25 bp, Saccharomyces pastorianus
cacgtatttgttagagcccaccgat

SEQ ID NO: 55238 - DNA, 25 bp, Saccharomyces pastorianus
gctgccatggaaactatgctctcga

SEQ ID NO: 55239 - DNA, 25 bp, Saccharomyces pastorianus
ttgctactgccttgcctttgaaaaa

SEQ ID NO: 55240 - DNA, 25 bp, Saccharomyces pastorianus
accatcttggttgtgtttgctactg

SEQ ID NO: 55241 - DNA, 25 bp, Saccharomyces pastorianus
aaccagctcgttccaattttacttg

SEQ ID NO: 55242 - DNA, 25 bp, Saccharomyces pastorianus
aatttctgccaaacttctagcttcg

SEQ ID NO: 55243 - DNA, 25 bp, Saccharomyces pastorianus
gtttgacagcaaattcggcacagca

SEQ ID NO: 55244 - DNA, 25 bp, Saccharomyces pastorianus
aagttcatcacctcctatactagag

SEQ ID NO: 55245 - DNA, 25 bp, Saccharomyces pastorianus
aaaccagcttctgttcacaacgtgc

SEQ ID NO: 55246 - DNA, 25 bp, Saccharomyces pastorianus
aaattgctgcacacaccatcttggt

SEQ ID NO: 55247 - DNA, 25 bp, Saccharomyces pastorianus
actcagcgcttgtcacaatctgtaa

SEQ ID NO: 55248 - DNA, 25 bp, Saccharomyces pastorianus
acagcatctgttatagcgttcctag

SEQ ID NO: 55249 - DNA, 25 bp, Saccharomyces pastorianus
agggctgacatattagtgtccgcta

SEQ ID NO: 55250 - DNA, 25 bp, Saccharomyces pastorianus
ggtgtattgcaatcgttacctctcg

SEQ ID NO: 55251 - DNA, 25 bp, Saccharomyces pastorianus
gttacctctcgatgctgaaattttt

SEQ ID NO: 55252 - DNA, 25 bp, Saccharomyces pastorianus
aagacttatcagtgtattcccttca

SEQ ID NO: 55253 - DNA, 25 bp, Saccharomyces pastorianus
gtgtccgctatcagaaattcgccat

SEQ ID NO: 55254 - DNA, 25 bp, Saccharomyces pastorianus
ctgaaaaacttttgtccactctgtt

SEQ ID NO: 55255 - DNA, 25 bp, Saccharomyces pastorianus
ttcctgtatgctaaacaccatcacc

SEQ ID NO: 55256 - DNA, 25 bp, Saccharomyces pastorianus
gaggtgtctcaactggctgaattac

SEQ ID NO: 55257 - DNA, 25 bp, Saccharomyces pastorianus
aattgggtctcttgctactttgagc

SEQ ID NO: 55258 - DNA, 25 bp, Saccharomyces pastorianus
agaccctggaccaagacggtggatt

SEQ ID NO: 55259 - DNA, 25 bp, Saccharomyces pastorianus
ggattaccagttttatacgcacaag

SEQ ID NO: 55260 - DNA, 25 bp, Saccharomyces pastorianus
tacgctatcatttactccttgtttt

SEQ ID NO: 55261 - DNA, 25 bp, Saccharomyces pastorianus
gccatgttacctgcaatctttgttc

SEQ ID NO: 55262 - DNA, 25 bp, Saccharomyces pastorianus
ttggctgcattcgttatcggtgtta

SEQ ID NO: 55263 - DNA, 25 bp, Saccharomyces pastorianus
gcttcccaaaactctttactttctg

SEQ ID NO: 55264 - DNA, 25 bp, Saccharomyces pastorianus
gtaatggaagtactgccacctccag

SEQ ID NO: 55265 - DNA, 25 bp, Saccharomyces pastorianus
atcttgcagtggttatgtcgtgaca

SEQ ID NO: 55266 - DNA, 25 bp, Saccharomyces pastorianus
gcggtccgtatgttttacgctatca

SEQ ID NO: 55267 - DNA, 25 bp, Saccharomyces pastorianus
gcaattgcccgttatggttttcata

SEQ ID NO: 55268 - DNA, 25 bp, Saccharomyces pastorianus
gtaggattatttgcctcatcgctct

SEQ ID NO: 55269 - DNA, 25 bp, Saccharomyces pastorianus
gaatttactgctgctttggctgcat

SEQ ID NO: 55270 - DNA, 25 bp, Saccharomyces pastorianus
ggtttcggtatcacgctgggctcag

SEQ ID NO: 55271 - DNA, 25 bp, Saccharomyces pastorianus
ggtgtattcatttcaaagtcttgtg

SEQ ID NO: 55272 - DNA, 25 bp, Saccharomyces pastorianus
tggataccctaccagatcttgacaa

SEQ ID NO: 55273 - DNA, 25 bp, Saccharomyces pastorianus
ctaaggaatcctatttgcgagttga

SEQ ID NO: 55274 - DNA, 25 bp, Saccharomyces pastorianus
gattatcgcttgatgggtacaacac

SEQ ID NO: 55275 - DNA, 25 bp, Saccharomyces pastorianus
taagaccgcttaacgaaaggccaag

SEQ ID NO: 55276 - DNA, 25 bp, Saccharomyces pastorianus
gacgaagttgtgaacctaacgtaga

SEQ ID NO: 55277 - DNA, 25 bp, Saccharomyces pastorianus
gccaaaactgccctataactaaaat

SEQ ID NO: 55278 - DNA, 25 bp, Saccharomyces pastorianus
gaatacctaggcgaaattgactttc

SEQ ID NO: 55279 - DNA, 25 bp, Saccharomyces pastorianus
aaaagtactatttcacccacactgg

SEQ ID NO: 55280 - DNA, 25 bp, Saccharomyces pastorianus
acccacactggcctttatttataga

SEQ ID NO: 55281 - DNA, 25 bp, Saccharomyces pastorianus
gggtcacgtttgtcttaatggctac

SEQ ID NO: 55282 - DNA, 25 bp, Saccharomyces pastorianus
aaagaagtgttttcggccatcattc

SEQ ID NO: 55283 - DNA, 25 bp, Saccharomyces pastorianus
gcctgttccagttttcttctatagt

SEQ ID NO: 55284 - DNA, 25 bp, Saccharomyces pastorianus
tggtccaacacctatgcatttgctt

SEQ ID NO: 55285 - DNA, 25 bp, Saccharomyces pastorianus
tagtgcgtgtatctgcggctcaagt

SEQ ID NO: 55286 - DNA, 25 bp, Saccharomyces pastorianus
aaagttctaaggtccaggccactca

SEQ ID NO: 55287 - DNA, 25 bp, Saccharomyces pastorianus
atagcagcggccgtagctctggcaa

SEQ ID NO: 55288 - DNA, 25 bp, Saccharomyces pastorianus
atatctcctcaatatatgcccgtga

SEQ ID NO: 55289 - DNA, 25 bp, Saccharomyces pastorianus
gcaaaacaccactaccattgactgt

SEQ ID NO: 55290 - DNA, 25 bp, Saccharomyces pastorianus
aaatgggagatcagcgcctgttcca

SEQ ID NO: 55291 - DNA, 25 bp, Saccharomyces pastorianus
atgcccgtgagaacattcaacccaa

SEQ ID NO: 55292 - DNA, 25 bp, Saccharomyces pastorianus
aacccaatggctacagctggtccaa

SEQ ID NO: 55293 - DNA, 25 bp, Saccharomyces pastorianus
actttcctttgtacgggtgctcaat

SEQ ID NO: 55294 - DNA, 25 bp, Saccharomyces pastorianus
ggaagctggccaactttcctttgta

SEQ ID NO: 55295 - DNA, 25 bp, Saccharomyces pastorianus
aagctcttgacgatttaccaaccaa

SEQ ID NO: 55296 - DNA, 25 bp, Saccharomyces pastorianus
aggcgattggactttaccgttagat

SEQ ID NO: 55297 - DNA, 25 bp, Saccharomyces pastorianus
agttctaccttacacactatcacag

SEQ ID NO: 55298 - DNA, 25 bp, Saccharomyces pastorianus
gatccatcccctaatatttctacag

SEQ ID NO: 55299 - DNA, 25 bp, Saccharomyces pastorianus
agaaccggttatggacttgagtctt

SEQ ID NO: 55300 - DNA, 25 bp, Saccharomyces pastorianus
gtattacaggatttgacaggcgcga

SEQ ID NO: 55301 - DNA, 25 bp, Saccharomyces pastorianus
agatgaatcttgtccgatatcttcg

SEQ ID NO: 55302 - DNA, 25 bp, Saccharomyces pastorianus
gaaacctaattctcaaagctcttga

SEQ ID NO: 55303 - DNA, 25 bp, Saccharomyces pastorianus
tgttcctcctgatatcagttctacc

SEQ ID NO: 55304 - DNA, 25 bp, Saccharomyces pastorianus
agaagacctttggaacgccacactg

SEQ ID NO: 55305 - DNA, 25 bp, Saccharomyces pastorianus
gattcgaccctgtcagttgtcaaga

SEQ ID NO: 55306 - DNA, 25 bp, Saccharomyces pastorianus
acagtagtagaccttctggccaaga

SEQ ID NO: 55307 - DNA, 25 bp, Saccharomyces pastorianus
acggttctgtgagcgttggctagat

SEQ ID NO: 55308 - DNA, 25 bp, Saccharomyces pastorianus
gaaattttgggcctgaccatgcttc

SEQ ID NO: 55309 - DNA, 25 bp, Saccharomyces pastorianus
gacgcctgccaaaataaccgacgaa

SEQ ID NO: 55310 - DNA, 25 bp, Saccharomyces pastorianus
acaaactttgcgaccagctgggaat

SEQ ID NO: 55311 - DNA, 25 bp, Saccharomyces pastorianus
gtgcgcagcaagattctcattctat

SEQ ID NO: 55312 - DNA, 25 bp, Saccharomyces pastorianus
gatgcggtagcctgtctcagaacaa

SEQ ID NO: 55313 - DNA, 25 bp, Saccharomyces pastorianus
ctcattctatccagcgtcggagatg

SEQ ID NO: 55314 - DNA, 25 bp, Saccharomyces pastorianus
catgcttcgcacttggcattgggag

SEQ ID NO: 55315 - DNA, 25 bp, Saccharomyces pastorianus
aggcgagttcgtcatgccaacagca

SEQ ID NO: 55316 - DNA, 25 bp, Saccharomyces pastorianus
aatcgcccatatttagtgacagagg

SEQ ID NO: 55317 - DNA, 25 bp, Saccharomyces pastorianus
cttacccattattccttcagaactt

SEQ ID NO: 55318 - DNA, 25 bp, Saccharomyces pastorianus
gttcccgcaactacaaactcgttga

SEQ ID NO: 55319 - DNA, 25 bp, Saccharomyces pastorianus
gtgttcaggattcacaatcgcccat

SEQ ID NO: 55320 - DNA, 25 bp, Saccharomyces pastorianus
attgaaattcataaggccggtggcc

SEQ ID NO: 55321 - DNA, 25 bp, Saccharomyces pastorianus
gagggtgaccgggttattcttccat

SEQ ID NO: 55322 - DNA, 25 bp, Saccharomyces pastorianus
gccggtggccaggatgacacctata

SEQ ID NO: 55323 - DNA, 25 bp, Saccharomyces pastorianus
tatatttaggccacttacccattat

SEQ ID NO: 55324 - DNA, 25 bp, Saccharomyces pastorianus
gtaacgactataggttcccgcaact

SEQ ID NO: 55325 - DNA, 25 bp, Saccharomyces pastorianus
gatcatccgattgatacttcgctgt

SEQ ID NO: 55326 - DNA, 25 bp, Saccharomyces pastorianus
tggtctttgggatgcatagttctag

SEQ ID NO: 55327 - DNA, 25 bp, Saccharomyces pastorianus
gtaagcgtccatggtcgaacctaga

SEQ ID NO: 55328 - DNA, 25 bp, Saccharomyces pastorianus
acacatgttggacgaagctttttag

SEQ ID NO: 55329 - DNA, 25 bp, Saccharomyces pastorianus
tgcactctaaaggtattcttcacag

SEQ ID NO: 55330 - DNA, 25 bp, Saccharomyces pastorianus
aggcccactgcgactaaacttttgt

SEQ ID NO: 55331 - DNA, 25 bp, Saccharomyces pastorianus
gaaggtctggcatatttgcactcta

SEQ ID NO: 55332 - DNA, 25 bp, Saccharomyces pastorianus
acatgaccatgcgagggaccgtctt

SEQ ID NO: 55333 - DNA, 25 bp, Saccharomyces pastorianus
cgaacctagaagttgttgctgcaat

SEQ ID NO: 55334 - DNA, 25 bp, Saccharomyces pastorianus
aatcaaccaggctagcgaagtttat

SEQ ID NO: 55335 - DNA, 25 bp, Saccharomyces pastorianus
agcggacaatttgcttttggatcaa

SEQ ID NO: 55336 - DNA, 25 bp, Saccharomyces pastorianus
ttgggaagtccaaatctgctccgcc

SEQ ID NO: 55337 - DNA, 25 bp, Saccharomyces pastorianus
tatacctccagatatcctcaacaat

SEQ ID NO: 55338 - DNA, 25 bp, Saccharomyces pastorianus
atgcgccgccgttatctgaggacga

SEQ ID NO: 55339 - DNA, 25 bp, Saccharomyces pastorianus
tagctcctccgacgatattatatgg

SEQ ID NO: 55340 - DNA, 25 bp, Saccharomyces pastorianus
acgtctgcagccgacatatttgaag

SEQ ID NO: 55341 - DNA, 25 bp, Saccharomyces pastorianus
aatgacttttagaccatctccagaa

SEQ ID NO: 55342 - DNA, 25 bp, Saccharomyces pastorianus
gataatgattccacgcattctgatg

SEQ ID NO: 55343 - DNA, 25 bp, Saccharomyces pastorianus
attgctcatgaagctagcctagcga

SEQ ID NO: 55344 - DNA, 25 bp, Saccharomyces pastorianus
gtgataacaacgactctagctcctc

SEQ ID NO: 55345 - DNA, 25 bp, Saccharomyces pastorianus
tttcccagggctaacctcgataagc

SEQ ID NO: 55346 - DNA, 25 bp, Saccharomyces pastorianus
agagttgtttcttccacgtctgcag

SEQ ID NO: 55347 - DNA, 25 bp, Saccharomyces pastorianus
taactgaaggaatagcctcccctac

SEQ ID NO: 55348 - DNA, 25 bp, Saccharomyces pastorianus
cacccctcaggtttccattaaatga

SEQ ID NO: 55349 - DNA, 25 bp, Saccharomyces pastorianus
tagaagagctggtcggcaacctggt

SEQ ID NO: 55350 - DNA, 25 bp, Saccharomyces pastorianus
agaattctggatatcgcccgacaca

SEQ ID NO: 55351 - DNA, 25 bp, Saccharomyces pastorianus
gaatacgcgctaggcgattctgaag

SEQ ID NO: 55352 - DNA, 25 bp, Saccharomyces pastorianus
aattacaccggatatgcctattgaa

SEQ ID NO: 55353 - DNA, 25 bp, Saccharomyces pastorianus
gtacattcgccaactgcatttgaga

SEQ ID NO: 55354 - DNA, 25 bp, Saccharomyces pastorianus
cttttcggattggtcgtacattcgc

SEQ ID NO: 55355 - DNA, 25 bp, Saccharomyces pastorianus
gaagagctatacaaggtcatcgcca

SEQ ID NO: 55356 - DNA, 25 bp, Saccharomyces pastorianus
agattacacgcttaccttttcggat

SEQ ID NO: 55357 - DNA, 25 bp, Saccharomyces pastorianus
tttggagtacgtttcttctgcagaa

SEQ ID NO: 55358 - DNA, 25 bp, Saccharomyces pastorianus
atgaacctcactttgcctttatgac

SEQ ID NO: 55359 - DNA, 25 bp, Saccharomyces pastorianus
gttggtcttccaatatcatccttat

SEQ ID NO: 55360 - DNA, 25 bp, Saccharomyces pastorianus
gaaagggtttcttcaatgctaacag

SEQ ID NO: 55361 - DNA, 25 bp, Saccharomyces pastorianus
ggtatcttatcattcttaggctatt

SEQ ID NO: 55362 - DNA, 25 bp, Saccharomyces pastorianus
aagccttctgcttggaaccgttgga

SEQ ID NO: 55363 - DNA, 25 bp, Saccharomyces pastorianus
tgtttattcattgctgtcgtttcag

SEQ ID NO: 55364 - DNA, 25 bp, Saccharomyces pastorianus
cattctcattagtcagttggtcttc

SEQ ID NO: 55365 - DNA, 25 bp, Saccharomyces pastorianus
ttaggctattgctcgatctttcttt

SEQ ID NO: 55366 - DNA, 25 bp, Saccharomyces pastorianus
ttacaatagacgcttcacccatggt

SEQ ID NO: 55367 - DNA, 25 bp, Saccharomyces pastorianus
aaccggcctttgtatatggagtgca

SEQ ID NO: 55368 - DNA, 25 bp, Saccharomyces pastorianus
gtttcacttttggttttgcttgcat

SEQ ID NO: 55369 - DNA, 25 bp, Saccharomyces pastorianus
ttcagtaactccattaaccggcctt

SEQ ID NO: 55370 - DNA, 25 bp, Saccharomyces pastorianus
gtagcgtggacaatcatatccttgg

SEQ ID NO: 55371 - DNA, 25 bp, Saccharomyces pastorianus
gatcaatgcctctatggccggaaat

SEQ ID NO: 55372 - DNA, 25 bp, Saccharomyces pastorianus
gagactcaccgtacgacaggaattg

SEQ ID NO: 55373 - DNA, 25 bp, Saccharomyces pastorianus
ggaatcgatcaaacttacccacaga

SEQ ID NO: 55374 - DNA, 25 bp, Saccharomyces pastorianus
tatccttggagccattaacccgcaa

SEQ ID NO: 55375 - DNA, 25 bp, Saccharomyces pastorianus
atccttcatcgtgggcatgtggctt

SEQ ID NO: 55376 - DNA, 25 bp, Saccharomyces pastorianus
tggataagccatcgagactcaccgt

SEQ ID NO: 55377 - DNA, 25 bp, Saccharomyces pastorianus
gcatgtggcttgtcgatcaatgcct

SEQ ID NO: 55378 - DNA, 25 bp, Saccharomyces pastorianus
cacattgctgataacgtcctggata

SEQ ID NO: 55379 - DNA, 25 bp, Saccharomyces pastorianus
tggcccactctcactaatgaagaca

SEQ ID NO: 55380 - DNA, 25 bp, Saccharomyces pastorianus
aacaggtacctgtatctacgcctgc

SEQ ID NO: 55381 - DNA, 25 bp, Saccharomyces pastorianus
aaaaggccttctgatgtgtcatccg

SEQ ID NO: 55382 - DNA, 25 bp, Saccharomyces pastorianus
aagcgttgacgaggtgcttcctcca

SEQ ID NO: 55383 - DNA, 25 bp, Saccharomyces pastorianus
gtcgtcttctttcatttccgatgaa

SEQ ID NO: 55384 - DNA, 25 bp, Saccharomyces pastorianus
gcgagaatcggactacactgcaatg

SEQ ID NO: 55385 - DNA, 25 bp, Saccharomyces pastorianus
atcgcatgatatttccgagcgctcg

SEQ ID NO: 55386 - DNA, 25 bp, Saccharomyces pastorianus
ggaaaagccctctgaaacctcacag

SEQ ID NO: 55387 - DNA, 25 bp, Saccharomyces pastorianus
tagtctcgcatccagggtctcggaa

SEQ ID NO: 55388 - DNA, 25 bp, Saccharomyces pastorianus
gcactctgcctgatctaataccaag

SEQ ID NO: 55389 - DNA, 25 bp, Saccharomyces pastorianus
agagctctccgtttcttcctatagt

SEQ ID NO: 55390 - DNA, 25 bp, Saccharomyces pastorianus
gccaaggcttaagaccaggctttta

SEQ ID NO: 55391 - DNA, 25 bp, Saccharomyces pastorianus
gtatcttactctacttctctgtcat

SEQ ID NO: 55392 - DNA, 25 bp, Saccharomyces pastorianus
gcatatccagctgctctttacgaaa

SEQ ID NO: 55393 - DNA, 25 bp, Saccharomyces pastorianus
gagtatcataatcctgccatcgact

SEQ ID NO: 55394 - DNA, 25 bp, Saccharomyces pastorianus
tcctgtccatgaactatcctatttc

SEQ ID NO: 55395 - DNA, 25 bp, Saccharomyces pastorianus
agggcccaaaattacgctgctgatt

SEQ ID NO: 55396 - DNA, 25 bp, Saccharomyces pastorianus
attcaatagcaacatctcctgtcca

SEQ ID NO: 55397 - DNA, 25 bp, Saccharomyces pastorianus
aacctattactatccctgactttga

SEQ ID NO: 55398 - DNA, 25 bp, Saccharomyces pastorianus
gcgatgccgaaaaaggcctggcctt

SEQ ID NO: 55399 - DNA, 25 bp, Saccharomyces pastorianus
aggcctggccttgttagacgaaatt

SEQ ID NO: 55400 - DNA, 25 bp, Saccharomyces pastorianus
gaagctgaacctgaaagaaccacta

SEQ ID NO: 55401 - DNA, 25 bp, Saccharomyces pastorianus
atcgactccgaagatcctgatcaag

SEQ ID NO: 55402 - DNA, 25 bp, Saccharomyces pastorianus
tttgacgcaccatctctgttaggaa

SEQ ID NO: 55403 - DNA, 25 bp, Saccharomyces pastorianus
caacgccggcacaggaataaccagt

SEQ ID NO: 55404 - DNA, 25 bp, Saccharomyces pastorianus
aaactgcttcatcttgctctactac

SEQ ID NO: 55405 - DNA, 25 bp, Saccharomyces pastorianus
gcactgggatcaagcaacctgctag

SEQ ID NO: 55406 - DNA, 25 bp, Saccharomyces pastorianus
gccaaatccaattcgtaccacaacg

SEQ ID NO: 55407 - DNA, 25 bp, Saccharomyces pastorianus
gaagtaaccacttctcgttccgtgg

SEQ ID NO: 55408 - DNA, 25 bp, Saccharomyces pastorianus
aaactaattcttctaccatctacac

SEQ ID NO: 55409 - DNA, 25 bp, Saccharomyces pastorianus
aaacggtcacatcgtatgccaagac

SEQ ID NO: 55410 - DNA, 25 bp, Saccharomyces pastorianus
taaagctagcgttgtcaccacatct

SEQ ID NO: 55411 - DNA, 25 bp, Saccharomyces pastorianus
ccaccaccgcaaaattatcttcata

SEQ ID NO: 55412 - DNA, 25 bp, Saccharomyces pastorianus
tctacaccaactctaatgcagcaac

SEQ ID NO: 55413 - DNA, 25 bp, Saccharomyces pastorianus
agtggcaacaacattcgttcaacca

SEQ ID NO: 55414 - DNA, 25 bp, Saccharomyces pastorianus
gcccaaagttgcctcgagtagtgac

SEQ ID NO: 55415 - DNA, 25 bp, Saccharomyces pastorianus
aagaaaggtacgtccatccctgagt

SEQ ID NO: 55416 - DNA, 25 bp, Saccharomyces pastorianus
agagagccggttaggtcttcgtctt

SEQ ID NO: 55417 - DNA, 25 bp, Saccharomyces pastorianus
gagtctggctcggattctaatagtg

SEQ ID NO: 55418 - DNA, 25 bp, Saccharomyces pastorianus
tctagtattcttcacgatcttccaa

SEQ ID NO: 55419 - DNA, 25 bp, Saccharomyces pastorianus
gagttcgttatctgacctcgtctca

SEQ ID NO: 55420 - DNA, 25 bp, Saccharomyces pastorianus
ttaatggatatgtcctctccaccat

SEQ ID NO: 55421 - DNA, 25 bp, Saccharomyces pastorianus
attgacgcagtaactccatcgttga

SEQ ID NO: 55422 - DNA, 25 bp, Saccharomyces pastorianus
aaatctgccagtgctgctctaggta

SEQ ID NO: 55423 - DNA, 25 bp, Saccharomyces pastorianus
ttcaggttcagactccagctcggat

SEQ ID NO: 55424 - DNA, 25 bp, Saccharomyces pastorianus
gaatcgagccctagttcaggttcag

SEQ ID NO: 55425 - DNA, 25 bp, Saccharomyces pastorianus
atgcccttgcggacgatgacgatga

SEQ ID NO: 55426 - DNA, 25 bp, Saccharomyces pastorianus
aaaggtagtgtcgttccgctgacgg

SEQ ID NO: 55427 - DNA, 25 bp, Saccharomyces pastorianus
gcaaagccatacactactgtcttga

SEQ ID NO: 55428 - DNA, 25 bp, Saccharomyces pastorianus
ggtgaagatcttccgcaatggttta

SEQ ID NO: 55429 - DNA, 25 bp, Saccharomyces pastorianus
gaagaggcagataccaccgttcgta

SEQ ID NO: 55430 - DNA, 25 bp, Saccharomyces pastorianus
caagttcagcaggatctacggacga

SEQ ID NO: 55431 - DNA, 25 bp, Saccharomyces pastorianus
aaaggcaatctgcacccttagctaa

SEQ ID NO: 55432 - DNA, 25 bp, Saccharomyces pastorianus
gaaccccaaggagcgcggctaaaag

SEQ ID NO: 55433 - DNA, 25 bp, Saccharomyces pastorianus
tagtacatcaggattccgactcctc

SEQ ID NO: 55434 - DNA, 25 bp, Saccharomyces pastorianus
gaggttcctgaaaaagccacacaag

SEQ ID NO: 55435 - DNA, 25 bp, Saccharomyces pastorianus
gggacatctctttgtactcattgaa

SEQ ID NO: 55436 - DNA, 25 bp, Saccharomyces pastorianus
ttgacgtctggaattccccttgaga

SEQ ID NO: 55437 - DNA, 25 bp, Saccharomyces pastorianus
atccgagctggagtctgaacctgaa

SEQ ID NO: 55438 - DNA, 25 bp, Saccharomyces pastorianus
gaattccccttgagacgaggtcaga

SEQ ID NO: 55439 - DNA, 25 bp, Saccharomyces pastorianus
aagctttttccgtctccagaagaat

SEQ ID NO: 55440 - DNA, 25 bp, Saccharomyces pastorianus
ttagagcttttttccttgacgtctg

SEQ ID NO: 55441 - DNA, 25 bp, Saccharomyces pastorianus
ctcgaggcaactttgggctgtggtt

SEQ ID NO: 55442 - DNA, 25 bp, Saccharomyces pastorianus
gaacctgaactagggctcgattcat

SEQ ID NO: 55443 - DNA, 25 bp, Saccharomyces pastorianus
gattcatcgtcactactcgaggcaa

SEQ ID NO: 55444 - DNA, 25 bp, Saccharomyces pastorianus
agccagactcagagccggaatccga

SEQ ID NO: 55445 - DNA, 25 bp, Saccharomyces pastorianus
gtggtttaccaatcgatttagagct

SEQ ID NO: 55446 - DNA, 25 bp, Saccharomyces pastorianus
aaccactattagaatccgagccaga

SEQ ID NO: 55447 - DNA, 25 bp, Saccharomyces pastorianus
ctaccgcatcttaagggctcattgg

SEQ ID NO: 55448 - DNA, 25 bp, Saccharomyces pastorianus
gcgactacgaaggtattgccattct

SEQ ID NO: 55449 - DNA, 25 bp, Saccharomyces pastorianus
aggaggcgagcctacaaccaacatc

SEQ ID NO: 55450 - DNA, 25 bp, Saccharomyces pastorianus
aactcagtttaactctatcggcctc

SEQ ID NO: 55451 - DNA, 25 bp, Saccharomyces pastorianus
tatcggcctccctgaggaattttat

SEQ ID NO: 55452 - DNA, 25 bp, Saccharomyces pastorianus
ttgctaggtctctggatgtccgcga

SEQ ID NO: 55453 - DNA, 25 bp, Saccharomyces pastorianus
gatgtccgcgactacttgaatagaa

SEQ ID NO: 55454 - DNA, 25 bp, Saccharomyces pastorianus
aatcatcgatcagagctttgctagg

SEQ ID NO: 55455 - DNA, 25 bp, Saccharomyces pastorianus
attctaacgtacgaaggctccgaag

SEQ ID NO: 55456 - DNA, 25 bp, Saccharomyces pastorianus
gataagtttgctgttctaccgcatc

SEQ ID NO: 55457 - DNA, 25 bp, Saccharomyces pastorianus
atagctacggtcattgttatcggcg

SEQ ID NO: 55458 - DNA, 25 bp, Saccharomyces pastorianus
aatactatgcatggcatctcgcgca

SEQ ID NO: 55459 - DNA, 25 bp, Saccharomyces pastorianus
agaaacaacactttgagctcctcca

SEQ ID NO: 55460 - DNA, 25 bp, Saccharomyces pastorianus
gcattgagattggtccacttgccct

SEQ ID NO: 55461 - DNA, 25 bp, Saccharomyces pastorianus
tggtggtaccactgctatttctcca

SEQ ID NO: 55462 - DNA, 25 bp, Saccharomyces pastorianus
agtgggttcgtcaacctgtacgaca

SEQ ID NO: 55463 - DNA, 25 bp, Saccharomyces pastorianus
atctcgcgcagtcaaggatgcattg

SEQ ID NO: 55464 - DNA, 25 bp, Saccharomyces pastorianus
acccattgctgcgttagaccaacta

SEQ ID NO: 55465 - DNA, 25 bp, Saccharomyces pastorianus
tattttgcatgctacctcagggtta

SEQ ID NO: 55466 - DNA, 25 bp, Saccharomyces pastorianus
acggcatcatcctcttacaaggtaa

SEQ ID NO: 55467 - DNA, 25 bp, Saccharomyces pastorianus
taacgactaccatttcgagtttaca

SEQ ID NO: 55468 - DNA, 25 bp, Saccharomyces pastorianus
agactaaatctacccacggcatcat

SEQ ID NO: 55469 - DNA, 25 bp, Saccharomyces pastorianus
gaacaactcgaacaagtcctttgtc

SEQ ID NO: 55470 - DNA, 25 bp, Saccharomyces pastorianus
gaacgcattctggtgagaaacctta

SEQ ID NO: 55471 - DNA, 25 bp, Saccharomyces pastorianus
gaatcagcgcatttaacacgaggaa

SEQ ID NO: 55472 - DNA, 25 bp, Saccharomyces pastorianus
atgtttatggcatgactgtcaccgt

SEQ ID NO: 55473 - DNA, 25 bp, Saccharomyces pastorianus
cggcgaaaagcctctacaatgtaag

SEQ ID NO: 55474 - DNA, 25 bp, Saccharomyces pastorianus
ttgcccgaatcctcaaacacatgaa

SEQ ID NO: 55475 - DNA, 25 bp, Saccharomyces pastorianus
acattcatctggtttggcactatca

SEQ ID NO: 55476 - DNA, 25 bp, Saccharomyces pastorianus
ggttcagcataccagaacgcattct

SEQ ID NO: 55477 - DNA, 25 bp, Saccharomyces pastorianus
gagcaagcatatcaagacccataag

SEQ ID NO: 55478 - DNA, 25 bp, Saccharomyces pastorianus
aatgacacaaccaacacatcaccgt

SEQ ID NO: 55479 - DNA, 25 bp, Saccharomyces pastorianus
atgaccatttggaatcagcgcattt

SEQ ID NO: 55480 - DNA, 25 bp, Saccharomyces pastorianus
atactgcatttgcatccgatgctag

SEQ ID NO: 55481 - DNA, 25 bp, Saccharomyces pastorianus
aagagtacattgattgccagcattt

SEQ ID NO: 55482 - DNA, 25 bp, Saccharomyces pastorianus
taacaattcctctctggcgaaatat

SEQ ID NO: 55483 - DNA, 25 bp, Saccharomyces pastorianus
atggtaacgactacggccactgctg

SEQ ID NO: 55484 - DNA, 25 bp, Saccharomyces pastorianus
cagcggatagcggtggccatgccaa

SEQ ID NO: 55485 - DNA, 25 bp, Saccharomyces pastorianus
tcaccacagtgtggctgcggatgac

SEQ ID NO: 55486 - DNA, 25 bp, Saccharomyces pastorianus
gaagccctgggcataagcacggaag

SEQ ID NO: 55487 - DNA, 25 bp, Saccharomyces pastorianus
ggaaggaatagtccacggccacatc

SEQ ID NO: 55488 - DNA, 25 bp, Saccharomyces pastorianus
gaactaccataacaattcctctctg

SEQ ID NO: 55489 - DNA, 25 bp, Saccharomyces pastorianus
tgccagcattttgagtttttgaact

SEQ ID NO: 55490 - DNA, 25 bp, Saccharomyces pastorianus
ccgatgctagccatgcagcggatag

SEQ ID NO: 55491 - DNA, 25 bp, Saccharomyces pastorianus
tgtcgccgtatgagagtagcctaac

SEQ ID NO: 55492 - DNA, 25 bp, Saccharomyces pastorianus
cctaaacaacttccttactggtcat

SEQ ID NO: 55493 - DNA, 25 bp, Saccharomyces pastorianus
agcaagcacattattctacctccaa

SEQ ID NO: 55494 - DNA, 25 bp, Saccharomyces pastorianus
atcgactttagctacgtgcgtactt

SEQ ID NO: 55495 - DNA, 25 bp, Saccharomyces pastorianus
agggctcctcttctaacatgatgtc

SEQ ID NO: 55496 - DNA, 25 bp, Saccharomyces pastorianus
aagagccagttttggaaccgccaca

SEQ ID NO: 55497 - DNA, 25 bp, Saccharomyces pastorianus
gaacaacgccacgtgtacgctgaat

SEQ ID NO: 55498 - DNA, 25 bp, Saccharomyces pastorianus
ctcattatcaagtggctctgggcaa

SEQ ID NO: 55499 - DNA, 25 bp, Saccharomyces pastorianus
catgcttctccgaccaaatcattaa

SEQ ID NO: 55500 - DNA, 25 bp, Saccharomyces pastorianus
ggaaattcgcgtcgtgactctataa

SEQ ID NO: 55501 - DNA, 25 bp, Saccharomyces pastorianus
gccacaatctatacgctcattatca

SEQ ID NO: 55502 - DNA, 25 bp, Saccharomyces pastorianus
aaaggactacgttgaaagcttcaga

SEQ ID NO: 55503 - DNA, 25 bp, Saccharomyces pastorianus
gaaattgcagcaaagatcgctaaga

SEQ ID NO: 55504 - DNA, 25 bp, Saccharomyces pastorianus
gaagatggaagctgtcttgaaatta

SEQ ID NO: 55505 - DNA, 25 bp, Saccharomyces pastorianus
gaaagcttcagacatgaactaatgg

SEQ ID NO: 55506 - DNA, 25 bp, Saccharomyces pastorianus
gagctggtagacgtcgccaatacca

SEQ ID NO: 55507 - DNA, 25 bp, Saccharomyces pastorianus
ggtagacgtcgccaataccattggt

SEQ ID NO: 55508 - DNA, 25 bp, Saccharomyces pastorianus
ggagctacttttacgcaaatctgta

SEQ ID NO: 55509 - DNA, 25 bp, Saccharomyces pastorianus
taccattggtaactcttcacttaag

SEQ ID NO: 55510 - DNA, 25 bp, Saccharomyces pastorianus
tagaggagctacttttacgcaaatc

SEQ ID NO: 55511 - DNA, 25 bp, Saccharomyces pastorianus
gatcgctaagataatgaaggattct

SEQ ID NO: 55512 - DNA, 25 bp, Saccharomyces pastorianus
tttacgaatggtgtagaggagctac

SEQ ID NO: 55513 - DNA, 25 bp, Saccharomyces pastorianus
tcagctacgaccgtctattcgagac

SEQ ID NO: 55514 - DNA, 25 bp, Saccharomyces pastorianus
tcctgcgagacaagttcataaccaa

SEQ ID NO: 55515 - DNA, 25 bp, Saccharomyces pastorianus
tggccaaactcctgcgagacaagtt

SEQ ID NO: 55516 - DNA, 25 bp, Saccharomyces pastorianus
aaaggcttcagcgttggcgagttca

SEQ ID NO: 55517 - DNA, 25 bp, Saccharomyces pastorianus
ttcgagacggtcaagcaacaaataa

SEQ ID NO: 55518 - DNA, 25 bp, Saccharomyces pastorianus
gcgagttcagggacgccctggccaa

SEQ ID NO: 55519 - DNA, 25 bp, Saccharomyces pastorianus
ggactcagctacgaccgtctattcg

SEQ ID NO: 55520 - DNA, 25 bp, Saccharomyces pastorianus
aaggcttcagcgttggcgagttcag

SEQ ID NO: 55521 - DNA, 25 bp, Saccharomyces pastorianus
gtctattcgagacggtcaagcaaca

SEQ ID NO: 55522 - DNA, 25 bp, Saccharomyces pastorianus
gcaacaaataaaaggcttcagcgtt

SEQ ID NO: 55523 - DNA, 25 bp, Saccharomyces pastorianus
aaactcctgcgagacaagttcataa

SEQ ID NO: 55524 - DNA, 25 bp, Saccharomyces pastorianus
gctatctgacattcgaattgaccct

SEQ ID NO: 55525 - DNA, 25 bp, Saccharomyces pastorianus
attttccagcaatctaatgacgagc

SEQ ID NO: 55526 - DNA, 25 bp, Saccharomyces pastorianus
gaaggaactatacccgatgtggaat

SEQ ID NO: 55527 - DNA, 25 bp, Saccharomyces pastorianus
attatagttcgttcttcccacttat

SEQ ID NO: 55528 - DNA, 25 bp, Saccharomyces pastorianus
gaatttttatccagttttcaccagg

SEQ ID NO: 55529 - DNA, 25 bp, Saccharomyces pastorianus
aagtagttctttgcaccacgaggga

SEQ ID NO: 55530 - DNA, 25 bp, Saccharomyces pastorianus
gagaaacacctccatgcaaatcagc

SEQ ID NO: 55531 - DNA, 25 bp, Saccharomyces pastorianus
tgagaacttccaacctgatttgagg

SEQ ID NO: 55532 - DNA, 25 bp, Saccharomyces pastorianus
ttttccaaacctgcgtattgacttt

SEQ ID NO: 55533 - DNA, 25 bp, Saccharomyces pastorianus
gatagcaatcgcctgacatttcaga

SEQ ID NO: 55534 - DNA, 25 bp, Saccharomyces pastorianus
gacatttcagagcatctcagagcaa

SEQ ID NO: 55535 - DNA, 25 bp, Saccharomyces pastorianus
acgcctgtgacgaatctacaactat

SEQ ID NO: 55536 - DNA, 25 bp, Saccharomyces pastorianus
aaatatacccatttacgcctgtgac

SEQ ID NO: 55537 - DNA, 25 bp, Saccharomyces pastorianus
atccgatcccgaactgaaattagag

SEQ ID NO: 55538 - DNA, 25 bp, Saccharomyces pastorianus
gaaccctcatttcccagtaatatgg

SEQ ID NO: 55539 - DNA, 25 bp, Saccharomyces pastorianus
tggactagtgtctgaacgctttcaa

SEQ ID NO: 55540 - DNA, 25 bp, Saccharomyces pastorianus
atcagtcctggccaatttattggac

SEQ ID NO: 55541 - DNA, 25 bp, Saccharomyces pastorianus
aaacgtcggtacaatcagtcctggc

SEQ ID NO: 55542 - DNA, 25 bp, Saccharomyces pastorianus
gttcagtggtttgttagaaccctca

SEQ ID NO: 55543 - DNA, 25 bp, Saccharomyces pastorianus
gtttaaagttagtggcagcgcgtat

SEQ ID NO: 55544 - DNA, 25 bp, Saccharomyces pastorianus
ggtggttgaattcatccgatcccga

SEQ ID NO: 55545 - DNA, 25 bp, Saccharomyces pastorianus
aagtggcgtccaaagtgtcaagtcc

SEQ ID NO: 55546 - DNA, 25 bp, Saccharomyces pastorianus
tgaagagcctggtgccggcatacta

SEQ ID NO: 55547 - DNA, 25 bp, Saccharomyces pastorianus
aaggtgcgacagcatggtacccgtc

SEQ ID NO: 55548 - DNA, 25 bp, Saccharomyces pastorianus
aacacagactttgtcagcgggcgcg

SEQ ID NO: 55549 - DNA, 25 bp, Saccharomyces pastorianus
gctgcagctgctatggacgtcgtcg

SEQ ID NO: 55550 - DNA, 25 bp, Saccharomyces pastorianus
atagtagcatgcacgactggtcgcg

SEQ ID NO: 55551 - DNA, 25 bp, Saccharomyces pastorianus
gactgtctggcgctcatcgaaaggt

SEQ ID NO: 55552 - DNA, 25 bp, Saccharomyces pastorianus
gttgcgaacccgaccagtttcaagg

SEQ ID NO: 55553 - DNA, 25 bp, Saccharomyces pastorianus
tacgagttcgacttcagcaacgcaa

SEQ ID NO: 55554 - DNA, 25 bp, Saccharomyces pastorianus
gaaactgcttgccatggccatgact

SEQ ID NO: 55555 - DNA, 25 bp, Saccharomyces pastorianus
attggagctactacatgcggcggca

SEQ ID NO: 55556 - DNA, 25 bp, Saccharomyces pastorianus
ttatccccatgctgtatatcggcgg

SEQ ID NO: 55557 - DNA, 25 bp, Saccharomyces pastorianus
gcagggaaaccaatctgataaacaa

SEQ ID NO: 55558 - DNA, 25 bp, Saccharomyces pastorianus
aagaagacgctacccttcaagcgaa

SEQ ID NO: 55559 - DNA, 25 bp, Saccharomyces pastorianus
tattgacgaattgcatagccaggga

SEQ ID NO: 55560 - DNA, 25 bp, Saccharomyces pastorianus
gggatatcatttgcatcatattttc

SEQ ID NO: 55561 - DNA, 25 bp, Saccharomyces pastorianus
ctactatcttgggtgttattgacga

SEQ ID NO: 55562 - DNA, 25 bp, Saccharomyces pastorianus
agacgctacccttcaagcgaaggat

SEQ ID NO: 55563 - DNA, 25 bp, Saccharomyces pastorianus
tagccagggatatcatttgcatcat

SEQ ID NO: 55564 - DNA, 25 bp, Saccharomyces pastorianus
gctacccttcaagcgaaggatgcgc

SEQ ID NO: 55565 - DNA, 25 bp, Saccharomyces pastorianus
gacgaattgcatagccagggatatc

SEQ ID NO: 55566 - DNA, 25 bp, Saccharomyces pastorianus
atcttgggtgttattgacgaattgc

SEQ ID NO: 55567 - DNA, 25 bp, Saccharomyces pastorianus
acgtttctactatcttgggtgttat

SEQ ID NO: 55568 - DNA, 25 bp, Saccharomyces pastorianus
gccatttggcagtgcactagtcgaa

SEQ ID NO: 55569 - DNA, 25 bp, Saccharomyces pastorianus
gagggcccagctaatgatctacaag

SEQ ID NO: 55570 - DNA, 25 bp, Saccharomyces pastorianus
gaaaccacgaagctcattctcggca

SEQ ID NO: 55571 - DNA, 25 bp, Saccharomyces pastorianus
gttattgagttcatctatcctacaa

SEQ ID NO: 55572 - DNA, 25 bp, Saccharomyces pastorianus
gccgctcaatcccttgatagtgatc

SEQ ID NO: 55573 - DNA, 25 bp, Saccharomyces pastorianus
aataccaaccatgaagagggcccag

SEQ ID NO: 55574 - DNA, 25 bp, Saccharomyces pastorianus
ctacaagcccaagatcaagtcgata

SEQ ID NO: 55575 - DNA, 25 bp, Saccharomyces pastorianus
aaattcagaccacattgccctgatg

SEQ ID NO: 55576 - DNA, 25 bp, Saccharomyces pastorianus
caaagacattctaaatcgcgccgct

SEQ ID NO: 55577 - DNA, 25 bp, Saccharomyces pastorianus
gataacatatctcttacgaccgacc

SEQ ID NO: 55578 - DNA, 25 bp, Saccharomyces pastorianus
tcggcaaaccaaacagacgcaaatt

SEQ ID NO: 55579 - DNA, 25 bp, Saccharomyces pastorianus
gaaacaatctaattcggccgatgat

SEQ ID NO: 55580 - DNA, 25 bp, Saccharomyces pastorianus
ttactcttccctcttcaaggagagc

SEQ ID NO: 55581 - DNA, 25 bp, Saccharomyces pastorianus
gagagcccaaaagaaagcgctttct

SEQ ID NO: 55582 - DNA, 25 bp, Saccharomyces pastorianus
aaaggcatccatatcttccaaaggt

SEQ ID NO: 55583 - DNA, 25 bp, Saccharomyces pastorianus
tttatctccgtcaagcgtactaatc

SEQ ID NO: 55584 - DNA, 25 bp, Saccharomyces pastorianus
atgaggacgatgattttatctccgt

SEQ ID NO: 55585 - DNA, 25 bp, Saccharomyces pastorianus
aatgaagctgaactgccagccctta

SEQ ID NO: 55586 - DNA, 25 bp, Saccharomyces pastorianus
agaactgttgattactcacacggta

SEQ ID NO: 55587 - DNA, 25 bp, Saccharomyces pastorianus
gggcatcagtagcatacttaggaac

SEQ ID NO: 55588 - DNA, 25 bp, Saccharomyces pastorianus
aattcggccgatgatattactgaag

SEQ ID NO: 55589 - DNA, 25 bp, Saccharomyces pastorianus
ggtgaagctcatccagtttacgaac

SEQ ID NO: 55590 - DNA, 25 bp, Saccharomyces pastorianus
ggttgtccaaaatgattgcccagaa

SEQ ID NO: 55591 - DNA, 25 bp, Saccharomyces pastorianus
gtttaccgggtgctccaaagatcaa

SEQ ID NO: 55592 - DNA, 25 bp, Saccharomyces pastorianus
aggtatcgattttcctgcggttgaa

SEQ ID NO: 55593 - DNA, 25 bp, Saccharomyces pastorianus
gacttgccaacagaggagtttgcct

SEQ ID NO: 55594 - DNA, 25 bp, Saccharomyces pastorianus
tatttcatacgtgagatccatctat

SEQ ID NO: 55595 - DNA, 25 bp, Saccharomyces pastorianus
gtagacacatacatccatagagttg

SEQ ID NO: 55596 - DNA, 25 bp, Saccharomyces pastorianus
aaatgcagccaggtatctctttgat

SEQ ID NO: 55597 - DNA, 25 bp, Saccharomyces pastorianus
gaagaaatctatcaagccgcaatta

SEQ ID NO: 55598 - DNA, 25 bp, Saccharomyces pastorianus
gagtttgcctattcgcttggtttac

SEQ ID NO: 55599 - DNA, 25 bp, Saccharomyces pastorianus
caggaagattgagcccagtagacta

SEQ ID NO: 55600 - DNA, 25 bp, Saccharomyces pastorianus
ttttgctacagatgtcgtcgccaga

SEQ ID NO: 55601 - DNA, 25 bp, Saccharomyces pastorianus
attttgctttccagagaattcgatt

SEQ ID NO: 55602 - DNA, 25 bp, Saccharomyces pastorianus
aacaacatctttagacaccatatat

SEQ ID NO: 55603 - DNA, 25 bp, Saccharomyces pastorianus
acatctttagacaccatatattttg

SEQ ID NO: 55604 - DNA, 25 bp, Saccharomyces pastorianus
atattttgctttccagagaattcga

SEQ ID NO: 55605 - DNA, 25 bp, Saccharomyces pastorianus
ggactaacaacatctttagacacca

SEQ ID NO: 55606 - DNA, 25 bp, Saccharomyces pastorianus
acaccatatattttgctttccagag

SEQ ID NO: 55607 - DNA, 25 bp, Saccharomyces pastorianus
agacaccatatattttgctttccag

SEQ ID NO: 55608 - DNA, 25 bp, Saccharomyces pastorianus
gacaccatatattttgctttccaga

SEQ ID NO: 55609 - DNA, 25 bp, Saccharomyces pastorianus
tcttctaggactaacaacatcttta

SEQ ID NO: 55610 - DNA, 25 bp, Saccharomyces pastorianus
catatattttgctttccagagaatt

SEQ ID NO: 55611 - DNA, 25 bp, Saccharomyces pastorianus
accatatattttgctttccagagaa

SEQ ID NO: 55612 - DNA, 25 bp, Saccharomyces pastorianus
tctcgaattattccgcatggcacca

SEQ ID NO: 55613 - DNA, 25 bp, Saccharomyces pastorianus
atgatctggcagactgagctcgcag

SEQ ID NO: 55614 - DNA, 25 bp, Saccharomyces pastorianus
gctcgcagtcgtaaataagctactt

SEQ ID NO: 55615 - DNA, 25 bp, Saccharomyces pastorianus
aaattcgtccatgatctggcagact

SEQ ID NO: 55616 - DNA, 25 bp, Saccharomyces pastorianus
gacagaagtctcttatatcatcaac

SEQ ID NO: 55617 - DNA, 25 bp, Saccharomyces pastorianus
atcaacgccatgtttacagacgctg

SEQ ID NO: 55618 - DNA, 25 bp, Saccharomyces pastorianus
gaccaatccgtgtggttttacatta

SEQ ID NO: 55619 - DNA, 25 bp, Saccharomyces pastorianus
accatggctggcactatcgtagaat

SEQ ID NO: 55620 - DNA, 25 bp, Saccharomyces pastorianus
acagacgctgaagaccaatccgtgt

SEQ ID NO: 55621 - DNA, 25 bp, Saccharomyces pastorianus
gatgcaaggaactaccatggctggc

SEQ ID NO: 55622 - DNA, 25 bp, Saccharomyces pastorianus
caattgatggatgcggacccgttaa

SEQ ID NO: 55623 - DNA, 25 bp, Saccharomyces pastorianus
aatagtgtccactccgcaagtacaa

SEQ ID NO: 55624 - DNA, 25 bp, Saccharomyces pastorianus
gttcatcaagctactggtggcacct

SEQ ID NO: 55625 - DNA, 25 bp, Saccharomyces pastorianus
aaggaaattttccataccctgccag

SEQ ID NO: 55626 - DNA, 25 bp, Saccharomyces pastorianus
tgggacctggcattgtggagaaaac

SEQ ID NO: 55627 - DNA, 25 bp, Saccharomyces pastorianus
acgctgatccagcagtatggtcttt

SEQ ID NO: 55628 - DNA, 25 bp, Saccharomyces pastorianus
atggtcttttattcttgccttgaag

SEQ ID NO: 55629 - DNA, 25 bp, Saccharomyces pastorianus
gatccggcttggtctaaatttgtga

SEQ ID NO: 55630 - DNA, 25 bp, Saccharomyces pastorianus
aactgtggagtgcattcaacctgga

SEQ ID NO: 55631 - DNA, 25 bp, Saccharomyces pastorianus
tctggactctgctgacgactattac

SEQ ID NO: 55632 - DNA, 25 bp, Saccharomyces pastorianus
gagagcaactgcttcttgatctaga

SEQ ID NO: 55633 - DNA, 25 bp, Saccharomyces pastorianus
ataaggcacttctgggtcaattcga

SEQ ID NO: 55634 - DNA, 25 bp, Saccharomyces pastorianus
aaaggccggtgtcatgtccaagtcc

SEQ ID NO: 55635 - DNA, 25 bp, Saccharomyces pastorianus
aaagatacttcctagacgccttgcc

SEQ ID NO: 55636 - DNA, 25 bp, Saccharomyces pastorianus
gaattcttgttcaacgccatcgaca

SEQ ID NO: 55637 - DNA, 25 bp, Saccharomyces pastorianus
agacagactgttggtcgccttcggt

SEQ ID NO: 55638 - DNA, 25 bp, Saccharomyces pastorianus
agaaaatcgtcaccgaggccgtcga

SEQ ID NO: 55639 - DNA, 25 bp, Saccharomyces pastorianus
ggttgaccttctccaacgagttgat

SEQ ID NO: 55640 - DNA, 25 bp, Saccharomyces pastorianus
gatggatccaagacgcagacgcgct

SEQ ID NO: 55641 - DNA, 25 bp, Saccharomyces pastorianus
cagacgcgctgttcggtgaaagact

SEQ ID NO: 55642 - DNA, 25 bp, Saccharomyces pastorianus
gtgaaagactagtcgccttcgcgtc

SEQ ID NO: 55643 - DNA, 25 bp, Saccharomyces pastorianus
gtacgtcgagttcgtcgcagacaga

SEQ ID NO: 55644 - DNA, 25 bp, Saccharomyces pastorianus
gccagtcgccttgctaggtatgaat

SEQ ID NO: 55645 - DNA, 25 bp, Saccharomyces pastorianus
gtctctgcagatcaactcgttggag

SEQ ID NO: 55646 - DNA, 25 bp, Saccharomyces pastorianus
caactcgttggagaaggtcaacccg

SEQ ID NO: 55647 - DNA, 25 bp, Saccharomyces pastorianus
ggagaaggtcaacccgggcatcata

SEQ ID NO: 55648 - DNA, 25 bp, Saccharomyces pastorianus
gatcaactcgttggagaaggtcaac

SEQ ID NO: 55649 - DNA, 25 bp, Saccharomyces pastorianus
ttggagaaggtcaacccgggcatca

SEQ ID NO: 55650 - DNA, 25 bp, Saccharomyces pastorianus
gcagatcaactcgttggagaaggtc

SEQ ID NO: 55651 - DNA, 25 bp, Saccharomyces pastorianus
cgttggagaaggtcaacccgggcat

SEQ ID NO: 55652 - DNA, 25 bp, Saccharomyces pastorianus
ctctgcagatcaactcgttggagaa

SEQ ID NO: 55653 - DNA, 25 bp, Saccharomyces pastorianus
gaaggtcaacccgggcatcatacct

SEQ ID NO: 55654 - DNA, 25 bp, Saccharomyces pastorianus
accagaagatggaggcgaaggaccc

SEQ ID NO: 55655 - DNA, 25 bp, Saccharomyces pastorianus
cttcttcaaccagaagatggaggcg

SEQ ID NO: 55656 - DNA, 25 bp, Saccharomyces pastorianus
gtctctgcagatcaactcgttggag

SEQ ID NO: 55657 - DNA, 25 bp, Saccharomyces pastorianus
caactcgttggagaaggtcaacccg

SEQ ID NO: 55658 - DNA, 25 bp, Saccharomyces pastorianus
ggagaaggtcaacccgggcatcata

SEQ ID NO: 55659 - DNA, 25 bp, Saccharomyces pastorianus
ggcaaagtcggtgtgcaaaccttcg

SEQ ID NO: 55660 - DNA, 25 bp, Saccharomyces pastorianus
ttggagaaggtcaacccgggcatca

SEQ ID NO: 55661 - DNA, 25 bp, Saccharomyces pastorianus
gcagatcaactcgttggagaaggtc

SEQ ID NO: 55662 - DNA, 25 bp, Saccharomyces pastorianus
ctctgcagatcaactcgttggagaa

SEQ ID NO: 55663 - DNA, 25 bp, Saccharomyces pastorianus
gaaggtcaacccgggcatcatacct

SEQ ID NO: 55664 - DNA, 25 bp, Saccharomyces pastorianus
accagaagatggaggcgaaggaccc

SEQ ID NO: 55665 - DNA, 25 bp, Saccharomyces pastorianus
cttcttcaaccagaagatggaggcg

SEQ ID NO: 55666 - DNA, 25 bp, Saccharomyces pastorianus
ggtccggcttgttcttcaaatgggc

SEQ ID NO: 55667 - DNA, 25 bp, Saccharomyces pastorianus
gtcaagatatccatctgccgactag

SEQ ID NO: 55668 - DNA, 25 bp, Saccharomyces pastorianus
tagcatcgcaactttcagctgactt

SEQ ID NO: 55669 - DNA, 25 bp, Saccharomyces pastorianus
gacttctaacgactacttccaatgg

SEQ ID NO: 55670 - DNA, 25 bp, Saccharomyces pastorianus
ggtccgacgaagaaactctgcagtt

SEQ ID NO: 55671 - DNA, 25 bp, Saccharomyces pastorianus
tgacttcgccatttctgaacagcaa

SEQ ID NO: 55672 - DNA, 25 bp, Saccharomyces pastorianus
ttggaccccgacactaatcgtgatc

SEQ ID NO: 55673 - DNA, 25 bp, Saccharomyces pastorianus
aacagttcactttactactcgtcaa

SEQ ID NO: 55674 - DNA, 25 bp, Saccharomyces pastorianus
gtggtttacccagataagtcgactt

SEQ ID NO: 55675 - DNA, 25 bp, Saccharomyces pastorianus
gtacccgttgaaatggatcctcgaa

SEQ ID NO: 55676 - DNA, 25 bp, Saccharomyces pastorianus
aatcgtgatcatgaggccatcgact

SEQ ID NO: 55677 - DNA, 25 bp, Saccharomyces pastorianus
attaacccgccattcgacaacaagg

SEQ ID NO: 55678 - DNA, 25 bp, Saccharomyces pastorianus
gaatcagagttagccatattagact

SEQ ID NO: 55679 - DNA, 25 bp, Saccharomyces pastorianus
cgctacattgtatttcacttttatt

SEQ ID NO: 55680 - DNA, 25 bp, Saccharomyces pastorianus
gttagccatattagacttgattcaa

SEQ ID NO: 55681 - DNA, 25 bp, Saccharomyces pastorianus
aacaacgaggatattcagatcatct

SEQ ID NO: 55682 - DNA, 25 bp, Saccharomyces pastorianus
ggatattcagatcatcttcaaaaac

SEQ ID NO: 55683 - DNA, 25 bp, Saccharomyces pastorianus
ttcacttttattgtggacgaccaag

SEQ ID NO: 55684 - DNA, 25 bp, Saccharomyces pastorianus
gtaatagtgatgatgtaaacaacga

SEQ ID NO: 55685 - DNA, 25 bp, Saccharomyces pastorianus
agccatattagacttgattcaaact

SEQ ID NO: 55686 - DNA, 25 bp, Saccharomyces pastorianus
acgaggatattcagatcatcttcaa

SEQ ID NO: 55687 - DNA, 25 bp, Saccharomyces pastorianus
tgtggacgaccaagaatcagagtta

SEQ ID NO: 55688 - DNA, 25 bp, Saccharomyces pastorianus
aaaactacgctacattgtatttcac

SEQ ID NO: 55689 - DNA, 25 bp, Saccharomyces pastorianus
cacggtgtgcaccacttggaagcaa

SEQ ID NO: 55690 - DNA, 25 bp, Saccharomyces pastorianus
accaattccaggtgaacgctcgtga

SEQ ID NO: 55691 - DNA, 25 bp, Saccharomyces pastorianus
ggacgacgctaaagtgagccctatt

SEQ ID NO: 55692 - DNA, 25 bp, Saccharomyces pastorianus
aaaggtctcttgatcaggccattgc

SEQ ID NO: 55693 - DNA, 25 bp, Saccharomyces pastorianus
aatgggcatgtacaaccctacaagg

SEQ ID NO: 55694 - DNA, 25 bp, Saccharomyces pastorianus
gtcgaggttttctagctatttacaa

SEQ ID NO: 55695 - DNA, 25 bp, Saccharomyces pastorianus
gctcaggaagagattgcccatttaa

SEQ ID NO: 55696 - DNA, 25 bp, Saccharomyces pastorianus
tcagtcgattattttgctcaggaag

SEQ ID NO: 55697 - DNA, 25 bp, Saccharomyces pastorianus
gacaccgacgatacaatggcattga

SEQ ID NO: 55698 - DNA, 25 bp, Saccharomyces pastorianus
attgttcccttgatggactgtgcaa

SEQ ID NO: 55699 - DNA, 25 bp, Saccharomyces pastorianus
actgtgcaaggctttacgggcgtcc

SEQ ID NO: 55700 - DNA, 25 bp, Saccharomyces pastorianus
ttattagacgattcccctgttactg

SEQ ID NO: 55701 - DNA, 25 bp, Saccharomyces pastorianus
aagcgtgagagaccaaaaacctgaa

SEQ ID NO: 55702 - DNA, 25 bp, Saccharomyces pastorianus
aaatatctgccggtgagggatacat

SEQ ID NO: 55703 - DNA, 25 bp, Saccharomyces pastorianus
gaagcgaccctgtttatcatataat

SEQ ID NO: 55704 - DNA, 25 bp, Saccharomyces pastorianus
gtcccatgacacctaagaaccaaga

SEQ ID NO: 55705 - DNA, 25 bp, Saccharomyces pastorianus
cacgccggctaacaccaattttgga

SEQ ID NO: 55706 - DNA, 25 bp, Saccharomyces pastorianus
gagctgaaacaacaccaaataccct

SEQ ID NO: 55707 - DNA, 25 bp, Saccharomyces pastorianus
ggatacattaacagtcccatgacac

SEQ ID NO: 55708 - DNA, 25 bp, Saccharomyces pastorianus
ttggtttctaagacactgatcccct

SEQ ID NO: 55709 - DNA, 25 bp, Saccharomyces pastorianus
aatcatattccgtttcacaaagcag

SEQ ID NO: 55710 - DNA, 25 bp, Saccharomyces pastorianus
actgatcccctcataccaagaaaaa

SEQ ID NO: 55711 - DNA, 25 bp, Saccharomyces pastorianus
tggtttctgtgctcctaatcatatc

SEQ ID NO: 55712 - DNA, 25 bp, Saccharomyces pastorianus
tgctgccatgacaaatgctcctggt

SEQ ID NO: 55713 - DNA, 25 bp, Saccharomyces pastorianus
gtttcgactaccctattaacctatg

SEQ ID NO: 55714 - DNA, 25 bp, Saccharomyces pastorianus
taaggttggacctggcatggtttct

SEQ ID NO: 55715 - DNA, 25 bp, Saccharomyces pastorianus
aatgctcctggtaattcccttgata

SEQ ID NO: 55716 - DNA, 25 bp, Saccharomyces pastorianus
gattttactgggtggtgtttcgact

SEQ ID NO: 55717 - DNA, 25 bp, Saccharomyces pastorianus
gatcggctcaattgggttctttatg

SEQ ID NO: 55718 - DNA, 25 bp, Saccharomyces pastorianus
gtcttggttatccatctcgatttta

SEQ ID NO: 55719 - DNA, 25 bp, Saccharomyces pastorianus
gttctttatgacatctttggctgtg

SEQ ID NO: 55720 - DNA, 25 bp, Saccharomyces pastorianus
agaacatatctgtcttggttatcca

SEQ ID NO: 55721 - DNA, 25 bp, Saccharomyces pastorianus
tagcgttaattctgcttattatcaa

SEQ ID NO: 55722 - DNA, 25 bp, Saccharomyces pastorianus
ttttgaccactatttcaatggtgac

SEQ ID NO: 55723 - DNA, 25 bp, Saccharomyces pastorianus
tgaccactatttcaatggtgaccaa

SEQ ID NO: 55724 - DNA, 25 bp, Saccharomyces pastorianus
tatttcaatggtgaccaaatatcca

SEQ ID NO: 55725 - DNA, 25 bp, Saccharomyces pastorianus
atggtgaccaaatatccaaaatccc

SEQ ID NO: 55726 - DNA, 25 bp, Saccharomyces pastorianus
ccactatttcaatggtgaccaaata

SEQ ID NO: 55727 - DNA, 25 bp, Saccharomyces pastorianus
gaccactatttcaatggtgaccaaa

SEQ ID NO: 55728 - DNA, 25 bp, Saccharomyces pastorianus
tgttaccaaaaaatactatgaagtt

SEQ ID NO: 55729 - DNA, 25 bp, Saccharomyces pastorianus
ttgaccactatttcaatggtgacca

SEQ ID NO: 55730 - DNA, 25 bp, Saccharomyces pastorianus
tcaatggtgaccaaatatccaaaat

SEQ ID NO: 55731 - DNA, 25 bp, Saccharomyces pastorianus
tttgaccactatttcaatggtgacc

SEQ ID NO: 55732 - DNA, 25 bp, Saccharomyces pastorianus
aaaaaatactatgaagttgtggcat

SEQ ID NO: 55733 - DNA, 25 bp, Saccharomyces pastorianus
taatcatcttgatcccagtttcctg

SEQ ID NO: 55734 - DNA, 25 bp, Saccharomyces pastorianus
ccaccagctttcttggccataataa

SEQ ID NO: 55735 - DNA, 25 bp, Saccharomyces pastorianus
tcttggtggcaagcatgtcgtaaat

SEQ ID NO: 55736 - DNA, 25 bp, Saccharomyces pastorianus
gaggcgcgaccttattaatcatctt

SEQ ID NO: 55737 - DNA, 25 bp, Saccharomyces pastorianus
cagtttcctggttttggaccttgag

SEQ ID NO: 55738 - DNA, 25 bp, Saccharomyces pastorianus
gtcgtaaataccatcttctctaata

SEQ ID NO: 55739 - DNA, 25 bp, Saccharomyces pastorianus
gcctctgtggcgacgttgatagcaa

SEQ ID NO: 55740 - DNA, 25 bp, Saccharomyces pastorianus
tctctaatatcctttacaccttcac

SEQ ID NO: 55741 - DNA, 25 bp, Saccharomyces pastorianus
gctggcttgcaggtatatctatttt

SEQ ID NO: 55742 - DNA, 25 bp, Saccharomyces pastorianus
tttggaccttgaggcgctcttggac

SEQ ID NO: 55743 - DNA, 25 bp, Saccharomyces pastorianus
atgacgttatattttgctggcttgc

SEQ ID NO: 55744 - DNA, 25 bp, Saccharomyces pastorianus
atgcgatagcaggatctggctctac

SEQ ID NO: 55745 - DNA, 25 bp, Saccharomyces pastorianus
tgtaggtccggttctgcagcagaca

SEQ ID NO: 55746 - DNA, 25 bp, Saccharomyces pastorianus
agacacgcaggcgattgccgacatt

SEQ ID NO: 55747 - DNA, 25 bp, Saccharomyces pastorianus
ggatctggctctactttcatatatg

SEQ ID NO: 55748 - DNA, 25 bp, Saccharomyces pastorianus
tggctccgtccataagctgccttat

SEQ ID NO: 55749 - DNA, 25 bp, Saccharomyces pastorianus
actgctgcctcggtgttcaaagaat

SEQ ID NO: 55750 - DNA, 25 bp, Saccharomyces pastorianus
gatactaggtgctgattcacgtacc

SEQ ID NO: 55751 - DNA, 25 bp, Saccharomyces pastorianus
atactattccattgggtggctccgt

SEQ ID NO: 55752 - DNA, 25 bp, Saccharomyces pastorianus
tgccgacattgttcagtaccatttg

SEQ ID NO: 55753 - DNA, 25 bp, Saccharomyces pastorianus
gtgcgtacatagctaaccgtgtgac

SEQ ID NO: 55754 - DNA, 25 bp, Saccharomyces pastorianus
acggatcttccggtggtgttataag

SEQ ID NO: 55755 - DNA, 25 bp, Saccharomyces pastorianus
ggttctgggtctaccttcatatatg

SEQ ID NO: 55756 - DNA, 25 bp, Saccharomyces pastorianus
tttggtgctgtagatctggttctgc

SEQ ID NO: 55757 - DNA, 25 bp, Saccharomyces pastorianus
atacgcaagcagttgctgacattgt

SEQ ID NO: 55758 - DNA, 25 bp, Saccharomyces pastorianus
tgtatacctctcaatatgggacccc

SEQ ID NO: 55759 - DNA, 25 bp, Saccharomyces pastorianus
gagaagtatacaccatcccgttggg

SEQ ID NO: 55760 - DNA, 25 bp, Saccharomyces pastorianus
tcccgttgggtggttctgtccataa

SEQ ID NO: 55761 - DNA, 25 bp, Saccharomyces pastorianus
ttaggtgccgattcacgtaccacta

SEQ ID NO: 55762 - DNA, 25 bp, Saccharomyces pastorianus
atacgccatcgcaggttctgggtct

SEQ ID NO: 55763 - DNA, 25 bp, Saccharomyces pastorianus
acagagactgcagccgctatattta

SEQ ID NO: 55764 - DNA, 25 bp, Saccharomyces pastorianus
gggcctatattgctaaccgtgtaac

SEQ ID NO: 55765 - DNA, 25 bp, Saccharomyces pastorianus
tgtccataaactaccatacgccatc

SEQ ID NO: 55766 - DNA, 25 bp, Saccharomyces pastorianus
gtacactttattcctaagccagcaa

SEQ ID NO: 55767 - DNA, 25 bp, Saccharomyces pastorianus
gtgatgtcaaatccgcaaagtcttt

SEQ ID NO: 55768 - DNA, 25 bp, Saccharomyces pastorianus
agaaccctattagatgtctcacgcc

SEQ ID NO: 55769 - DNA, 25 bp, Saccharomyces pastorianus
atcagagctttacagcggcttggta

SEQ ID NO: 55770 - DNA, 25 bp, Saccharomyces pastorianus
acgccaatctcaaaggccgcaattt

SEQ ID NO: 55771 - DNA, 25 bp, Saccharomyces pastorianus
atcagagtcgaaacacccgctatat

SEQ ID NO: 55772 - DNA, 25 bp, Saccharomyces pastorianus
aaattggacgtgctctcatcagtac

SEQ ID NO: 55773 - DNA, 25 bp, Saccharomyces pastorianus
tgacactctgtcaagggcgaagaac

SEQ ID NO: 55774 - DNA, 25 bp, Saccharomyces pastorianus
acttcatatgtcgaatgcgtctact

SEQ ID NO: 55775 - DNA, 25 bp, Saccharomyces pastorianus
gccagcaagttcttccttggaaatc

SEQ ID NO: 55776 - DNA, 25 bp, Saccharomyces pastorianus
ggaggatgctcaaccacttcatatg

SEQ ID NO: 55777 - DNA, 25 bp, Saccharomyces pastorianus
cgaatccacggatctttctgagagt

SEQ ID NO: 55778 - DNA, 25 bp, Saccharomyces pastorianus
gagtgacatactgactgagtcgcta

SEQ ID NO: 55779 - DNA, 25 bp, Saccharomyces pastorianus
gatttcggattagctcttactttac

SEQ ID NO: 55780 - DNA, 25 bp, Saccharomyces pastorianus
gaacgcaacgaggacagcttaatgt

SEQ ID NO: 55781 - DNA, 25 bp, Saccharomyces pastorianus
aaagatgatgccgattttgccagag

SEQ ID NO: 55782 - DNA, 25 bp, Saccharomyces pastorianus
agaagctttttgcacagtacggaga

SEQ ID NO: 55783 - DNA, 25 bp, Saccharomyces pastorianus
aaagttctttcaggacctactgctg

SEQ ID NO: 55784 - DNA, 25 bp, Saccharomyces pastorianus
cagagtcgtctttgatggtgcattg

SEQ ID NO: 55785 - DNA, 25 bp, Saccharomyces pastorianus
gagggtactagtgccaaacttcaaa

SEQ ID NO: 55786 - DNA, 25 bp, Saccharomyces pastorianus
taacgctttgctaccagggctataa

SEQ ID NO: 55787 - DNA, 25 bp, Saccharomyces pastorianus
tttagtgtactaattgtcgccaatg

SEQ ID NO: 55788 - DNA, 25 bp, Saccharomyces pastorianus
gctggtatccaattgtctccaaagt

SEQ ID NO: 55789 - DNA, 25 bp, Saccharomyces pastorianus
atccaattgtctccaaagttcgtca

SEQ ID NO: 55790 - DNA, 25 bp, Saccharomyces pastorianus
ccgctggtatccaattgtctccaaa

SEQ ID NO: 55791 - DNA, 25 bp, Saccharomyces pastorianus
ctggtatccaattgtctccaaagtt

SEQ ID NO: 55792 - DNA, 25 bp, Saccharomyces pastorianus
cgctggtatccaattgtctccaaag

SEQ ID NO: 55793 - DNA, 25 bp, Saccharomyces pastorianus
caattgtctccaaagttcgtcaagt

SEQ ID NO: 55794 - DNA, 25 bp, Saccharomyces pastorianus
aattgtctccaaagttcgtcaagtt

SEQ ID NO: 55795 - DNA, 25 bp, Saccharomyces pastorianus
tccaattgtctccaaagttcgtcaa

SEQ ID NO: 55796 - DNA, 25 bp, Saccharomyces pastorianus
ggtatccaattgtctccaaagttcg

SEQ ID NO: 55797 - DNA, 25 bp, Saccharomyces pastorianus
attgtctccaaagttcgtcaagttg

SEQ ID NO: 55798 - DNA, 25 bp, Saccharomyces pastorianus
gtatccaattgtctccaaagttcgt

SEQ ID NO: 55799 - DNA, 25 bp, Saccharomyces pastorianus
tggcgggtccaatttatcgaagtat

SEQ ID NO: 55800 - DNA, 25 bp, Saccharomyces pastorianus
gctgcttgattatgcttgcacttta

SEQ ID NO: 55801 - DNA, 25 bp, Saccharomyces pastorianus
gtatgcattcgtacctcaattgctg

SEQ ID NO: 55802 - DNA, 25 bp, Saccharomyces pastorianus
tactgtatcccgatggcgatcttta

SEQ ID NO: 55803 - DNA, 25 bp, Saccharomyces pastorianus
atggcctttccattcatttcaagat

SEQ ID NO: 55804 - DNA, 25 bp, Saccharomyces pastorianus
tttgaaccaagccatctccaagaag

SEQ ID NO: 55805 - DNA, 25 bp, Saccharomyces pastorianus
cacgctagtgcctttgttgggatgc

SEQ ID NO: 55806 - DNA, 25 bp, Saccharomyces pastorianus
ttgctgctcgtattggtaaccgggt

SEQ ID NO: 55807 - DNA, 25 bp, Saccharomyces pastorianus
ggtccacgagcacaattgacggctt

SEQ ID NO: 55808 - DNA, 25 bp, Saccharomyces pastorianus
gggtacgaattcttggaccagtcat

SEQ ID NO: 55809 - DNA, 25 bp, Saccharomyces pastorianus
atggcaggtctcttatatggccttt

SEQ ID NO: 55810 - DNA, 25 bp, Saccharomyces pastorianus
atacgggaccgaagagaatgcacaa

SEQ ID NO: 55811 - DNA, 25 bp, Saccharomyces pastorianus
atttgcgtccaggttcgccactggc

SEQ ID NO: 55812 - DNA, 25 bp, Saccharomyces pastorianus
gagctagccaagaaactgtcatcca

SEQ ID NO: 55813 - DNA, 25 bp, Saccharomyces pastorianus
gaggaagtagaagccgtgaccacca

SEQ ID NO: 55814 - DNA, 25 bp, Saccharomyces pastorianus
ggaggtctttgacatcgacatgaag

SEQ ID NO: 55815 - DNA, 25 bp, Saccharomyces pastorianus
gaaacttatatacactcgctactgg

SEQ ID NO: 55816 - DNA, 25 bp, Saccharomyces pastorianus
gaagaaactggccaagacatttgcg

SEQ ID NO: 55817 - DNA, 25 bp, Saccharomyces pastorianus
atcctgacctttacgcacaactata

SEQ ID NO: 55818 - DNA, 25 bp, Saccharomyces pastorianus
tgaatccagtatcggtgaagccaga

SEQ ID NO: 55819 - DNA, 25 bp, Saccharomyces pastorianus
atttctgggctggaggtctttgaca

SEQ ID NO: 55820 - DNA, 25 bp, Saccharomyces pastorianus
ggctgttccgtgtccaagaacgtgg

SEQ ID NO: 55821 - DNA, 25 bp, Saccharomyces pastorianus
aataccgcattgttaccatttgtca

SEQ ID NO: 55822 - DNA, 25 bp, Saccharomyces pastorianus
gttgccctcattgcattaaataccg

SEQ ID NO: 55823 - DNA, 25 bp, Saccharomyces pastorianus
accatttgtcagtaaatacgcgggc

SEQ ID NO: 55824 - DNA, 25 bp, Saccharomyces pastorianus
tgcctgtccataatatcattgatat

SEQ ID NO: 55825 - DNA, 25 bp, Saccharomyces pastorianus
ggtattttagttgccctcattgcat

SEQ ID NO: 55826 - DNA, 25 bp, Saccharomyces pastorianus
ttttttggacttgtcaagaggcaag

SEQ ID NO: 55827 - DNA, 25 bp, Saccharomyces pastorianus
gccctcattgcattaaataccgcat

SEQ ID NO: 55828 - DNA, 25 bp, Saccharomyces pastorianus
accgcattgttaccatttgtcagta

SEQ ID NO: 55829 - DNA, 25 bp, Saccharomyces pastorianus
ttgtcagtaaatacgcgggcagaaa

SEQ ID NO: 55830 - DNA, 25 bp, Saccharomyces pastorianus
ttttagttgccctcattgcattaaa

SEQ ID NO: 55831 - DNA, 25 bp, Saccharomyces pastorianus
atacgcgggcagaaaattgagacaa

SEQ ID NO: 55832 - DNA, 25 bp, Saccharomyces pastorianus
tgtattggatgtccacgtggctgtt

SEQ ID NO: 55833 - DNA, 25 bp, Saccharomyces pastorianus
aaagtggtagagacccaacgaatct

SEQ ID NO: 55834 - DNA, 25 bp, Saccharomyces pastorianus
gaatactatgaccacaggccgttca

SEQ ID NO: 55835 - DNA, 25 bp, Saccharomyces pastorianus
ttccagttcctgttatatggcccat

SEQ ID NO: 55836 - DNA, 25 bp, Saccharomyces pastorianus
taaggcctgccaacggtataattta

SEQ ID NO: 55837 - DNA, 25 bp, Saccharomyces pastorianus
tcatggtctacctttttccttgcat

SEQ ID NO: 55838 - DNA, 25 bp, Saccharomyces pastorianus
taccgtatcgccatgtcatggtcta

SEQ ID NO: 55839 - DNA, 25 bp, Saccharomyces pastorianus
ttatatggcccattgcacgcagaaa

SEQ ID NO: 55840 - DNA, 25 bp, Saccharomyces pastorianus
gaaaacgcggtgatgcttgtcatca

SEQ ID NO: 55841 - DNA, 25 bp, Saccharomyces pastorianus
acttcaccaagtctttcggcagagg

SEQ ID NO: 55842 - DNA, 25 bp, Saccharomyces pastorianus
gagccttctatacgttcaactactt

SEQ ID NO: 55843 - DNA, 25 bp, Saccharomyces pastorianus
aaagaccctggtcacgaggctggac

SEQ ID NO: 55844 - DNA, 25 bp, Saccharomyces pastorianus
acgccgtggactgtcaggtacagca

SEQ ID NO: 55845 - DNA, 25 bp, Saccharomyces pastorianus
taaggtgtctgcacatcctcatcaa

SEQ ID NO: 55846 - DNA, 25 bp, Saccharomyces pastorianus
aggtccgactgctcttcgtacaaga

SEQ ID NO: 55847 - DNA, 25 bp, Saccharomyces pastorianus
ggccacggacgagctaaagaccctg

SEQ ID NO: 55848 - DNA, 25 bp, Saccharomyces pastorianus
gtccgagaacatcaccatatccaag

SEQ ID NO: 55849 - DNA, 25 bp, Saccharomyces pastorianus
aggactcgagaagacctgcttcgca

SEQ ID NO: 55850 - DNA, 25 bp, Saccharomyces pastorianus
ataaggaacagctgcacgagtatct

SEQ ID NO: 55851 - DNA, 25 bp, Saccharomyces pastorianus
gaaagaccacccaatgcgtgtaagg

SEQ ID NO: 55852 - DNA, 25 bp, Saccharomyces pastorianus
agagagtacttcttcaacccggaca

SEQ ID NO: 55853 - DNA, 25 bp, Saccharomyces pastorianus
gagatgcagcccagtttcgaggacg

SEQ ID NO: 55854 - DNA, 25 bp, Saccharomyces pastorianus
aggacatgcatgctttgcaggcccg

SEQ ID NO: 55855 - DNA, 25 bp, Saccharomyces pastorianus
agatcacgcgacacgtcaccaacaa

SEQ ID NO: 55856 - DNA, 25 bp, Saccharomyces pastorianus
tccatgaaacgcgacaggtccactt

SEQ ID NO: 55857 - DNA, 25 bp, Saccharomyces pastorianus
tcggcagccagatggaagacgtgca

SEQ ID NO: 55858 - DNA, 25 bp, Saccharomyces pastorianus
gactctgacgaccaccacaagaggt

SEQ ID NO: 55859 - DNA, 25 bp, Saccharomyces pastorianus
agccaaggccatgccagcgaagacg

SEQ ID NO: 55860 - DNA, 25 bp, Saccharomyces pastorianus
agcgaagacgaccacgactacgact

SEQ ID NO: 55861 - DNA, 25 bp, Saccharomyces pastorianus
aagacgtgcagaaggtgctgctctc

SEQ ID NO: 55862 - DNA, 25 bp, Saccharomyces pastorianus
gggcaggtataactccaagatcacg

SEQ ID NO: 55863 - DNA, 25 bp, Saccharomyces pastorianus
tgctgctctcgctgtccaaggacat

SEQ ID NO: 55864 - DNA, 25 bp, Saccharomyces pastorianus
gcctccgccaagaacgatggtcaca

SEQ ID NO: 55865 - DNA, 25 bp, Saccharomyces pastorianus
caaggttctgaacgacaactccaag

SEQ ID NO: 55866 - DNA, 25 bp, Saccharomyces pastorianus
ggacatctcggagaccaattctgag

SEQ ID NO: 55867 - DNA, 25 bp, Saccharomyces pastorianus
attctgagaggtcgttgatgatcac

SEQ ID NO: 55868 - DNA, 25 bp, Saccharomyces pastorianus
gctaggcaagttcaaccagctacta

SEQ ID NO: 55869 - DNA, 25 bp, Saccharomyces pastorianus
atgatcacggagacatcatcaccgt

SEQ ID NO: 55870 - DNA, 25 bp, Saccharomyces pastorianus
ctggaactggagagcatggatttaa

SEQ ID NO: 55871 - DNA, 25 bp, Saccharomyces pastorianus
atggacactcgaaccaggacagacg

SEQ ID NO: 55872 - DNA, 25 bp, Saccharomyces pastorianus
ggacagacgaggcatccacggacat

SEQ ID NO: 55873 - DNA, 25 bp, Saccharomyces pastorianus
accgctggcttggaagagtccgaca

SEQ ID NO: 55874 - DNA, 25 bp, Saccharomyces pastorianus
agacgctgtgtaaatcgctaggcaa

SEQ ID NO: 55875 - DNA, 25 bp, Saccharomyces pastorianus
aaataacgactaccgctggcttgga

SEQ ID NO: 55876 - DNA, 25 bp, Saccharomyces pastorianus
aagctcaatgtcaccaatactcaag

SEQ ID NO: 55877 - DNA, 25 bp, Saccharomyces pastorianus
aaagagtttgtctgcaaagctcaga

SEQ ID NO: 55878 - DNA, 25 bp, Saccharomyces pastorianus
acggccagtgtctcatagcaagctt

SEQ ID NO: 55879 - DNA, 25 bp, Saccharomyces pastorianus
gttataatcaagactgacggccagt

SEQ ID NO: 55880 - DNA, 25 bp, Saccharomyces pastorianus
gctcattggcctcttggacatcgag

SEQ ID NO: 55881 - DNA, 25 bp, Saccharomyces pastorianus
gaggcagcgaaatcgcgctcattgg

SEQ ID NO: 55882 - DNA, 25 bp, Saccharomyces pastorianus
agcaagcttggacggcttcgacaag

SEQ ID NO: 55883 - DNA, 25 bp, Saccharomyces pastorianus
gacaaggcagataccaagctcaatg

SEQ ID NO: 55884 - DNA, 25 bp, Saccharomyces pastorianus
aaagctcagatacttcgaggcagcg

SEQ ID NO: 55885 - DNA, 25 bp, Saccharomyces pastorianus
agcctatacgcaggctgcagggaaa

SEQ ID NO: 55886 - DNA, 25 bp, Saccharomyces pastorianus
ggcttcgacaagaacactaacctat

SEQ ID NO: 55887 - DNA, 25 bp, Saccharomyces pastorianus
aagaacaggcttgtcgcttgcggat

SEQ ID NO: 55888 - DNA, 25 bp, Saccharomyces pastorianus
atctcgggttggctttgctgatata

SEQ ID NO: 55889 - DNA, 25 bp, Saccharomyces pastorianus
gtaaattcgtcacttctgctatctt

SEQ ID NO: 55890 - DNA, 25 bp, Saccharomyces pastorianus
tacactgtctatacgctgttcgcaa

SEQ ID NO: 55891 - DNA, 25 bp, Saccharomyces pastorianus
cagcccaagatgttcagcttcgaat

SEQ ID NO: 55892 - DNA, 25 bp, Saccharomyces pastorianus
aaatttgtgatttgctctgatgccg

SEQ ID NO: 55893 - DNA, 25 bp, Saccharomyces pastorianus
atcttcatcttcatgtttcagtcga

SEQ ID NO: 55894 - DNA, 25 bp, Saccharomyces pastorianus
aagtgcaacaggtcaacagcccaag

SEQ ID NO: 55895 - DNA, 25 bp, Saccharomyces pastorianus
ctaccgcaaggactttatcgaccat

SEQ ID NO: 55896 - DNA, 25 bp, Saccharomyces pastorianus
gatgccgagggaaccttgaacccta

SEQ ID NO: 55897 - DNA, 25 bp, Saccharomyces pastorianus
agagtacaattctcgtctccacgat

SEQ ID NO: 55898 - DNA, 25 bp, Saccharomyces pastorianus
gttactaccttaggcaacggttgct

SEQ ID NO: 55899 - DNA, 25 bp, Saccharomyces pastorianus
tcaatagcactaccgatcgtgggat

SEQ ID NO: 55900 - DNA, 25 bp, Saccharomyces pastorianus
aggtacctgttgacttcgtacggca

SEQ ID NO: 55901 - DNA, 25 bp, Saccharomyces pastorianus
atgagttcgatatcgccgcacaagt

SEQ ID NO: 55902 - DNA, 25 bp, Saccharomyces pastorianus
cggttgctatgtaatcggttttcta

SEQ ID NO: 55903 - DNA, 25 bp, Saccharomyces pastorianus
gagcaacatttacaccttttttctt

SEQ ID NO: 55904 - DNA, 25 bp, Saccharomyces pastorianus
actggtgtggcaacggtaaccttca

SEQ ID NO: 55905 - DNA, 25 bp, Saccharomyces pastorianus
aattgcaagtgcagcctcttagtcc

SEQ ID NO: 55906 - DNA, 25 bp, Saccharomyces pastorianus
acgtctcaccttgtttagttttgca

SEQ ID NO: 55907 - DNA, 25 bp, Saccharomyces pastorianus
aatacttgggacttcttgaccctca

SEQ ID NO: 55908 - DNA, 25 bp, Saccharomyces pastorianus
aaatcgctcatttcagtggaggcgt

SEQ ID NO: 55909 - DNA, 25 bp, Saccharomyces pastorianus
gaagcatcatgcatggaaggccgaa

SEQ ID NO: 55910 - DNA, 25 bp, Saccharomyces pastorianus
tgaatggagactgccagaaatagca

SEQ ID NO: 55911 - DNA, 25 bp, Saccharomyces pastorianus
gtgactagcgccatgcgccaaactt

SEQ ID NO: 55912 - DNA, 25 bp, Saccharomyces pastorianus
attcatggctattgtttgaagcatc

SEQ ID NO: 55913 - DNA, 25 bp, Saccharomyces pastorianus
gcaggagaagatttcctaataccgg

SEQ ID NO: 55914 - DNA, 25 bp, Saccharomyces pastorianus
gagtaataatgctactgcaggagaa

SEQ ID NO: 55915 - DNA, 25 bp, Saccharomyces pastorianus
gatcctgtattaaacgccattgtga

SEQ ID NO: 55916 - DNA, 25 bp, Saccharomyces pastorianus
gcaaagccggtaaatttgaactagt

SEQ ID NO: 55917 - DNA, 25 bp, Saccharomyces pastorianus
aaatgacgacattgagtggatgcta

SEQ ID NO: 55918 - DNA, 25 bp, Saccharomyces pastorianus
aatgctatcggcacataatatcgtt

SEQ ID NO: 55919 - DNA, 25 bp, Saccharomyces pastorianus
ggccgaaagttagacgatcctgtat

SEQ ID NO: 55920 - DNA, 25 bp, Saccharomyces pastorianus
aaaaacgcagtcttagcagtggcta

SEQ ID NO: 55921 - DNA, 25 bp, Saccharomyces pastorianus
gagtgccctctgaaaactgcacgag

SEQ ID NO: 55922 - DNA, 25 bp, Saccharomyces pastorianus
gacactacacttgactctcggaatg

SEQ ID NO: 55923 - DNA, 25 bp, Saccharomyces pastorianus
atgtgaactactggatgctgcgctt

SEQ ID NO: 55924 - DNA, 25 bp, Saccharomyces pastorianus
atccctcctggaaagtatcttggcc

SEQ ID NO: 55925 - DNA, 25 bp, Saccharomyces pastorianus
ggtgattcgcaacatacttctagag

SEQ ID NO: 55926 - DNA, 25 bp, Saccharomyces pastorianus
gatctcacggtgtttaccagcttaa

SEQ ID NO: 55927 - DNA, 25 bp, Saccharomyces pastorianus
aaggattgcccctaagtggatctca

SEQ ID NO: 55928 - DNA, 25 bp, Saccharomyces pastorianus
ggagcatccctaagacaaccctgga

SEQ ID NO: 55929 - DNA, 25 bp, Saccharomyces pastorianus
gtggtttagagattcatccctcctg

SEQ ID NO: 55930 - DNA, 25 bp, Saccharomyces pastorianus
aagacactacggaccttgtggattc

SEQ ID NO: 55931 - DNA, 25 bp, Saccharomyces pastorianus
tcctcagcaacggtcttcaagttga

SEQ ID NO: 55932 - DNA, 25 bp, Saccharomyces pastorianus
ggcttggtagcgaattcctcagcaa

SEQ ID NO: 55933 - DNA, 25 bp, Saccharomyces pastorianus
gttaaccaagatgtctcttagctgt

SEQ ID NO: 55934 - DNA, 25 bp, Saccharomyces pastorianus
gccggatttgttaaccaagatgtct

SEQ ID NO: 55935 - DNA, 25 bp, Saccharomyces pastorianus
tactcaatggccttcttggcttctt

SEQ ID NO: 55936 - DNA, 25 bp, Saccharomyces pastorianus
agctctgaatctgttggccaagacg

SEQ ID NO: 55937 - DNA, 25 bp, Saccharomyces pastorianus
caagacggtcttgccggatttgtta

SEQ ID NO: 55938 - DNA, 25 bp, Saccharomyces pastorianus
ggcttcttccggcttggtagcgaat

SEQ ID NO: 55939 - DNA, 25 bp, Saccharomyces pastorianus
gaatctgttggccaagacggtcttg

SEQ ID NO: 55940 - DNA, 25 bp, Saccharomyces pastorianus
ttcttggcttcttccggcttggtag

SEQ ID NO: 55941 - DNA, 25 bp, Saccharomyces pastorianus
tcaagttgaatagagctctgaatct

SEQ ID NO: 55942 - DNA, 25 bp, Saccharomyces pastorianus
ggaccaagcttacagggctcgtcat

SEQ ID NO: 55943 - DNA, 25 bp, Saccharomyces pastorianus
gttggccaccaacgagagcatcatc

SEQ ID NO: 55944 - DNA, 25 bp, Saccharomyces pastorianus
gcaagacctggcacagactgttgtc

SEQ ID NO: 55945 - DNA, 25 bp, Saccharomyces pastorianus
gttgcattgatcagactgccccagt

SEQ ID NO: 55946 - DNA, 25 bp, Saccharomyces pastorianus
agtttcacgtggatgacctgaccga

SEQ ID NO: 55947 - DNA, 25 bp, Saccharomyces pastorianus
tcccgccgtgatgcagacaagttta

SEQ ID NO: 55948 - DNA, 25 bp, Saccharomyces pastorianus
tctggatgcctcttccttgagagag

SEQ ID NO: 55949 - DNA, 25 bp, Saccharomyces pastorianus
gtcgtgccgtctacaagtttttgca

SEQ ID NO: 55950 - DNA, 25 bp, Saccharomyces pastorianus
gaggttcctccaagatgtcgtgccg

SEQ ID NO: 55951 - DNA, 25 bp, Saccharomyces pastorianus
gactgttgtcattggcgttgcattg

SEQ ID NO: 55952 - DNA, 25 bp, Saccharomyces pastorianus
gagcatcatcgtggacctcttggag

SEQ ID NO: 55953 - DNA, 25 bp, Saccharomyces pastorianus
aggcgtacggccattgcattgcgat

SEQ ID NO: 55954 - DNA, 25 bp, Saccharomyces pastorianus
acgctggacatcttgctgggtgtga

SEQ ID NO: 55955 - DNA, 25 bp, Saccharomyces pastorianus
ctggtggtacgaaactaatgccctt

SEQ ID NO: 55956 - DNA, 25 bp, Saccharomyces pastorianus
gtgtgcaacatcagcgagtacgtct

SEQ ID NO: 55957 - DNA, 25 bp, Saccharomyces pastorianus
atcgtgagtttctttaccacctagc

SEQ ID NO: 55958 - DNA, 25 bp, Saccharomyces pastorianus
agagctcgttgatccagacgctgga

SEQ ID NO: 55959 - DNA, 25 bp, Saccharomyces pastorianus
ggccggatggactaacatgtcgcat

SEQ ID NO: 55960 - DNA, 25 bp, Saccharomyces pastorianus
aaaaccgcctcatgcaagactatcg

SEQ ID NO: 55961 - DNA, 25 bp, Saccharomyces pastorianus
gagcccagcgtgttttatttcaaga

SEQ ID NO: 55962 - DNA, 25 bp, Saccharomyces pastorianus
ggtgtgaagcattctgccaacgctg

SEQ ID NO: 55963 - DNA, 25 bp, Saccharomyces pastorianus
ggaaggccagtaccagatcttttct

SEQ ID NO: 55964 - DNA, 25 bp, Saccharomyces pastorianus
tgatcagtttattcttactctcccc

SEQ ID NO: 55965 - DNA, 25 bp, Saccharomyces pastorianus
ggacttagtagagatctcctttaat

SEQ ID NO: 55966 - DNA, 25 bp, Saccharomyces pastorianus
ttcgctcaattccacgcttcttaga

SEQ ID NO: 55967 - DNA, 25 bp, Saccharomyces pastorianus
ttcagccgtaattttgtccttactg

SEQ ID NO: 55968 - DNA, 25 bp, Saccharomyces pastorianus
aatgcccatcccttcaggtacagtt

SEQ ID NO: 55969 - DNA, 25 bp, Saccharomyces pastorianus
gaaatcacattaaccaatgcccatc

SEQ ID NO: 55970 - DNA, 25 bp, Saccharomyces pastorianus
tcaggtacagttcgctcaattccac

SEQ ID NO: 55971 - DNA, 25 bp, Saccharomyces pastorianus
ccacgcttcttagagcgttcttcaa

SEQ ID NO: 55972 - DNA, 25 bp, Saccharomyces pastorianus
gtccttactgttggacttagtagag

SEQ ID NO: 55973 - DNA, 25 bp, Saccharomyces pastorianus
tactctcccctatttcccgagaaat

SEQ ID NO: 55974 - DNA, 25 bp, Saccharomyces pastorianus
ttagattcagacaacttgatcagtt

SEQ ID NO: 55975 - DNA, 25 bp, Saccharomyces pastorianus
aactctatattatgaagcccttcgt

SEQ ID NO: 55976 - DNA, 25 bp, Saccharomyces pastorianus
gcttggaacaggtcctgtgcatcac

SEQ ID NO: 55977 - DNA, 25 bp, Saccharomyces pastorianus
aaagggcccgctattgcttggaaca

SEQ ID NO: 55978 - DNA, 25 bp, Saccharomyces pastorianus
gtgcatcaccccattcaattatgtt

SEQ ID NO: 55979 - DNA, 25 bp, Saccharomyces pastorianus
ggagatctctactaagtccaacagt

SEQ ID NO: 55980 - DNA, 25 bp, Saccharomyces pastorianus
aaccaggaagccgttctgcaagaat

SEQ ID NO: 55981 - DNA, 25 bp, Saccharomyces pastorianus
tgaaagccaccctattgcaaataaa

SEQ ID NO: 55982 - DNA, 25 bp, Saccharomyces pastorianus
ttgagcgaactgtacctgaagggat

SEQ ID NO: 55983 - DNA, 25 bp, Saccharomyces pastorianus
aaatctgagctcttagacaaggcgt

SEQ ID NO: 55984 - DNA, 25 bp, Saccharomyces pastorianus
ggataagttccctctagatgctgaa

SEQ ID NO: 55985 - DNA, 25 bp, Saccharomyces pastorianus
gttacctatgtctccattgctaaga

SEQ ID NO: 55986 - DNA, 25 bp, Saccharomyces pastorianus
gaatcccatcagatgcttcacaaga

SEQ ID NO: 55987 - DNA, 25 bp, Saccharomyces pastorianus
gaaaatctcctagacgaatgcattg

SEQ ID NO: 55988 - DNA, 25 bp, Saccharomyces pastorianus
gcgaattcactaacgcactacgaaa

SEQ ID NO: 55989 - DNA, 25 bp, Saccharomyces pastorianus
ggttccacttcaacgaaaatctcct

SEQ ID NO: 55990 - DNA, 25 bp, Saccharomyces pastorianus
tagggaccgtcttctgaatacgcat

SEQ ID NO: 55991 - DNA, 25 bp, Saccharomyces pastorianus
tgaattgtcctcgttgccaatttgc

SEQ ID NO: 55992 - DNA, 25 bp, Saccharomyces pastorianus
gacgggctagacgagttttcactgg

SEQ ID NO: 55993 - DNA, 25 bp, Saccharomyces pastorianus
gaatacgcatcctgacaagcttact

SEQ ID NO: 55994 - DNA, 25 bp, Saccharomyces pastorianus
gttaacccaatgtagtgcgtgcagt

SEQ ID NO: 55995 - DNA, 25 bp, Saccharomyces pastorianus
gttttcactggacgatttctcattt

SEQ ID NO: 55996 - DNA, 25 bp, Saccharomyces pastorianus
ttgccaatttgccaacgggttccac

SEQ ID NO: 55997 - DNA, 25 bp, Saccharomyces pastorianus
aagttcgtcttaagtacacctgtag

SEQ ID NO: 55998 - DNA, 25 bp, Saccharomyces pastorianus
ttggaagtatcttggcctatcacct

SEQ ID NO: 55999 - DNA, 25 bp, Saccharomyces pastorianus
aaggttcccactgtcagaggcgcca

SEQ ID NO: 56000 - DNA, 25 bp, Saccharomyces pastorianus
tggcctatcacctctggttaatgaa

SEQ ID NO: 56001 - DNA, 25 bp, Saccharomyces pastorianus
gaggtcttccacacgtcttatgaag

SEQ ID NO: 56002 - DNA, 25 bp, Saccharomyces pastorianus
ctggtgacggtgttgtgcatcacaa

SEQ ID NO: 56003 - DNA, 25 bp, Saccharomyces pastorianus
gtacacctgtagttcgagctgttac

SEQ ID NO: 56004 - DNA, 25 bp, Saccharomyces pastorianus
agttccgcaggtcatgtcagtttaa

SEQ ID NO: 56005 - DNA, 25 bp, Saccharomyces pastorianus
aagatctttactatggccctggtga

SEQ ID NO: 56006 - DNA, 25 bp, Saccharomyces pastorianus
ttaaagctacattcaacgccactac

SEQ ID NO: 56007 - DNA, 25 bp, Saccharomyces pastorianus
aataccctctgatgaggtcttccac

SEQ ID NO: 56008 - DNA, 25 bp, Saccharomyces pastorianus
cgttcttagtggacgtcttcgataa

SEQ ID NO: 56009 - DNA, 25 bp, Saccharomyces pastorianus
gtcccaccatctgcgtatgttgata

SEQ ID NO: 56010 - DNA, 25 bp, Saccharomyces pastorianus
gatttccctgtgttagatgccaatg

SEQ ID NO: 56011 - DNA, 25 bp, Saccharomyces pastorianus
ggagaccatccagaattggcatctt

SEQ ID NO: 56012 - DNA, 25 bp, Saccharomyces pastorianus
ggcatctttggaggcgccgttatga

SEQ ID NO: 56013 - DNA, 25 bp, Saccharomyces pastorianus
agatgcgccatttttatcattcgat

SEQ ID NO: 56014 - DNA, 25 bp, Saccharomyces pastorianus
cagagggttcttcgtttgaccagtt

SEQ ID NO: 56015 - DNA, 25 bp, Saccharomyces pastorianus
gccgtctccattgatttcgattatt

SEQ ID NO: 56016 - DNA, 25 bp, Saccharomyces pastorianus
tagtggcaccacacagtatcacgat

SEQ ID NO: 56017 - DNA, 25 bp, Saccharomyces pastorianus
aaggcccttttcatttatcaactct

SEQ ID NO: 56018 - DNA, 25 bp, Saccharomyces pastorianus
atgaggcagttctatcgtctacata

SEQ ID NO: 56019 - DNA, 25 bp, Saccharomyces pastorianus
taccgaattgttgtgacaggtcatt

SEQ ID NO: 56020 - DNA, 25 bp, Saccharomyces pastorianus
ggtcttgacatatgcaacaccaaag

SEQ ID NO: 56021 - DNA, 25 bp, Saccharomyces pastorianus
ggagattatattcccatggtcccac

SEQ ID NO: 56022 - DNA, 25 bp, Saccharomyces pastorianus
gggctttgatcctttggtcttgaca

SEQ ID NO: 56023 - DNA, 25 bp, Saccharomyces pastorianus
gcacagaggctttctcagattcact

SEQ ID NO: 56024 - DNA, 25 bp, Saccharomyces pastorianus
gggtattttcgagtggtccataatg

SEQ ID NO: 56025 - DNA, 25 bp, Saccharomyces pastorianus
accattttatcatccggccggtttg

SEQ ID NO: 56026 - DNA, 25 bp, Saccharomyces pastorianus
agattcactgaaacccttgggatgg

SEQ ID NO: 56027 - DNA, 25 bp, Saccharomyces pastorianus
ggaaagctatccagattaccgaatt

SEQ ID NO: 56028 - DNA, 25 bp, Saccharomyces pastorianus
ggctctaaacgatggattccgggat

SEQ ID NO: 56029 - DNA, 25 bp, Saccharomyces pastorianus
ctccgctttgcgtgaatgaatatcg

SEQ ID NO: 56030 - DNA, 25 bp, Saccharomyces pastorianus
gaaaatggtcggtcacgccaacctg

SEQ ID NO: 56031 - DNA, 25 bp, Saccharomyces pastorianus
agagacctcgacctgcggaaaatgg

SEQ ID NO: 56032 - DNA, 25 bp, Saccharomyces pastorianus
atcaccattccacagcaatacttat

SEQ ID NO: 56033 - DNA, 25 bp, Saccharomyces pastorianus
tttgtcctcttcgacggcgctgcag

SEQ ID NO: 56034 - DNA, 25 bp, Saccharomyces pastorianus
ggtccttgacgagatcgacgcctta

SEQ ID NO: 56035 - DNA, 25 bp, Saccharomyces pastorianus
acatcagcaagatacgctctaagct

SEQ ID NO: 56036 - DNA, 25 bp, Saccharomyces pastorianus
aacctgctggacagggtccttgacg

SEQ ID NO: 56037 - DNA, 25 bp, Saccharomyces pastorianus
gatcgacgccttagatggtgacttt

SEQ ID NO: 56038 - DNA, 25 bp, Saccharomyces pastorianus
tgtctcagtgcgctctggctaaacg

SEQ ID NO: 56039 - DNA, 25 bp, Saccharomyces pastorianus
tggctaaacgtcaccacagagacct

SEQ ID NO: 56040 - DNA, 25 bp, Saccharomyces pastorianus
agatggtgactttgtcctcttcgac

SEQ ID NO: 56041 - DNA, 25 bp, Saccharomyces pastorianus
agaattggcccatctagcgaaaagg

SEQ ID NO: 56042 - DNA, 25 bp, Saccharomyces pastorianus
gtactccaaactatcatcggcattc

SEQ ID NO: 56043 - DNA, 25 bp, Saccharomyces pastorianus
gaaatattccctcttggagcctgat

SEQ ID NO: 56044 - DNA, 25 bp, Saccharomyces pastorianus
tagaaaagttcaccagctccgacta

SEQ ID NO: 56045 - DNA, 25 bp, Saccharomyces pastorianus
gaccttttgaaagtcgccacttggg

SEQ ID NO: 56046 - DNA, 25 bp, Saccharomyces pastorianus
gttttgcctggccttcatgaagcgt

SEQ ID NO: 56047 - DNA, 25 bp, Saccharomyces pastorianus
atcctcgatagtccggcttggttag

SEQ ID NO: 56048 - DNA, 25 bp, Saccharomyces pastorianus
gaatgtagagaagctctccccgttt

SEQ ID NO: 56049 - DNA, 25 bp, Saccharomyces pastorianus
gctcgcaagatttaacactcacgtt

SEQ ID NO: 56050 - DNA, 25 bp, Saccharomyces pastorianus
agctcagtggctaaccattctgtta

SEQ ID NO: 56051 - DNA, 25 bp, Saccharomyces pastorianus
tcgggcgcagtttatcacggcaact

SEQ ID NO: 56052 - DNA, 25 bp, Saccharomyces pastorianus
ttaattattttagcgataccccagg

SEQ ID NO: 56053 - DNA, 25 bp, Saccharomyces pastorianus
gataaggttcatctgcacaacgaat

SEQ ID NO: 56054 - DNA, 25 bp, Saccharomyces pastorianus
agatcaggtttactcggttccacag

SEQ ID NO: 56055 - DNA, 25 bp, Saccharomyces pastorianus
agaagttagcatccctggtatattt

SEQ ID NO: 56056 - DNA, 25 bp, Saccharomyces pastorianus
taccgaggataccatctgtaccgat

SEQ ID NO: 56057 - DNA, 25 bp, Saccharomyces pastorianus
gctcattccgccatactcagaagaa

SEQ ID NO: 56058 - DNA, 25 bp, Saccharomyces pastorianus
ggttggaaaccattacgtcccatca

SEQ ID NO: 56059 - DNA, 25 bp, Saccharomyces pastorianus
caggctacccttccaaggattatga

SEQ ID NO: 56060 - DNA, 25 bp, Saccharomyces pastorianus
cattcacgggaccttctagtttcaa

SEQ ID NO: 56061 - DNA, 25 bp, Saccharomyces pastorianus
gttccaaatcggtcctggtagtaat

SEQ ID NO: 56062 - DNA, 25 bp, Saccharomyces pastorianus
tgtaccgatgagtgccaaggatatt

SEQ ID NO: 56063 - DNA, 25 bp, Saccharomyces pastorianus
actaccacatgcatgttcactgctg

SEQ ID NO: 56064 - DNA, 25 bp, Saccharomyces pastorianus
tgcatcgaggactgggcacgcgaat

SEQ ID NO: 56065 - DNA, 25 bp, Saccharomyces pastorianus
gagagccatggatcctagtaccgat

SEQ ID NO: 56066 - DNA, 25 bp, Saccharomyces pastorianus
gttcactgctgtgctagtcatttca

SEQ ID NO: 56067 - DNA, 25 bp, Saccharomyces pastorianus
tctatcgttcgctcatgcattgcaa

SEQ ID NO: 56068 - DNA, 25 bp, Saccharomyces pastorianus
tgattatcgcaacaagcctatcctc

SEQ ID NO: 56069 - DNA, 25 bp, Saccharomyces pastorianus
aatctggcccattactctatcgttc

SEQ ID NO: 56070 - DNA, 25 bp, Saccharomyces pastorianus
gatacatggacttttttcctctcgt

SEQ ID NO: 56071 - DNA, 25 bp, Saccharomyces pastorianus
cattgagtttcgcagacaggatctt

SEQ ID NO: 56072 - DNA, 25 bp, Saccharomyces pastorianus
caaatgaacctgctaccgaaagagt

SEQ ID NO: 56073 - DNA, 25 bp, Saccharomyces pastorianus
aagactgcagttttcactaccacat

SEQ ID NO: 56074 - DNA, 25 bp, Saccharomyces pastorianus
gaaggccattctgggatactgacag

SEQ ID NO: 56075 - DNA, 25 bp, Saccharomyces pastorianus
tggcagtcgtcactgggtgatttct

SEQ ID NO: 56076 - DNA, 25 bp, Saccharomyces pastorianus
ttcctgttcatgaggcccgcagaag

SEQ ID NO: 56077 - DNA, 25 bp, Saccharomyces pastorianus
gggctagctcctgaaattgttgttt

SEQ ID NO: 56078 - DNA, 25 bp, Saccharomyces pastorianus
gtgattgcatcacattgcctacaaa

SEQ ID NO: 56079 - DNA, 25 bp, Saccharomyces pastorianus
gtgatttctttgtaaagcccttcga

SEQ ID NO: 56080 - DNA, 25 bp, Saccharomyces pastorianus
ggcatctggtgccactgaaggcctt

SEQ ID NO: 56081 - DNA, 25 bp, Saccharomyces pastorianus
tgtacaatcaaactccttcagggct

SEQ ID NO: 56082 - DNA, 25 bp, Saccharomyces pastorianus
gaaattacatccagcttctacgata

SEQ ID NO: 56083 - DNA, 25 bp, Saccharomyces pastorianus
atcccttcccagtgctggataagga

SEQ ID NO: 56084 - DNA, 25 bp, Saccharomyces pastorianus
gagacgcttcgcaagtttaagtgat

SEQ ID NO: 56085 - DNA, 25 bp, Saccharomyces pastorianus
aggttaatgttttcgagaccaccat

SEQ ID NO: 56086 - DNA, 25 bp, Saccharomyces pastorianus
gaaaccatgttcttggcgtcgtgga

SEQ ID NO: 56087 - DNA, 25 bp, Saccharomyces pastorianus
taaaccttcacagcggccaggctat

SEQ ID NO: 56088 - DNA, 25 bp, Saccharomyces pastorianus
ggttatgacatttacggcccgattt

SEQ ID NO: 56089 - DNA, 25 bp, Saccharomyces pastorianus
gcctaccactactctgaacagtttg

SEQ ID NO: 56090 - DNA, 25 bp, Saccharomyces pastorianus
aagggaattccatactccagcgtaa

SEQ ID NO: 56091 - DNA, 25 bp, Saccharomyces pastorianus
gatttaccactcttttcgcaatatg

SEQ ID NO: 56092 - DNA, 25 bp, Saccharomyces pastorianus
gctttagcgtttatatccacccaaa

SEQ ID NO: 56093 - DNA, 25 bp, Saccharomyces pastorianus
gtcagccgctgggttggattattgt

SEQ ID NO: 56094 - DNA, 25 bp, Saccharomyces pastorianus
gtcatccacggcagagtttacaaca

SEQ ID NO: 56095 - DNA, 25 bp, Saccharomyces pastorianus
ttggcgggttattatctgcctacca

SEQ ID NO: 56096 - DNA, 25 bp, Saccharomyces pastorianus
gacgagttgtccactttgtctaatc

SEQ ID NO: 56097 - DNA, 25 bp, Saccharomyces pastorianus
tatgtgctattttctaccgccttca

SEQ ID NO: 56098 - DNA, 25 bp, Saccharomyces pastorianus
gtcagaaatcccttttacactactt

SEQ ID NO: 56099 - DNA, 25 bp, Saccharomyces pastorianus
ggctctttcagtggtagacatcctt

SEQ ID NO: 56100 - DNA, 25 bp, Saccharomyces pastorianus
tagaggctcacaagttcgacatttt

SEQ ID NO: 56101 - DNA, 25 bp, Saccharomyces pastorianus
ttttaacggtctgcccacatgaaag

SEQ ID NO: 56102 - DNA, 25 bp, Saccharomyces pastorianus
aggctcatttatgtcctaggtgaat

SEQ ID NO: 56103 - DNA, 25 bp, Saccharomyces pastorianus
gcgatatggcaactggttttcccaa

SEQ ID NO: 56104 - DNA, 25 bp, Saccharomyces pastorianus
gttttcccaacgatcaattccttat

SEQ ID NO: 56105 - DNA, 25 bp, Saccharomyces pastorianus
cgacattttgtctttgatcctgatt

SEQ ID NO: 56106 - DNA, 25 bp, Saccharomyces pastorianus
gaagagtctgtcgtacatctccaaa

SEQ ID NO: 56107 - DNA, 25 bp, Saccharomyces pastorianus
aattctttcttccaaggtactccag

SEQ ID NO: 56108 - DNA, 25 bp, Saccharomyces pastorianus
gctttacacagacaacgacgctact

SEQ ID NO: 56109 - DNA, 25 bp, Saccharomyces pastorianus
tccttcgaccttggtgtcacattaa

SEQ ID NO: 56110 - DNA, 25 bp, Saccharomyces pastorianus
gttcttaataacatgccttccgagt

SEQ ID NO: 56111 - DNA, 25 bp, Saccharomyces pastorianus
gctggtttggatattctccttcgac

SEQ ID NO: 56112 - DNA, 25 bp, Saccharomyces pastorianus
ttccctccagaacttgacgttatgc

SEQ ID NO: 56113 - DNA, 25 bp, Saccharomyces pastorianus
ggtactccagcgacactcaagaatg

SEQ ID NO: 56114 - DNA, 25 bp, Saccharomyces pastorianus
aagtgttgtcaaggccaattcctgc

SEQ ID NO: 56115 - DNA, 25 bp, Saccharomyces pastorianus
atttcacgcattctatgacggtctc

SEQ ID NO: 56116 - DNA, 25 bp, Saccharomyces pastorianus
attgctcagtagttctgggccagac

SEQ ID NO: 56117 - DNA, 25 bp, Saccharomyces pastorianus
ggctggcccactttataagctgtac

SEQ ID NO: 56118 - DNA, 25 bp, Saccharomyces pastorianus
gtcaatgacaccgtcaagatcgatt

SEQ ID NO: 56119 - DNA, 25 bp, Saccharomyces pastorianus
ggtaagatcaccgacttcatcaagt

SEQ ID NO: 56120 - DNA, 25 bp, Saccharomyces pastorianus
gacttcatcaagttcgacgctggta

SEQ ID NO: 56121 - DNA, 25 bp, Saccharomyces pastorianus
gacaccgtcaagatcgatttggcct

SEQ ID NO: 56122 - DNA, 25 bp, Saccharomyces pastorianus
cgacgtcaagggtagatttgccgtt

SEQ ID NO: 56123 - DNA, 25 bp, Saccharomyces pastorianus
ggtagatttgccgttcaccgtatca

SEQ ID NO: 56124 - DNA, 25 bp, Saccharomyces pastorianus
ccgttcaccgtatcaccgaagaaga

SEQ ID NO: 56125 - DNA, 25 bp, Saccharomyces pastorianus
ccgtcaagatcgatttggcctctgg

SEQ ID NO: 56126 - DNA, 25 bp, Saccharomyces pastorianus
catcaagttcgacgctggtaagcta

SEQ ID NO: 56127 - DNA, 25 bp, Saccharomyces pastorianus
gacgctggtaagctagtttacgtta

SEQ ID NO: 56128 - DNA, 25 bp, Saccharomyces pastorianus
ggcctctggtaagatcaccgacttc

SEQ ID NO: 56129 - DNA, 25 bp, Saccharomyces pastorianus
atgaacttctccatcgacacagcta

SEQ ID NO: 56130 - DNA, 25 bp, Saccharomyces pastorianus
gtggcattcgctgctgaatcttgac

SEQ ID NO: 56131 - DNA, 25 bp, Saccharomyces pastorianus
gaatcttgacacgtacgacctgctt

SEQ ID NO: 56132 - DNA, 25 bp, Saccharomyces pastorianus
atagtcggcgtcatgaacaacctca

SEQ ID NO: 56133 - DNA, 25 bp, Saccharomyces pastorianus
atggcaggcacgtgcgacgcatcga

SEQ ID NO: 56134 - DNA, 25 bp, Saccharomyces pastorianus
gatggccaattttctgcaagcgaac

SEQ ID NO: 56135 - DNA, 25 bp, Saccharomyces pastorianus
tggtgcgcttgctcaagtccatgaa

SEQ ID NO: 56136 - DNA, 25 bp, Saccharomyces pastorianus
gaggtcacctcgaacaacgcagaga

SEQ ID NO: 56137 - DNA, 25 bp, Saccharomyces pastorianus
aagcgaacttcgaagccatcaggaa

SEQ ID NO: 56138 - DNA, 25 bp, Saccharomyces pastorianus
aaaacgtcgatactctgcagggcaa

SEQ ID NO: 56139 - DNA, 25 bp, Saccharomyces pastorianus
gtgaattccattctcagcaaggctg

SEQ ID NO: 56140 - DNA, 25 bp, Saccharomyces pastorianus
gaagagcttcctccgtatggatata

SEQ ID NO: 56141 - DNA, 25 bp, Saccharomyces pastorianus
gactccatttatcgagcatcttttg

SEQ ID NO: 56142 - DNA, 25 bp, Saccharomyces pastorianus
agaagttcatctcctagcaaagcta

SEQ ID NO: 56143 - DNA, 25 bp, Saccharomyces pastorianus
agtgttcagtcaggcattgcaacca

SEQ ID NO: 56144 - DNA, 25 bp, Saccharomyces pastorianus
gggtttcgtatacgatatccctctc

SEQ ID NO: 56145 - DNA, 25 bp, Saccharomyces pastorianus
tatgctatccctacaagctgacgga

SEQ ID NO: 56146 - DNA, 25 bp, Saccharomyces pastorianus
tctcgttattgcgacgggcggaata

SEQ ID NO: 56147 - DNA, 25 bp, Saccharomyces pastorianus
ctgtccacggcccagttggtgaaaa

SEQ ID NO: 56148 - DNA, 25 bp, Saccharomyces pastorianus
ttgtttccggaaagcctgcgagaac

SEQ ID NO: 56149 - DNA, 25 bp, Saccharomyces pastorianus
aactgcatttctcggctgcaatgaa

SEQ ID NO: 56150 - DNA, 25 bp, Saccharomyces pastorianus
tttacgccacactcagaaactagga

SEQ ID NO: 56151 - DNA, 25 bp, Saccharomyces pastorianus
gattcccaaggcgactgtaacaatt

SEQ ID NO: 56152 - DNA, 25 bp, Saccharomyces pastorianus
ggagatatcctgttttattacgaga

SEQ ID NO: 56153 - DNA, 25 bp, Saccharomyces pastorianus
gtgttattgctcctcatggtataca

SEQ ID NO: 56154 - DNA, 25 bp, Saccharomyces pastorianus
ggaatggttcagatgccgtacatac

SEQ ID NO: 56155 - DNA, 25 bp, Saccharomyces pastorianus
gggtacgtaatagcacaggcgcttt

SEQ ID NO: 56156 - DNA, 25 bp, Saccharomyces pastorianus
ctatactgtcagaacgtcgtgttat

SEQ ID NO: 56157 - DNA, 25 bp, Saccharomyces pastorianus
gagatgttcaatttcgaaacgctgt

SEQ ID NO: 56158 - DNA, 25 bp, Saccharomyces pastorianus
gaaacgctgtaacggcatctatact

SEQ ID NO: 56159 - DNA, 25 bp, Saccharomyces pastorianus
tacaatttacgctcaacctggcgat

SEQ ID NO: 56160 - DNA, 25 bp, Saccharomyces pastorianus
aagtcatggctgattcccaaggcga

SEQ ID NO: 56161 - DNA, 25 bp, Saccharomyces pastorianus
tggcgatcgccttatcatcaaaacc

SEQ ID NO: 56162 - DNA, 25 bp, Saccharomyces pastorianus
aatatggccagtttcgtcccacaga

SEQ ID NO: 56163 - DNA, 25 bp, Saccharomyces pastorianus
tgttgcaaaccggtatcatctgtca

SEQ ID NO: 56164 - DNA, 25 bp, Saccharomyces pastorianus
ggcacaattgctgatcggtaacggt

SEQ ID NO: 56165 - DNA, 25 bp, Saccharomyces pastorianus
tttcgtggtatttcatctctgtgct

SEQ ID NO: 56166 - DNA, 25 bp, Saccharomyces pastorianus
tcttgttgcccatctcgattgtgat

SEQ ID NO: 56167 - DNA, 25 bp, Saccharomyces pastorianus
gatgggtcagttccatttcgtggta

SEQ ID NO: 56168 - DNA, 25 bp, Saccharomyces pastorianus
gtaacggtgggaacctctctgcgga

SEQ ID NO: 56169 - DNA, 25 bp, Saccharomyces pastorianus
actttcgcacgcttacagatgttat

SEQ ID NO: 56170 - DNA, 25 bp, Saccharomyces pastorianus
agagtttctcatcaaggacctcacc

SEQ ID NO: 56171 - DNA, 25 bp, Saccharomyces pastorianus
gattcattcttatgcagttgccctt

SEQ ID NO: 56172 - DNA, 25 bp, Saccharomyces pastorianus
aaccacttctttgcgggattcattc

SEQ ID NO: 56173 - DNA, 25 bp, Saccharomyces pastorianus
gcttcagggtaatttcccaccaaat

SEQ ID NO: 56174 - DNA, 25 bp, Saccharomyces pastorianus
gttaccagcgggtcaacaaccacaa

SEQ ID NO: 56175 - DNA, 25 bp, Saccharomyces pastorianus
agggatttcctatgccaccaaatgg

SEQ ID NO: 56176 - DNA, 25 bp, Saccharomyces pastorianus
gatatgccccaacagcaattcatgc

SEQ ID NO: 56177 - DNA, 25 bp, Saccharomyces pastorianus
ctccaggtcttgttcagttccaaaa

SEQ ID NO: 56178 - DNA, 25 bp, Saccharomyces pastorianus
gttttttccccatgcatcctaattt

SEQ ID NO: 56179 - DNA, 25 bp, Saccharomyces pastorianus
caccaaatttccaacagggctttag

SEQ ID NO: 56180 - DNA, 25 bp, Saccharomyces pastorianus
gatgggagtaccaccaaacttttca

SEQ ID NO: 56181 - DNA, 25 bp, Saccharomyces pastorianus
aggtttagtctctcatcaaggtcca

SEQ ID NO: 56182 - DNA, 25 bp, Saccharomyces pastorianus
tatgccaatgccacctatggttaat

SEQ ID NO: 56183 - DNA, 25 bp, Saccharomyces pastorianus
gaaaagcgaaactaacactccacct

SEQ ID NO: 56184 - DNA, 25 bp, Saccharomyces pastorianus
cgataacggatttcttgaacctgaa

SEQ ID NO: 56185 - DNA, 25 bp, Saccharomyces pastorianus
ataatcaagcgccatcaccaggtgc

SEQ ID NO: 56186 - DNA, 25 bp, Saccharomyces pastorianus
aaattcagagccacaaccactatcg

SEQ ID NO: 56187 - DNA, 25 bp, Saccharomyces pastorianus
actagaaagatacagactccctccc

SEQ ID NO: 56188 - DNA, 25 bp, Saccharomyces pastorianus
gaggacttgagacctgcaatgccaa

SEQ ID NO: 56189 - DNA, 25 bp, Saccharomyces pastorianus
tgcaccaatggcatttccacagcat

SEQ ID NO: 56190 - DNA, 25 bp, Saccharomyces pastorianus
aaccggttccagctcgataacggat

SEQ ID NO: 56191 - DNA, 25 bp, Saccharomyces pastorianus
tcttcaataagtccgccacttcatt

SEQ ID NO: 56192 - DNA, 25 bp, Saccharomyces pastorianus
gacaacagcacaccacgtcaaagtg

SEQ ID NO: 56193 - DNA, 25 bp, Saccharomyces pastorianus
aaaagttcatcgtctcgcttttcgt

SEQ ID NO: 56194 - DNA, 25 bp, Saccharomyces pastorianus
ctcgcttttcgtcattcttcaataa

SEQ ID NO: 56195 - DNA, 25 bp, Saccharomyces pastorianus
atttacagcaagttccagacggata

SEQ ID NO: 56196 - DNA, 25 bp, Saccharomyces pastorianus
atagtgcattgttgagaccgggccg

SEQ ID NO: 56197 - DNA, 25 bp, Saccharomyces pastorianus
cagggttttcaggtgcggatttgca

SEQ ID NO: 56198 - DNA, 25 bp, Saccharomyces pastorianus
gaagccaacagctgtggtcacgata

SEQ ID NO: 56199 - DNA, 25 bp, Saccharomyces pastorianus
atcggtacctgtctgccagtagaga

SEQ ID NO: 56200 - DNA, 25 bp, Saccharomyces pastorianus
acctgaacaggcgtccggagataat

SEQ ID NO: 56201 - DNA, 25 bp, Saccharomyces pastorianus
ttttagcagccacgagtagacccga

SEQ ID NO: 56202 - DNA, 25 bp, Saccharomyces pastorianus
ataaactacgtttgcggactctgct

SEQ ID NO: 56203 - DNA, 25 bp, Saccharomyces pastorianus
agggcctctgttacaacgcgtattt

SEQ ID NO: 56204 - DNA, 25 bp, Saccharomyces pastorianus
atcgagtacttcactatcaacggga

SEQ ID NO: 56205 - DNA, 25 bp, Saccharomyces pastorianus
aggaaggaactgacctcgccatgat

SEQ ID NO: 56206 - DNA, 25 bp, Saccharomyces pastorianus
attaccgggctatccatctttagtg

SEQ ID NO: 56207 - DNA, 25 bp, Saccharomyces pastorianus
agagacagctctgggtccattgata

SEQ ID NO: 56208 - DNA, 25 bp, Saccharomyces pastorianus
aaacgagttcatgagtattccaggt

SEQ ID NO: 56209 - DNA, 25 bp, Saccharomyces pastorianus
gaaccccttggcaggtcgtataatg

SEQ ID NO: 56210 - DNA, 25 bp, Saccharomyces pastorianus
tctacgatatcgataaggacggatt

SEQ ID NO: 56211 - DNA, 25 bp, Saccharomyces pastorianus
aaagttcgctttcaaaatctacgat

SEQ ID NO: 56212 - DNA, 25 bp, Saccharomyces pastorianus
ctatccatctttagtgggcgtgggt

SEQ ID NO: 56213 - DNA, 25 bp, Saccharomyces pastorianus
ttccaggagttcattaccgggctat

SEQ ID NO: 56214 - DNA, 25 bp, Saccharomyces pastorianus
ggtgacgtggacttccaggagttca

SEQ ID NO: 56215 - DNA, 25 bp, Saccharomyces pastorianus
aaatgccatcgaaaccacggaagtg

SEQ ID NO: 56216 - DNA, 25 bp, Saccharomyces pastorianus
gagtattccaggtgtttcttcgaac

SEQ ID NO: 56217 - DNA, 25 bp, Saccharomyces pastorianus
ggaattaacagtcggcgttcaacaa

SEQ ID NO: 56218 - DNA, 25 bp, Saccharomyces pastorianus
gtcagagaccaacttgaaccttttc

SEQ ID NO: 56219 - DNA, 25 bp, Saccharomyces pastorianus
atccaaaatcatccaaagccaacgc

SEQ ID NO: 56220 - DNA, 25 bp, Saccharomyces pastorianus
aggctaccgctgttttcgaaaccat

SEQ ID NO: 56221 - DNA, 25 bp, Saccharomyces pastorianus
gaaaccatcatcaacagcatcgtca

SEQ ID NO: 56222 - DNA, 25 bp, Saccharomyces pastorianus
aatcttttatcacaccatccatagg

SEQ ID NO: 56223 - DNA, 25 bp, Saccharomyces pastorianus
caacaagtaccgctctgggagagga

SEQ ID NO: 56224 - DNA, 25 bp, Saccharomyces pastorianus
gcctaaatttgctgtccttgatgaa

SEQ ID NO: 56225 - DNA, 25 bp, Saccharomyces pastorianus
ggcggatatcaatttggtcccttca

SEQ ID NO: 56226 - DNA, 25 bp, Saccharomyces pastorianus
gaatgtacatcagcagtggctccag

SEQ ID NO: 56227 - DNA, 25 bp, Saccharomyces pastorianus
tggtcccttcaacccacaagaaagg

SEQ ID NO: 56228 - DNA, 25 bp, Saccharomyces pastorianus
cgttcctcatacatcatattgctgc

SEQ ID NO: 56229 - DNA, 25 bp, Saccharomyces pastorianus
gaagagttgacgatggtttccaaac

SEQ ID NO: 56230 - DNA, 25 bp, Saccharomyces pastorianus
gtttccaaacacagtaccgattcag

SEQ ID NO: 56231 - DNA, 25 bp, Saccharomyces pastorianus
aaatgtcttcaacggcatctggttt

SEQ ID NO: 56232 - DNA, 25 bp, Saccharomyces pastorianus
tgctgctagcaacgctttacaactc

SEQ ID NO: 56233 - DNA, 25 bp, Saccharomyces pastorianus
gttcaaacttttgctacatgacagg

SEQ ID NO: 56234 - DNA, 25 bp, Saccharomyces pastorianus
gttttatttatcacgcaggctatcc

SEQ ID NO: 56235 - DNA, 25 bp, Saccharomyces pastorianus
agtgaatctactacgttcctcatac

SEQ ID NO: 56236 - DNA, 25 bp, Saccharomyces pastorianus
ggatggtcagctagtttccacttta

SEQ ID NO: 56237 - DNA, 25 bp, Saccharomyces pastorianus
caggacgttattgtctcttcgtgtg

SEQ ID NO: 56238 - DNA, 25 bp, Saccharomyces pastorianus
aaaggatacacagtcgacggattca

SEQ ID NO: 56239 - DNA, 25 bp, Saccharomyces pastorianus
atgccattctagtgattcgccttgt

SEQ ID NO: 56240 - DNA, 25 bp, Saccharomyces pastorianus
gagtgtgcgtgtcatgccattctag

SEQ ID NO: 56241 - DNA, 25 bp, Saccharomyces pastorianus
attcgtccctgaacgcaactgtgaa

SEQ ID NO: 56242 - DNA, 25 bp, Saccharomyces pastorianus
gataatccaagctacagctccgtga

SEQ ID NO: 56243 - DNA, 25 bp, Saccharomyces pastorianus
actcctgtggcttgcgctataagaa

SEQ ID NO: 56244 - DNA, 25 bp, Saccharomyces pastorianus
gcaagaccaactatgtaactcctgt

SEQ ID NO: 56245 - DNA, 25 bp, Saccharomyces pastorianus
tatcacagatttgccctagattccc

SEQ ID NO: 56246 - DNA, 25 bp, Saccharomyces pastorianus
attcgccttgttggagaccgtcatg

SEQ ID NO: 56247 - DNA, 25 bp, Saccharomyces pastorianus
gagatcgagatcatcttcacctgta

SEQ ID NO: 56248 - DNA, 25 bp, Saccharomyces pastorianus
gaagatcatccaactcgagcattac

SEQ ID NO: 56249 - DNA, 25 bp, Saccharomyces pastorianus
gccatcataccagagtgtgcgtgtc

SEQ ID NO: 56250 - DNA, 25 bp, Saccharomyces pastorianus
atatcgaccgtctctttctctaaaa

SEQ ID NO: 56251 - DNA, 25 bp, Saccharomyces pastorianus
aattttacctccattgtcattagct

SEQ ID NO: 56252 - DNA, 25 bp, Saccharomyces pastorianus
actccctcaatgtgtcaccaatttt

SEQ ID NO: 56253 - DNA, 25 bp, Saccharomyces pastorianus
agaaaatgcagctcgtttccctgat

SEQ ID NO: 56254 - DNA, 25 bp, Saccharomyces pastorianus
gcatcacatggcttacaacccaatt

SEQ ID NO: 56255 - DNA, 25 bp, Saccharomyces pastorianus
aatttcaacccattcacaagctcaa

SEQ ID NO: 56256 - DNA, 25 bp, Saccharomyces pastorianus
aaaagaccggagcactgccagcaat

SEQ ID NO: 56257 - DNA, 25 bp, Saccharomyces pastorianus
aatttcatcattgacgcccaacagc

SEQ ID NO: 56258 - DNA, 25 bp, Saccharomyces pastorianus
ttactacctagtccacttcaacaag

SEQ ID NO: 56259 - DNA, 25 bp, Saccharomyces pastorianus
ggaaaactaatctcactcattggtg

SEQ ID NO: 56260 - DNA, 25 bp, Saccharomyces pastorianus
tgccagcaatccttaccatcgttaa

SEQ ID NO: 56261 - DNA, 25 bp, Saccharomyces pastorianus
tgatctaagagccttggacgccact

SEQ ID NO: 56262 - DNA, 25 bp, Saccharomyces pastorianus
ttttgcttgtattccattgcctggt

SEQ ID NO: 56263 - DNA, 25 bp, Saccharomyces pastorianus
gaaatcattgacgaagccgccaaga

SEQ ID NO: 56264 - DNA, 25 bp, Saccharomyces pastorianus
ctgccaagccattccaagttactaa

SEQ ID NO: 56265 - DNA, 25 bp, Saccharomyces pastorianus
gaaatctgcagttaaacctcgccca

SEQ ID NO: 56266 - DNA, 25 bp, Saccharomyces pastorianus
cctcgcccacttgttttggaaagag

SEQ ID NO: 56267 - DNA, 25 bp, Saccharomyces pastorianus
ggacgccactaccaatgttttgaac

SEQ ID NO: 56268 - DNA, 25 bp, Saccharomyces pastorianus
gaaaaccaacagtacgttgccgccg

SEQ ID NO: 56269 - DNA, 25 bp, Saccharomyces pastorianus
attgcctggtatctctgttcctttc

SEQ ID NO: 56270 - DNA, 25 bp, Saccharomyces pastorianus
ttcctttccattcgacttacttgag

SEQ ID NO: 56271 - DNA, 25 bp, Saccharomyces pastorianus
gaagggttgctacatcattttctca

SEQ ID NO: 56272 - DNA, 25 bp, Saccharomyces pastorianus
ggatggtaccggtgttcgtattatc

SEQ ID NO: 56273 - DNA, 25 bp, Saccharomyces pastorianus
tattatcgttgctggtactctagac

SEQ ID NO: 56274 - DNA, 25 bp, Saccharomyces pastorianus
gtactctagacatcaacccagacgg

SEQ ID NO: 56275 - DNA, 25 bp, Saccharomyces pastorianus
ggtctaggtgtcttgactcatcgta

SEQ ID NO: 56276 - DNA, 25 bp, Saccharomyces pastorianus
gcatcaccttttcattctcatttat

SEQ ID NO: 56277 - DNA, 25 bp, Saccharomyces pastorianus
acccagacggtgactacggattcaa

SEQ ID NO: 56278 - DNA, 25 bp, Saccharomyces pastorianus
tctcgggctccatctcagaaagaat

SEQ ID NO: 56279 - DNA, 25 bp, Saccharomyces pastorianus
actagatttcggtccaggtggtgct

SEQ ID NO: 56280 - DNA, 25 bp, Saccharomyces pastorianus
aagaacttggtcgtatcaggcccac

SEQ ID NO: 56281 - DNA, 25 bp, Saccharomyces pastorianus
aatcttcgacgttaccagcaatggg

SEQ ID NO: 56282 - DNA, 25 bp, Saccharomyces pastorianus
taccacacaattcaaaaccactcat

SEQ ID NO: 56283 - DNA, 25 bp, Saccharomyces pastorianus
agaagatttaactcttccatcggta

SEQ ID NO: 56284 - DNA, 25 bp, Saccharomyces pastorianus
aatccgcttctgctcgtggttccta

SEQ ID NO: 56285 - DNA, 25 bp, Saccharomyces pastorianus
aagatttaactcttccatcggtaga

SEQ ID NO: 56286 - DNA, 25 bp, Saccharomyces pastorianus
gatttaactcttccatcggtagaac

SEQ ID NO: 56287 - DNA, 25 bp, Saccharomyces pastorianus
taaatccgcttctgctcgtggttcc

SEQ ID NO: 56288 - DNA, 25 bp, Saccharomyces pastorianus
cgcttctgctcgtggttcctacttg

SEQ ID NO: 56289 - DNA, 25 bp, Saccharomyces pastorianus
gctaaatccgcttctgctcgtggtt

SEQ ID NO: 56290 - DNA, 25 bp, Saccharomyces pastorianus
ctaaatccgcttctgctcgtggttc

SEQ ID NO: 56291 - DNA, 25 bp, Saccharomyces pastorianus
ttctgctcgtggttcctacttgcgt

SEQ ID NO: 56292 - DNA, 25 bp, Saccharomyces pastorianus
tgctaaatccgcttctgctcgtggt

SEQ ID NO: 56293 - DNA, 25 bp, Saccharomyces pastorianus
agatttaactcttccatcggtagaa

SEQ ID NO: 56294 - DNA, 25 bp, Saccharomyces pastorianus
ctccactaaccctgctaaatccgct

SEQ ID NO: 56295 - DNA, 25 bp, Saccharomyces pastorianus
tgctcaagctatcaacggttgggaa

SEQ ID NO: 56296 - DNA, 25 bp, Saccharomyces pastorianus
ggctagatacggtgctacctccact

SEQ ID NO: 56297 - DNA, 25 bp, Saccharomyces pastorianus
tgctacctccactaaccctgctaaa

SEQ ID NO: 56298 - DNA, 25 bp, Saccharomyces pastorianus
agatacggtgctacctccactaacc

SEQ ID NO: 56299 - DNA, 25 bp, Saccharomyces pastorianus
taaatccgcttctgctcgtggttcc

SEQ ID NO: 56300 - DNA, 25 bp, Saccharomyces pastorianus
tggctagatacggtgctacctccac

SEQ ID NO: 56301 - DNA, 25 bp, Saccharomyces pastorianus
ctagatacggtgctacctccactaa

SEQ ID NO: 56302 - DNA, 25 bp, Saccharomyces pastorianus
gctagatacggtgctacctccacta

SEQ ID NO: 56303 - DNA, 25 bp, Saccharomyces pastorianus
ttaactcttccatcggtagaaccgc

SEQ ID NO: 56304 - DNA, 25 bp, Saccharomyces pastorianus
tagatacggtgctacctccactaac

SEQ ID NO: 56305 - DNA, 25 bp, Saccharomyces pastorianus
tttttgttctactgtattggcttac

SEQ ID NO: 56306 - DNA, 25 bp, Saccharomyces pastorianus
atgttggtcctcagtttaacgatgc

SEQ ID NO: 56307 - DNA, 25 bp, Saccharomyces pastorianus
aggtatttgcaagcctataacggta

SEQ ID NO: 56308 - DNA, 25 bp, Saccharomyces pastorianus
gaaggcgttgacgtagaatctcaat

SEQ ID NO: 56309 - DNA, 25 bp, Saccharomyces pastorianus
attggcttacatggactcgtattca

SEQ ID NO: 56310 - DNA, 25 bp, Saccharomyces pastorianus
ggtagtgctactccagcaacttcaa

SEQ ID NO: 56311 - DNA, 25 bp, Saccharomyces pastorianus
gagatagattccgttcgagaaacat

SEQ ID NO: 56312 - DNA, 25 bp, Saccharomyces pastorianus
agctctattataggcattccagaag

SEQ ID NO: 56313 - DNA, 25 bp, Saccharomyces pastorianus
gaagaatcgctacatccaattgcaa

SEQ ID NO: 56314 - DNA, 25 bp, Saccharomyces pastorianus
tgaacagtcgtacatcccatagaat

SEQ ID NO: 56315 - DNA, 25 bp, Saccharomyces pastorianus
gagtttcgcaaaagtcatcctgcag

SEQ ID NO: 56316 - DNA, 25 bp, Saccharomyces pastorianus
tttaccatcccatcttgttaggaag

SEQ ID NO: 56317 - DNA, 25 bp, Saccharomyces pastorianus
gcaccgacttgcagtttgataacaa

SEQ ID NO: 56318 - DNA, 25 bp, Saccharomyces pastorianus
gatataccaatattcgcaccgactt

SEQ ID NO: 56319 - DNA, 25 bp, Saccharomyces pastorianus
tagtgacggcacaagatataccaat

SEQ ID NO: 56320 - DNA, 25 bp, Saccharomyces pastorianus
tatcactccaagtagacatagtcct

SEQ ID NO: 56321 - DNA, 25 bp, Saccharomyces pastorianus
accacgttatcaaaattatagccgg

SEQ ID NO: 56322 - DNA, 25 bp, Saccharomyces pastorianus
atagccggaatattcttggtcttgg

SEQ ID NO: 56323 - DNA, 25 bp, Saccharomyces pastorianus
ggtggtatgagtaatatcactccaa

SEQ ID NO: 56324 - DNA, 25 bp, Saccharomyces pastorianus
ttaggaagtcttcaccactccatat

SEQ ID NO: 56325 - DNA, 25 bp, Saccharomyces pastorianus
cttggtcttggaatgccacgctaaa

SEQ ID NO: 56326 - DNA, 25 bp, Saccharomyces pastorianus
atattcattataagcaaccacgtta

SEQ ID NO: 56327 - DNA, 25 bp, Saccharomyces pastorianus
gattctgaagctctacggatctttt

SEQ ID NO: 56328 - DNA, 25 bp, Saccharomyces pastorianus
tgacccattttagcaactttttcca

SEQ ID NO: 56329 - DNA, 25 bp, Saccharomyces pastorianus
gaaattttcccaggcaattcctcgt

SEQ ID NO: 56330 - DNA, 25 bp, Saccharomyces pastorianus
ggtagattgggttccagcctagaaa

SEQ ID NO: 56331 - DNA, 25 bp, Saccharomyces pastorianus
gcaattcctcgtatgcagatatatt

SEQ ID NO: 56332 - DNA, 25 bp, Saccharomyces pastorianus
gtcccgccggccaagaatctgagag

SEQ ID NO: 56333 - DNA, 25 bp, Saccharomyces pastorianus
gaatatgccaaccttcattgaatga

SEQ ID NO: 56334 - DNA, 25 bp, Saccharomyces pastorianus
aatgatttaggctccagttacgaaa

SEQ ID NO: 56335 - DNA, 25 bp, Saccharomyces pastorianus
ttttccaattacaagcgtgtcccgc

SEQ ID NO: 56336 - DNA, 25 bp, Saccharomyces pastorianus
gtttactggtttcattacgctcgag

SEQ ID NO: 56337 - DNA, 25 bp, Saccharomyces pastorianus
taaaccactggaactgttgcccaaa

SEQ ID NO: 56338 - DNA, 25 bp, Saccharomyces pastorianus
aacttcaactgacaatcttccgggc

SEQ ID NO: 56339 - DNA, 25 bp, Saccharomyces pastorianus
aagacttattccttgtttgcgctct

SEQ ID NO: 56340 - DNA, 25 bp, Saccharomyces pastorianus
gacccagattcatctgccgtatcaa

SEQ ID NO: 56341 - DNA, 25 bp, Saccharomyces pastorianus
ttccgggccgcgcagatagcaataa

SEQ ID NO: 56342 - DNA, 25 bp, Saccharomyces pastorianus
agacttttcttgtaccctgagacat

SEQ ID NO: 56343 - DNA, 25 bp, Saccharomyces pastorianus
ttgcgctctttgtctgaaatcccaa

SEQ ID NO: 56344 - DNA, 25 bp, Saccharomyces pastorianus
atttcttccccttttgatggcaata

SEQ ID NO: 56345 - DNA, 25 bp, Saccharomyces pastorianus
cgtccaaaatcgttattctttcagg

SEQ ID NO: 56346 - DNA, 25 bp, Saccharomyces pastorianus
ggcggagttgagcacgttaacttca

SEQ ID NO: 56347 - DNA, 25 bp, Saccharomyces pastorianus
aatacggcacgaaggtctggaccca

SEQ ID NO: 56348 - DNA, 25 bp, Saccharomyces pastorianus
gttattgtttatcttatctgcctta

SEQ ID NO: 56349 - DNA, 25 bp, Saccharomyces pastorianus
tcactgttctggtacgacttgccta

SEQ ID NO: 56350 - DNA, 25 bp, Saccharomyces pastorianus
gttctggtacgacttgcctaaaatg

SEQ ID NO: 56351 - DNA, 25 bp, Saccharomyces pastorianus
ttctggtacgacttgcctaaaatgg

SEQ ID NO: 56352 - DNA, 25 bp, Saccharomyces pastorianus
ctggtacgacttgcctaaaatggtg

SEQ ID NO: 56353 - DNA, 25 bp, Saccharomyces pastorianus
gtctcactgttctggtacgacttgc

SEQ ID NO: 56354 - DNA, 25 bp, Saccharomyces pastorianus
ctgttctggtacgacttgcctaaaa

SEQ ID NO: 56355 - DNA, 25 bp, Saccharomyces pastorianus
tctggtacgacttgcctaaaatggt

SEQ ID NO: 56356 - DNA, 25 bp, Saccharomyces pastorianus
actgttctggtacgacttgcctaaa

SEQ ID NO: 56357 - DNA, 25 bp, Saccharomyces pastorianus
cactgttctggtacgacttgcctaa

SEQ ID NO: 56358 - DNA, 25 bp, Saccharomyces pastorianus
agtctcactgttctggtacgacttg

SEQ ID NO: 56359 - DNA, 25 bp, Saccharomyces pastorianus
tgttctggtacgacttgcctaaaat

SEQ ID NO: 56360 - DNA, 25 bp, Saccharomyces pastorianus
gagaactacggctccaatcagtcat

SEQ ID NO: 56361 - DNA, 25 bp, Saccharomyces pastorianus
gaaacgcccttctcgaaactattgt

SEQ ID NO: 56362 - DNA, 25 bp, Saccharomyces pastorianus
tgaaaacgcctctttgtaccatcac

SEQ ID NO: 56363 - DNA, 25 bp, Saccharomyces pastorianus
gggttcgcaatgactttgccatttt

SEQ ID NO: 56364 - DNA, 25 bp, Saccharomyces pastorianus
ataatcatacctctggaacctctga

SEQ ID NO: 56365 - DNA, 25 bp, Saccharomyces pastorianus
gtccattggtatgcagacctgtcta

SEQ ID NO: 56366 - DNA, 25 bp, Saccharomyces pastorianus
acctgtctagtcttggcactgcata

SEQ ID NO: 56367 - DNA, 25 bp, Saccharomyces pastorianus
gagcatcaccgcaggattcttgttg

SEQ ID NO: 56368 - DNA, 25 bp, Saccharomyces pastorianus
gtaaaaatttcctctcgagccgtca

SEQ ID NO: 56369 - DNA, 25 bp, Saccharomyces pastorianus
ggaaccagccccattggtggaaaca

SEQ ID NO: 56370 - DNA, 25 bp, Saccharomyces pastorianus
ctctgtcgtcatctttgggtagcaa

SEQ ID NO: 56371 - DNA, 25 bp, Saccharomyces pastorianus
cgaatgatggcccaacattagaaaa

SEQ ID NO: 56372 - DNA, 25 bp, Saccharomyces pastorianus
atgatggcccaacattagaaaaata

SEQ ID NO: 56373 - DNA, 25 bp, Saccharomyces pastorianus
gtttatgtcgaatgatggcccaaca

SEQ ID NO: 56374 - DNA, 25 bp, Saccharomyces pastorianus
atgtcgaatgatggcccaacattag

SEQ ID NO: 56375 - DNA, 25 bp, Saccharomyces pastorianus
ttctacaggcgggtttatgtcgaat

SEQ ID NO: 56376 - DNA, 25 bp, Saccharomyces pastorianus
tctacaggcgggtttatgtcgaatg

SEQ ID NO: 56377 - DNA, 25 bp, Saccharomyces pastorianus
atggcccaacattagaaaaatatat

SEQ ID NO: 56378 - DNA, 25 bp, Saccharomyces pastorianus
acaggcgggtttatgtcgaatgatg

SEQ ID NO: 56379 - DNA, 25 bp, Saccharomyces pastorianus
ttatgtcgaatgatggcccaacatt

SEQ ID NO: 56380 - DNA, 25 bp, Saccharomyces pastorianus
ggtttatgtcgaatgatggcccaac

SEQ ID NO: 56381 - DNA, 25 bp, Saccharomyces pastorianus
tacaggcgggtttatgtcgaatgat

SEQ ID NO: 56382 - DNA, 25 bp, Saccharomyces pastorianus
cggagctgatccttttgattctgat

SEQ ID NO: 56383 - DNA, 25 bp, Saccharomyces pastorianus
gtttgacaacagtgatagggaaagt

SEQ ID NO: 56384 - DNA, 25 bp, Saccharomyces pastorianus
gctgatccttttgattctgatgaag

SEQ ID NO: 56385 - DNA, 25 bp, Saccharomyces pastorianus
tagtcggagctgatccttttgattc

SEQ ID NO: 56386 - DNA, 25 bp, Saccharomyces pastorianus
ttctgatgaagaaggaagtgtgcta

SEQ ID NO: 56387 - DNA, 25 bp, Saccharomyces pastorianus
atctagtcggagctgatccttttga

SEQ ID NO: 56388 - DNA, 25 bp, Saccharomyces pastorianus
gaaacggttatgtttgacaacagtg

SEQ ID NO: 56389 - DNA, 25 bp, Saccharomyces pastorianus
gagctgatccttttgattctgatga

SEQ ID NO: 56390 - DNA, 25 bp, Saccharomyces pastorianus
agttcggaaatctagtcggagctga

SEQ ID NO: 56391 - DNA, 25 bp, Saccharomyces pastorianus
gaaatctagtcggagctgatccttt

SEQ ID NO: 56392 - DNA, 25 bp, Saccharomyces pastorianus
gatgatttatttgatgagttcggaa

SEQ ID NO: 56393 - DNA, 25 bp, Saccharomyces pastorianus
gaacacacagtcaactgaaacccct

SEQ ID NO: 56394 - DNA, 25 bp, Saccharomyces pastorianus
ggaagtgctaatagaaaccgagaac

SEQ ID NO: 56395 - DNA, 25 bp, Saccharomyces pastorianus
acgtggaagtgctaatagaaaccga

SEQ ID NO: 56396 - DNA, 25 bp, Saccharomyces pastorianus
aagacgtggaagtgctaatagaaac

SEQ ID NO: 56397 - DNA, 25 bp, Saccharomyces pastorianus
acacagtcaactgaaacccctttag

SEQ ID NO: 56398 - DNA, 25 bp, Saccharomyces pastorianus
aaccgagaacacacagtcaactgaa

SEQ ID NO: 56399 - DNA, 25 bp, Saccharomyces pastorianus
tgctaatagaaaccgagaacacaca

SEQ ID NO: 56400 - DNA, 25 bp, Saccharomyces pastorianus
gaaaccgagaacacacagtcaactg

SEQ ID NO: 56401 - DNA, 25 bp, Saccharomyces pastorianus
catccttacgtcaaagacgtggaag

SEQ ID NO: 56402 - DNA, 25 bp, Saccharomyces pastorianus
cacagtcaactgaaacccctttagt

SEQ ID NO: 56403 - DNA, 25 bp, Saccharomyces pastorianus
atagaaaccgagaacacacagtcaa

SEQ ID NO: 56404 - DNA, 25 bp, Saccharomyces pastorianus
atatggactgcttgctgtatgattt

SEQ ID NO: 56405 - DNA, 25 bp, Saccharomyces pastorianus
accagtgttcaaaatcgttcttcaa

SEQ ID NO: 56406 - DNA, 25 bp, Saccharomyces pastorianus
agacgtccagagcatatcgattagt

SEQ ID NO: 56407 - DNA, 25 bp, Saccharomyces pastorianus
agttgctcaggtgaatcattcgctt

SEQ ID NO: 56408 - DNA, 25 bp, Saccharomyces pastorianus
tcattcgcttcaatccctgtgaata

SEQ ID NO: 56409 - DNA, 25 bp, Saccharomyces pastorianus
atctcaaagtactatccaggtgcga

SEQ ID NO: 56410 - DNA, 25 bp, Saccharomyces pastorianus
aataactctgtatcacgttcaagtg

SEQ ID NO: 56411 - DNA, 25 bp, Saccharomyces pastorianus
tttatcctgtccacgaagcatccaa

SEQ ID NO: 56412 - DNA, 25 bp, Saccharomyces pastorianus
attagtgtcacagcggaaccaatgg

SEQ ID NO: 56413 - DNA, 25 bp, Saccharomyces pastorianus
ggagctccctaagttattggacgct

SEQ ID NO: 56414 - DNA, 25 bp, Saccharomyces pastorianus
aagggtatttccgatgcatacatca

SEQ ID NO: 56415 - DNA, 25 bp, Saccharomyces pastorianus
aacacccacattattagagcccatt

SEQ ID NO: 56416 - DNA, 25 bp, Saccharomyces pastorianus
tggtctgttgacagcaacacccaca

SEQ ID NO: 56417 - DNA, 25 bp, Saccharomyces pastorianus
agttgacgttatggttcacgctcca

SEQ ID NO: 56418 - DNA, 25 bp, Saccharomyces pastorianus
acgctccactgttaccaatagttga

SEQ ID NO: 56419 - DNA, 25 bp, Saccharomyces pastorianus
tggaaattcgcggacaaattcccgt

SEQ ID NO: 56420 - DNA, 25 bp, Saccharomyces pastorianus
gaagcttgtaggaacaccgttgttg

SEQ ID NO: 56421 - DNA, 25 bp, Saccharomyces pastorianus
gggatgtgccaattgtacttctgga

SEQ ID NO: 56422 - DNA, 25 bp, Saccharomyces pastorianus
aagacgcggcagtcgattatacaag

SEQ ID NO: 56423 - DNA, 25 bp, Saccharomyces pastorianus
agaaggcctgttacgttggtctgtt

SEQ ID NO: 56424 - DNA, 25 bp, Saccharomyces pastorianus
ttagagcccatttacgaagttgacg

SEQ ID NO: 56425 - DNA, 25 bp, Saccharomyces pastorianus
aaattcccgttatcgaatcagcagg

SEQ ID NO: 56426 - DNA, 25 bp, Saccharomyces pastorianus
gagaaagaacgacgcagactccact

SEQ ID NO: 56427 - DNA, 25 bp, Saccharomyces pastorianus
gacgcagactccactgccgatgtca

SEQ ID NO: 56428 - DNA, 25 bp, Saccharomyces pastorianus
actccactgccgatgtcaccggatt

SEQ ID NO: 56429 - DNA, 25 bp, Saccharomyces pastorianus
gatgaagggtaagaccaacaggcca

SEQ ID NO: 56430 - DNA, 25 bp, Saccharomyces pastorianus
aagaatgccaagtacggtcaaggtg

SEQ ID NO: 56431 - DNA, 25 bp, Saccharomyces pastorianus
atgtcaccggattctcctccagaaa

SEQ ID NO: 56432 - DNA, 25 bp, Saccharomyces pastorianus
gagagtcgcaaagaatgccaagtac

SEQ ID NO: 56433 - DNA, 25 bp, Saccharomyces pastorianus
accggattctcctccagaaagatga

SEQ ID NO: 56434 - DNA, 25 bp, Saccharomyces pastorianus
aggcccaacggcaagagagtcgcaa

SEQ ID NO: 56435 - DNA, 25 bp, Saccharomyces pastorianus
ccaagtacggtcaaggtggaatgaa

SEQ ID NO: 56436 - DNA, 25 bp, Saccharomyces pastorianus
agaagtccgacagaggcaggcccaa

SEQ ID NO: 56437 - DNA, 25 bp, Saccharomyces pastorianus
ttacgcttccccagagcttttaaag

SEQ ID NO: 56438 - DNA, 25 bp, Saccharomyces pastorianus
atgtaacacttctcctttagggcca

SEQ ID NO: 56439 - DNA, 25 bp, Saccharomyces pastorianus
accggatttcgttagctcaagtctg

SEQ ID NO: 56440 - DNA, 25 bp, Saccharomyces pastorianus
aatgcatccatgaacaccaagcctg

SEQ ID NO: 56441 - DNA, 25 bp, Saccharomyces pastorianus
tgggacccgagccttccaagtatat

SEQ ID NO: 56442 - DNA, 25 bp, Saccharomyces pastorianus
aaattagcgcggcatccttatcttc

SEQ ID NO: 56443 - DNA, 25 bp, Saccharomyces pastorianus
gccagcgtccgatatttgggcatta

SEQ ID NO: 56444 - DNA, 25 bp, Saccharomyces pastorianus
gcccgactcttctcaatcagaaatt

SEQ ID NO: 56445 - DNA, 25 bp, Saccharomyces pastorianus
gaattcgaacctagactacgctctt

SEQ ID NO: 56446 - DNA, 25 bp, Saccharomyces pastorianus
agtatatcggatccttaccttacgc

SEQ ID NO: 56447 - DNA, 25 bp, Saccharomyces pastorianus
gcatatttatgattcgcccgactct

SEQ ID NO: 56448 - DNA, 25 bp, Saccharomyces pastorianus
acgatcctcgtatacaattagtagc

SEQ ID NO: 56449 - DNA, 25 bp, Saccharomyces pastorianus
gagacgatcctcgtatacaattagt

SEQ ID NO: 56450 - DNA, 25 bp, Saccharomyces pastorianus
actgggaagcggagagacgatcctc

SEQ ID NO: 56451 - DNA, 25 bp, Saccharomyces pastorianus
gtatacaattagtagcaacaacaac

SEQ ID NO: 56452 - DNA, 25 bp, Saccharomyces pastorianus
tccaactgggaagcggagagacgat

SEQ ID NO: 56453 - DNA, 25 bp, Saccharomyces pastorianus
aagcggagagacgatcctcgtatac

SEQ ID NO: 56454 - DNA, 25 bp, Saccharomyces pastorianus
gcggagagacgatcctcgtatacaa

SEQ ID NO: 56455 - DNA, 25 bp, Saccharomyces pastorianus
ggagagacgatcctcgtatacaatt

SEQ ID NO: 56456 - DNA, 25 bp, Saccharomyces pastorianus
gagagacgatcctcgtatacaatta

SEQ ID NO: 56457 - DNA, 25 bp, Saccharomyces pastorianus
gacgatcctcgtatacaattagtag

SEQ ID NO: 56458 - DNA, 25 bp, Saccharomyces pastorianus
ggaagcggagagacgatcctcgtat

SEQ ID NO: 56459 - DNA, 25 bp, Saccharomyces pastorianus
tactctcgtgcagctgcatagcaaa

SEQ ID NO: 56460 - DNA, 25 bp, Saccharomyces pastorianus
gaactttggaactctccagaggcaa

SEQ ID NO: 56461 - DNA, 25 bp, Saccharomyces pastorianus
gatttgcactctaatgtcaagccta

SEQ ID NO: 56462 - DNA, 25 bp, Saccharomyces pastorianus
tatacctgctaacgaggcggcgccg

SEQ ID NO: 56463 - DNA, 25 bp, Saccharomyces pastorianus
gaacatgagcatccatcgcggtcta

SEQ ID NO: 56464 - DNA, 25 bp, Saccharomyces pastorianus
gcaagcagcctttacacacgatggg

SEQ ID NO: 56465 - DNA, 25 bp, Saccharomyces pastorianus
atgagtccagaaggctctctcttat

SEQ ID NO: 56466 - DNA, 25 bp, Saccharomyces pastorianus
agacgattccgccagtagctacaag

SEQ ID NO: 56467 - DNA, 25 bp, Saccharomyces pastorianus
agcctatccctttacccagaaatag

SEQ ID NO: 56468 - DNA, 25 bp, Saccharomyces pastorianus
aaacagtgctactccgcaggtggaa

SEQ ID NO: 56469 - DNA, 25 bp, Saccharomyces pastorianus
atacgctctacttcaggcccaagaa

SEQ ID NO: 56470 - DNA, 25 bp, Saccharomyces pastorianus
gaaaggtcgactacacccattggaa

SEQ ID NO: 56471 - DNA, 25 bp, Saccharomyces pastorianus
ggcacaagttctgttttccaaaccg

SEQ ID NO: 56472 - DNA, 25 bp, Saccharomyces pastorianus
gaagcaattactccacggtgtcaaa

SEQ ID NO: 56473 - DNA, 25 bp, Saccharomyces pastorianus
acacccattggaagccgattgtttc

SEQ ID NO: 56474 - DNA, 25 bp, Saccharomyces pastorianus
gggcacaatcggatcggagccgtat

SEQ ID NO: 56475 - DNA, 25 bp, Saccharomyces pastorianus
tattctcttttatcctcatggtttg

SEQ ID NO: 56476 - DNA, 25 bp, Saccharomyces pastorianus
gtgaactcagaactagcggcaacta

SEQ ID NO: 56477 - DNA, 25 bp, Saccharomyces pastorianus
tgtcccgcaggtgatctttatggta

SEQ ID NO: 56478 - DNA, 25 bp, Saccharomyces pastorianus
agacatatcctttgacaccttttgc

SEQ ID NO: 56479 - DNA, 25 bp, Saccharomyces pastorianus
tcgctcattgcgacttgaaacctga

SEQ ID NO: 56480 - DNA, 25 bp, Saccharomyces pastorianus
ggtactaggacaccacctttggaag

SEQ ID NO: 56481 - DNA, 25 bp, Saccharomyces pastorianus
gttacagaaactattgacatgcgca

SEQ ID NO: 56482 - DNA, 25 bp, Saccharomyces pastorianus
cgggcatatgggtgccagagtcttt

SEQ ID NO: 56483 - DNA, 25 bp, Saccharomyces pastorianus
tagaacacaaccctcttccagagaa

SEQ ID NO: 56484 - DNA, 25 bp, Saccharomyces pastorianus
tttgaacaagattagtgccaccact

SEQ ID NO: 56485 - DNA, 25 bp, Saccharomyces pastorianus
gtgcaaactggaaatcctctctcaa

SEQ ID NO: 56486 - DNA, 25 bp, Saccharomyces pastorianus
gtcttttggcatgactacctaccta

SEQ ID NO: 56487 - DNA, 25 bp, Saccharomyces pastorianus
taagttaccccaaatcctcatagat

SEQ ID NO: 56488 - DNA, 25 bp, Saccharomyces pastorianus
gggcttaggttgacctttcagatga

SEQ ID NO: 56489 - DNA, 25 bp, Saccharomyces pastorianus
cctaccttgcaattctacaatccag

SEQ ID NO: 56490 - DNA, 25 bp, Saccharomyces pastorianus
tctcaagagggcacggttacagaaa

SEQ ID NO: 56491 - DNA, 25 bp, Saccharomyces pastorianus
gcagaagagtgttccgtgcaaactg

SEQ ID NO: 56492 - DNA, 25 bp, Saccharomyces pastorianus
tcagctacgggatttcttcgatgcg

SEQ ID NO: 56493 - DNA, 25 bp, Saccharomyces pastorianus
gctacgggatttcttcgatgcgatt

SEQ ID NO: 56494 - DNA, 25 bp, Saccharomyces pastorianus
ggatttcttcgatgcgattgaaaaa

SEQ ID NO: 56495 - DNA, 25 bp, Saccharomyces pastorianus
gtcgcttcagctacgggatttcttc

SEQ ID NO: 56496 - DNA, 25 bp, Saccharomyces pastorianus
acgggatttcttcgatgcgattgaa

SEQ ID NO: 56497 - DNA, 25 bp, Saccharomyces pastorianus
atgcagctctcggtaattttttccc

SEQ ID NO: 56498 - DNA, 25 bp, Saccharomyces pastorianus
ctacgggatttcttcgatgcgattg

SEQ ID NO: 56499 - DNA, 25 bp, Saccharomyces pastorianus
taattttttcccgtcgcttcagcta

SEQ ID NO: 56500 - DNA, 25 bp, Saccharomyces pastorianus
gcagctctcggtaattttttcccgt

SEQ ID NO: 56501 - DNA, 25 bp, Saccharomyces pastorianus
agttgtgttcaatgagaatatggga

SEQ ID NO: 56502 - DNA, 25 bp, Saccharomyces pastorianus
tgcagctctcggtaattttttcccg

SEQ ID NO: 56503 - DNA, 25 bp, Saccharomyces pastorianus
accaatttttgatccgttcccaatg

SEQ ID NO: 56504 - DNA, 25 bp, Saccharomyces pastorianus
tcactgttctactttttgttcaccg

SEQ ID NO: 56505 - DNA, 25 bp, Saccharomyces pastorianus
atcctgtcttccttattcatgttaa

SEQ ID NO: 56506 - DNA, 25 bp, Saccharomyces pastorianus
cacaatctcgtctctgatcatttca

SEQ ID NO: 56507 - DNA, 25 bp, Saccharomyces pastorianus
gtcatctacttaacttttgctcctg

SEQ ID NO: 56508 - DNA, 25 bp, Saccharomyces pastorianus
gctgcaggtgttaagagtctccgta

SEQ ID NO: 56509 - DNA, 25 bp, Saccharomyces pastorianus
actattgtttggctatcctgtcttc

SEQ ID NO: 56510 - DNA, 25 bp, Saccharomyces pastorianus
tttgctcctgcgtttatcattttaa

SEQ ID NO: 56511 - DNA, 25 bp, Saccharomyces pastorianus
aaccatctcctttgaatcactgttc

SEQ ID NO: 56512 - DNA, 25 bp, Saccharomyces pastorianus
gggctactgtctacatgcttgggta

SEQ ID NO: 56513 - DNA, 25 bp, Saccharomyces pastorianus
gaatgtcgcttccatttcttcattt

SEQ ID NO: 56514 - DNA, 25 bp, Saccharomyces pastorianus
agcattctcctttcaacttttacat

SEQ ID NO: 56515 - DNA, 25 bp, Saccharomyces pastorianus
gaactggatcctcttttaccagcat

SEQ ID NO: 56516 - DNA, 25 bp, Saccharomyces pastorianus
agaagcctcatttgcgttacttgga

SEQ ID NO: 56517 - DNA, 25 bp, Saccharomyces pastorianus
catcgctgttaactcatgtgacatt

SEQ ID NO: 56518 - DNA, 25 bp, Saccharomyces pastorianus
ttagaactatcgtcacttttggctt

SEQ ID NO: 56519 - DNA, 25 bp, Saccharomyces pastorianus
gatcgtatacgggtttttccataga

SEQ ID NO: 56520 - DNA, 25 bp, Saccharomyces pastorianus
atgtgacatttggatccgttggaat

SEQ ID NO: 56521 - DNA, 25 bp, Saccharomyces pastorianus
gaggatgccgccgatgaccagaaaa

SEQ ID NO: 56522 - DNA, 25 bp, Saccharomyces pastorianus
ggctggatctttttctcttttacaa

SEQ ID NO: 56523 - DNA, 25 bp, Saccharomyces pastorianus
aggtctgtattacgcacgggtatca

SEQ ID NO: 56524 - DNA, 25 bp, Saccharomyces pastorianus
cttttggcttcataggctggatctt

SEQ ID NO: 56525 - DNA, 25 bp, Saccharomyces pastorianus
acgccggtatcctaacagatggtaa

SEQ ID NO: 56526 - DNA, 25 bp, Saccharomyces pastorianus
ttaacgccggtatcctaacagatgg

SEQ ID NO: 56527 - DNA, 25 bp, Saccharomyces pastorianus
cggtatcctaacagatggtaagggc

SEQ ID NO: 56528 - DNA, 25 bp, Saccharomyces pastorianus
taacgccggtatcctaacagatggt

SEQ ID NO: 56529 - DNA, 25 bp, Saccharomyces pastorianus
gccggtatcctaacagatggtaagg

SEQ ID NO: 56530 - DNA, 25 bp, Saccharomyces pastorianus
ccagatggtaacttggccattggta

SEQ ID NO: 56531 - DNA, 25 bp, Saccharomyces pastorianus
cgccggtatcctaacagatggtaag

SEQ ID NO: 56532 - DNA, 25 bp, Saccharomyces pastorianus
cactccagatggtaacttggccatt

SEQ ID NO: 56533 - DNA, 25 bp, Saccharomyces pastorianus
cttaacgccggtatcctaacagatg

SEQ ID NO: 56534 - DNA, 25 bp, Saccharomyces pastorianus
aacgccggtatcctaacagatggta

SEQ ID NO: 56535 - DNA, 25 bp, Saccharomyces pastorianus
agatggtaacttggccattggtaac

SEQ ID NO: 56536 - DNA, 25 bp, Saccharomyces pastorianus
cggtatcctaacagatggtaagggc

SEQ ID NO: 56537 - DNA, 25 bp, Saccharomyces pastorianus
ggtaacttctacaatctgtacgatg

SEQ ID NO: 56538 - DNA, 25 bp, Saccharomyces pastorianus
taacgccggtatcctaacagatggt

SEQ ID NO: 56539 - DNA, 25 bp, Saccharomyces pastorianus
gtacgatgaacacattgggtctcaa

SEQ ID NO: 56540 - DNA, 25 bp, Saccharomyces pastorianus
aagccggtgctctttacgctgctgg

SEQ ID NO: 56541 - DNA, 25 bp, Saccharomyces pastorianus
ccagatggtaacttggccattggta

SEQ ID NO: 56542 - DNA, 25 bp, Saccharomyces pastorianus
cgccggtatcctaacagatggtaag

SEQ ID NO: 56543 - DNA, 25 bp, Saccharomyces pastorianus
cactccagatggtaacttggccatt

SEQ ID NO: 56544 - DNA, 25 bp, Saccharomyces pastorianus
cttaacgccggtatcctaacagatg

SEQ ID NO: 56545 - DNA, 25 bp, Saccharomyces pastorianus
aacgccggtatcctaacagatggta

SEQ ID NO: 56546 - DNA, 25 bp, Saccharomyces pastorianus
agatggtaacttggccattggtaac

SEQ ID NO: 56547 - DNA, 25 bp, Saccharomyces pastorianus
aagaaaaccctagtcgcatctgctt

SEQ ID NO: 56548 - DNA, 25 bp, Saccharomyces pastorianus
taccactaagactcaagctcctgct

SEQ ID NO: 56549 - DNA, 25 bp, Saccharomyces pastorianus
aaccctagtcgcatctgctttagct

SEQ ID NO: 56550 - DNA, 25 bp, Saccharomyces pastorianus
taagactcaagctcctgctgtctct

SEQ ID NO: 56551 - DNA, 25 bp, Saccharomyces pastorianus
atgcaatacaagaaaaccctagtcg

SEQ ID NO: 56552 - DNA, 25 bp, Saccharomyces pastorianus
gtgcagctatttcccaaatcggtga

SEQ ID NO: 56553 - DNA, 25 bp, Saccharomyces pastorianus
gggtgcagctatttcccaaatcggt

SEQ ID NO: 56554 - DNA, 25 bp, Saccharomyces pastorianus
gctactaccaagactcaagctacca

SEQ ID NO: 56555 - DNA, 25 bp, Saccharomyces pastorianus
ggtatcgctgttgaaccaatcgcta

SEQ ID NO: 56556 - DNA, 25 bp, Saccharomyces pastorianus
tgttgaaccaatcgctactaccgcc

SEQ ID NO: 56557 - DNA, 25 bp, Saccharomyces pastorianus
gactcaagctaccactaagactcaa

SEQ ID NO: 56558 - DNA, 25 bp, Saccharomyces pastorianus
taccaacggcgctagtcaagtgagt

SEQ ID NO: 56559 - DNA, 25 bp, Saccharomyces pastorianus
tctaccagtgtttgtcgggtgactt

SEQ ID NO: 56560 - DNA, 25 bp, Saccharomyces pastorianus
agtcgatgtcgtctcttgcaataat

SEQ ID NO: 56561 - DNA, 25 bp, Saccharomyces pastorianus
gtacgataaacacattggttcccag

SEQ ID NO: 56562 - DNA, 25 bp, Saccharomyces pastorianus
tggttcccagtgtcatgaagtttac

SEQ ID NO: 56563 - DNA, 25 bp, Saccharomyces pastorianus
aaaggtgctgcttctcagatcacag

SEQ ID NO: 56564 - DNA, 25 bp, Saccharomyces pastorianus
caagagcgccaacgatccagtcgat

SEQ ID NO: 56565 - DNA, 25 bp, Saccharomyces pastorianus
ggtgaccaagacactttctaccagt

SEQ ID NO: 56566 - DNA, 25 bp, Saccharomyces pastorianus
ttcaggccactaccgaagccaagag

SEQ ID NO: 56567 - DNA, 25 bp, Saccharomyces pastorianus
gtacaggcttcgaaaactaccaacg

SEQ ID NO: 56568 - DNA, 25 bp, Saccharomyces pastorianus
tcgggtgacttttacaacttgtacg

SEQ ID NO: 56569 - DNA, 25 bp, Saccharomyces pastorianus
gctgatgtccatccctcaataaaaa

SEQ ID NO: 56570 - DNA, 25 bp, Saccharomyces pastorianus
gctcgaatgcaataccacccaggaa

SEQ ID NO: 56571 - DNA, 25 bp, Saccharomyces pastorianus
aactcagccgtttgaaagccatgta

SEQ ID NO: 56572 - DNA, 25 bp, Saccharomyces pastorianus
ttgaggtcacacagcgggccaaata

SEQ ID NO: 56573 - DNA, 25 bp, Saccharomyces pastorianus
tccgatgcctctcttatgagtcaac

SEQ ID NO: 56574 - DNA, 25 bp, Saccharomyces pastorianus
gaagaccccattctccaagaggttg

SEQ ID NO: 56575 - DNA, 25 bp, Saccharomyces pastorianus
aactcaggttcgtctcaaggtgcaa

SEQ ID NO: 56576 - DNA, 25 bp, Saccharomyces pastorianus
atgtttgatcgtgtcatcatctcct

SEQ ID NO: 56577 - DNA, 25 bp, Saccharomyces pastorianus
catcattgactacaactcagccgtt

SEQ ID NO: 56578 - DNA, 25 bp, Saccharomyces pastorianus
gctggagtttgatccggaacgacga

SEQ ID NO: 56579 - DNA, 25 bp, Saccharomyces pastorianus
ggtggagacttttcatcatcatctt

SEQ ID NO: 56580 - DNA, 25 bp, Saccharomyces pastorianus
caccgtgagggtgtcgaggctttat

SEQ ID NO: 56581 - DNA, 25 bp, Saccharomyces pastorianus
tgacaaagacgccatcccagcatta

SEQ ID NO: 56582 - DNA, 25 bp, Saccharomyces pastorianus
gtgctgcctgtgctgccagagatca

SEQ ID NO: 56583 - DNA, 25 bp, Saccharomyces pastorianus
aatgttgggttctgtcgtcacctta

SEQ ID NO: 56584 - DNA, 25 bp, Saccharomyces pastorianus
aattgccaagagattacctcctggt

SEQ ID NO: 56585 - DNA, 25 bp, Saccharomyces pastorianus
aattgtattcaacacagccgcaaga

SEQ ID NO: 56586 - DNA, 25 bp, Saccharomyces pastorianus
attggacaccattacctcaaaggcc

SEQ ID NO: 56587 - DNA, 25 bp, Saccharomyces pastorianus
tacctcctggtctatcaatgttggg

SEQ ID NO: 56588 - DNA, 25 bp, Saccharomyces pastorianus
taggctatctgtttgacggcactgt

SEQ ID NO: 56589 - DNA, 25 bp, Saccharomyces pastorianus
cttcgatcaaagtctggcccaaaca

SEQ ID NO: 56590 - DNA, 25 bp, Saccharomyces pastorianus
ttccggctttacttcactgcaaaaa

SEQ ID NO: 56591 - DNA, 25 bp, Saccharomyces pastorianus
gatgctttacaatctgctaatgggt

SEQ ID NO: 56592 - DNA, 25 bp, Saccharomyces pastorianus
gcaagaccatcatcaaagattaacg

SEQ ID NO: 56593 - DNA, 25 bp, Saccharomyces pastorianus
gtggattccacaatcgatcctaaga

SEQ ID NO: 56594 - DNA, 25 bp, Saccharomyces pastorianus
gaagggtctgtcgttaccatcgagg

SEQ ID NO: 56595 - DNA, 25 bp, Saccharomyces pastorianus
gcgaatcatttactgcaagaccatc

SEQ ID NO: 56596 - DNA, 25 bp, Saccharomyces pastorianus
attattgatcactgaatctagctgt

SEQ ID NO: 56597 - DNA, 25 bp, Saccharomyces pastorianus
accatcgagggtagtgtcagtaaga

SEQ ID NO: 56598 - DNA, 25 bp, Saccharomyces pastorianus
gataccgagaattcattagatgctt

SEQ ID NO: 56599 - DNA, 25 bp, Saccharomyces pastorianus
ctagctgtgagaatggtgtggatat

SEQ ID NO: 56600 - DNA, 25 bp, Saccharomyces pastorianus
gtcaacgaagacgaggataccgaga

SEQ ID NO: 56601 - DNA, 25 bp, Saccharomyces pastorianus
gtggatattttgatcgcatgcaaca

SEQ ID NO: 56602 - DNA, 25 bp, Saccharomyces pastorianus
aaagagttatcagccatctattgtt

SEQ ID NO: 56603 - DNA, 25 bp, Saccharomyces pastorianus
tacgctactaaccacagattccgtg

SEQ ID NO: 56604 - DNA, 25 bp, Saccharomyces pastorianus
agattccgtgagaccaaccgtcgtg

SEQ ID NO: 56605 - DNA, 25 bp, Saccharomyces pastorianus
tagtttggtggattcccaggccacg

SEQ ID NO: 56606 - DNA, 25 bp, Saccharomyces pastorianus
gtcgtgtcccaggaaccgttattag

SEQ ID NO: 56607 - DNA, 25 bp, Saccharomyces pastorianus
agccatctattgttattgcaggtcc

SEQ ID NO: 56608 - DNA, 25 bp, Saccharomyces pastorianus
gaaccgttattagcggcgaattaca

SEQ ID NO: 56609 - DNA, 25 bp, Saccharomyces pastorianus
gacatcatcatcaaagactgggatt

SEQ ID NO: 56610 - DNA, 25 bp, Saccharomyces pastorianus
tctagagctagtttggtggattccc

SEQ ID NO: 56611 - DNA, 25 bp, Saccharomyces pastorianus
gcaagactagctttcttacgctact

SEQ ID NO: 56612 - DNA, 25 bp, Saccharomyces pastorianus
tgccatagcatttatcacagtgcaa

SEQ ID NO: 56613 - DNA, 25 bp, Saccharomyces pastorianus
atgctgttcctgaatacactttaga

SEQ ID NO: 56614 - DNA, 25 bp, Saccharomyces pastorianus
aaatgcctacccaggaggcgctggt

SEQ ID NO: 56615 - DNA, 25 bp, Saccharomyces pastorianus
ggctgagtgctcatttgcacgtcag

SEQ ID NO: 56616 - DNA, 25 bp, Saccharomyces pastorianus
agtccagcgacttggcagctgttga

SEQ ID NO: 56617 - DNA, 25 bp, Saccharomyces pastorianus
gagccggataaatcgcacatttcgt

SEQ ID NO: 56618 - DNA, 25 bp, Saccharomyces pastorianus
aatcgacctggatttgtccagcgat

SEQ ID NO: 56619 - DNA, 25 bp, Saccharomyces pastorianus
gatgagacacggttcctatcactgg

SEQ ID NO: 56620 - DNA, 25 bp, Saccharomyces pastorianus
tgcacgtcagatttcaagcttctat

SEQ ID NO: 56621 - DNA, 25 bp, Saccharomyces pastorianus
agatttgtgccctcagtggtggctg

SEQ ID NO: 56622 - DNA, 25 bp, Saccharomyces pastorianus
gaaaagccgcctgctgtggcaaaaa

SEQ ID NO: 56623 - DNA, 25 bp, Saccharomyces pastorianus
gaggaactctcaattagccaatcga

SEQ ID NO: 56624 - DNA, 25 bp, Saccharomyces pastorianus
tggttcaagaactaccgccgaggtt

SEQ ID NO: 56625 - DNA, 25 bp, Saccharomyces pastorianus
acataaaccactaccttcagatcta

SEQ ID NO: 56626 - DNA, 25 bp, Saccharomyces pastorianus
tgaagcacactttatcctggcagaa

SEQ ID NO: 56627 - DNA, 25 bp, Saccharomyces pastorianus
aaggttatttctcacactttggatg

SEQ ID NO: 56628 - DNA, 25 bp, Saccharomyces pastorianus
gtctctggacgatggtgttcgcaac

SEQ ID NO: 56629 - DNA, 25 bp, Saccharomyces pastorianus
agaaggatgtcgctgctccagtgac

SEQ ID NO: 56630 - DNA, 25 bp, Saccharomyces pastorianus
gtgtctctgttcacggtgccaatag

SEQ ID NO: 56631 - DNA, 25 bp, Saccharomyces pastorianus
gttcgcaacatcaccgctgtggaaa

SEQ ID NO: 56632 - DNA, 25 bp, Saccharomyces pastorianus
ggatgtatccgttttcagaacacaa

SEQ ID NO: 56633 - DNA, 25 bp, Saccharomyces pastorianus
aaactgccgtttctgccgctaatag

SEQ ID NO: 56634 - DNA, 25 bp, Saccharomyces pastorianus
tagattgggtgctaactccttgtta

SEQ ID NO: 56635 - DNA, 25 bp, Saccharomyces pastorianus
gtccgcttttgtccgccagacacag

SEQ ID NO: 56636 - DNA, 25 bp, Saccharomyces pastorianus
aagcttgctgtgtttaagagcgcaa

SEQ ID NO: 56637 - DNA, 25 bp, Saccharomyces pastorianus
gggtctgtgaatggctccacgtcca

SEQ ID NO: 56638 - DNA, 25 bp, Saccharomyces pastorianus
gtctgtgaatggctccacgtccact

SEQ ID NO: 56639 - DNA, 25 bp, Saccharomyces pastorianus
aaatctacgctctctaagcttgctg

SEQ ID NO: 56640 - DNA, 25 bp, Saccharomyces pastorianus
acgctctctaagcttgctgtgttta

SEQ ID NO: 56641 - DNA, 25 bp, Saccharomyces pastorianus
tcatcgtccgcttttgtccgccaga

SEQ ID NO: 56642 - DNA, 25 bp, Saccharomyces pastorianus
gacgttttcatcgtccgcttttgtc

SEQ ID NO: 56643 - DNA, 25 bp, Saccharomyces pastorianus
gctctctaagcttgctgtgtttaag

SEQ ID NO: 56644 - DNA, 25 bp, Saccharomyces pastorianus
gcaaggacgttttcatcgtccgctt

SEQ ID NO: 56645 - DNA, 25 bp, Saccharomyces pastorianus
aagagcgcaaggacgttttcatcgt

SEQ ID NO: 56646 - DNA, 25 bp, Saccharomyces pastorianus
gtactgccatctttactttcgaagg

SEQ ID NO: 56647 - DNA, 25 bp, Saccharomyces pastorianus
ttgacatccgtcctagcatgggtag

SEQ ID NO: 56648 - DNA, 25 bp, Saccharomyces pastorianus
ggccatattattatccacacctttg

SEQ ID NO: 56649 - DNA, 25 bp, Saccharomyces pastorianus
ttgatatacatatacccaccgctgt

SEQ ID NO: 56650 - DNA, 25 bp, Saccharomyces pastorianus
gttcaactactgtacgcattggcca

SEQ ID NO: 56651 - DNA, 25 bp, Saccharomyces pastorianus
cgttcagcctatccggaatttcaag

SEQ ID NO: 56652 - DNA, 25 bp, Saccharomyces pastorianus
gtagggtcctttgcatgcataccat

SEQ ID NO: 56653 - DNA, 25 bp, Saccharomyces pastorianus
gttgcgccattgtgcttttgacatc

SEQ ID NO: 56654 - DNA, 25 bp, Saccharomyces pastorianus
taatcttcggagtcgctgtcatggc

SEQ ID NO: 56655 - DNA, 25 bp, Saccharomyces pastorianus
agtagtcttcatatcctgtggtctc

SEQ ID NO: 56656 - DNA, 25 bp, Saccharomyces pastorianus
ttaaagaactacttccgttgcgcca

SEQ ID NO: 56657 - DNA, 25 bp, Saccharomyces pastorianus
ggtaccggtaagacattatgtgctc

SEQ ID NO: 56658 - DNA, 25 bp, Saccharomyces pastorianus
cgtgctgtcgctaatagaactgacg

SEQ ID NO: 56659 - DNA, 25 bp, Saccharomyces pastorianus
tcctggtaccggtaagacattatgt

SEQ ID NO: 56660 - DNA, 25 bp, Saccharomyces pastorianus
ggtcctcctggtaccggtaagacat

SEQ ID NO: 56661 - DNA, 25 bp, Saccharomyces pastorianus
tgtgctcgtgctgtcgctaatagaa

SEQ ID NO: 56662 - DNA, 25 bp, Saccharomyces pastorianus
gtcctcctggtaccggtaagacatt

SEQ ID NO: 56663 - DNA, 25 bp, Saccharomyces pastorianus
ttatgtgctcgtgctgtcgctaata

SEQ ID NO: 56664 - DNA, 25 bp, Saccharomyces pastorianus
tgctcgtgctgtcgctaatagaact

SEQ ID NO: 56665 - DNA, 25 bp, Saccharomyces pastorianus
tggtcctcctggtaccggtaagaca

SEQ ID NO: 56666 - DNA, 25 bp, Saccharomyces pastorianus
agacattatgtgctcgtgctgtcgc

SEQ ID NO: 56667 - DNA, 25 bp, Saccharomyces pastorianus
acattatgtgctcgtgctgtcgcta

SEQ ID NO: 56668 - DNA, 25 bp, Saccharomyces pastorianus
aaagataccgacaccctagtcatag

SEQ ID NO: 56669 - DNA, 25 bp, Saccharomyces pastorianus
gcgaggtttttgagacgagtcttct

SEQ ID NO: 56670 - DNA, 25 bp, Saccharomyces pastorianus
cccatcccatgactatagccaaaag

SEQ ID NO: 56671 - DNA, 25 bp, Saccharomyces pastorianus
gttcccctttgtcagtgcaagctga

SEQ ID NO: 56672 - DNA, 25 bp, Saccharomyces pastorianus
ggttcaatcattggatcgttcccct

SEQ ID NO: 56673 - DNA, 25 bp, Saccharomyces pastorianus
gaaatttgccttccaactctgtatt

SEQ ID NO: 56674 - DNA, 25 bp, Saccharomyces pastorianus
aaaccacttactaccatctgcaagt

SEQ ID NO: 56675 - DNA, 25 bp, Saccharomyces pastorianus
taagcgcttaccttgaatcatctaa

SEQ ID NO: 56676 - DNA, 25 bp, Saccharomyces pastorianus
gagtcttctctaccagtgccataga

SEQ ID NO: 56677 - DNA, 25 bp, Saccharomyces pastorianus
ggcggtattgattccttagtcgata

SEQ ID NO: 56678 - DNA, 25 bp, Saccharomyces pastorianus
cccagtgctgataatgcgaggtttt

SEQ ID NO: 56679 - DNA, 25 bp, Saccharomyces pastorianus
atgtgttccgacgtttggtgttgta

SEQ ID NO: 56680 - DNA, 25 bp, Saccharomyces pastorianus
gtaataaatactcgaccgcccactt

SEQ ID NO: 56681 - DNA, 25 bp, Saccharomyces pastorianus
ttctcccaaggttcggctcaaatgt

SEQ ID NO: 56682 - DNA, 25 bp, Saccharomyces pastorianus
aaaactttattcaaccaccagcgtg

SEQ ID NO: 56683 - DNA, 25 bp, Saccharomyces pastorianus
attttattgccatagctccggctat

SEQ ID NO: 56684 - DNA, 25 bp, Saccharomyces pastorianus
caaatgtttgcagctttttcgttaa

SEQ ID NO: 56685 - DNA, 25 bp, Saccharomyces pastorianus
atccaacccttttcaatttctgcat

SEQ ID NO: 56686 - DNA, 25 bp, Saccharomyces pastorianus
taggaatatcgtgttgccttctgct

SEQ ID NO: 56687 - DNA, 25 bp, Saccharomyces pastorianus
ggaaatccttcaacattcagccaag

SEQ ID NO: 56688 - DNA, 25 bp, Saccharomyces pastorianus
acccagcttcatgtatcttttcttt

SEQ ID NO: 56689 - DNA, 25 bp, Saccharomyces pastorianus
gaattcgcgttctttgatattccga

SEQ ID NO: 56690 - DNA, 25 bp, Saccharomyces pastorianus
gtgacgccttgcaaagcgactattt

SEQ ID NO: 56691 - DNA, 25 bp, Saccharomyces pastorianus
ggacggactatactaatcgtgtcat

SEQ ID NO: 56692 - DNA, 25 bp, Saccharomyces pastorianus
aaaagcgttctaatattgcatctaa

SEQ ID NO: 56693 - DNA, 25 bp, Saccharomyces pastorianus
ggctgtggttgcctactagtagaat

SEQ ID NO: 56694 - DNA, 25 bp, Saccharomyces pastorianus
tcttgacggacttttaagctgccat

SEQ ID NO: 56695 - DNA, 25 bp, Saccharomyces pastorianus
gctttatgacatgccgtggtttttc

SEQ ID NO: 56696 - DNA, 25 bp, Saccharomyces pastorianus
tgggtactcccacaataaagaactg

SEQ ID NO: 56697 - DNA, 25 bp, Saccharomyces pastorianus
gagatttactgctagtgacgccttg

SEQ ID NO: 56698 - DNA, 25 bp, Saccharomyces pastorianus
taactttatggtacaggcctcctga

SEQ ID NO: 56699 - DNA, 25 bp, Saccharomyces pastorianus
agaactggccaacgctttatgacat

SEQ ID NO: 56700 - DNA, 25 bp, Saccharomyces pastorianus
attcgaaagtattttgccatctgca

SEQ ID NO: 56701 - DNA, 25 bp, Saccharomyces pastorianus
agcaaaaaatacgataacagggaag

SEQ ID NO: 56702 - DNA, 25 bp, Saccharomyces pastorianus
aacagggaagttagtagcattaaag

SEQ ID NO: 56703 - DNA, 25 bp, Saccharomyces pastorianus
gataacagggaagttagtagcatta

SEQ ID NO: 56704 - DNA, 25 bp, Saccharomyces pastorianus
cattaaagaaactaagactacaggg

SEQ ID NO: 56705 - DNA, 25 bp, Saccharomyces pastorianus
acgataacagggaagttagtagcat

SEQ ID NO: 56706 - DNA, 25 bp, Saccharomyces pastorianus
cagggaagttagtagcattaaagaa

SEQ ID NO: 56707 - DNA, 25 bp, Saccharomyces pastorianus
gcattaaagaaactaagactacagg

SEQ ID NO: 56708 - DNA, 25 bp, Saccharomyces pastorianus
gcaaaaaatacgataacagggaagt

SEQ ID NO: 56709 - DNA, 25 bp, Saccharomyces pastorianus
acagggaagttagtagcattaaaga

SEQ ID NO: 56710 - DNA, 25 bp, Saccharomyces pastorianus
ataacagggaagttagtagcattaa

SEQ ID NO: 56711 - DNA, 25 bp, Saccharomyces pastorianus
cgataacagggaagttagtagcatt

SEQ ID NO: 56712 - DNA, 25 bp, Saccharomyces pastorianus
atagttaccagtcaaatctagataa

SEQ ID NO: 56713 - DNA, 25 bp, Saccharomyces pastorianus
tagataatgactcgcctcaaacgat

SEQ ID NO: 56714 - DNA, 25 bp, Saccharomyces pastorianus
gaatacggactaataatagttacca

SEQ ID NO: 56715 - DNA, 25 bp, Saccharomyces pastorianus
aatctagataatgactcgcctcaaa

SEQ ID NO: 56716 - DNA, 25 bp, Saccharomyces pastorianus
cgcctcaaacgatggatccaactga

SEQ ID NO: 56717 - DNA, 25 bp, Saccharomyces pastorianus
gggtcaggaaataccaattctccgt

SEQ ID NO: 56718 - DNA, 25 bp, Saccharomyces pastorianus
taatgactcgcctcaaacgatggat

SEQ ID NO: 56719 - DNA, 25 bp, Saccharomyces pastorianus
atgactcgcctcaaacgatggatcc

SEQ ID NO: 56720 - DNA, 25 bp, Saccharomyces pastorianus
gactcgcctcaaacgatggatccaa

SEQ ID NO: 56721 - DNA, 25 bp, Saccharomyces pastorianus
ccagtctctatcgaggccaccgcca

SEQ ID NO: 56722 - DNA, 25 bp, Saccharomyces pastorianus
tcgcctcaaacgatggatccaactg

SEQ ID NO: 56723 - DNA, 25 bp, Saccharomyces pastorianus
gtatgcggataggtccaacactatg

SEQ ID NO: 56724 - DNA, 25 bp, Saccharomyces pastorianus
atcctttcccgttacaatgacacat

SEQ ID NO: 56725 - DNA, 25 bp, Saccharomyces pastorianus
ggttcgagatacaataatagcacat

SEQ ID NO: 56726 - DNA, 25 bp, Saccharomyces pastorianus
acaaactcaagatatcaaggttcga

SEQ ID NO: 56727 - DNA, 25 bp, Saccharomyces pastorianus
aatgacacatcttcccaaacaaact

SEQ ID NO: 56728 - DNA, 25 bp, Saccharomyces pastorianus
aatttctatctcatttaccgaaggg

SEQ ID NO: 56729 - DNA, 25 bp, Saccharomyces pastorianus
gggcctaaatctgtagagacgtcga

SEQ ID NO: 56730 - DNA, 25 bp, Saccharomyces pastorianus
atagcacatcgtatgcggataggtc

SEQ ID NO: 56731 - DNA, 25 bp, Saccharomyces pastorianus
gcaataataatatcctttcccgtta

SEQ ID NO: 56732 - DNA, 25 bp, Saccharomyces pastorianus
gctgaatttctatctcatttaccga

SEQ ID NO: 56733 - DNA, 25 bp, Saccharomyces pastorianus
ctactacttctaattaccacaataa

SEQ ID NO: 56734 - DNA, 25 bp, Saccharomyces pastorianus
gccatggctgattgcgccaaggcaa

SEQ ID NO: 56735 - DNA, 25 bp, Saccharomyces pastorianus
gcaaattttgtgcaggccatggctg

SEQ ID NO: 56736 - DNA, 25 bp, Saccharomyces pastorianus
aacatagttcgagactacctgtatg

SEQ ID NO: 56737 - DNA, 25 bp, Saccharomyces pastorianus
gtatgaaagtttttcctacttgcga

SEQ ID NO: 56738 - DNA, 25 bp, Saccharomyces pastorianus
gaagtcgtgcctcttattttaccaa

SEQ ID NO: 56739 - DNA, 25 bp, Saccharomyces pastorianus
gagacgaaatgaagtcgtgcctctt

SEQ ID NO: 56740 - DNA, 25 bp, Saccharomyces pastorianus
tcgtgcctcttattttaccaaacag

SEQ ID NO: 56741 - DNA, 25 bp, Saccharomyces pastorianus
tgggtactcagtccccgtgaagaac

SEQ ID NO: 56742 - DNA, 25 bp, Saccharomyces pastorianus
cgtgaagaacaacaggcccgtaaga

SEQ ID NO: 56743 - DNA, 25 bp, Saccharomyces pastorianus
gactacctgtatgggtactcagtcc

SEQ ID NO: 56744 - DNA, 25 bp, Saccharomyces pastorianus
tttcctacttgcgataagcagcgag

SEQ ID NO: 56745 - DNA, 25 bp, Saccharomyces pastorianus
gtcagattgcattccactttaacgg

SEQ ID NO: 56746 - DNA, 25 bp, Saccharomyces pastorianus
gtgtcttggaattggccacacaaca

SEQ ID NO: 56747 - DNA, 25 bp, Saccharomyces pastorianus
gacttattcgatttcggatcttccg

SEQ ID NO: 56748 - DNA, 25 bp, Saccharomyces pastorianus
gatgtctttctatgccaaattctga

SEQ ID NO: 56749 - DNA, 25 bp, Saccharomyces pastorianus
gataagttctcaccagaagtcttag

SEQ ID NO: 56750 - DNA, 25 bp, Saccharomyces pastorianus
ggatcttccgaggatactccacaaa

SEQ ID NO: 56751 - DNA, 25 bp, Saccharomyces pastorianus
ggagcgcactacaaagtgtcttgga

SEQ ID NO: 56752 - DNA, 25 bp, Saccharomyces pastorianus
aatacttcaagcacattgggcgatt

SEQ ID NO: 56753 - DNA, 25 bp, Saccharomyces pastorianus
attgggcgatttagacgacttattc

SEQ ID NO: 56754 - DNA, 25 bp, Saccharomyces pastorianus
ttccatctatttcaagcctaacgca

SEQ ID NO: 56755 - DNA, 25 bp, Saccharomyces pastorianus
gttccaagactgttcaagggctcaa

SEQ ID NO: 56756 - DNA, 25 bp, Saccharomyces pastorianus
agtttaccgatccactctatgttaa

SEQ ID NO: 56757 - DNA, 25 bp, Saccharomyces pastorianus
gtgtcacaatttctactggcgttga

SEQ ID NO: 56758 - DNA, 25 bp, Saccharomyces pastorianus
tatgtgtcgagctaggtgttcttga

SEQ ID NO: 56759 - DNA, 25 bp, Saccharomyces pastorianus
aacccagcggttgtcttggcaacta

SEQ ID NO: 56760 - DNA, 25 bp, Saccharomyces pastorianus
aatgccctagatgattcgaaccctt

SEQ ID NO: 56761 - DNA, 25 bp, Saccharomyces pastorianus
gattcgaaccctttggtcattgcaa

SEQ ID NO: 56762 - DNA, 25 bp, Saccharomyces pastorianus
ttgattcaatcgcacgtgtcacaat

SEQ ID NO: 56763 - DNA, 25 bp, Saccharomyces pastorianus
taaccgctcatttacaacacgtcaa

SEQ ID NO: 56764 - DNA, 25 bp, Saccharomyces pastorianus
taccgaatgggcgagaatcactata

SEQ ID NO: 56765 - DNA, 25 bp, Saccharomyces pastorianus
gtatcattaatgtctacaccgcctg

SEQ ID NO: 56766 - DNA, 25 bp, Saccharomyces pastorianus
gagtacactgtctgaatattcggcg

SEQ ID NO: 56767 - DNA, 25 bp, Saccharomyces pastorianus
ggctatgttagaccaatcatttcat

SEQ ID NO: 56768 - DNA, 25 bp, Saccharomyces pastorianus
gtggtacaaggtgcgctactgactt

SEQ ID NO: 56769 - DNA, 25 bp, Saccharomyces pastorianus
gacgttttacagtgccctatgttaa

SEQ ID NO: 56770 - DNA, 25 bp, Saccharomyces pastorianus
gaagacgatccatatagccgaaaga

SEQ ID NO: 56771 - DNA, 25 bp, Saccharomyces pastorianus
ggagctacgtactacagctacttat

SEQ ID NO: 56772 - DNA, 25 bp, Saccharomyces pastorianus
ggaagaacccacatgcagaatataa

SEQ ID NO: 56773 - DNA, 25 bp, Saccharomyces pastorianus
gtattctgatggaacacttcgccaa

SEQ ID NO: 56774 - DNA, 25 bp, Saccharomyces pastorianus
ctactgactttgttgagctaccaag

SEQ ID NO: 56775 - DNA, 25 bp, Saccharomyces pastorianus
ggaaatgcatcgctgacgttttaca

SEQ ID NO: 56776 - DNA, 25 bp, Saccharomyces pastorianus
ggtgcgggagatttggccatttatt

SEQ ID NO: 56777 - DNA, 25 bp, Saccharomyces pastorianus
aattggcaagcactatgagactgga

SEQ ID NO: 56778 - DNA, 25 bp, Saccharomyces pastorianus
cttatttgacttccccagacggctt

SEQ ID NO: 56779 - DNA, 25 bp, Saccharomyces pastorianus
tgttttatatggcaaccctgaagag

SEQ ID NO: 56780 - DNA, 25 bp, Saccharomyces pastorianus
taattaggtcgtttgccacagccgg

SEQ ID NO: 56781 - DNA, 25 bp, Saccharomyces pastorianus
tgcgtcaatttagccaagtctcttt

SEQ ID NO: 56782 - DNA, 25 bp, Saccharomyces pastorianus
aagcacaggaacttctcgaacgaat

SEQ ID NO: 56783 - DNA, 25 bp, Saccharomyces pastorianus
gctctcccgccaaagtcaattaatt

SEQ ID NO: 56784 - DNA, 25 bp, Saccharomyces pastorianus
gaacctggatagattgagcgataca

SEQ ID NO: 56785 - DNA, 25 bp, Saccharomyces pastorianus
aagattgcacagtaccttttccaaa

SEQ ID NO: 56786 - DNA, 25 bp, Saccharomyces pastorianus
ttcaatgtcttgataccgtcgctct

SEQ ID NO: 56787 - DNA, 25 bp, Saccharomyces pastorianus
acagccggtgcagtttccagaacta

SEQ ID NO: 56788 - DNA, 25 bp, Saccharomyces pastorianus
aagtctctttgaggcaagcacagga

SEQ ID NO: 56789 - DNA, 25 bp, Saccharomyces pastorianus
atctctttcccattacgggctaggt

SEQ ID NO: 56790 - DNA, 25 bp, Saccharomyces pastorianus
aatactcaaggcactatctctttcc

SEQ ID NO: 56791 - DNA, 25 bp, Saccharomyces pastorianus
gtaatgaactacacagaggacctga

SEQ ID NO: 56792 - DNA, 25 bp, Saccharomyces pastorianus
atacactcagtattgcctcacgaaa

SEQ ID NO: 56793 - DNA, 25 bp, Saccharomyces pastorianus
aaaagggctattcgcatttcagaaa

SEQ ID NO: 56794 - DNA, 25 bp, Saccharomyces pastorianus
aactgcaagggagctatacactcag

SEQ ID NO: 56795 - DNA, 25 bp, Saccharomyces pastorianus
tcttgatgaagtcttgctcgcgcag

SEQ ID NO: 56796 - DNA, 25 bp, Saccharomyces pastorianus
gctcgcgcaggcagaactaggttca

SEQ ID NO: 56797 - DNA, 25 bp, Saccharomyces pastorianus
tgctactgacagataggcctcttga

SEQ ID NO: 56798 - DNA, 25 bp, Saccharomyces pastorianus
ataagggacggctgaaggcctctaa

SEQ ID NO: 56799 - DNA, 25 bp, Saccharomyces pastorianus
gcttgcttacaatattcggctgatt

SEQ ID NO: 56800 - DNA, 25 bp, Saccharomyces pastorianus
atcgagcctctttagcagtagcatc

SEQ ID NO: 56801 - DNA, 25 bp, Saccharomyces pastorianus
gatttcccaggttctggatctgctt

SEQ ID NO: 56802 - DNA, 25 bp, Saccharomyces pastorianus
gaacccagcggttggagtttagcca

SEQ ID NO: 56803 - DNA, 25 bp, Saccharomyces pastorianus
tacctcaaagccctcttctaaggaa

SEQ ID NO: 56804 - DNA, 25 bp, Saccharomyces pastorianus
acttcaaatattccagttccacctc

SEQ ID NO: 56805 - DNA, 25 bp, Saccharomyces pastorianus
atttgaagccgcatacgatttccca

SEQ ID NO: 56806 - DNA, 25 bp, Saccharomyces pastorianus
gatctgcttcagagttgccattgaa

SEQ ID NO: 56807 - DNA, 25 bp, Saccharomyces pastorianus
agtagcatcccaacagcgcaagaaa

SEQ ID NO: 56808 - DNA, 25 bp, Saccharomyces pastorianus
tgatggtttggcttccgcattggca

SEQ ID NO: 56809 - DNA, 25 bp, Saccharomyces pastorianus
gaaactgttcagtccactggtaatg

SEQ ID NO: 56810 - DNA, 25 bp, Saccharomyces pastorianus
ctcctcctatgggtgaacctgaaga

SEQ ID NO: 56811 - DNA, 25 bp, Saccharomyces pastorianus
aatggacacctatcaagtatttcga

SEQ ID NO: 56812 - DNA, 25 bp, Saccharomyces pastorianus
gccgctgatcaagcatttgctcaaa

SEQ ID NO: 56813 - DNA, 25 bp, Saccharomyces pastorianus
gccgggaatctttgctgcgatgaat

SEQ ID NO: 56814 - DNA, 25 bp, Saccharomyces pastorianus
aattcgtcgttaagcattatgcagg

SEQ ID NO: 56815 - DNA, 25 bp, Saccharomyces pastorianus
aggtttctttctacgatgtttccag

SEQ ID NO: 56816 - DNA, 25 bp, Saccharomyces pastorianus
cgatgtttccagacgatgttgataa

SEQ ID NO: 56817 - DNA, 25 bp, Saccharomyces pastorianus
atgaatgattccattgcaaccgccc

SEQ ID NO: 56818 - DNA, 25 bp, Saccharomyces pastorianus
ttccctggtgccgataagtcaattg

SEQ ID NO: 56819 - DNA, 25 bp, Saccharomyces pastorianus
ttttgagcataactcctttgagcaa

SEQ ID NO: 56820 - DNA, 25 bp, Saccharomyces pastorianus
ttaatctatctttgcaagccttccc

SEQ ID NO: 56821 - DNA, 25 bp, Saccharomyces pastorianus
aaggacctgatcgagctagttggca

SEQ ID NO: 56822 - DNA, 25 bp, Saccharomyces pastorianus
caggctcttccggtgcaacaataag

SEQ ID NO: 56823 - DNA, 25 bp, Saccharomyces pastorianus
aagtacgatgaaaccgccgatgtct

SEQ ID NO: 56824 - DNA, 25 bp, Saccharomyces pastorianus
atctccaagaaccaaggcctattcg

SEQ ID NO: 56825 - DNA, 25 bp, Saccharomyces pastorianus
gacaagtccctgactgtcactgaat

SEQ ID NO: 56826 - DNA, 25 bp, Saccharomyces pastorianus
aagccagtcatcagttctatcgtga

SEQ ID NO: 56827 - DNA, 25 bp, Saccharomyces pastorianus
atacggacttggatggttccatctc

SEQ ID NO: 56828 - DNA, 25 bp, Saccharomyces pastorianus
gtggcgatttttcgtatacggactt

SEQ ID NO: 56829 - DNA, 25 bp, Saccharomyces pastorianus
gccgatgtctttttgaagccagtca

SEQ ID NO: 56830 - DNA, 25 bp, Saccharomyces pastorianus
tgactcaccattcccaggtgacaag

SEQ ID NO: 56831 - DNA, 25 bp, Saccharomyces pastorianus
agattatcgggcacaggctcttccg

SEQ ID NO: 56832 - DNA, 25 bp, Saccharomyces pastorianus
aagccctaatgttgttgactcacca

SEQ ID NO: 56833 - DNA, 25 bp, Saccharomyces pastorianus
ttgaactgctacgaagtcccaaccg

SEQ ID NO: 56834 - DNA, 25 bp, Saccharomyces pastorianus
actgctacgaagtcccaaccggctg

SEQ ID NO: 56835 - DNA, 25 bp, Saccharomyces pastorianus
agggttgaactgctacgaagtccca

SEQ ID NO: 56836 - DNA, 25 bp, Saccharomyces pastorianus
gggttgaactgctacgaagtcccaa

SEQ ID NO: 56837 - DNA, 25 bp, Saccharomyces pastorianus
tacgaagtcccaaccggctggaagt

SEQ ID NO: 56838 - DNA, 25 bp, Saccharomyces pastorianus
gttgaactgctacgaagtcccaacc

SEQ ID NO: 56839 - DNA, 25 bp, Saccharomyces pastorianus
ggttgaactgctacgaagtcccaac

SEQ ID NO: 56840 - DNA, 25 bp, Saccharomyces pastorianus
tgaactgctacgaagtcccaaccgg

SEQ ID NO: 56841 - DNA, 25 bp, Saccharomyces pastorianus
tcgtttcgcaataaagaaagggttg

SEQ ID NO: 56842 - DNA, 25 bp, Saccharomyces pastorianus
gaaagggttgaactgctacgaagtc

SEQ ID NO: 56843 - DNA, 25 bp, Saccharomyces pastorianus
gaactgctacgaagtcccaaccggc

SEQ ID NO: 56844 - DNA, 25 bp, Saccharomyces pastorianus
gtttaccagccgaagaagtgctcca

SEQ ID NO: 56845 - DNA, 25 bp, Saccharomyces pastorianus
tgatctacggatatgggcctgcttt

SEQ ID NO: 56846 - DNA, 25 bp, Saccharomyces pastorianus
gacccaaatctaacttatgctcgca

SEQ ID NO: 56847 - DNA, 25 bp, Saccharomyces pastorianus
tgagaaaatcgcctttggtgccgct

SEQ ID NO: 56848 - DNA, 25 bp, Saccharomyces pastorianus
tctacctgacttcggcggtttacac

SEQ ID NO: 56849 - DNA, 25 bp, Saccharomyces pastorianus
tcaccaggtgactctgttgctatta

SEQ ID NO: 56850 - DNA, 25 bp, Saccharomyces pastorianus
aattgacccaaccaaggcatatgtt

SEQ ID NO: 56851 - DNA, 25 bp, Saccharomyces pastorianus
ttatgctcgcactcttgttgacaga

SEQ ID NO: 56852 - DNA, 25 bp, Saccharomyces pastorianus
tacgggttagctcgttcattcccaa

SEQ ID NO: 56853 - DNA, 25 bp, Saccharomyces pastorianus
tattgccgaatatgcctcagaaatt

SEQ ID NO: 56854 - DNA, 25 bp, Saccharomyces pastorianus
gaacggtatcacaggaccatatggt

SEQ ID NO: 56855 - DNA, 25 bp, Saccharomyces pastorianus
ttagtttattaagccgtgatccgac

SEQ ID NO: 56856 - DNA, 25 bp, Saccharomyces pastorianus
atatgagatgctgaccggtcttcca

SEQ ID NO: 56857 - DNA, 25 bp, Saccharomyces pastorianus
ggtcttccaccttattatgacgagg

SEQ ID NO: 56858 - DNA, 25 bp, Saccharomyces pastorianus
ggtggacgctaggtgtcttgttata

SEQ ID NO: 56859 - DNA, 25 bp, Saccharomyces pastorianus
caagccagctgttagtaatgccatg

SEQ ID NO: 56860 - DNA, 25 bp, Saccharomyces pastorianus
gacgaaatcagaaaccatccctttt

SEQ ID NO: 56861 - DNA, 25 bp, Saccharomyces pastorianus
aaccatccctttttcagccaattgt

SEQ ID NO: 56862 - DNA, 25 bp, Saccharomyces pastorianus
tccagaatatttggcgccggagcta

SEQ ID NO: 56863 - DNA, 25 bp, Saccharomyces pastorianus
ggcgccggagctactattaggttta

SEQ ID NO: 56864 - DNA, 25 bp, Saccharomyces pastorianus
cactttgtgactttgggctgtgcaa

SEQ ID NO: 56865 - DNA, 25 bp, Saccharomyces pastorianus
ttcggcggctggacatacgtcggaa

SEQ ID NO: 56866 - DNA, 25 bp, Saccharomyces pastorianus
caagcactcgattgggacgtatgaa

SEQ ID NO: 56867 - DNA, 25 bp, Saccharomyces pastorianus
gacaagtagatccaagcactcgatt

SEQ ID NO: 56868 - DNA, 25 bp, Saccharomyces pastorianus
gagaaggctcgtctgctggaataat

SEQ ID NO: 56869 - DNA, 25 bp, Saccharomyces pastorianus
ggacaaatcggaattcctccagctt

SEQ ID NO: 56870 - DNA, 25 bp, Saccharomyces pastorianus
atgctgacgctgacaattttttcgg

SEQ ID NO: 56871 - DNA, 25 bp, Saccharomyces pastorianus
ggaagagttaccacccagatatgct

SEQ ID NO: 56872 - DNA, 25 bp, Saccharomyces pastorianus
gattacaatgaaacttctccgttat

SEQ ID NO: 56873 - DNA, 25 bp, Saccharomyces pastorianus
ataccccttctgaaatatccggtgg

SEQ ID NO: 56874 - DNA, 25 bp, Saccharomyces pastorianus
atatccggtggagctaccaataaga

SEQ ID NO: 56875 - DNA, 25 bp, Saccharomyces pastorianus
ggaattcctccagcttataacggaa

SEQ ID NO: 56876 - DNA, 25 bp, Saccharomyces pastorianus
aaaggatatcctctaatttcgacag

SEQ ID NO: 56877 - DNA, 25 bp, Saccharomyces pastorianus
gactaccgttccatatccttatttt

SEQ ID NO: 56878 - DNA, 25 bp, Saccharomyces pastorianus
tgcatctccgggtgggtttgatgac

SEQ ID NO: 56879 - DNA, 25 bp, Saccharomyces pastorianus
tgccccacaacaagaaggacgcggt

SEQ ID NO: 56880 - DNA, 25 bp, Saccharomyces pastorianus
gaatgctttgggtacacgaacttca

SEQ ID NO: 56881 - DNA, 25 bp, Saccharomyces pastorianus
aaagttacttcttgttgcccagtat

SEQ ID NO: 56882 - DNA, 25 bp, Saccharomyces pastorianus
cagtaatgaattatcccttgcccca

SEQ ID NO: 56883 - DNA, 25 bp, Saccharomyces pastorianus
tgaaggttttcagacatatcccaaa

SEQ ID NO: 56884 - DNA, 25 bp, Saccharomyces pastorianus
tggattccagctttgcatctccggg

SEQ ID NO: 56885 - DNA, 25 bp, Saccharomyces pastorianus
atagcggcatcttgctggattccag

SEQ ID NO: 56886 - DNA, 25 bp, Saccharomyces pastorianus
aaggacgatcagcaattcattaagg

SEQ ID NO: 56887 - DNA, 25 bp, Saccharomyces pastorianus
gtttgatgacgagatcgctctgcaa

SEQ ID NO: 56888 - DNA, 25 bp, Saccharomyces pastorianus
tccaagcatcttgagggtattccaa

SEQ ID NO: 56889 - DNA, 25 bp, Saccharomyces pastorianus
gagacattacagaagttgggtgcta

SEQ ID NO: 56890 - DNA, 25 bp, Saccharomyces pastorianus
gttggaatccaagagtgacagtgaa

SEQ ID NO: 56891 - DNA, 25 bp, Saccharomyces pastorianus
cttggagactccgtacgagaatgat

SEQ ID NO: 56892 - DNA, 25 bp, Saccharomyces pastorianus
cagaaaaagcaagcgggaggtccca

SEQ ID NO: 56893 - DNA, 25 bp, Saccharomyces pastorianus
gaaaaagagctactgctgaatcaaa

SEQ ID NO: 56894 - DNA, 25 bp, Saccharomyces pastorianus
aactgttagagtggttggaatccaa

SEQ ID NO: 56895 - DNA, 25 bp, Saccharomyces pastorianus
attgcccattccaagcatcttgagg

SEQ ID NO: 56896 - DNA, 25 bp, Saccharomyces pastorianus
aagtcgcgtaaggaacaattagata

SEQ ID NO: 56897 - DNA, 25 bp, Saccharomyces pastorianus
attccaattgtcttggagactccgt

SEQ ID NO: 56898 - DNA, 25 bp, Saccharomyces pastorianus
agtgacagtgaattgctagaagaca

SEQ ID NO: 56899 - DNA, 25 bp, Saccharomyces pastorianus
taccgcacggccaatatttcattaa

SEQ ID NO: 56900 - DNA, 25 bp, Saccharomyces pastorianus
gtaggaagctccttggtagacttaa

SEQ ID NO: 56901 - DNA, 25 bp, Saccharomyces pastorianus
gaagcaattggcctcatacttgaac

SEQ ID NO: 56902 - DNA, 25 bp, Saccharomyces pastorianus
acctttgccgcaggctacgatataa

SEQ ID NO: 56903 - DNA, 25 bp, Saccharomyces pastorianus
aaaaggcgaccatcaattgcaattg

SEQ ID NO: 56904 - DNA, 25 bp, Saccharomyces pastorianus
aaatatggcgggtactgggaatctg

SEQ ID NO: 56905 - DNA, 25 bp, Saccharomyces pastorianus
gggcgttggtctctataacctacat

SEQ ID NO: 56906 - DNA, 25 bp, Saccharomyces pastorianus
ctacatccaggctctaccttaaaag

SEQ ID NO: 56907 - DNA, 25 bp, Saccharomyces pastorianus
atgggtgtctccacagtatacacaa

SEQ ID NO: 56908 - DNA, 25 bp, Saccharomyces pastorianus
atagatacctgtcatacctttgccg

SEQ ID NO: 56909 - DNA, 25 bp, Saccharomyces pastorianus
gtaccactgaggcataccacaattt

SEQ ID NO: 56910 - DNA, 25 bp, Saccharomyces pastorianus
ccgatgtatcccttgttggactgga

SEQ ID NO: 56911 - DNA, 25 bp, Saccharomyces pastorianus
agattactgtcgtcacacctaaaag

SEQ ID NO: 56912 - DNA, 25 bp, Saccharomyces pastorianus
attcaaatgttcacccaaccttggc

SEQ ID NO: 56913 - DNA, 25 bp, Saccharomyces pastorianus
gtggtggccacaacaactcatcaag

SEQ ID NO: 56914 - DNA, 25 bp, Saccharomyces pastorianus
gtggatgacaacctgatcaacgata

SEQ ID NO: 56915 - DNA, 25 bp, Saccharomyces pastorianus
gaaaccgctcaattggccatagata

SEQ ID NO: 56916 - DNA, 25 bp, Saccharomyces pastorianus
aagaggctcgcgaaaccgctcaatt

SEQ ID NO: 56917 - DNA, 25 bp, Saccharomyces pastorianus
gaggtggagaacttgcatcagaata

SEQ ID NO: 56918 - DNA, 25 bp, Saccharomyces pastorianus
atacaacaagaaccctactcaccat

SEQ ID NO: 56919 - DNA, 25 bp, Saccharomyces pastorianus
aaccttggccgaagtggacgcgcaa

SEQ ID NO: 56920 - DNA, 25 bp, Saccharomyces pastorianus
aaatcactcattccgatgtatccct

SEQ ID NO: 56921 - DNA, 25 bp, Saccharomyces pastorianus
agacattaacgttgccattgcgaac

SEQ ID NO: 56922 - DNA, 25 bp, Saccharomyces pastorianus
gaatctcgatgtcttcaattctgct

SEQ ID NO: 56923 - DNA, 25 bp, Saccharomyces pastorianus
taccaagatcgagccctatcatagc

SEQ ID NO: 56924 - DNA, 25 bp, Saccharomyces pastorianus
gcgaacgctgttgccaatgtggatt

SEQ ID NO: 56925 - DNA, 25 bp, Saccharomyces pastorianus
acattccaggtccatttgtcgttac

SEQ ID NO: 56926 - DNA, 25 bp, Saccharomyces pastorianus
tcactcaccttcttcgatacgagaa

SEQ ID NO: 56927 - DNA, 25 bp, Saccharomyces pastorianus
gtgttactaaccacgacatttcctc

SEQ ID NO: 56928 - DNA, 25 bp, Saccharomyces pastorianus
gaagaatctggcctgctggacatcc

SEQ ID NO: 56929 - DNA, 25 bp, Saccharomyces pastorianus
gagctactctgatgtggtgaacgat

SEQ ID NO: 56930 - DNA, 25 bp, Saccharomyces pastorianus
aattctgctaccgacgacattccag

SEQ ID NO: 56931 - DNA, 25 bp, Saccharomyces pastorianus
gacgacgcctccaataacaatgatg

SEQ ID NO: 56932 - DNA, 25 bp, Saccharomyces pastorianus
gaagcctcaacaaaaacctgctgct

SEQ ID NO: 56933 - DNA, 25 bp, Saccharomyces pastorianus
aatagcagcgtgaagcctcaacaaa

SEQ ID NO: 56934 - DNA, 25 bp, Saccharomyces pastorianus
gatgaagcagccaatagcagcgtga

SEQ ID NO: 56935 - DNA, 25 bp, Saccharomyces pastorianus
gtacaacctagtgagtaataacttc

SEQ ID NO: 56936 - DNA, 25 bp, Saccharomyces pastorianus
gacactgaatccgaagatgacgatg

SEQ ID NO: 56937 - DNA, 25 bp, Saccharomyces pastorianus
aacgcaagggcagaaagaagtacaa

SEQ ID NO: 56938 - DNA, 25 bp, Saccharomyces pastorianus
tgggctccacctcagaactacctga

SEQ ID NO: 56939 - DNA, 25 bp, Saccharomyces pastorianus
aaacctgctgctaaacgcaagggca

SEQ ID NO: 56940 - DNA, 25 bp, Saccharomyces pastorianus
cagaaggctcaaactaccaaagaaa

SEQ ID NO: 56941 - DNA, 25 bp, Saccharomyces pastorianus
ataacttcagaaggctcaaactacc

SEQ ID NO: 56942 - DNA, 25 bp, Saccharomyces pastorianus
gaactacctgacactgaatccgaag

SEQ ID NO: 56943 - DNA, 25 bp, Saccharomyces pastorianus
agatgacatcaagggtctacgcgat

SEQ ID NO: 56944 - DNA, 25 bp, Saccharomyces pastorianus
ggaactggataaactgaaagtcgag

SEQ ID NO: 56945 - DNA, 25 bp, Saccharomyces pastorianus
agggtctacgcgatgttaaacatat

SEQ ID NO: 56946 - DNA, 25 bp, Saccharomyces pastorianus
gtcgagctaaaaacatgggaacaca

SEQ ID NO: 56947 - DNA, 25 bp, Saccharomyces pastorianus
atgtattcgttggaactggataaac

SEQ ID NO: 56948 - DNA, 25 bp, Saccharomyces pastorianus
gagaaccaacgagagatgacatcaa

SEQ ID NO: 56949 - DNA, 25 bp, Saccharomyces pastorianus
atcaagggtctacgcgatgttaaac

SEQ ID NO: 56950 - DNA, 25 bp, Saccharomyces pastorianus
gggaacacaaatttattgatacgca

SEQ ID NO: 56951 - DNA, 25 bp, Saccharomyces pastorianus
tattgatacgcataacagagaacca

SEQ ID NO: 56952 - DNA, 25 bp, Saccharomyces pastorianus
aacatatgtataagcaatattccat

SEQ ID NO: 56953 - DNA, 25 bp, Saccharomyces pastorianus
gcataacagagaaccaacgagagat

SEQ ID NO: 56954 - DNA, 25 bp, Saccharomyces pastorianus
attcagtccatctcctttgattagg

SEQ ID NO: 56955 - DNA, 25 bp, Saccharomyces pastorianus
aaagcccgactttgtattcacgatg

SEQ ID NO: 56956 - DNA, 25 bp, Saccharomyces pastorianus
gtcaagcgccagttgaacttccaaa

SEQ ID NO: 56957 - DNA, 25 bp, Saccharomyces pastorianus
ggagacccctaacgaaatctttgat

SEQ ID NO: 56958 - DNA, 25 bp, Saccharomyces pastorianus
atttcacaggaatcttcgccggcaa

SEQ ID NO: 56959 - DNA, 25 bp, Saccharomyces pastorianus
ggcttcaaatggcattcccatcttt

SEQ ID NO: 56960 - DNA, 25 bp, Saccharomyces pastorianus
atactccaatttcatccccatgtaa

SEQ ID NO: 56961 - DNA, 25 bp, Saccharomyces pastorianus
gttgaaagcaccatcttcgcatact

SEQ ID NO: 56962 - DNA, 25 bp, Saccharomyces pastorianus
agaatcgaacactagacgccggctt

SEQ ID NO: 56963 - DNA, 25 bp, Saccharomyces pastorianus
aatatccaatgaatcttccccacaa

SEQ ID NO: 56964 - DNA, 25 bp, Saccharomyces pastorianus
aggcgtttcaacttcattcagtcca

SEQ ID NO: 56965 - DNA, 25 bp, Saccharomyces pastorianus
gaatccagcgtactctgaggtatct

SEQ ID NO: 56966 - DNA, 25 bp, Saccharomyces pastorianus
gtgacgaagaattctccggttatga

SEQ ID NO: 56967 - DNA, 25 bp, Saccharomyces pastorianus
gaattttagcttgtcttctccacta

SEQ ID NO: 56968 - DNA, 25 bp, Saccharomyces pastorianus
ttctgctcatccctcgaacgaaata

SEQ ID NO: 56969 - DNA, 25 bp, Saccharomyces pastorianus
ggaacaaccagtctgaatccagcgt

SEQ ID NO: 56970 - DNA, 25 bp, Saccharomyces pastorianus
agatcacccaatgagcgacttcaag

SEQ ID NO: 56971 - DNA, 25 bp, Saccharomyces pastorianus
atgtctttaagagggccacttgtga

SEQ ID NO: 56972 - DNA, 25 bp, Saccharomyces pastorianus
gtctcataatcatcacagtagtcat

SEQ ID NO: 56973 - DNA, 25 bp, Saccharomyces pastorianus
ggatcttcgacgaccaattacgaga

SEQ ID NO: 56974 - DNA, 25 bp, Saccharomyces pastorianus
tgaggtatctacagctctaccctta

SEQ ID NO: 56975 - DNA, 25 bp, Saccharomyces pastorianus
gacagtgaccgccaaaattcatctt

SEQ ID NO: 56976 - DNA, 25 bp, Saccharomyces pastorianus
agacgtcaaccatttgctaaaccca

SEQ ID NO: 56977 - DNA, 25 bp, Saccharomyces pastorianus
ggtatccgtaagcacttcatctttg

SEQ ID NO: 56978 - DNA, 25 bp, Saccharomyces pastorianus
aaacggacacatggccacggacgtt

SEQ ID NO: 56979 - DNA, 25 bp, Saccharomyces pastorianus
aaattccatcattctgtctgcagac

SEQ ID NO: 56980 - DNA, 25 bp, Saccharomyces pastorianus
gacttggacttattcgacgttcaaa

SEQ ID NO: 56981 - DNA, 25 bp, Saccharomyces pastorianus
tttctccaccgtcactttgtatgat

SEQ ID NO: 56982 - DNA, 25 bp, Saccharomyces pastorianus
agcaatgattgccttggtctcttac

SEQ ID NO: 56983 - DNA, 25 bp, Saccharomyces pastorianus
tacatgaagaaccattccccagtgc

SEQ ID NO: 56984 - DNA, 25 bp, Saccharomyces pastorianus
atctttgctccacgtctggatgaca

SEQ ID NO: 56985 - DNA, 25 bp, Saccharomyces pastorianus
gtatcactctgtccttagatccaaa

SEQ ID NO: 56986 - DNA, 25 bp, Saccharomyces pastorianus
tgggcactgccctggtggaagaact

SEQ ID NO: 56987 - DNA, 25 bp, Saccharomyces pastorianus
tggtggcatgctggaacaaagactt

SEQ ID NO: 56988 - DNA, 25 bp, Saccharomyces pastorianus
agactccatgacttattcgaccttt

SEQ ID NO: 56989 - DNA, 25 bp, Saccharomyces pastorianus
gttgctgctttaatatccaccatgg

SEQ ID NO: 56990 - DNA, 25 bp, Saccharomyces pastorianus
gatgacgctgacaaatatgctctgt

SEQ ID NO: 56991 - DNA, 25 bp, Saccharomyces pastorianus
ttgtcggagtactacgatgacgctg

SEQ ID NO: 56992 - DNA, 25 bp, Saccharomyces pastorianus
cgatgacactgagtttcacttcttg

SEQ ID NO: 56993 - DNA, 25 bp, Saccharomyces pastorianus
tggcaagtactttatcacagctata

SEQ ID NO: 56994 - DNA, 25 bp, Saccharomyces pastorianus
gctataattagttacgttgctgctt

SEQ ID NO: 56995 - DNA, 25 bp, Saccharomyces pastorianus
atccaccatggtatcgttatcttta

SEQ ID NO: 56996 - DNA, 25 bp, Saccharomyces pastorianus
caatacctcacaaccagctttgtta

SEQ ID NO: 56997 - DNA, 25 bp, Saccharomyces pastorianus
agctttgttatacatcgttccttcc

SEQ ID NO: 56998 - DNA, 25 bp, Saccharomyces pastorianus
tatcgtttcatttgtgctctccgta

SEQ ID NO: 56999 - DNA, 25 bp, Saccharomyces pastorianus
ggctgttcaccaaaagaccttgact

SEQ ID NO: 57000 - DNA, 25 bp, Saccharomyces pastorianus
tacttcctttaactagtggttgcac

SEQ ID NO: 57001 - DNA, 25 bp, Saccharomyces pastorianus
atcgcatatgacttcttggaaccca

SEQ ID NO: 57002 - DNA, 25 bp, Saccharomyces pastorianus
gattaactaactcggctgttcacca

SEQ ID NO: 57003 - DNA, 25 bp, Saccharomyces pastorianus
ttttgccaaggtaccgtgtaaccat

SEQ ID NO: 57004 - DNA, 25 bp, Saccharomyces pastorianus
gtggttgcactttattagctttgta

SEQ ID NO: 57005 - DNA, 25 bp, Saccharomyces pastorianus
ggaacccattgactgttttgccaag

SEQ ID NO: 57006 - DNA, 25 bp, Saccharomyces pastorianus
gtcgccactgtctacttttatttgt

SEQ ID NO: 57007 - DNA, 25 bp, Saccharomyces pastorianus
gtaaccattgctgacgataacgacg

SEQ ID NO: 57008 - DNA, 25 bp, Saccharomyces pastorianus
ataccagcaggtacatttgtctact

SEQ ID NO: 57009 - DNA, 25 bp, Saccharomyces pastorianus
aacgtttttcaataccacttctgag

SEQ ID NO: 57010 - DNA, 25 bp, Saccharomyces pastorianus
gaggattttgctccagaaacgtttt

SEQ ID NO: 57011 - DNA, 25 bp, Saccharomyces pastorianus
gaagacgagtctctttccatggacc

SEQ ID NO: 57012 - DNA, 25 bp, Saccharomyces pastorianus
aaaagggctcttaatcacctcacgt

SEQ ID NO: 57013 - DNA, 25 bp, Saccharomyces pastorianus
aggaccagttgacccaagatgtttt

SEQ ID NO: 57014 - DNA, 25 bp, Saccharomyces pastorianus
gagcgcctcatcaataatgcccaag

SEQ ID NO: 57015 - DNA, 25 bp, Saccharomyces pastorianus
aatgcccaaggaatcactagacaag

SEQ ID NO: 57016 - DNA, 25 bp, Saccharomyces pastorianus
gttttgaacaataagagcgcctcat

SEQ ID NO: 57017 - DNA, 25 bp, Saccharomyces pastorianus
cgtggactcgtcagggaagtcttct

SEQ ID NO: 57018 - DNA, 25 bp, Saccharomyces pastorianus
tacaatatttgttgattcccgagaa

SEQ ID NO: 57019 - DNA, 25 bp, Saccharomyces pastorianus
aagcagtccagtttgaagattctca

SEQ ID NO: 57020 - DNA, 25 bp, Saccharomyces pastorianus
aatccgcttttcttggaatctcttg

SEQ ID NO: 57021 - DNA, 25 bp, Saccharomyces pastorianus
acgaaatgttagagaagctaggcaa

SEQ ID NO: 57022 - DNA, 25 bp, Saccharomyces pastorianus
gcttttcttggaatctcttgtagtg

SEQ ID NO: 57023 - DNA, 25 bp, Saccharomyces pastorianus
acggcgttcgtctatggatagctcc

SEQ ID NO: 57024 - DNA, 25 bp, Saccharomyces pastorianus
agttaatgagtttgaaaatccgctt

SEQ ID NO: 57025 - DNA, 25 bp, Saccharomyces pastorianus
gctaggcaaaataaagttcgaggaa

SEQ ID NO: 57026 - DNA, 25 bp, Saccharomyces pastorianus
gatcccaacctagtagacgaaatgt

SEQ ID NO: 57027 - DNA, 25 bp, Saccharomyces pastorianus
tactatacggcagtgatcccaacct

SEQ ID NO: 57028 - DNA, 25 bp, Saccharomyces pastorianus
gcagtgatcccaacctagtagacga

SEQ ID NO: 57029 - DNA, 25 bp, Saccharomyces pastorianus
ctggtacggcgttcgtctatggata

SEQ ID NO: 57030 - DNA, 25 bp, Saccharomyces pastorianus
tatacggcagtgatcccaacctagt

SEQ ID NO: 57031 - DNA, 25 bp, Saccharomyces pastorianus
aagttttggtttgcatgtgcgccgc

SEQ ID NO: 57032 - DNA, 25 bp, Saccharomyces pastorianus
aaaaattggcttctccaatgcccag

SEQ ID NO: 57033 - DNA, 25 bp, Saccharomyces pastorianus
attccagacgtcaattcactttcac

SEQ ID NO: 57034 - DNA, 25 bp, Saccharomyces pastorianus
tagatggctggctcaagcacaagtt

SEQ ID NO: 57035 - DNA, 25 bp, Saccharomyces pastorianus
agcgcctgcgatatacagctgaaga

SEQ ID NO: 57036 - DNA, 25 bp, Saccharomyces pastorianus
gaagttttctgttactgctcgaaag

SEQ ID NO: 57037 - DNA, 25 bp, Saccharomyces pastorianus
tggagtaatcaaacaccgccttcaa

SEQ ID NO: 57038 - DNA, 25 bp, Saccharomyces pastorianus
gccgccccacttaaatttcgatagt

SEQ ID NO: 57039 - DNA, 25 bp, Saccharomyces pastorianus
aagacacgagtctttctacccgcat

SEQ ID NO: 57040 - DNA, 25 bp, Saccharomyces pastorianus
ttcacgaccagaccaggccaagtta

SEQ ID NO: 57041 - DNA, 25 bp, Saccharomyces pastorianus
ggattcactagcaactacgcacatt

SEQ ID NO: 57042 - DNA, 25 bp, Saccharomyces pastorianus
atttacgttcgccattcttgaaggc

SEQ ID NO: 57043 - DNA, 25 bp, Saccharomyces pastorianus
ggaaacctatcatatggcccgatcc

SEQ ID NO: 57044 - DNA, 25 bp, Saccharomyces pastorianus
ttacgttcgccattcttgaaggccg

SEQ ID NO: 57045 - DNA, 25 bp, Saccharomyces pastorianus
tatcatatggcccgatccggtcacg

SEQ ID NO: 57046 - DNA, 25 bp, Saccharomyces pastorianus
gccggaaacctatcatatggcccga

SEQ ID NO: 57047 - DNA, 25 bp, Saccharomyces pastorianus
aacctatcatatggcccgatccggt

SEQ ID NO: 57048 - DNA, 25 bp, Saccharomyces pastorianus
tcgccattcttgaaggccggaaacc

SEQ ID NO: 57049 - DNA, 25 bp, Saccharomyces pastorianus
tcttgaaggccggaaacctatcata

SEQ ID NO: 57050 - DNA, 25 bp, Saccharomyces pastorianus
gccattcttgaaggccggaaaccta

SEQ ID NO: 57051 - DNA, 25 bp, Saccharomyces pastorianus
tgaaggccggaaacctatcatatgg

SEQ ID NO: 57052 - DNA, 25 bp, Saccharomyces pastorianus
acgttcgccattcttgaaggccgga

SEQ ID NO: 57053 - DNA, 25 bp, Saccharomyces pastorianus
gatctgctggagaaacgactggcta

SEQ ID NO: 57054 - DNA, 25 bp, Saccharomyces pastorianus
aagctctcgcggactaatccattgg

SEQ ID NO: 57055 - DNA, 25 bp, Saccharomyces pastorianus
gatcccggtacctctgattatgtga

SEQ ID NO: 57056 - DNA, 25 bp, Saccharomyces pastorianus
tatgtcccacagaagcccgatgata

SEQ ID NO: 57057 - DNA, 25 bp, Saccharomyces pastorianus
cgcatgagcttgacgatcttgtgga

SEQ ID NO: 57058 - DNA, 25 bp, Saccharomyces pastorianus
attcgataatcacaggcagcatgct

SEQ ID NO: 57059 - DNA, 25 bp, Saccharomyces pastorianus
gtatagatgacacactccagcgatt

SEQ ID NO: 57060 - DNA, 25 bp, Saccharomyces pastorianus
tgcgccaactccattacattcagaa

SEQ ID NO: 57061 - DNA, 25 bp, Saccharomyces pastorianus
taattctgaaccaaaaccggcggcg

SEQ ID NO: 57062 - DNA, 25 bp, Saccharomyces pastorianus
ggttaaccatatcatgtcctcgctg

SEQ ID NO: 57063 - DNA, 25 bp, Saccharomyces pastorianus
gcagcatgctgccaagacagacgat

SEQ ID NO: 57064 - DNA, 25 bp, Saccharomyces pastorianus
gtgcccacgaccagacgctatacta

SEQ ID NO: 57065 - DNA, 25 bp, Saccharomyces pastorianus
tatactacgcctttggcggctgcca

SEQ ID NO: 57066 - DNA, 25 bp, Saccharomyces pastorianus
atactacgcctttggcggctgccac

SEQ ID NO: 57067 - DNA, 25 bp, Saccharomyces pastorianus
agacgctatactacgcctttggcgg

SEQ ID NO: 57068 - DNA, 25 bp, Saccharomyces pastorianus
tgcgtgcccacgaccagacgctata

SEQ ID NO: 57069 - DNA, 25 bp, Saccharomyces pastorianus
gacgctatactacgcctttggcggc

SEQ ID NO: 57070 - DNA, 25 bp, Saccharomyces pastorianus
accagacgctatactacgcctttgg

SEQ ID NO: 57071 - DNA, 25 bp, Saccharomyces pastorianus
gaccagacgctatactacgcctttg

SEQ ID NO: 57072 - DNA, 25 bp, Saccharomyces pastorianus
ctccaaggagctgccgcccgtggac

SEQ ID NO: 57073 - DNA, 25 bp, Saccharomyces pastorianus
gctatactacgcctttggcggctgc

SEQ ID NO: 57074 - DNA, 25 bp, Saccharomyces pastorianus
acgaccagacgctatactacgcctt

SEQ ID NO: 57075 - DNA, 25 bp, Saccharomyces pastorianus
agcctacggaaattcccctgtcaca

SEQ ID NO: 57076 - DNA, 25 bp, Saccharomyces pastorianus
tggcgcccgtgctggatccacagaa

SEQ ID NO: 57077 - DNA, 25 bp, Saccharomyces pastorianus
aaattcccctgtcacagatcaggcg

SEQ ID NO: 57078 - DNA, 25 bp, Saccharomyces pastorianus
agatcaacgccatggtggccactat

SEQ ID NO: 57079 - DNA, 25 bp, Saccharomyces pastorianus
gagcaacagtgtgaagcctacggaa

SEQ ID NO: 57080 - DNA, 25 bp, Saccharomyces pastorianus
acggaaattcccctgtcacagatca

SEQ ID NO: 57081 - DNA, 25 bp, Saccharomyces pastorianus
gcccgtgctggatccacagaagatc

SEQ ID NO: 57082 - DNA, 25 bp, Saccharomyces pastorianus
caacgccatggtggccactatgaag

SEQ ID NO: 57083 - DNA, 25 bp, Saccharomyces pastorianus
acagaagatcaacgccatggtggcc

SEQ ID NO: 57084 - DNA, 25 bp, Saccharomyces pastorianus
atgtcactacagagcaacagtgtga

SEQ ID NO: 57085 - DNA, 25 bp, Saccharomyces pastorianus
ctgtcacagatcaggcgcccgctgg

SEQ ID NO: 57086 - DNA, 25 bp, Saccharomyces pastorianus
ccaacgaagaagacaaggaatttat

SEQ ID NO: 57087 - DNA, 25 bp, Saccharomyces pastorianus
acaatggtattgtcggtgccgtcct

SEQ ID NO: 57088 - DNA, 25 bp, Saccharomyces pastorianus
ggccaagattttgctccagctttcg

SEQ ID NO: 57089 - DNA, 25 bp, Saccharomyces pastorianus
ttttgctccagctttcgatgttgcc

SEQ ID NO: 57090 - DNA, 25 bp, Saccharomyces pastorianus
attgtcggtgccgtcctggtcagag

SEQ ID NO: 57091 - DNA, 25 bp, Saccharomyces pastorianus
ggtattgtcggtgccgtcctggtca

SEQ ID NO: 57092 - DNA, 25 bp, Saccharomyces pastorianus
tgggataagccagttgttgtcaact

SEQ ID NO: 57093 - DNA, 25 bp, Saccharomyces pastorianus
aagattttgctccagctttcgatgt

SEQ ID NO: 57094 - DNA, 25 bp, Saccharomyces pastorianus
ctccagctttcgatgttgccccaga

SEQ ID NO: 57095 - DNA, 25 bp, Saccharomyces pastorianus
agttgttgtcaactgtgaatccaag

SEQ ID NO: 57096 - DNA, 25 bp, Saccharomyces pastorianus
aacaatggtattgtcggtgccgtcc

SEQ ID NO: 57097 - DNA, 25 bp, Saccharomyces pastorianus
taacaacttggtcgctggtttcttc

SEQ ID NO: 57098 - DNA, 25 bp, Saccharomyces pastorianus
ccaacgaagaagacaaggaatttat

SEQ ID NO: 57099 - DNA, 25 bp, Saccharomyces pastorianus
atgttcggttgtctagtcgtctacg

SEQ ID NO: 57100 - DNA, 25 bp, Saccharomyces pastorianus
acaatggtattgtcggtgccgtcct

SEQ ID NO: 57101 - DNA, 25 bp, Saccharomyces pastorianus
ggccaagattttgctccagctttcg

SEQ ID NO: 57102 - DNA, 25 bp, Saccharomyces pastorianus
ttttgctccagctttcgatgttgcc

SEQ ID NO: 57103 - DNA, 25 bp, Saccharomyces pastorianus
attgtcggtgccgtcctggtcagag

SEQ ID NO: 57104 - DNA, 25 bp, Saccharomyces pastorianus
tgggataagccagttgttgtcaact

SEQ ID NO: 57105 - DNA, 25 bp, Saccharomyces pastorianus
aagattttgctccagctttcgatgt

SEQ ID NO: 57106 - DNA, 25 bp, Saccharomyces pastorianus
ctccagctttcgatgttgccccaga

SEQ ID NO: 57107 - DNA, 25 bp, Saccharomyces pastorianus
agttgttgtcaactgtgaatccaag

SEQ ID NO: 57108 - DNA, 25 bp, Saccharomyces pastorianus
aggttgacaacattgctgctgtttt

SEQ ID NO: 57109 - DNA, 25 bp, Saccharomyces pastorianus
gagactacacttttgttgcaactga

SEQ ID NO: 57110 - DNA, 25 bp, Saccharomyces pastorianus
ttgttgcaactgaaaacatctcttt

SEQ ID NO: 57111 - DNA, 25 bp, Saccharomyces pastorianus
agaatggagagccaagcaccctcaa

SEQ ID NO: 57112 - DNA, 25 bp, Saccharomyces pastorianus
tccaatttttaagacccagacctgc

SEQ ID NO: 57113 - DNA, 25 bp, Saccharomyces pastorianus
ctgctgttttcgatgctagactaag

SEQ ID NO: 57114 - DNA, 25 bp, Saccharomyces pastorianus
cagtgcttgggcttttggcttatcc

SEQ ID NO: 57115 - DNA, 25 bp, Saccharomyces pastorianus
ctatcgctgcttctccaatttttaa

SEQ ID NO: 57116 - DNA, 25 bp, Saccharomyces pastorianus
gagccaagcaccctcaactaatgag

SEQ ID NO: 57117 - DNA, 25 bp, Saccharomyces pastorianus
acatctctttggctgatcttcacgc

SEQ ID NO: 57118 - DNA, 25 bp, Saccharomyces pastorianus
gcttatcctctattttgggtccaga

SEQ ID NO: 57119 - DNA, 25 bp, Saccharomyces pastorianus
tgaagcaagttccagctttcttggg

SEQ ID NO: 57120 - DNA, 25 bp, Saccharomyces pastorianus
aagaccaagccagcgagtttgcatc

SEQ ID NO: 57121 - DNA, 25 bp, Saccharomyces pastorianus
gggttcaagctaactgaagctatcg

SEQ ID NO: 57122 - DNA, 25 bp, Saccharomyces pastorianus
taactgaagctatcgccatccaata

SEQ ID NO: 57123 - DNA, 25 bp, Saccharomyces pastorianus
gatttctcacttcaaactagatgtt

SEQ ID NO: 57124 - DNA, 25 bp, Saccharomyces pastorianus
gaaactttgcttccaaagctttgat

SEQ ID NO: 57125 - DNA, 25 bp, Saccharomyces pastorianus
agccagcgagtttgcatctttgttc

SEQ ID NO: 57126 - DNA, 25 bp, Saccharomyces pastorianus
aatcgttgagaaagaccaagccagc

SEQ ID NO: 57127 - DNA, 25 bp, Saccharomyces pastorianus
agctatcgccatccaatattactgt

SEQ ID NO: 57128 - DNA, 25 bp, Saccharomyces pastorianus
tccaaagctttgatttctcacttca

SEQ ID NO: 57129 - DNA, 25 bp, Saccharomyces pastorianus
tcccattgaagcaagttccagcttt

SEQ ID NO: 57130 - DNA, 25 bp, Saccharomyces pastorianus
gcgcaagttccgttctcaaaagaga

SEQ ID NO: 57131 - DNA, 25 bp, Saccharomyces pastorianus
gaggatactcctgttaacgataaaa

SEQ ID NO: 57132 - DNA, 25 bp, Saccharomyces pastorianus
gagatcgaagcacttttggccaaaa

SEQ ID NO: 57133 - DNA, 25 bp, Saccharomyces pastorianus
acgtatcgtgccagcttagaggaaa

SEQ ID NO: 57134 - DNA, 25 bp, Saccharomyces pastorianus
caaagcactgtctacttgggaagaa

SEQ ID NO: 57135 - DNA, 25 bp, Saccharomyces pastorianus
gaaggaacccctgaactccgaacag

SEQ ID NO: 57136 - DNA, 25 bp, Saccharomyces pastorianus
tttaaaggttccattatcgagatcg

SEQ ID NO: 57137 - DNA, 25 bp, Saccharomyces pastorianus
atacccggcatatatttccaaagca

SEQ ID NO: 57138 - DNA, 25 bp, Saccharomyces pastorianus
gaagttacatttgcgcaagttccgt

SEQ ID NO: 57139 - DNA, 25 bp, Saccharomyces pastorianus
aagatctccgagagcgcctgtttga

SEQ ID NO: 57140 - DNA, 25 bp, Saccharomyces pastorianus
attgagattcgacacgtatcgtgcc

SEQ ID NO: 57141 - DNA, 25 bp, Saccharomyces pastorianus
ttaggtattgactatggccagcaaa

SEQ ID NO: 57142 - DNA, 25 bp, Saccharomyces pastorianus
tgaaagagtttacggttccgctgtg

SEQ ID NO: 57143 - DNA, 25 bp, Saccharomyces pastorianus
atcatcacaggatctttggcagccg

SEQ ID NO: 57144 - DNA, 25 bp, Saccharomyces pastorianus
aaagctattgtagtctcaccacagg

SEQ ID NO: 57145 - DNA, 25 bp, Saccharomyces pastorianus
tccgctgtgggaagtttggcaacga

SEQ ID NO: 57146 - DNA, 25 bp, Saccharomyces pastorianus
tcaccacaggctccagtagagcttg

SEQ ID NO: 57147 - DNA, 25 bp, Saccharomyces pastorianus
gtagagcttgtgcttactccagaag

SEQ ID NO: 57148 - DNA, 25 bp, Saccharomyces pastorianus
gtaaggaaatatctggcctttcaat

SEQ ID NO: 57149 - DNA, 25 bp, Saccharomyces pastorianus
ttggcagccgttttaggtattgact

SEQ ID NO: 57150 - DNA, 25 bp, Saccharomyces pastorianus
gaagaacgacccaaatgcagttgaa

SEQ ID NO: 57151 - DNA, 25 bp, Saccharomyces pastorianus
tttttgcaacttttatcatcacagg

SEQ ID NO: 57152 - DNA, 25 bp, Saccharomyces pastorianus
atggactctatggtacagtctgaac

SEQ ID NO: 57153 - DNA, 25 bp, Saccharomyces pastorianus
caaagtttgttatccgttcagcgtc

SEQ ID NO: 57154 - DNA, 25 bp, Saccharomyces pastorianus
atgttcgtattttggataggcgtgt

SEQ ID NO: 57155 - DNA, 25 bp, Saccharomyces pastorianus
atgaaatctctctcttcgaaactaa

SEQ ID NO: 57156 - DNA, 25 bp, Saccharomyces pastorianus
aaaccagtgttgatcattttgacgg

SEQ ID NO: 57157 - DNA, 25 bp, Saccharomyces pastorianus
atccgttcagcgtcagctcgatgaa

SEQ ID NO: 57158 - DNA, 25 bp, Saccharomyces pastorianus
gtacttggacgtttgataccttcct

SEQ ID NO: 57159 - DNA, 25 bp, Saccharomyces pastorianus
gtaaacagatttcgattgccttaga

SEQ ID NO: 57160 - DNA, 25 bp, Saccharomyces pastorianus
tgattcttcggtggtcaaattagca

SEQ ID NO: 57161 - DNA, 25 bp, Saccharomyces pastorianus
gggctctgtttcaaaatcctggata

SEQ ID NO: 57162 - DNA, 25 bp, Saccharomyces pastorianus
gaattcgatagcttcatggactcta

SEQ ID NO: 57163 - DNA, 25 bp, Saccharomyces pastorianus
gagatccagcgggttacttacacaa

SEQ ID NO: 57164 - DNA, 25 bp, Saccharomyces pastorianus
gttagctacttttatgaaacctcta

SEQ ID NO: 57165 - DNA, 25 bp, Saccharomyces pastorianus
acaggatcattgactccagttaatc

SEQ ID NO: 57166 - DNA, 25 bp, Saccharomyces pastorianus
aaacctctatcccaaagagatccag

SEQ ID NO: 57167 - DNA, 25 bp, Saccharomyces pastorianus
gatgaggatctgatggtggacctaa

SEQ ID NO: 57168 - DNA, 25 bp, Saccharomyces pastorianus
caagttttcaagaagctttcaatca

SEQ ID NO: 57169 - DNA, 25 bp, Saccharomyces pastorianus
tggtggacctaaacacaggatcatt

SEQ ID NO: 57170 - DNA, 25 bp, Saccharomyces pastorianus
tgactccagttaatctaaagcattg

SEQ ID NO: 57171 - DNA, 25 bp, Saccharomyces pastorianus
cagcgggttacttacacaaacaact

SEQ ID NO: 57172 - DNA, 25 bp, Saccharomyces pastorianus
acaactaagccaacaagttttcaag

SEQ ID NO: 57173 - DNA, 25 bp, Saccharomyces pastorianus
gtgaacccaaataattctgttagct

SEQ ID NO: 57174 - DNA, 25 bp, Saccharomyces pastorianus
ttaaggcaacccgtaaagacaagca

SEQ ID NO: 57175 - DNA, 25 bp, Saccharomyces pastorianus
tggtggacagcgactttgtttgccc

SEQ ID NO: 57176 - DNA, 25 bp, Saccharomyces pastorianus
atgaataacggtggcacacccgtcc

SEQ ID NO: 57177 - DNA, 25 bp, Saccharomyces pastorianus
gaagtgttccttgacgggaggcctt

SEQ ID NO: 57178 - DNA, 25 bp, Saccharomyces pastorianus
attcttctggattcgttagtgcccg

SEQ ID NO: 57179 - DNA, 25 bp, Saccharomyces pastorianus
agatctgggcggcaaatccaaagat

SEQ ID NO: 57180 - DNA, 25 bp, Saccharomyces pastorianus
gaaactattggacactaccagcact

SEQ ID NO: 57181 - DNA, 25 bp, Saccharomyces pastorianus
atctacccgccgatttgaagtgttc

SEQ ID NO: 57182 - DNA, 25 bp, Saccharomyces pastorianus
tgaatactcccactcctatgaataa

SEQ ID NO: 57183 - DNA, 25 bp, Saccharomyces pastorianus
aagggcatttcaacgatctacccgc

SEQ ID NO: 57184 - DNA, 25 bp, Saccharomyces pastorianus
aagacttttccaaagtggcgctgga

SEQ ID NO: 57185 - DNA, 25 bp, Saccharomyces pastorianus
gaattgtccaacgaatagcgatcca

SEQ ID NO: 57186 - DNA, 25 bp, Saccharomyces pastorianus
atcaggagaaccacgggtatcccaa

SEQ ID NO: 57187 - DNA, 25 bp, Saccharomyces pastorianus
tcaagtcgaagacaaacagtcctgg

SEQ ID NO: 57188 - DNA, 25 bp, Saccharomyces pastorianus
gtggtggtagagaccattggatcaa

SEQ ID NO: 57189 - DNA, 25 bp, Saccharomyces pastorianus
tagaccctgagacgatgacgcccga

SEQ ID NO: 57190 - DNA, 25 bp, Saccharomyces pastorianus
aaggatcaggagaaccacgggtatc

SEQ ID NO: 57191 - DNA, 25 bp, Saccharomyces pastorianus
gatggctcagcggaagatcatgata

SEQ ID NO: 57192 - DNA, 25 bp, Saccharomyces pastorianus
gaaattcgtggttcaagtcgaagac

SEQ ID NO: 57193 - DNA, 25 bp, Saccharomyces pastorianus
atccattgagatagaccctgagacg

SEQ ID NO: 57194 - DNA, 25 bp, Saccharomyces pastorianus
atgacgcccgaggagatggctcagc

SEQ ID NO: 57195 - DNA, 25 bp, Saccharomyces pastorianus
gagaccattggatcaagaattgtcc

SEQ ID NO: 57196 - DNA, 25 bp, Saccharomyces pastorianus
ggtcatgaatacctcactgatacga

SEQ ID NO: 57197 - DNA, 25 bp, Saccharomyces pastorianus
tttaccttcgtactgtggatatcaa

SEQ ID NO: 57198 - DNA, 25 bp, Saccharomyces pastorianus
gagaggcagcatatccactatttaa

SEQ ID NO: 57199 - DNA, 25 bp, Saccharomyces pastorianus
gattttttcagtacgctcttacgct

SEQ ID NO: 57200 - DNA, 25 bp, Saccharomyces pastorianus
gacagctcatatgaccaatggatct

SEQ ID NO: 57201 - DNA, 25 bp, Saccharomyces pastorianus
tacgcttatgcgattctcatgcaaa

SEQ ID NO: 57202 - DNA, 25 bp, Saccharomyces pastorianus
aacagtcaggagtttgccttgaaat

SEQ ID NO: 57203 - DNA, 25 bp, Saccharomyces pastorianus
taactttttccgtttactactgatg

SEQ ID NO: 57204 - DNA, 25 bp, Saccharomyces pastorianus
gtattatctacctttgacagctcat

SEQ ID NO: 57205 - DNA, 25 bp, Saccharomyces pastorianus
ggtcggctgcagaagtgctgtacaa

SEQ ID NO: 57206 - DNA, 25 bp, Saccharomyces pastorianus
aatggatcttggacggtagcagagt

SEQ ID NO: 57207 - DNA, 25 bp, Saccharomyces pastorianus
aaataagatcgttatggctcgtaac

SEQ ID NO: 57208 - DNA, 25 bp, Saccharomyces pastorianus
atcaagatacggtgcccaaatattt

SEQ ID NO: 57209 - DNA, 25 bp, Saccharomyces pastorianus
ctggacataataaccggagagctac

SEQ ID NO: 57210 - DNA, 25 bp, Saccharomyces pastorianus
gaattctctgactacttctgaaaaa

SEQ ID NO: 57211 - DNA, 25 bp, Saccharomyces pastorianus
gcttcttcgataactctttacggtg

SEQ ID NO: 57212 - DNA, 25 bp, Saccharomyces pastorianus
tatgcattccgatactcaagagtct

SEQ ID NO: 57213 - DNA, 25 bp, Saccharomyces pastorianus
tggttttacaatatgcattccgata

SEQ ID NO: 57214 - DNA, 25 bp, Saccharomyces pastorianus
ggagagctaccgaattctctgacta

SEQ ID NO: 57215 - DNA, 25 bp, Saccharomyces pastorianus
ttttcaaccatacaaccattctctc

SEQ ID NO: 57216 - DNA, 25 bp, Saccharomyces pastorianus
atttggcaaacctggaaacgatatt

SEQ ID NO: 57217 - DNA, 25 bp, Saccharomyces pastorianus
acaaccattctctctacaaacttaa

SEQ ID NO: 57218 - DNA, 25 bp, Saccharomyces pastorianus
aagctcaagctcaaccacaaccaga

SEQ ID NO: 57219 - DNA, 25 bp, Saccharomyces pastorianus
atgcatgcaaccacaagctcaagct

SEQ ID NO: 57220 - DNA, 25 bp, Saccharomyces pastorianus
gctgcagcacaacaaggtgttccat

SEQ ID NO: 57221 - DNA, 25 bp, Saccharomyces pastorianus
ctcaaccacaaccagaagctcaaat

SEQ ID NO: 57222 - DNA, 25 bp, Saccharomyces pastorianus
caaccacaatcaacatgcatgcaac

SEQ ID NO: 57223 - DNA, 25 bp, Saccharomyces pastorianus
caacaaggtgttccatacggttaca

SEQ ID NO: 57224 - DNA, 25 bp, Saccharomyces pastorianus
gctcaaatacagaatggtcaacctg

SEQ ID NO: 57225 - DNA, 25 bp, Saccharomyces pastorianus
gaatggtcaacctgtcaacccacaa

SEQ ID NO: 57226 - DNA, 25 bp, Saccharomyces pastorianus
gcaacaacaacaagccgctgctgcc

SEQ ID NO: 57227 - DNA, 25 bp, Saccharomyces pastorianus
gccgctgctgcagcacaacaaggtg

SEQ ID NO: 57228 - DNA, 25 bp, Saccharomyces pastorianus
tgttccatacggttacaacggttat

SEQ ID NO: 57229 - DNA, 25 bp, Saccharomyces pastorianus
aacaccgctcaaagggacgatcgga

SEQ ID NO: 57230 - DNA, 25 bp, Saccharomyces pastorianus
caaagggacgatcggatgacgacaa

SEQ ID NO: 57231 - DNA, 25 bp, Saccharomyces pastorianus
agggacgatcggatgacgacaacga

SEQ ID NO: 57232 - DNA, 25 bp, Saccharomyces pastorianus
ggaacaccgctcaaagggacgatcg

SEQ ID NO: 57233 - DNA, 25 bp, Saccharomyces pastorianus
accgctcaaagggacgatcggatga

SEQ ID NO: 57234 - DNA, 25 bp, Saccharomyces pastorianus
gagtacgaaggaggttctcaagcca

SEQ ID NO: 57235 - DNA, 25 bp, Saccharomyces pastorianus
ggccagacgaagaggagagtacgaa

SEQ ID NO: 57236 - DNA, 25 bp, Saccharomyces pastorianus
gcaggaacaccgctcaaagggacga

SEQ ID NO: 57237 - DNA, 25 bp, Saccharomyces pastorianus
atgacgacaacgaggggccagacga

SEQ ID NO: 57238 - DNA, 25 bp, Saccharomyces pastorianus
gctcaaagggacgatcggatgacga

SEQ ID NO: 57239 - DNA, 25 bp, Saccharomyces pastorianus
caggaacaccgctcaaagggacgat

SEQ ID NO: 57240 - DNA, 25 bp, Saccharomyces pastorianus
gcctttaaagcttatttctggttca

SEQ ID NO: 57241 - DNA, 25 bp, Saccharomyces pastorianus
gcatcgggtccgaacaatctattac

SEQ ID NO: 57242 - DNA, 25 bp, Saccharomyces pastorianus
taatggcgccgtaccatatggcaaa

SEQ ID NO: 57243 - DNA, 25 bp, Saccharomyces pastorianus
gatatcatagtcaaacttccctcaa

SEQ ID NO: 57244 - DNA, 25 bp, Saccharomyces pastorianus
ttaaccgacttgaatctggattgct

SEQ ID NO: 57245 - DNA, 25 bp, Saccharomyces pastorianus
ttccctcaagttcaatcaccgaaga

SEQ ID NO: 57246 - DNA, 25 bp, Saccharomyces pastorianus
catcttagcctcatttttaaccgac

SEQ ID NO: 57247 - DNA, 25 bp, Saccharomyces pastorianus
gacagagcctatatcgtggttacaa

SEQ ID NO: 57248 - DNA, 25 bp, Saccharomyces pastorianus
gtgaacacaatagagccactcctct

SEQ ID NO: 57249 - DNA, 25 bp, Saccharomyces pastorianus
gagatcatcgctgcatctggtgaac

SEQ ID NO: 57250 - DNA, 25 bp, Saccharomyces pastorianus
gatggtttctatctcctaaccacag

SEQ ID NO: 57251 - DNA, 25 bp, Saccharomyces pastorianus
agggtgcatgtactacttgctcgtc

SEQ ID NO: 57252 - DNA, 25 bp, Saccharomyces pastorianus
gtggttccaagagcatcgtcatcaa

SEQ ID NO: 57253 - DNA, 25 bp, Saccharomyces pastorianus
gaggaattccatgctgttcaagaag

SEQ ID NO: 57254 - DNA, 25 bp, Saccharomyces pastorianus
aacagatctttgtccagtgtcccgg

SEQ ID NO: 57255 - DNA, 25 bp, Saccharomyces pastorianus
catcgagttattgaccaagcagctt

SEQ ID NO: 57256 - DNA, 25 bp, Saccharomyces pastorianus
cttgctcgtctagtgaagtgacttt

SEQ ID NO: 57257 - DNA, 25 bp, Saccharomyces pastorianus
ggtattgaatccatgctgaagcatt

SEQ ID NO: 57258 - DNA, 25 bp, Saccharomyces pastorianus
cattgactaccgtggttgggatcca

SEQ ID NO: 57259 - DNA, 25 bp, Saccharomyces pastorianus
tggtccactggaacgtcattgagcc

SEQ ID NO: 57260 - DNA, 25 bp, Saccharomyces pastorianus
aagcagcttgcttctggcaacgatg

SEQ ID NO: 57261 - DNA, 25 bp, Saccharomyces pastorianus
aaccattccaagctagcacaacaga

SEQ ID NO: 57262 - DNA, 25 bp, Saccharomyces pastorianus
gaggttactcttcatcatttacgct

SEQ ID NO: 57263 - DNA, 25 bp, Saccharomyces pastorianus
gtggagaccaacagacacctcatac

SEQ ID NO: 57264 - DNA, 25 bp, Saccharomyces pastorianus
gttcgacgaccaagatgatgccagc

SEQ ID NO: 57265 - DNA, 25 bp, Saccharomyces pastorianus
gcaagcaccatctgcattgatctta

SEQ ID NO: 57266 - DNA, 25 bp, Saccharomyces pastorianus
attgtttttgttaccattgccttct

SEQ ID NO: 57267 - DNA, 25 bp, Saccharomyces pastorianus
tacagacccagaaaacgttgcggac

SEQ ID NO: 57268 - DNA, 25 bp, Saccharomyces pastorianus
ggcgcttgctttggctgtattttac

SEQ ID NO: 57269 - DNA, 25 bp, Saccharomyces pastorianus
accattgccttcttgtggagaccaa

SEQ ID NO: 57270 - DNA, 25 bp, Saccharomyces pastorianus
tactttgattccaatggcgcttgct

SEQ ID NO: 57271 - DNA, 25 bp, Saccharomyces pastorianus
tgatgccagcatcatcactggtgag

SEQ ID NO: 57272 - DNA, 25 bp, Saccharomyces pastorianus
ccttcttaagtgttttagccggcag

SEQ ID NO: 57273 - DNA, 25 bp, Saccharomyces pastorianus
atttgccttctggaaacacaagcat

SEQ ID NO: 57274 - DNA, 25 bp, Saccharomyces pastorianus
ttatattcatttgccttctggaaac

SEQ ID NO: 57275 - DNA, 25 bp, Saccharomyces pastorianus
gttatattcatttgccttctggaaa

SEQ ID NO: 57276 - DNA, 25 bp, Saccharomyces pastorianus
tattcatttgccttctggaaacaca

SEQ ID NO: 57277 - DNA, 25 bp, Saccharomyces pastorianus
catttgccttctggaaacacaagca

SEQ ID NO: 57278 - DNA, 25 bp, Saccharomyces pastorianus
caagcatgaattgctaccattgcaa

SEQ ID NO: 57279 - DNA, 25 bp, Saccharomyces pastorianus
acacaagcatgaattgctaccattg

SEQ ID NO: 57280 - DNA, 25 bp, Saccharomyces pastorianus
ttcatttgccttctggaaacacaag

SEQ ID NO: 57281 - DNA, 25 bp, Saccharomyces pastorianus
tcatttgccttctggaaacacaagc

SEQ ID NO: 57282 - DNA, 25 bp, Saccharomyces pastorianus
attcatttgccttctggaaacacaa

SEQ ID NO: 57283 - DNA, 25 bp, Saccharomyces pastorianus
atattcatttgccttctggaaacac

SEQ ID NO: 57284 - DNA, 25 bp, Saccharomyces pastorianus
gtttgcacgatactaaatacccggt

SEQ ID NO: 57285 - DNA, 25 bp, Saccharomyces pastorianus
gtgagccaattgacgaatctgatgc

SEQ ID NO: 57286 - DNA, 25 bp, Saccharomyces pastorianus
aacgcttatggtcaccttgcaggta

SEQ ID NO: 57287 - DNA, 25 bp, Saccharomyces pastorianus
ttctatgttggctactagcgttcgt

SEQ ID NO: 57288 - DNA, 25 bp, Saccharomyces pastorianus
gaataaatctctcgctaatcccatc

SEQ ID NO: 57289 - DNA, 25 bp, Saccharomyces pastorianus
gctaatcccatcatgacgttttcta

SEQ ID NO: 57290 - DNA, 25 bp, Saccharomyces pastorianus
actggattttactgtgttactgcat

SEQ ID NO: 57291 - DNA, 25 bp, Saccharomyces pastorianus
tactgagatcataaactaccgctat

SEQ ID NO: 57292 - DNA, 25 bp, Saccharomyces pastorianus
agttgtttacgatccatatacttcc

SEQ ID NO: 57293 - DNA, 25 bp, Saccharomyces pastorianus
aatctgatgctggtattgtcgttgc

SEQ ID NO: 57294 - DNA, 25 bp, Saccharomyces pastorianus
gatccatttatatcgttcaacgtca

SEQ ID NO: 57295 - DNA, 25 bp, Saccharomyces pastorianus
gtttgtttgatatggatggtcttct

SEQ ID NO: 57296 - DNA, 25 bp, Saccharomyces pastorianus
gaagatatttacactgaaacgttaa

SEQ ID NO: 57297 - DNA, 25 bp, Saccharomyces pastorianus
gatggtcttcttattaacacagaag

SEQ ID NO: 57298 - DNA, 25 bp, Saccharomyces pastorianus
acttgggacgtgaagattcagttac

SEQ ID NO: 57299 - DNA, 25 bp, Saccharomyces pastorianus
taaaggtcctttgacttgggacgtg

SEQ ID NO: 57300 - DNA, 25 bp, Saccharomyces pastorianus
taaatgaaaccttggcggaatttgg

SEQ ID NO: 57301 - DNA, 25 bp, Saccharomyces pastorianus
catcctgtagatgtaaaagcatgtt

SEQ ID NO: 57302 - DNA, 25 bp, Saccharomyces pastorianus
aggtcctttgacttgggacgtgaag

SEQ ID NO: 57303 - DNA, 25 bp, Saccharomyces pastorianus
cctttgacttgggacgtgaagattc

SEQ ID NO: 57304 - DNA, 25 bp, Saccharomyces pastorianus
atatggatggtcttcttattaacac

SEQ ID NO: 57305 - DNA, 25 bp, Saccharomyces pastorianus
aaagcatgtttgtttgatatggatg

SEQ ID NO: 57306 - DNA, 25 bp, Saccharomyces pastorianus
gtgcggacttttcaattgttcaacc

SEQ ID NO: 57307 - DNA, 25 bp, Saccharomyces pastorianus
gatccgacggtgcacaacgatgata

SEQ ID NO: 57308 - DNA, 25 bp, Saccharomyces pastorianus
cgtgtaaagtttccgccagtgaccg

SEQ ID NO: 57309 - DNA, 25 bp, Saccharomyces pastorianus
ccgaaaacgcgctggtgtcaatggt

SEQ ID NO: 57310 - DNA, 25 bp, Saccharomyces pastorianus
tatgaggctgactttccccttgtta

SEQ ID NO: 57311 - DNA, 25 bp, Saccharomyces pastorianus
gacgcagatcagtgggtctcgccta

SEQ ID NO: 57312 - DNA, 25 bp, Saccharomyces pastorianus
tactgttgtgttcaggttgtgccaa

SEQ ID NO: 57313 - DNA, 25 bp, Saccharomyces pastorianus
gattccatcgtccaatgtgtcgtat

SEQ ID NO: 57314 - DNA, 25 bp, Saccharomyces pastorianus
gaatacttagtctctgaggcggtgt

SEQ ID NO: 57315 - DNA, 25 bp, Saccharomyces pastorianus
aatattccggcgattttgtctctaa

SEQ ID NO: 57316 - DNA, 25 bp, Saccharomyces pastorianus
gttcaaccagcatgcatgtgtgtcg

SEQ ID NO: 57317 - DNA, 25 bp, Saccharomyces pastorianus
ttgttcgtttccactctgctaaata

SEQ ID NO: 57318 - DNA, 25 bp, Saccharomyces pastorianus
aaaatactaatgagacctggccgtc

SEQ ID NO: 57319 - DNA, 25 bp, Saccharomyces pastorianus
gagcctgtatttgtatccaccttag

SEQ ID NO: 57320 - DNA, 25 bp, Saccharomyces pastorianus
ggaagtcctggccaagttgttagta

SEQ ID NO: 57321 - DNA, 25 bp, Saccharomyces pastorianus
aatgctctcatttatactaccagga

SEQ ID NO: 57322 - DNA, 25 bp, Saccharomyces pastorianus
gaatctgatggcaacactcatagag

SEQ ID NO: 57323 - DNA, 25 bp, Saccharomyces pastorianus
gaaatgtttctgtcttctccaaaat

SEQ ID NO: 57324 - DNA, 25 bp, Saccharomyces pastorianus
gacattctattactattctcctgaa

SEQ ID NO: 57325 - DNA, 25 bp, Saccharomyces pastorianus
gaggcctttattcctaagttactca

SEQ ID NO: 57326 - DNA, 25 bp, Saccharomyces pastorianus
tgagtgttcgtacgctggaagtcct

SEQ ID NO: 57327 - DNA, 25 bp, Saccharomyces pastorianus
gtctctgcataattgtgagcctgta

SEQ ID NO: 57328 - DNA, 25 bp, Saccharomyces pastorianus
ttgttctatatagccgccgccgctg

SEQ ID NO: 57329 - DNA, 25 bp, Saccharomyces pastorianus
gacccattgcaaacactcgtcaaag

SEQ ID NO: 57330 - DNA, 25 bp, Saccharomyces pastorianus
atgggcctgtacataggctcccaca

SEQ ID NO: 57331 - DNA, 25 bp, Saccharomyces pastorianus
gctgccacctacaactggttggtat

SEQ ID NO: 57332 - DNA, 25 bp, Saccharomyces pastorianus
tgcaccttgatcatgggcctgtaca

SEQ ID NO: 57333 - DNA, 25 bp, Saccharomyces pastorianus
aaagtcacgaggcaccttgaccgtc

SEQ ID NO: 57334 - DNA, 25 bp, Saccharomyces pastorianus
actggttggtatgcaccgagggatc

SEQ ID NO: 57335 - DNA, 25 bp, Saccharomyces pastorianus
gagggatcgtgctgcaccttgatca

SEQ ID NO: 57336 - DNA, 25 bp, Saccharomyces pastorianus
tgctcctgttcgatgcgggctgtgc

SEQ ID NO: 57337 - DNA, 25 bp, Saccharomyces pastorianus
tgcaggatcactgcggtggctagac

SEQ ID NO: 57338 - DNA, 25 bp, Saccharomyces pastorianus
tcttctagcgcctgcaggatcactg

SEQ ID NO: 57339 - DNA, 25 bp, Saccharomyces pastorianus
atttagatccaggttcgagaacgac

SEQ ID NO: 57340 - DNA, 25 bp, Saccharomyces pastorianus
ggtcttcgttggcatatgatcctgt

SEQ ID NO: 57341 - DNA, 25 bp, Saccharomyces pastorianus
gacgacattactgaaaaacgcccta

SEQ ID NO: 57342 - DNA, 25 bp, Saccharomyces pastorianus
aatccattgttcactaggttatctg

SEQ ID NO: 57343 - DNA, 25 bp, Saccharomyces pastorianus
atgatcctgttaatatggccaagag

SEQ ID NO: 57344 - DNA, 25 bp, Saccharomyces pastorianus
gaaggctattgaccatctgcacaag

SEQ ID NO: 57345 - DNA, 25 bp, Saccharomyces pastorianus
agcgggagtgcacgacagtaacaat

SEQ ID NO: 57346 - DNA, 25 bp, Saccharomyces pastorianus
gtcatccgctgcttgacaagtcgaa

SEQ ID NO: 57347 - DNA, 25 bp, Saccharomyces pastorianus
aacgttacgttatcgctggactcca

SEQ ID NO: 57348 - DNA, 25 bp, Saccharomyces pastorianus
acgagattgccatcaaatgctttaa

SEQ ID NO: 57349 - DNA, 25 bp, Saccharomyces pastorianus
gaagcctaataatgtatctacgacg

SEQ ID NO: 57350 - DNA, 25 bp, Saccharomyces pastorianus
gctttttcattattaggccacacaa

SEQ ID NO: 57351 - DNA, 25 bp, Saccharomyces pastorianus
gaagatcgaacctgctttttcatta

SEQ ID NO: 57352 - DNA, 25 bp, Saccharomyces pastorianus
aacaggatccgccaaagtgtacaaa

SEQ ID NO: 57353 - DNA, 25 bp, Saccharomyces pastorianus
cacacatcctgccattcgataataa

SEQ ID NO: 57354 - DNA, 25 bp, Saccharomyces pastorianus
gaaacagccgagctaggtgagcaaa

SEQ ID NO: 57355 - DNA, 25 bp, Saccharomyces pastorianus
cagtctacgactgcggtgaaagatt

SEQ ID NO: 57356 - DNA, 25 bp, Saccharomyces pastorianus
gaactgtctaacactatgcgacgaa

SEQ ID NO: 57357 - DNA, 25 bp, Saccharomyces pastorianus
taaccatcggttctgacggtaagat

SEQ ID NO: 57358 - DNA, 25 bp, Saccharomyces pastorianus
gtgattacttcgctgtaggtttaag

SEQ ID NO: 57359 - DNA, 25 bp, Saccharomyces pastorianus
catgcatcttgagacacacatcctg

SEQ ID NO: 57360 - DNA, 25 bp, Saccharomyces pastorianus
tcggtacctacttaataaccatcgg

SEQ ID NO: 57361 - DNA, 25 bp, Saccharomyces pastorianus
gaagaccttggtttgataactgatg

SEQ ID NO: 57362 - DNA, 25 bp, Saccharomyces pastorianus
ggagctgtgcgaaactcttgaattt

SEQ ID NO: 57363 - DNA, 25 bp, Saccharomyces pastorianus
agcttcggctgggtaattatactaa

SEQ ID NO: 57364 - DNA, 25 bp, Saccharomyces pastorianus
aaatggttcttcctgccttgattta

SEQ ID NO: 57365 - DNA, 25 bp, Saccharomyces pastorianus
ggcgaatgatcccaagttcagcaaa

SEQ ID NO: 57366 - DNA, 25 bp, Saccharomyces pastorianus
taagcctagtacttgggacctcgct

SEQ ID NO: 57367 - DNA, 25 bp, Saccharomyces pastorianus
aaaacgaactgagccagcttcggct

SEQ ID NO: 57368 - DNA, 25 bp, Saccharomyces pastorianus
ccttatttcaagtctgatccacgct

SEQ ID NO: 57369 - DNA, 25 bp, Saccharomyces pastorianus
acccaatggtccgatatttatcctt

SEQ ID NO: 57370 - DNA, 25 bp, Saccharomyces pastorianus
ggacctcgcttccaaggagctgtgc

SEQ ID NO: 57371 - DNA, 25 bp, Saccharomyces pastorianus
gatccacgctttttgcaaatgcttg

SEQ ID NO: 57372 - DNA, 25 bp, Saccharomyces pastorianus
tataaaccagatgacagattcgttg

SEQ ID NO: 57373 - DNA, 25 bp, Saccharomyces pastorianus
tgacgcgatcattaaaagccggtaa

SEQ ID NO: 57374 - DNA, 25 bp, Saccharomyces pastorianus
gaactcatcctcaaggttgacgcga

SEQ ID NO: 57375 - DNA, 25 bp, Saccharomyces pastorianus
catcctcaaggttgacgcgatcatt

SEQ ID NO: 57376 - DNA, 25 bp, Saccharomyces pastorianus
gggtcgatgttcaccgatattaaga

SEQ ID NO: 57377 - DNA, 25 bp, Saccharomyces pastorianus
gatattaagaactcatcctcaaggt

SEQ ID NO: 57378 - DNA, 25 bp, Saccharomyces pastorianus
agaaggcttagccaataagttagct

SEQ ID NO: 57379 - DNA, 25 bp, Saccharomyces pastorianus
aagccggtaatggtatatggagaat

SEQ ID NO: 57380 - DNA, 25 bp, Saccharomyces pastorianus
gagaatggttggtttggcactgtta

SEQ ID NO: 57381 - DNA, 25 bp, Saccharomyces pastorianus
caataagttagctacgtttagaaat

SEQ ID NO: 57382 - DNA, 25 bp, Saccharomyces pastorianus
ggttggtttggcactgttaatattc

SEQ ID NO: 57383 - DNA, 25 bp, Saccharomyces pastorianus
caaggcttctaactggagattagtc

SEQ ID NO: 57384 - DNA, 25 bp, Saccharomyces pastorianus
caccgattctattgtcaaggcttct

SEQ ID NO: 57385 - DNA, 25 bp, Saccharomyces pastorianus
tattgtcaaggcttctaactggaga

SEQ ID NO: 57386 - DNA, 25 bp, Saccharomyces pastorianus
accgattctattgtcaaggcttcta

SEQ ID NO: 57387 - DNA, 25 bp, Saccharomyces pastorianus
ttctattgtcaaggcttctaactgg

SEQ ID NO: 57388 - DNA, 25 bp, Saccharomyces pastorianus
tgtcaaggcttctaactggagatta

SEQ ID NO: 57389 - DNA, 25 bp, Saccharomyces pastorianus
ccgattctattgtcaaggcttctaa

SEQ ID NO: 57390 - DNA, 25 bp, Saccharomyces pastorianus
ttgtcaaggcttctaactggagatt

SEQ ID NO: 57391 - DNA, 25 bp, Saccharomyces pastorianus
gattctattgtcaaggcttctaact

SEQ ID NO: 57392 - DNA, 25 bp, Saccharomyces pastorianus
tccaccgattctattgtcaaggctt

SEQ ID NO: 57393 - DNA, 25 bp, Saccharomyces pastorianus
ctattgtcaaggcttctaactggag

SEQ ID NO: 57394 - DNA, 25 bp, Saccharomyces pastorianus
aatgacccgttcgatgagcgaggca

SEQ ID NO: 57395 - DNA, 25 bp, Saccharomyces pastorianus
aatccaagctgttcgaagtagtgac

SEQ ID NO: 57396 - DNA, 25 bp, Saccharomyces pastorianus
gaacctattggagcaggatcagact

SEQ ID NO: 57397 - DNA, 25 bp, Saccharomyces pastorianus
caaaacttggtttctaacgcgccag

SEQ ID NO: 57398 - DNA, 25 bp, Saccharomyces pastorianus
taacgcgccagttgcagaaacaatc

SEQ ID NO: 57399 - DNA, 25 bp, Saccharomyces pastorianus
gatctatgaatttgcctcagttaca

SEQ ID NO: 57400 - DNA, 25 bp, Saccharomyces pastorianus
aaagctcaacttcaagccatatcat

SEQ ID NO: 57401 - DNA, 25 bp, Saccharomyces pastorianus
gaaatcctgatgatgagctacaagc

SEQ ID NO: 57402 - DNA, 25 bp, Saccharomyces pastorianus
gagcgaggcaactggtctattggca

SEQ ID NO: 57403 - DNA, 25 bp, Saccharomyces pastorianus
gcaggatcagactctcatggaaatc

SEQ ID NO: 57404 - DNA, 25 bp, Saccharomyces pastorianus
gttgcagagcacacctcaaaacttg

SEQ ID NO: 57405 - DNA, 25 bp, Saccharomyces pastorianus
ggtcaatccaggtaggctccagaaa

SEQ ID NO: 57406 - DNA, 25 bp, Saccharomyces pastorianus
ctctctccctataagcataccagaa

SEQ ID NO: 57407 - DNA, 25 bp, Saccharomyces pastorianus
ggctgttccaccaccagatgagaaa

SEQ ID NO: 57408 - DNA, 25 bp, Saccharomyces pastorianus
ttttcttacaggtcgcgagtgtctt

SEQ ID NO: 57409 - DNA, 25 bp, Saccharomyces pastorianus
aactgcgataaccacgtcaacaaag

SEQ ID NO: 57410 - DNA, 25 bp, Saccharomyces pastorianus
attttcaccgttatcacagtctcaa

SEQ ID NO: 57411 - DNA, 25 bp, Saccharomyces pastorianus
gaagaagatttctactctctcccta

SEQ ID NO: 57412 - DNA, 25 bp, Saccharomyces pastorianus
atatctcggcggcatctcaactaga

SEQ ID NO: 57413 - DNA, 25 bp, Saccharomyces pastorianus
gattctggccaatatatctcggcgg

SEQ ID NO: 57414 - DNA, 25 bp, Saccharomyces pastorianus
aactaccacgcaagtgccttctaaa

SEQ ID NO: 57415 - DNA, 25 bp, Saccharomyces pastorianus
ggtggttcccaaggacgacaacaat

SEQ ID NO: 57416 - DNA, 25 bp, Saccharomyces pastorianus
ggtaagatcctaattgcctcagaaa

SEQ ID NO: 57417 - DNA, 25 bp, Saccharomyces pastorianus
aaaatagactcaccgggtccttgct

SEQ ID NO: 57418 - DNA, 25 bp, Saccharomyces pastorianus
taatcttgaattgacctgggcggaa

SEQ ID NO: 57419 - DNA, 25 bp, Saccharomyces pastorianus
cttacttcaggtacatcgatgacgt

SEQ ID NO: 57420 - DNA, 25 bp, Saccharomyces pastorianus
aatccttcatcgcagcgtgcacaag

SEQ ID NO: 57421 - DNA, 25 bp, Saccharomyces pastorianus
agtgaagagcgtcaacgatccctcg

SEQ ID NO: 57422 - DNA, 25 bp, Saccharomyces pastorianus
ggtggcacagctgaaaccttacttc

SEQ ID NO: 57423 - DNA, 25 bp, Saccharomyces pastorianus
acgatccctcgcaaaatagactcac

SEQ ID NO: 57424 - DNA, 25 bp, Saccharomyces pastorianus
agcgtgcacaagtggtcaccatgtc

SEQ ID NO: 57425 - DNA, 25 bp, Saccharomyces pastorianus
cttgctggcgcataaggtggctgat

SEQ ID NO: 57426 - DNA, 25 bp, Saccharomyces pastorianus
aggtctacctggtgcctgttgaaag

SEQ ID NO: 57427 - DNA, 25 bp, Saccharomyces pastorianus
tttcctagtagatcgcaaccttcgg

SEQ ID NO: 57428 - DNA, 25 bp, Saccharomyces pastorianus
gacatggccaatgatgacggttatt

SEQ ID NO: 57429 - DNA, 25 bp, Saccharomyces pastorianus
aattcggctttaatggtgctggtga

SEQ ID NO: 57430 - DNA, 25 bp, Saccharomyces pastorianus
cagaccaggcaaccccttatatagt

SEQ ID NO: 57431 - DNA, 25 bp, Saccharomyces pastorianus
ttcggaccccaaactgcaagatcag

SEQ ID NO: 57432 - DNA, 25 bp, Saccharomyces pastorianus
aaatggacttcaggtgcttccttgt

SEQ ID NO: 57433 - DNA, 25 bp, Saccharomyces pastorianus
ggtcaatcgtatgccagaccaggca

SEQ ID NO: 57434 - DNA, 25 bp, Saccharomyces pastorianus
atacttttcaattccttatctgcat

SEQ ID NO: 57435 - DNA, 25 bp, Saccharomyces pastorianus
gaattccaatccaaactttacagac

SEQ ID NO: 57436 - DNA, 25 bp, Saccharomyces pastorianus
atatctttcagcacgaattcggctt

SEQ ID NO: 57437 - DNA, 25 bp, Saccharomyces pastorianus
tgtttcccctagaccattttcctag

SEQ ID NO: 57438 - DNA, 25 bp, Saccharomyces pastorianus
aatgtttgagagagaaaccacttgt

SEQ ID NO: 57439 - DNA, 25 bp, Saccharomyces pastorianus
tttgagagagaaaccacttgtggga

SEQ ID NO: 57440 - DNA, 25 bp, Saccharomyces pastorianus
gagaaaccacttgtgggagacagac

SEQ ID NO: 57441 - DNA, 25 bp, Saccharomyces pastorianus
gaaaccacttgtgggagacagacta

SEQ ID NO: 57442 - DNA, 25 bp, Saccharomyces pastorianus
gagagaaaccacttgtgggagacag

SEQ ID NO: 57443 - DNA, 25 bp, Saccharomyces pastorianus
agaaaccacttgtgggagacagact

SEQ ID NO: 57444 - DNA, 25 bp, Saccharomyces pastorianus
agagaaaccacttgtgggagacaga

SEQ ID NO: 57445 - DNA, 25 bp, Saccharomyces pastorianus
agagagaaaccacttgtgggagaca

SEQ ID NO: 57446 - DNA, 25 bp, Saccharomyces pastorianus
gagagagaaaccacttgtgggagac

SEQ ID NO: 57447 - DNA, 25 bp, Saccharomyces pastorianus
ggaatgtttgagagagaaaccactt

SEQ ID NO: 57448 - DNA, 25 bp, Saccharomyces pastorianus
atgtttgagagagaaaccacttgtg

SEQ ID NO: 57449 - DNA, 25 bp, Saccharomyces pastorianus
atcatagattacacgcagacatttt

SEQ ID NO: 57450 - DNA, 25 bp, Saccharomyces pastorianus
aagaatgcctctaatagtcctccgt

SEQ ID NO: 57451 - DNA, 25 bp, Saccharomyces pastorianus
gtcgctaacctcaaaagttcttgat

SEQ ID NO: 57452 - DNA, 25 bp, Saccharomyces pastorianus
gctatttacaatacctatcccacaa

SEQ ID NO: 57453 - DNA, 25 bp, Saccharomyces pastorianus
taaatccgacgccactgaacagttg

SEQ ID NO: 57454 - DNA, 25 bp, Saccharomyces pastorianus
atgggcgttaaagtcgctaacctca

SEQ ID NO: 57455 - DNA, 25 bp, Saccharomyces pastorianus
agtacagacgttaatcaggatggtg

SEQ ID NO: 57456 - DNA, 25 bp, Saccharomyces pastorianus
tccaaagcttcagagggattttcag

SEQ ID NO: 57457 - DNA, 25 bp, Saccharomyces pastorianus
ctctaatagtcctccgttgaacgaa

SEQ ID NO: 57458 - DNA, 25 bp, Saccharomyces pastorianus
gatttactttctcagatcattccaa

SEQ ID NO: 57459 - DNA, 25 bp, Saccharomyces pastorianus
gctatgggcccgatggctggaaaaa

SEQ ID NO: 57460 - DNA, 25 bp, Saccharomyces pastorianus
gaaagaggttaatgttgacgacgaa

SEQ ID NO: 57461 - DNA, 25 bp, Saccharomyces pastorianus
acaatgttccagagataaaggcgaa

SEQ ID NO: 57462 - DNA, 25 bp, Saccharomyces pastorianus
gcaaagttgctgacgaaaatggcat

SEQ ID NO: 57463 - DNA, 25 bp, Saccharomyces pastorianus
gtgtgaattcggatgccatgctggt

SEQ ID NO: 57464 - DNA, 25 bp, Saccharomyces pastorianus
ggacaccagtgttaacgtatatgaa

SEQ ID NO: 57465 - DNA, 25 bp, Saccharomyces pastorianus
ttcggatgccatgctggtggacaac

SEQ ID NO: 57466 - DNA, 25 bp, Saccharomyces pastorianus
atgaggcaggtgtcagcatcaatgg

SEQ ID NO: 57467 - DNA, 25 bp, Saccharomyces pastorianus
gcaattcgaagatttggacaccagt

SEQ ID NO: 57468 - DNA, 25 bp, Saccharomyces pastorianus
aaagtgcaaaactggacaatgttcc

SEQ ID NO: 57469 - DNA, 25 bp, Saccharomyces pastorianus
gaacctccaacagataaccatgata

SEQ ID NO: 57470 - DNA, 25 bp, Saccharomyces pastorianus
gttacagaatatgaacctccaacag

SEQ ID NO: 57471 - DNA, 25 bp, Saccharomyces pastorianus
tgatttgcccattacttccttagat

SEQ ID NO: 57472 - DNA, 25 bp, Saccharomyces pastorianus
gacactaaggtgttggcacgctccg

SEQ ID NO: 57473 - DNA, 25 bp, Saccharomyces pastorianus
tgtgtgcttggcagcgaagctccaa

SEQ ID NO: 57474 - DNA, 25 bp, Saccharomyces pastorianus
gaaaaattagtcacgggctccacgg

SEQ ID NO: 57475 - DNA, 25 bp, Saccharomyces pastorianus
tcagcgttggcctctggtacaaaag

SEQ ID NO: 57476 - DNA, 25 bp, Saccharomyces pastorianus
aaaacggattcctcatcaacggcca

SEQ ID NO: 57477 - DNA, 25 bp, Saccharomyces pastorianus
agctccaatgataggtgcacttcaa

SEQ ID NO: 57478 - DNA, 25 bp, Saccharomyces pastorianus
tggacctgattgtcacgcctacata

SEQ ID NO: 57479 - DNA, 25 bp, Saccharomyces pastorianus
gctccgccaacaatagcacatgtgt

SEQ ID NO: 57480 - DNA, 25 bp, Saccharomyces pastorianus
attctccactgggacttggttacag

SEQ ID NO: 57481 - DNA, 25 bp, Saccharomyces pastorianus
gaaccaccaaactcactgaagggcg

SEQ ID NO: 57482 - DNA, 25 bp, Saccharomyces pastorianus
attggatgactcctgaaccaccgca

SEQ ID NO: 57483 - DNA, 25 bp, Saccharomyces pastorianus
cggatttctgatcaatgggcacaac

SEQ ID NO: 57484 - DNA, 25 bp, Saccharomyces pastorianus
ggatttgaggacaagctcaattctt

SEQ ID NO: 57485 - DNA, 25 bp, Saccharomyces pastorianus
taatgtctttaacatggagcgcgat

SEQ ID NO: 57486 - DNA, 25 bp, Saccharomyces pastorianus
ctttaacatggagcgcgatgagcat

SEQ ID NO: 57487 - DNA, 25 bp, Saccharomyces pastorianus
cagaagaattgctattgtcaagtat

SEQ ID NO: 57488 - DNA, 25 bp, Saccharomyces pastorianus
tcgtccttagatttcgatggtaaat

SEQ ID NO: 57489 - DNA, 25 bp, Saccharomyces pastorianus
attgcttacgatttaccagtatcgt

SEQ ID NO: 57490 - DNA, 25 bp, Saccharomyces pastorianus
ttaccagtatcgtccttagatttcg

SEQ ID NO: 57491 - DNA, 25 bp, Saccharomyces pastorianus
agacggatttctgatcaatgggcac

SEQ ID NO: 57492 - DNA, 25 bp, Saccharomyces pastorianus
tgaaccaccgcattcactagatggg

SEQ ID NO: 57493 - DNA, 25 bp, Saccharomyces pastorianus
ggaaacagcataaccgcattagact

SEQ ID NO: 57494 - DNA, 25 bp, Saccharomyces pastorianus
aagttggagagctgcctggtcacct

SEQ ID NO: 57495 - DNA, 25 bp, Saccharomyces pastorianus
aaagatcatctgaagcgtcgtcctt

SEQ ID NO: 57496 - DNA, 25 bp, Saccharomyces pastorianus
ctggtcaccttgctactgttaattg

SEQ ID NO: 57497 - DNA, 25 bp, Saccharomyces pastorianus
gaagaagccatatcgtcgttatgtg

SEQ ID NO: 57498 - DNA, 25 bp, Saccharomyces pastorianus
gcattagactttgatacaccatggg

SEQ ID NO: 57499 - DNA, 25 bp, Saccharomyces pastorianus
aagcgtcgtccttcacgcaaaatga

SEQ ID NO: 57500 - DNA, 25 bp, Saccharomyces pastorianus
acagccctgtcttttgattctgaag

SEQ ID NO: 57501 - DNA, 25 bp, Saccharomyces pastorianus
gatgccccatgaaaaaagccacgat

SEQ ID NO: 57502 - DNA, 25 bp, Saccharomyces pastorianus
gggaaccttgtgctcatcaagctac

SEQ ID NO: 57503 - DNA, 25 bp, Saccharomyces pastorianus
aaataccacggctttcagaatgaca

SEQ ID NO: 57504 - DNA, 25 bp, Saccharomyces pastorianus
agaaaacctgtttgccatgctcgtg

SEQ ID NO: 57505 - DNA, 25 bp, Saccharomyces pastorianus
gcaattggcaagaagcgctccgcac

SEQ ID NO: 57506 - DNA, 25 bp, Saccharomyces pastorianus
gactcattggccaaggacctgttca

SEQ ID NO: 57507 - DNA, 25 bp, Saccharomyces pastorianus
ggacctttccatgagcggtattctg

SEQ ID NO: 57508 - DNA, 25 bp, Saccharomyces pastorianus
aactccaaccaggtgctgatcgtgg

SEQ ID NO: 57509 - DNA, 25 bp, Saccharomyces pastorianus
atcgccattggtaactgtcttgaca

SEQ ID NO: 57510 - DNA, 25 bp, Saccharomyces pastorianus
gtataggatcttcggcgagacgctc

SEQ ID NO: 57511 - DNA, 25 bp, Saccharomyces pastorianus
gagacgctcgatatcgccattggta

SEQ ID NO: 57512 - DNA, 25 bp, Saccharomyces pastorianus
gtcttgacagattcgccagaacttt

SEQ ID NO: 57513 - DNA, 25 bp, Saccharomyces pastorianus
gtgtaggctgcaacgtgcggttaca

SEQ ID NO: 57514 - DNA, 25 bp, Saccharomyces pastorianus
tgcacgccacggacaacagattctg

SEQ ID NO: 57515 - DNA, 25 bp, Saccharomyces pastorianus
gaaacctactatacggctggtgccg

SEQ ID NO: 57516 - DNA, 25 bp, Saccharomyces pastorianus
tggagagtccgcagaaccggccaaa

SEQ ID NO: 57517 - DNA, 25 bp, Saccharomyces pastorianus
aggacgggatagatgcctctgcctt

SEQ ID NO: 57518 - DNA, 25 bp, Saccharomyces pastorianus
cgctggtggcagctaaccgtataga

SEQ ID NO: 57519 - DNA, 25 bp, Saccharomyces pastorianus
catggcagtgcgcttttcgagtacg

SEQ ID NO: 57520 - DNA, 25 bp, Saccharomyces pastorianus
acaagtccggcgaatcatggcagtg

SEQ ID NO: 57521 - DNA, 25 bp, Saccharomyces pastorianus
gaaacagaacgagccatccgccagt

SEQ ID NO: 57522 - DNA, 25 bp, Saccharomyces pastorianus
ttcgaccaggctaaagtcaccgaga

SEQ ID NO: 57523 - DNA, 25 bp, Saccharomyces pastorianus
aactgtttcaactcgtcaatggcct

SEQ ID NO: 57524 - DNA, 25 bp, Saccharomyces pastorianus
ggttctatgcgatgagcatcccgct

SEQ ID NO: 57525 - DNA, 25 bp, Saccharomyces pastorianus
tatagagcttctccgccgcgataga

SEQ ID NO: 57526 - DNA, 25 bp, Saccharomyces pastorianus
ttcaacgtcaagatcgaagccacct

SEQ ID NO: 57527 - DNA, 25 bp, Saccharomyces pastorianus
ttccgagcagcctacagacggtaga

SEQ ID NO: 57528 - DNA, 25 bp, Saccharomyces pastorianus
ccatcaacggtgcttgttcttacga

SEQ ID NO: 57529 - DNA, 25 bp, Saccharomyces pastorianus
aagaaggccaaggttctgcccaagc

SEQ ID NO: 57530 - DNA, 25 bp, Saccharomyces pastorianus
gaaaatatggtcgtccccactgtcg

SEQ ID NO: 57531 - DNA, 25 bp, Saccharomyces pastorianus
aagtctccgggtccatcgctatttg

SEQ ID NO: 57532 - DNA, 25 bp, Saccharomyces pastorianus
caccgaacccatcaatgtcatcaag

SEQ ID NO: 57533 - DNA, 25 bp, Saccharomyces pastorianus
ggtgctggttacaccaacggtatca

SEQ ID NO: 57534 - DNA, 25 bp, Saccharomyces pastorianus
tgtgtacactggttctggctctgac

SEQ ID NO: 57535 - DNA, 25 bp, Saccharomyces pastorianus
gctatttgcggtaccgattacccag

SEQ ID NO: 57536 - DNA, 25 bp, Saccharomyces pastorianus
acaacgctggtgtttctgtagagga

SEQ ID NO: 57537 - DNA, 25 bp, Saccharomyces pastorianus
cgaacaaccatcacacgtttcaggg

SEQ ID NO: 57538 - DNA, 25 bp, Saccharomyces pastorianus
ggatgccaccactatcagttcgtct

SEQ ID NO: 57539 - DNA, 25 bp, Saccharomyces pastorianus
gcagagcattctggaccggtctaga

SEQ ID NO: 57540 - DNA, 25 bp, Saccharomyces pastorianus
tatccattcgatacagtccactagg

SEQ ID NO: 57541 - DNA, 25 bp, Saccharomyces pastorianus
gtagtatgggacaagccaccggcag

SEQ ID NO: 57542 - DNA, 25 bp, Saccharomyces pastorianus
ttctgctcctcttcggtaaagtcgt

SEQ ID NO: 57543 - DNA, 25 bp, Saccharomyces pastorianus
taaagtcgtccactttctcggatat

SEQ ID NO: 57544 - DNA, 25 bp, Saccharomyces pastorianus
atattctccggcaggacccttgaga

SEQ ID NO: 57545 - DNA, 25 bp, Saccharomyces pastorianus
ggctcgttgcactcaagcgaatcag

SEQ ID NO: 57546 - DNA, 25 bp, Saccharomyces pastorianus
agacgaactctagtgtgctggccat

SEQ ID NO: 57547 - DNA, 25 bp, Saccharomyces pastorianus
aagcacgcacagttggacccggatg

SEQ ID NO: 57548 - DNA, 25 bp, Saccharomyces pastorianus
agctcaaggacaagctggtccccag

SEQ ID NO: 57549 - DNA, 25 bp, Saccharomyces pastorianus
gtccgccgaggagcaggatgacttt

SEQ ID NO: 57550 - DNA, 25 bp, Saccharomyces pastorianus
agacgacctcgaagagcgtctggcc

SEQ ID NO: 57551 - DNA, 25 bp, Saccharomyces pastorianus
tggactactccatcggtgaacagct

SEQ ID NO: 57552 - DNA, 25 bp, Saccharomyces pastorianus
aggagctggaagacgacctcgaaga

SEQ ID NO: 57553 - DNA, 25 bp, Saccharomyces pastorianus
ccgcccttgaattcgagttcgacga

SEQ ID NO: 57554 - DNA, 25 bp, Saccharomyces pastorianus
aagctggtccccagagccgtggact

SEQ ID NO: 57555 - DNA, 25 bp, Saccharomyces pastorianus
acgggcgccgcccttgaattcgagt

SEQ ID NO: 57556 - DNA, 25 bp, Saccharomyces pastorianus
acccaaggtcctgcacgaggatcag

SEQ ID NO: 57557 - DNA, 25 bp, Saccharomyces pastorianus
tactccatcggtgaacagctcaagg

SEQ ID NO: 57558 - DNA, 25 bp, Saccharomyces pastorianus
tcgaagagcgtctggccctggacta

SEQ ID NO: 57559 - DNA, 25 bp, Saccharomyces pastorianus
acccgctaccgtcattttattgtgt

SEQ ID NO: 57560 - DNA, 25 bp, Saccharomyces pastorianus
gttctctgtacattggtgttcctaa

SEQ ID NO: 57561 - DNA, 25 bp, Saccharomyces pastorianus
gatacacagtgtacggcctcaaagt

SEQ ID NO: 57562 - DNA, 25 bp, Saccharomyces pastorianus
gacactagtttatacgctgctaatc

SEQ ID NO: 57563 - DNA, 25 bp, Saccharomyces pastorianus
aactactaaaattccgcgatgacag

SEQ ID NO: 57564 - DNA, 25 bp, Saccharomyces pastorianus
gaagacgtcgagtgttctctgtaca

SEQ ID NO: 57565 - DNA, 25 bp, Saccharomyces pastorianus
gcctcaaagtgtttttaagacctct

SEQ ID NO: 57566 - DNA, 25 bp, Saccharomyces pastorianus
taagacctcttgtgggtgtcgcctc

SEQ ID NO: 57567 - DNA, 25 bp, Saccharomyces pastorianus
ggtgaaaaggcccatttgcataaca

SEQ ID NO: 57568 - DNA, 25 bp, Saccharomyces pastorianus
tcatatatgcaggtatacccgctac

SEQ ID NO: 57569 - DNA, 25 bp, Saccharomyces pastorianus
tcgcctccgtgctcatttggaaaga

SEQ ID NO: 57570 - DNA, 25 bp, Saccharomyces pastorianus
gggactcatacctcgacggataaat

SEQ ID NO: 57571 - DNA, 25 bp, Saccharomyces pastorianus
gtgccccatgggttttctaagaaat

SEQ ID NO: 57572 - DNA, 25 bp, Saccharomyces pastorianus
ttccatgctttgatcactgccagaa

SEQ ID NO: 57573 - DNA, 25 bp, Saccharomyces pastorianus
agattcactaagctcgtggctccaa

SEQ ID NO: 57574 - DNA, 25 bp, Saccharomyces pastorianus
acaatgtgccctggacgcaagtgca

SEQ ID NO: 57575 - DNA, 25 bp, Saccharomyces pastorianus
aagtgcaggaccacatcgctacgat

SEQ ID NO: 57576 - DNA, 25 bp, Saccharomyces pastorianus
gcaaagggactcgattctggactac

SEQ ID NO: 57577 - DNA, 25 bp, Saccharomyces pastorianus
ttccaattcgcgctggtctatttaa

SEQ ID NO: 57578 - DNA, 25 bp, Saccharomyces pastorianus
gctaccacctccattattacaaaag

SEQ ID NO: 57579 - DNA, 25 bp, Saccharomyces pastorianus
acagcctcttctacacgaaagcgat

SEQ ID NO: 57580 - DNA, 25 bp, Saccharomyces pastorianus
ggaagctttgttcccacatattccg

SEQ ID NO: 57581 - DNA, 25 bp, Saccharomyces pastorianus
gcaaaggctgcgacgagttgttttt

SEQ ID NO: 57582 - DNA, 25 bp, Saccharomyces pastorianus
atactcccaatgacagaacctcggt

SEQ ID NO: 57583 - DNA, 25 bp, Saccharomyces pastorianus
gtatactttcaatttcagtgcgggt

SEQ ID NO: 57584 - DNA, 25 bp, Saccharomyces pastorianus
cctagtggatgcttattgtgggtca

SEQ ID NO: 57585 - DNA, 25 bp, Saccharomyces pastorianus
atgtccgcgacaatttgcaaattcc

SEQ ID NO: 57586 - DNA, 25 bp, Saccharomyces pastorianus
aatgccattttacctgtggtgacca

SEQ ID NO: 57587 - DNA, 25 bp, Saccharomyces pastorianus
cagtgcgggtgaatttttccaaaat

SEQ ID NO: 57588 - DNA, 25 bp, Saccharomyces pastorianus
gttaacagaagaaggctcccgggat

SEQ ID NO: 57589 - DNA, 25 bp, Saccharomyces pastorianus
tatctgctgatagtgtttctttcgc

SEQ ID NO: 57590 - DNA, 25 bp, Saccharomyces pastorianus
gagcacaacgtcaagttagccaaga

SEQ ID NO: 57591 - DNA, 25 bp, Saccharomyces pastorianus
gtttttgaagcagctagccgcatat

SEQ ID NO: 57592 - DNA, 25 bp, Saccharomyces pastorianus
gtgaccacccctaatcttggttatg

SEQ ID NO: 57593 - DNA, 25 bp, Saccharomyces pastorianus
gataatgtgaattcccaggcaatga

SEQ ID NO: 57594 - DNA, 25 bp, Saccharomyces pastorianus
actattccgcaaacagcatcttcag

SEQ ID NO: 57595 - DNA, 25 bp, Saccharomyces pastorianus
cccgttcctgttccactgaatttca

SEQ ID NO: 57596 - DNA, 25 bp, Saccharomyces pastorianus
gattcatttcattggccaacataaa

SEQ ID NO: 57597 - DNA, 25 bp, Saccharomyces pastorianus
gtagatgacgtctcgaagattgata

SEQ ID NO: 57598 - DNA, 25 bp, Saccharomyces pastorianus
gaagacaccagagtccagctcaata

SEQ ID NO: 57599 - DNA, 25 bp, Saccharomyces pastorianus
ggttatgaatcttcacctgctatga

SEQ ID NO: 57600 - DNA, 25 bp, Saccharomyces pastorianus
gggctattcctcaagataatgattt

SEQ ID NO: 57601 - DNA, 25 bp, Saccharomyces pastorianus
aacagcgacgctaaaccagaccaag

SEQ ID NO: 57602 - DNA, 25 bp, Saccharomyces pastorianus
aaaccatggtctctgtggtctcaga

SEQ ID NO: 57603 - DNA, 25 bp, Saccharomyces pastorianus
taagaccacttttcgtttccattgt

SEQ ID NO: 57604 - DNA, 25 bp, Saccharomyces pastorianus
atatccccattttttctgacgcaag

SEQ ID NO: 57605 - DNA, 25 bp, Saccharomyces pastorianus
ttttacgcattactggttttcacca

SEQ ID NO: 57606 - DNA, 25 bp, Saccharomyces pastorianus
gcgagatcggtatggaccttttcaa

SEQ ID NO: 57607 - DNA, 25 bp, Saccharomyces pastorianus
gagatggttacgacgtctcttccga

SEQ ID NO: 57608 - DNA, 25 bp, Saccharomyces pastorianus
caccacttattcctctttgaagaca

SEQ ID NO: 57609 - DNA, 25 bp, Saccharomyces pastorianus
tctcaattctccaatgcgctatcaa

SEQ ID NO: 57610 - DNA, 25 bp, Saccharomyces pastorianus
aagaggctcgttgactgatatcccc

SEQ ID NO: 57611 - DNA, 25 bp, Saccharomyces pastorianus
gtagacatctcttccagaattgctt

SEQ ID NO: 57612 - DNA, 25 bp, Saccharomyces pastorianus
tcaaactagaagtcgttcgtcctcc

SEQ ID NO: 57613 - DNA, 25 bp, Saccharomyces pastorianus
agagtcgagttctagtcacttgagt

SEQ ID NO: 57614 - DNA, 25 bp, Saccharomyces pastorianus
gactgaccccgtacttcatatagag

SEQ ID NO: 57615 - DNA, 25 bp, Saccharomyces pastorianus
ggttactgttttcaagccctctgaa

SEQ ID NO: 57616 - DNA, 25 bp, Saccharomyces pastorianus
gggctttgcgacaatcttctaacaa

SEQ ID NO: 57617 - DNA, 25 bp, Saccharomyces pastorianus
actagtagtagctccgttaaccgcg

SEQ ID NO: 57618 - DNA, 25 bp, Saccharomyces pastorianus
atggaaacagcggactgaccccgta

SEQ ID NO: 57619 - DNA, 25 bp, Saccharomyces pastorianus
gttaaccgcgaacaccttatcgaag

SEQ ID NO: 57620 - DNA, 25 bp, Saccharomyces pastorianus
agtgtcatcagagcttggaatccaa

SEQ ID NO: 57621 - DNA, 25 bp, Saccharomyces pastorianus
gaatccaagtttcccaattcttttg

SEQ ID NO: 57622 - DNA, 25 bp, Saccharomyces pastorianus
ttcatatagagttacgccgttgggc

SEQ ID NO: 57623 - DNA, 25 bp, Saccharomyces pastorianus
ttttggcgccttccatggtaagtag

SEQ ID NO: 57624 - DNA, 25 bp, Saccharomyces pastorianus
gccgttgggcggacatactagtagt

SEQ ID NO: 57625 - DNA, 25 bp, Saccharomyces pastorianus
tggttccccgcttgttaacgaaatg

SEQ ID NO: 57626 - DNA, 25 bp, Saccharomyces pastorianus
ggttcccgctgtaactttcagtgat

SEQ ID NO: 57627 - DNA, 25 bp, Saccharomyces pastorianus
aaagcaatcagtcattccttccatt

SEQ ID NO: 57628 - DNA, 25 bp, Saccharomyces pastorianus
gtatacttgaccctattaagcctga

SEQ ID NO: 57629 - DNA, 25 bp, Saccharomyces pastorianus
gatctacccctgaagatactccagt

SEQ ID NO: 57630 - DNA, 25 bp, Saccharomyces pastorianus
atgaaagatcctacacctaagctgg

SEQ ID NO: 57631 - DNA, 25 bp, Saccharomyces pastorianus
ggtgccacaggttcattatccgtat

SEQ ID NO: 57632 - DNA, 25 bp, Saccharomyces pastorianus
tagaccccaggttgcctcaagacga

SEQ ID NO: 57633 - DNA, 25 bp, Saccharomyces pastorianus
attaagcctgacaaaatcgccgcct

SEQ ID NO: 57634 - DNA, 25 bp, Saccharomyces pastorianus
aattgcacgtactctttggtgccac

SEQ ID NO: 57635 - DNA, 25 bp, Saccharomyces pastorianus
gtgccactccgagaacagtacaggt

SEQ ID NO: 57636 - DNA, 25 bp, Saccharomyces pastorianus
gaccatacagcacggttacgtcggt

SEQ ID NO: 57637 - DNA, 25 bp, Saccharomyces pastorianus
tagtcaaatccggaccatacagcac

SEQ ID NO: 57638 - DNA, 25 bp, Saccharomyces pastorianus
catacagcacggttacgtcggtttc

SEQ ID NO: 57639 - DNA, 25 bp, Saccharomyces pastorianus
aaatccggaccatacagcacggtta

SEQ ID NO: 57640 - DNA, 25 bp, Saccharomyces pastorianus
tacagcacggttacgtcggtttcct

SEQ ID NO: 57641 - DNA, 25 bp, Saccharomyces pastorianus
gtcaaatccggaccatacagcacgg

SEQ ID NO: 57642 - DNA, 25 bp, Saccharomyces pastorianus
ggtttccttgttccagttgatagag

SEQ ID NO: 57643 - DNA, 25 bp, Saccharomyces pastorianus
ttccttgttccagttgatagagagc

SEQ ID NO: 57644 - DNA, 25 bp, Saccharomyces pastorianus
cagcacggttacgtcggtttccttg

SEQ ID NO: 57645 - DNA, 25 bp, Saccharomyces pastorianus
atccggaccatacagcacggttacg

SEQ ID NO: 57646 - DNA, 25 bp, Saccharomyces pastorianus
ggaccatacagcacggttacgtcgg

SEQ ID NO: 57647 - DNA, 25 bp, Saccharomyces pastorianus
gacagttactgtaccatgtgttaga

SEQ ID NO: 57648 - DNA, 25 bp, Saccharomyces pastorianus
gatgtcctcggaagaactcattaga

SEQ ID NO: 57649 - DNA, 25 bp, Saccharomyces pastorianus
ttctaagcattatcgaaacggatct

SEQ ID NO: 57650 - DNA, 25 bp, Saccharomyces pastorianus
ttccgcactaaatgaatcctttctg

SEQ ID NO: 57651 - DNA, 25 bp, Saccharomyces pastorianus
ctttatgcaaggagcggtggagaca

SEQ ID NO: 57652 - DNA, 25 bp, Saccharomyces pastorianus
aggtacagccatgtcaagcaaaact

SEQ ID NO: 57653 - DNA, 25 bp, Saccharomyces pastorianus
aagacgaattccgtattgtatcaaa

SEQ ID NO: 57654 - DNA, 25 bp, Saccharomyces pastorianus
gagacttgtaatattgttcgatgaa

SEQ ID NO: 57655 - DNA, 25 bp, Saccharomyces pastorianus
aggaccctaaagtccgtatagcaga

SEQ ID NO: 57656 - DNA, 25 bp, Saccharomyces pastorianus
caaaattttaaacgtgcttcacagc

SEQ ID NO: 57657 - DNA, 25 bp, Saccharomyces pastorianus
gattgtcttaagcagatgtcctcgg

SEQ ID NO: 57658 - DNA, 25 bp, Saccharomyces pastorianus
aagccgactatattggcctgatgat

SEQ ID NO: 57659 - DNA, 25 bp, Saccharomyces pastorianus
gacacacagctgagaacttatcgaa

SEQ ID NO: 57660 - DNA, 25 bp, Saccharomyces pastorianus
gaccccagtgtggataactctttgt

SEQ ID NO: 57661 - DNA, 25 bp, Saccharomyces pastorianus
gatcgccaccgtattatcacatgaa

SEQ ID NO: 57662 - DNA, 25 bp, Saccharomyces pastorianus
ggcatgtttccaaccacaggaatct

SEQ ID NO: 57663 - DNA, 25 bp, Saccharomyces pastorianus
ttttgcctatctgcgccaatgaaga

SEQ ID NO: 57664 - DNA, 25 bp, Saccharomyces pastorianus
attcagctctattttgcctatctgc

SEQ ID NO: 57665 - DNA, 25 bp, Saccharomyces pastorianus
acccggccagtgttcgcagaataga

SEQ ID NO: 57666 - DNA, 25 bp, Saccharomyces pastorianus
gtttctaagtacacacccggccagt

SEQ ID NO: 57667 - DNA, 25 bp, Saccharomyces pastorianus
aactgcctcaccaaacgcatttgtg

SEQ ID NO: 57668 - DNA, 25 bp, Saccharomyces pastorianus
tgtggtcaacgattcaactgcctca

SEQ ID NO: 57669 - DNA, 25 bp, Saccharomyces pastorianus
caagactcaactgtgctagggataa

SEQ ID NO: 57670 - DNA, 25 bp, Saccharomyces pastorianus
atgaaggccacttttccgcgaagaa

SEQ ID NO: 57671 - DNA, 25 bp, Saccharomyces pastorianus
aagaattttggccactcctgcaagg

SEQ ID NO: 57672 - DNA, 25 bp, Saccharomyces pastorianus
gacaataacggttccctgggtgaga

SEQ ID NO: 57673 - DNA, 25 bp, Saccharomyces pastorianus
cagtttcactttcacacaccaataa

SEQ ID NO: 57674 - DNA, 25 bp, Saccharomyces pastorianus
tgcaggagtctcctacattcgagca

SEQ ID NO: 57675 - DNA, 25 bp, Saccharomyces pastorianus
tgcctaccaatacaatccacagttt

SEQ ID NO: 57676 - DNA, 25 bp, Saccharomyces pastorianus
ttctaccaatgcgtatccagctttg

SEQ ID NO: 57677 - DNA, 25 bp, Saccharomyces pastorianus
gaacgcccaggtttgaacatgcagg

SEQ ID NO: 57678 - DNA, 25 bp, Saccharomyces pastorianus
taatctcgcccggtttagatacaga

SEQ ID NO: 57679 - DNA, 25 bp, Saccharomyces pastorianus
tcctgcaaggcggtactgtaagact

SEQ ID NO: 57680 - DNA, 25 bp, Saccharomyces pastorianus
gtgggcgttagcagtgttattgaca

SEQ ID NO: 57681 - DNA, 25 bp, Saccharomyces pastorianus
aagcatcgacgatagggtgctacgg

SEQ ID NO: 57682 - DNA, 25 bp, Saccharomyces pastorianus
gatttccaagcagactacagctccg

SEQ ID NO: 57683 - DNA, 25 bp, Saccharomyces pastorianus
gcagactacagctccgaaaacaatg

SEQ ID NO: 57684 - DNA, 25 bp, Saccharomyces pastorianus
ggctagtatagccactaaagtgctt

SEQ ID NO: 57685 - DNA, 25 bp, Saccharomyces pastorianus
aacaatgtcatgcttgcccggttca

SEQ ID NO: 57686 - DNA, 25 bp, Saccharomyces pastorianus
gcccggttcagaagcatcgacgata

SEQ ID NO: 57687 - DNA, 25 bp, Saccharomyces pastorianus
taaagtgctttctccagacccaatt

SEQ ID NO: 57688 - DNA, 25 bp, Saccharomyces pastorianus
gcagtgttattgacagcatcaagac

SEQ ID NO: 57689 - DNA, 25 bp, Saccharomyces pastorianus
gctttctccagacccaattctgaaa

SEQ ID NO: 57690 - DNA, 25 bp, Saccharomyces pastorianus
attctgaaaccacaggatttccaag

SEQ ID NO: 57691 - DNA, 25 bp, Saccharomyces pastorianus
gagtcagatgattgtcgttcagtta

SEQ ID NO: 57692 - DNA, 25 bp, Saccharomyces pastorianus
agttccaatgtctcactgtcatcct

SEQ ID NO: 57693 - DNA, 25 bp, Saccharomyces pastorianus
ttgcgacgcccaaaagtggagcttt

SEQ ID NO: 57694 - DNA, 25 bp, Saccharomyces pastorianus
gttcgtattacccaagaagagcttc

SEQ ID NO: 57695 - DNA, 25 bp, Saccharomyces pastorianus
gcatcgtttcatacaagggattcct

SEQ ID NO: 57696 - DNA, 25 bp, Saccharomyces pastorianus
agggattcctccataacatctgtaa

SEQ ID NO: 57697 - DNA, 25 bp, Saccharomyces pastorianus
ctagaggatgtatttgcgacgccca

SEQ ID NO: 57698 - DNA, 25 bp, Saccharomyces pastorianus
ttcagacccttcgagtgataacgct

SEQ ID NO: 57699 - DNA, 25 bp, Saccharomyces pastorianus
tcctcccaacagcacataacgaaaa

SEQ ID NO: 57700 - DNA, 25 bp, Saccharomyces pastorianus
tgtcacaattaccaagcacgttcga

SEQ ID NO: 57701 - DNA, 25 bp, Saccharomyces pastorianus
gaagagcttcatcctcgaatttgaa

SEQ ID NO: 57702 - DNA, 25 bp, Saccharomyces pastorianus
acaccttcatctgcaacgtttcaat

SEQ ID NO: 57703 - DNA, 25 bp, Saccharomyces pastorianus
tttgccgccctcagaagtaaacttg

SEQ ID NO: 57704 - DNA, 25 bp, Saccharomyces pastorianus
aacgttcggtacctgtatgaagaca

SEQ ID NO: 57705 - DNA, 25 bp, Saccharomyces pastorianus
atatcatatccctgcattcctatat

SEQ ID NO: 57706 - DNA, 25 bp, Saccharomyces pastorianus
aagatccacgtctgttaacgctgct

SEQ ID NO: 57707 - DNA, 25 bp, Saccharomyces pastorianus
ttattcctgggagtagaaccgctac

SEQ ID NO: 57708 - DNA, 25 bp, Saccharomyces pastorianus
gtattgcccgactcagtttgattga

SEQ ID NO: 57709 - DNA, 25 bp, Saccharomyces pastorianus
tttcagcgtgatagtattgcccgac

SEQ ID NO: 57710 - DNA, 25 bp, Saccharomyces pastorianus
tttcacccaggtttttagcagcaga

SEQ ID NO: 57711 - DNA, 25 bp, Saccharomyces pastorianus
aggcgttaagcgtatgcgactttta

SEQ ID NO: 57712 - DNA, 25 bp, Saccharomyces pastorianus
aaggtccaattccattacgagctcg

SEQ ID NO: 57713 - DNA, 25 bp, Saccharomyces pastorianus
atgtagccaaccgtctatagtcatg

SEQ ID NO: 57714 - DNA, 25 bp, Saccharomyces pastorianus
gaaccatattatcaccgtttcactt

SEQ ID NO: 57715 - DNA, 25 bp, Saccharomyces pastorianus
cattccaagccactttactcgtaaa

SEQ ID NO: 57716 - DNA, 25 bp, Saccharomyces pastorianus
gtatttggtggataccgacgcactg

SEQ ID NO: 57717 - DNA, 25 bp, Saccharomyces pastorianus
gattatctcggttcatttatatcag

SEQ ID NO: 57718 - DNA, 25 bp, Saccharomyces pastorianus
acccagacggttgttcgatgctcaa

SEQ ID NO: 57719 - DNA, 25 bp, Saccharomyces pastorianus
cgtttcacttttaccgctatgcaag

SEQ ID NO: 57720 - DNA, 25 bp, Saccharomyces pastorianus
cagcctggcgttgtattttgagaaa

SEQ ID NO: 57721 - DNA, 25 bp, Saccharomyces pastorianus
gatcaagctaatgtccttccacatg

SEQ ID NO: 57722 - DNA, 25 bp, Saccharomyces pastorianus
acgcactgtcttcacttatatccga

SEQ ID NO: 57723 - DNA, 25 bp, Saccharomyces pastorianus
aatgaatgtctaccacagcctggcg

SEQ ID NO: 57724 - DNA, 25 bp, Saccharomyces pastorianus
aagagctttgaacggtgtctccacc

SEQ ID NO: 57725 - DNA, 25 bp, Saccharomyces pastorianus
agctttgaacggtgtctccaccgat

SEQ ID NO: 57726 - DNA, 25 bp, Saccharomyces pastorianus
agtctcttatgattccgttttggaa

SEQ ID NO: 57727 - DNA, 25 bp, Saccharomyces pastorianus
tccaccgatgtccaaggtactgact

SEQ ID NO: 57728 - DNA, 25 bp, Saccharomyces pastorianus
ggtactgacttctctgaagtctctt

SEQ ID NO: 57729 - DNA, 25 bp, Saccharomyces pastorianus
caaggatgccttaagaagagctttg

SEQ ID NO: 57730 - DNA, 25 bp, Saccharomyces pastorianus
ttctctgaagtctcttatgattccg

SEQ ID NO: 57731 - DNA, 25 bp, Saccharomyces pastorianus
atgtccaaggtactgacttctctga

SEQ ID NO: 57732 - DNA, 25 bp, Saccharomyces pastorianus
gaagtctcttatgattccgttttgg

SEQ ID NO: 57733 - DNA, 25 bp, Saccharomyces pastorianus
tccaaggtactgacttctctgaagt

SEQ ID NO: 57734 - DNA, 25 bp, Saccharomyces pastorianus
gaacggtgtctccaccgatgtccaa

SEQ ID NO: 57735 - DNA, 25 bp, Saccharomyces pastorianus
aggcagcgggtatagcaataattcc

SEQ ID NO: 57736 - DNA, 25 bp, Saccharomyces pastorianus
ccgatgtttcggtgcaattgagtag

SEQ ID NO: 57737 - DNA, 25 bp, Saccharomyces pastorianus
gaattacctggcctggtgaacaatt

SEQ ID NO: 57738 - DNA, 25 bp, Saccharomyces pastorianus
aaagcctgttgcaactcttggatgt

SEQ ID NO: 57739 - DNA, 25 bp, Saccharomyces pastorianus
gattgtacgtccaactgcacgattt

SEQ ID NO: 57740 - DNA, 25 bp, Saccharomyces pastorianus
agatgccaaaatccagacccggtgt

SEQ ID NO: 57741 - DNA, 25 bp, Saccharomyces pastorianus
caggtactcctgatgatatccgtat

SEQ ID NO: 57742 - DNA, 25 bp, Saccharomyces pastorianus
ggtcaaaagtactctcaaagcctgt

SEQ ID NO: 57743 - DNA, 25 bp, Saccharomyces pastorianus
gatatccgtatattcactagctgtt

SEQ ID NO: 57744 - DNA, 25 bp, Saccharomyces pastorianus
tgcacgatttatactgtcagggtca

SEQ ID NO: 57745 - DNA, 25 bp, Saccharomyces pastorianus
caactcggtcgtcgaatctttggag

SEQ ID NO: 57746 - DNA, 25 bp, Saccharomyces pastorianus
gtcgcattccaaatataagcttcct

SEQ ID NO: 57747 - DNA, 25 bp, Saccharomyces pastorianus
atttgtgaggctgaaaccgtttgta

SEQ ID NO: 57748 - DNA, 25 bp, Saccharomyces pastorianus
taagcttcctacacattttgaaaag

SEQ ID NO: 57749 - DNA, 25 bp, Saccharomyces pastorianus
gaaaagctcgatgcaggctctacta

SEQ ID NO: 57750 - DNA, 25 bp, Saccharomyces pastorianus
tggtgtttaatcctaacggtttgca

SEQ ID NO: 57751 - DNA, 25 bp, Saccharomyces pastorianus
tagccccgagcctatgggcagcaca

SEQ ID NO: 57752 - DNA, 25 bp, Saccharomyces pastorianus
aagctgttcatatctacccgaaacg

SEQ ID NO: 57753 - DNA, 25 bp, Saccharomyces pastorianus
tttgcaatcaaaaactagccccgag

SEQ ID NO: 57754 - DNA, 25 bp, Saccharomyces pastorianus
gacagacgtacagcgattatcttcg

SEQ ID NO: 57755 - DNA, 25 bp, Saccharomyces pastorianus
tccagtccgcctaccaaattaaata

SEQ ID NO: 57756 - DNA, 25 bp, Saccharomyces pastorianus
cagtgatttcgacacaacactcgta

SEQ ID NO: 57757 - DNA, 25 bp, Saccharomyces pastorianus
tttataccaaagacggcacccacgg

SEQ ID NO: 57758 - DNA, 25 bp, Saccharomyces pastorianus
gctcgaagtggtccagctatgcatt

SEQ ID NO: 57759 - DNA, 25 bp, Saccharomyces pastorianus
agaggcggcttcttcggatgcccag

SEQ ID NO: 57760 - DNA, 25 bp, Saccharomyces pastorianus
ggtcgacgataagttggcctccaaa

SEQ ID NO: 57761 - DNA, 25 bp, Saccharomyces pastorianus
atttgcagtacatcagcgagccggg

SEQ ID NO: 57762 - DNA, 25 bp, Saccharomyces pastorianus
ggccgagaccatcaagtcgcatgaa

SEQ ID NO: 57763 - DNA, 25 bp, Saccharomyces pastorianus
ggcgtcaagatcgtcatcgactcga

SEQ ID NO: 57764 - DNA, 25 bp, Saccharomyces pastorianus
gctgctgttgccaagaacgactgtg

SEQ ID NO: 57765 - DNA, 25 bp, Saccharomyces pastorianus
aaagaacgctaaggcctcgcaaggc

SEQ ID NO: 57766 - DNA, 25 bp, Saccharomyces pastorianus
gttggcctccaaattcgttttcaag

SEQ ID NO: 57767 - DNA, 25 bp, Saccharomyces pastorianus
gactgtgcgtgtatggaagctccaa

SEQ ID NO: 57768 - DNA, 25 bp, Saccharomyces pastorianus
ttttcgattatggtgatttcactac

SEQ ID NO: 57769 - DNA, 25 bp, Saccharomyces pastorianus
ttcgattatggtgatttcactacca

SEQ ID NO: 57770 - DNA, 25 bp, Saccharomyces pastorianus
gttttcgattatggtgatttcacta

SEQ ID NO: 57771 - DNA, 25 bp, Saccharomyces pastorianus
cacttggccgaatactactctttcc

SEQ ID NO: 57772 - DNA, 25 bp, Saccharomyces pastorianus
aagctgttttcgattatggtgattt

SEQ ID NO: 57773 - DNA, 25 bp, Saccharomyces pastorianus
agctgttttcgattatggtgatttc

SEQ ID NO: 57774 - DNA, 25 bp, Saccharomyces pastorianus
gctgttttcgattatggtgatttca

SEQ ID NO: 57775 - DNA, 25 bp, Saccharomyces pastorianus
tggtgatttcactaccatgttgacc

SEQ ID NO: 57776 - DNA, 25 bp, Saccharomyces pastorianus
ctgttttcgattatggtgatttcac

SEQ ID NO: 57777 - DNA, 25 bp, Saccharomyces pastorianus
tgttttcgattatggtgatttcact

SEQ ID NO: 57778 - DNA, 25 bp, Saccharomyces pastorianus
cgattatggtgatttcactaccatg

SEQ ID NO: 57779 - DNA, 25 bp, Saccharomyces pastorianus
ctgggttcgacgtctacttcgagaa

SEQ ID NO: 57780 - DNA, 25 bp, Saccharomyces pastorianus
ttgacctactggcacaggcgttgat

SEQ ID NO: 57781 - DNA, 25 bp, Saccharomyces pastorianus
agattcaagcacgtcgaggctctac

SEQ ID NO: 57782 - DNA, 25 bp, Saccharomyces pastorianus
gaggctctactccagaactacatcg

SEQ ID NO: 57783 - DNA, 25 bp, Saccharomyces pastorianus
gctgggctactacaagacgctgcaa

SEQ ID NO: 57784 - DNA, 25 bp, Saccharomyces pastorianus
aaggacgcacagctgcagcaggcaa

SEQ ID NO: 57785 - DNA, 25 bp, Saccharomyces pastorianus
agacgctgcaagacgctgtcgaggt

SEQ ID NO: 57786 - DNA, 25 bp, Saccharomyces pastorianus
gtatcggcgatgtgtaccttctgat

SEQ ID NO: 57787 - DNA, 25 bp, Saccharomyces pastorianus
ggaaatcgaagacctctcacaactc

SEQ ID NO: 57788 - DNA, 25 bp, Saccharomyces pastorianus
aggcgttgatccttctgggacactc

SEQ ID NO: 57789 - DNA, 25 bp, Saccharomyces pastorianus
agaagcagagttcctcgtctgcgat

SEQ ID NO: 57790 - DNA, 25 bp, Saccharomyces pastorianus
gatcaagaaaccacaagccacgaag

SEQ ID NO: 57791 - DNA, 25 bp, Saccharomyces pastorianus
taagagactgttcgcgtaggatgac

SEQ ID NO: 57792 - DNA, 25 bp, Saccharomyces pastorianus
gaggagagtccaacgcgatcaacca

SEQ ID NO: 57793 - DNA, 25 bp, Saccharomyces pastorianus
gagaatccagataacacgctttccg

SEQ ID NO: 57794 - DNA, 25 bp, Saccharomyces pastorianus
gacaacgacgaggactatgccgata

SEQ ID NO: 57795 - DNA, 25 bp, Saccharomyces pastorianus
cacgctttccgagttattgttgtat

SEQ ID NO: 57796 - DNA, 25 bp, Saccharomyces pastorianus
tcaagcaacggttagcagggatcgc

SEQ ID NO: 57797 - DNA, 25 bp, Saccharomyces pastorianus
gattctatgccagttgaccagcgat

SEQ ID NO: 57798 - DNA, 25 bp, Saccharomyces pastorianus
cagggatcgcgtttgacgtggccaa

SEQ ID NO: 57799 - DNA, 25 bp, Saccharomyces pastorianus
ggatgcgacgagcatatcgatgcaa

SEQ ID NO: 57800 - DNA, 25 bp, Saccharomyces pastorianus
aagaccgtcgaggaagccagtctga

SEQ ID NO: 57801 - DNA, 25 bp, Saccharomyces pastorianus
tgggaaactctccatcggacctgaa

SEQ ID NO: 57802 - DNA, 25 bp, Saccharomyces pastorianus
aaaacctcgagcacatggccatgat

SEQ ID NO: 57803 - DNA, 25 bp, Saccharomyces pastorianus
actggttcatcgacctgctgaggaa

SEQ ID NO: 57804 - DNA, 25 bp, Saccharomyces pastorianus
tgcgtcctggtcgaactggtcattg

SEQ ID NO: 57805 - DNA, 25 bp, Saccharomyces pastorianus
atcaattggaacctgccggcggaaa

SEQ ID NO: 57806 - DNA, 25 bp, Saccharomyces pastorianus
tctttacccgatccatgaaaacctc

SEQ ID NO: 57807 - DNA, 25 bp, Saccharomyces pastorianus
tgcagccacggacagactcgacaag

SEQ ID NO: 57808 - DNA, 25 bp, Saccharomyces pastorianus
caaggacgcgctggaccacgaatgg

SEQ ID NO: 57809 - DNA, 25 bp, Saccharomyces pastorianus
atcgctgactttacaatggccggaa

SEQ ID NO: 57810 - DNA, 25 bp, Saccharomyces pastorianus
agtcttgcaatcatgcgatcgccta

SEQ ID NO: 57811 - DNA, 25 bp, Saccharomyces pastorianus
ggacctgaactcgaccgtaataaag

SEQ ID NO: 57812 - DNA, 25 bp, Saccharomyces pastorianus
actagaagaaatccctcacatcgag

SEQ ID NO: 57813 - DNA, 25 bp, Saccharomyces pastorianus
tcgacgaaaacgaccctggcgaaga

SEQ ID NO: 57814 - DNA, 25 bp, Saccharomyces pastorianus
aaggccactgcgaattccgattcaa

SEQ ID NO: 57815 - DNA, 25 bp, Saccharomyces pastorianus
gtaccatgtgtaccatttttcggtg

SEQ ID NO: 57816 - DNA, 25 bp, Saccharomyces pastorianus
ctgctacgctctctgaatactttaa

SEQ ID NO: 57817 - DNA, 25 bp, Saccharomyces pastorianus
ttcggtgtttatctatctgacttaa

SEQ ID NO: 57818 - DNA, 25 bp, Saccharomyces pastorianus
tattcttcacccatttatcgtctag

SEQ ID NO: 57819 - DNA, 25 bp, Saccharomyces pastorianus
ggatcagacttgttgacatcttaca

SEQ ID NO: 57820 - DNA, 25 bp, Saccharomyces pastorianus
ggtaatccggattttctagtcttag

SEQ ID NO: 57821 - DNA, 25 bp, Saccharomyces pastorianus
ggtggctttgcaaactaaggacctg

SEQ ID NO: 57822 - DNA, 25 bp, Saccharomyces pastorianus
tgacttaacttttacggattctggt

SEQ ID NO: 57823 - DNA, 25 bp, Saccharomyces pastorianus
ggctgtctcctgacccgaataaggt

SEQ ID NO: 57824 - DNA, 25 bp, Saccharomyces pastorianus
ggatatccccttgagagatcgtcat

SEQ ID NO: 57825 - DNA, 25 bp, Saccharomyces pastorianus
gaaagcttgttttcctttgtgtgtt

SEQ ID NO: 57826 - DNA, 25 bp, Saccharomyces pastorianus
aagtggttttcaggcgcatcggcga

SEQ ID NO: 57827 - DNA, 25 bp, Saccharomyces pastorianus
gatcgtcatttcttgttttctcctg

SEQ ID NO: 57828 - DNA, 25 bp, Saccharomyces pastorianus
tatttgactggaacgataccctctg

SEQ ID NO: 57829 - DNA, 25 bp, Saccharomyces pastorianus
gggaatcgacaatccttggttcttc

SEQ ID NO: 57830 - DNA, 25 bp, Saccharomyces pastorianus
gtcagtttcaagtttggctcgcaca

SEQ ID NO: 57831 - DNA, 25 bp, Saccharomyces pastorianus
tgctgtgggcacatgacgtcatcga

SEQ ID NO: 57832 - DNA, 25 bp, Saccharomyces pastorianus
gtgttacacgatcttcaactaccta

SEQ ID NO: 57833 - DNA, 25 bp, Saccharomyces pastorianus
ggcgactccaaatatttacctgttc

SEQ ID NO: 57834 - DNA, 25 bp, Saccharomyces pastorianus
gttctcatcagtttaccattgtctc

SEQ ID NO: 57835 - DNA, 25 bp, Saccharomyces pastorianus
caacatttcttgcattgtcgctcca

SEQ ID NO: 57836 - DNA, 25 bp, Saccharomyces pastorianus
actcaatgcgtttgtgttcctttac

SEQ ID NO: 57837 - DNA, 25 bp, Saccharomyces pastorianus
agagcatattctgctccacgttaca

SEQ ID NO: 57838 - DNA, 25 bp, Saccharomyces pastorianus
gctatcggtaatttctcggtgacta

SEQ ID NO: 57839 - DNA, 25 bp, Saccharomyces pastorianus
ggtacttttgggttcgaccactatg

SEQ ID NO: 57840 - DNA, 25 bp, Saccharomyces pastorianus
ttcatgcaatacctccggttataca

SEQ ID NO: 57841 - DNA, 25 bp, Saccharomyces pastorianus
gtatcactctcataaccacttctat

SEQ ID NO: 57842 - DNA, 25 bp, Saccharomyces pastorianus
cgcgtgctctcaaatttctacaggt

SEQ ID NO: 57843 - DNA, 25 bp, Saccharomyces pastorianus
agatcggtaacttgttcgcgctgta

SEQ ID NO: 57844 - DNA, 25 bp, Saccharomyces pastorianus
atcataggttgtattgttctcatca

SEQ ID NO: 57845 - DNA, 25 bp, Saccharomyces pastorianus
tacattgtgggtgggctgatttctt

SEQ ID NO: 57846 - DNA, 25 bp, Saccharomyces pastorianus
cctatctctaaaatcctgggttcgt

SEQ ID NO: 57847 - DNA, 25 bp, Saccharomyces pastorianus
ataaggctctactgaactacgctgc

SEQ ID NO: 57848 - DNA, 25 bp, Saccharomyces pastorianus
acgtcactaatgcttggttcttgaa

SEQ ID NO: 57849 - DNA, 25 bp, Saccharomyces pastorianus
tgcattcggtattctgacgttcata

SEQ ID NO: 57850 - DNA, 25 bp, Saccharomyces pastorianus
gaacctgtggtaacgtacttgatcc

SEQ ID NO: 57851 - DNA, 25 bp, Saccharomyces pastorianus
taagtcgtacgcctcactgatgatt

SEQ ID NO: 57852 - DNA, 25 bp, Saccharomyces pastorianus
actgatgattgtccgtactcttcta

SEQ ID NO: 57853 - DNA, 25 bp, Saccharomyces pastorianus
ctgccattgtgcctgtaagtcgtac

SEQ ID NO: 57854 - DNA, 25 bp, Saccharomyces pastorianus
gaactacgctgcatccatgggaatc

SEQ ID NO: 57855 - DNA, 25 bp, Saccharomyces pastorianus
aatttgggtaccatcttttctgccg

SEQ ID NO: 57856 - DNA, 25 bp, Saccharomyces pastorianus
ggcactctgtcaaagagacttcgaa

SEQ ID NO: 57857 - DNA, 25 bp, Saccharomyces pastorianus
atcacctaccaacaatatctccaat

SEQ ID NO: 57858 - DNA, 25 bp, Saccharomyces pastorianus
atatctccaattgcaacctgatcaa

SEQ ID NO: 57859 - DNA, 25 bp, Saccharomyces pastorianus
aaagtagcacaagaggaagtcgctt

SEQ ID NO: 57860 - DNA, 25 bp, Saccharomyces pastorianus
gaaaggatcgcatttgaacgtcaag

SEQ ID NO: 57861 - DNA, 25 bp, Saccharomyces pastorianus
gacttcgaacgagagactgaaagga

SEQ ID NO: 57862 - DNA, 25 bp, Saccharomyces pastorianus
gatcgtgtcacaacgtggtcatata

SEQ ID NO: 57863 - DNA, 25 bp, Saccharomyces pastorianus
aaaatacctggcactctgtcaaaga

SEQ ID NO: 57864 - DNA, 25 bp, Saccharomyces pastorianus
agacggttcattacaaagagatcac

SEQ ID NO: 57865 - DNA, 25 bp, Saccharomyces pastorianus
tgtgcctggtattgcaaggaaagta

SEQ ID NO: 57866 - DNA, 25 bp, Saccharomyces pastorianus
aagtcgcttggttcgatcgtgtcac

SEQ ID NO: 57867 - DNA, 25 bp, Saccharomyces pastorianus
cagagggttccgtctttgttcttca

SEQ ID NO: 57868 - DNA, 25 bp, Saccharomyces pastorianus
accagtgtgggatgttctccttcac

SEQ ID NO: 57869 - DNA, 25 bp, Saccharomyces pastorianus
gtaccagggtttcgctacaggtgac

SEQ ID NO: 57870 - DNA, 25 bp, Saccharomyces pastorianus
ttgttcttcactcttgtgctcacaa

SEQ ID NO: 57871 - DNA, 25 bp, Saccharomyces pastorianus
gtgacctggacaaagacgcctacgc

SEQ ID NO: 57872 - DNA, 25 bp, Saccharomyces pastorianus
gagaccacttggttaagctggccac

SEQ ID NO: 57873 - DNA, 25 bp, Saccharomyces pastorianus
gtgccaagatcgtcgctaagctgtt

SEQ ID NO: 57874 - DNA, 25 bp, Saccharomyces pastorianus
aatgggcccagattgtcgacgccat

SEQ ID NO: 57875 - DNA, 25 bp, Saccharomyces pastorianus
ttgtttccatctagcgctcacaaag

SEQ ID NO: 57876 - DNA, 25 bp, Saccharomyces pastorianus
aaaacaagaccatcaagcccgctgt

SEQ ID NO: 57877 - DNA, 25 bp, Saccharomyces pastorianus
tagtcaccatgtcatccagaatcac

SEQ ID NO: 57878 - DNA, 25 bp, Saccharomyces pastorianus
gaggtgaaacccctcatttcagatc

SEQ ID NO: 57879 - DNA, 25 bp, Saccharomyces pastorianus
gacggcgaactgcttttcttgatga

SEQ ID NO: 57880 - DNA, 25 bp, Saccharomyces pastorianus
gacgtgattctcttagcgacgggcc

SEQ ID NO: 57881 - DNA, 25 bp, Saccharomyces pastorianus
atggaatgctttgcagtctctggaa

SEQ ID NO: 57882 - DNA, 25 bp, Saccharomyces pastorianus
agtagtacagctgctttccaagata

SEQ ID NO: 57883 - DNA, 25 bp, Saccharomyces pastorianus
aagataactccaccttggcaagggc

SEQ ID NO: 57884 - DNA, 25 bp, Saccharomyces pastorianus
agataagtaatctctgccttcaggt

SEQ ID NO: 57885 - DNA, 25 bp, Saccharomyces pastorianus
cagggagacgaattcgccgcgatta

SEQ ID NO: 57886 - DNA, 25 bp, Saccharomyces pastorianus
gacgggcccattatcgatctcgaag

SEQ ID NO: 57887 - DNA, 25 bp, Saccharomyces pastorianus
tttcctcttctctcagacgtgattc

SEQ ID NO: 57888 - DNA, 25 bp, Saccharomyces pastorianus
tgagtccaaattcgaatctgcgccc

SEQ ID NO: 57889 - DNA, 25 bp, Saccharomyces pastorianus
agagcctagtgctaccataaaccag

SEQ ID NO: 57890 - DNA, 25 bp, Saccharomyces pastorianus
tgacgcttctcataaacctggttta

SEQ ID NO: 57891 - DNA, 25 bp, Saccharomyces pastorianus
tgtagtttcatccttcttacctttt

SEQ ID NO: 57892 - DNA, 25 bp, Saccharomyces pastorianus
tgttccaaagtgtcatgctctcaat

SEQ ID NO: 57893 - DNA, 25 bp, Saccharomyces pastorianus
agacttcttttttgagactgaccaa

SEQ ID NO: 57894 - DNA, 25 bp, Saccharomyces pastorianus
aggtcattggctttatgcttgtgca

SEQ ID NO: 57895 - DNA, 25 bp, Saccharomyces pastorianus
gtctgccttggtttgtatgacgctt

SEQ ID NO: 57896 - DNA, 25 bp, Saccharomyces pastorianus
tattcggctggcaactcagtgcaat

SEQ ID NO: 57897 - DNA, 25 bp, Saccharomyces pastorianus
gctagcaacgctgacttttggaatt

SEQ ID NO: 57898 - DNA, 25 bp, Saccharomyces pastorianus
taatctctttctccgtttgttatgg

SEQ ID NO: 57899 - DNA, 25 bp, Saccharomyces pastorianus
tgttgacttataccgactatcgcag

SEQ ID NO: 57900 - DNA, 25 bp, Saccharomyces pastorianus
aaagttctagagctcctggtggcaa

SEQ ID NO: 57901 - DNA, 25 bp, Saccharomyces pastorianus
gatgcttggaatacttcttctggtg

SEQ ID NO: 57902 - DNA, 25 bp, Saccharomyces pastorianus
gtactggaaccaccttttcactaat

SEQ ID NO: 57903 - DNA, 25 bp, Saccharomyces pastorianus
gatgattcatcgacaagatcttcag

SEQ ID NO: 57904 - DNA, 25 bp, Saccharomyces pastorianus
tgctgcaaatgctacggacccaatg

SEQ ID NO: 57905 - DNA, 25 bp, Saccharomyces pastorianus
gattcgtgggacatgtgcttccaat

SEQ ID NO: 57906 - DNA, 25 bp, Saccharomyces pastorianus
gctcctggtggcaagtgctgcaaat

SEQ ID NO: 57907 - DNA, 25 bp, Saccharomyces pastorianus
atgacttacatttcaggaagccaga

SEQ ID NO: 57908 - DNA, 25 bp, Saccharomyces pastorianus
gcttccaattgatccgcttacttaa

SEQ ID NO: 57909 - DNA, 25 bp, Saccharomyces pastorianus
accaatgcccaaccatagtggtatg

SEQ ID NO: 57910 - DNA, 25 bp, Saccharomyces pastorianus
gcgactcagagcaagacacaccaat

SEQ ID NO: 57911 - DNA, 25 bp, Saccharomyces pastorianus
gttactgatacccaaacaattgttt

SEQ ID NO: 57912 - DNA, 25 bp, Saccharomyces pastorianus
tccacccaagtggtttgaacctcat

SEQ ID NO: 57913 - DNA, 25 bp, Saccharomyces pastorianus
gaattccgcttcaggaggcgaataa

SEQ ID NO: 57914 - DNA, 25 bp, Saccharomyces pastorianus
gacagcagaggttatcttagttact

SEQ ID NO: 57915 - DNA, 25 bp, Saccharomyces pastorianus
gttcagtgtacatgttaatgcccta

SEQ ID NO: 57916 - DNA, 25 bp, Saccharomyces pastorianus
aatgtttacgaattccgcttcagga

SEQ ID NO: 57917 - DNA, 25 bp, Saccharomyces pastorianus
ggctggcaaaccttgactttactaa

SEQ ID NO: 57918 - DNA, 25 bp, Saccharomyces pastorianus
tgtaatttctactgtccacccaagt

SEQ ID NO: 57919 - DNA, 25 bp, Saccharomyces pastorianus
atagcgatggctcaacaagtttgga

SEQ ID NO: 57920 - DNA, 25 bp, Saccharomyces pastorianus
aatgccctatttcggtacaagctgt

SEQ ID NO: 57921 - DNA, 25 bp, Saccharomyces pastorianus
gtattccaattgatgtacaacctaa

SEQ ID NO: 57922 - DNA, 25 bp, Saccharomyces pastorianus
gaagcgcaatccaaactgaacgaaa

SEQ ID NO: 57923 - DNA, 25 bp, Saccharomyces pastorianus
aaagctataaacgtgctgcggcagt

SEQ ID NO: 57924 - DNA, 25 bp, Saccharomyces pastorianus
gaggcctctccgaagatttggacat

SEQ ID NO: 57925 - DNA, 25 bp, Saccharomyces pastorianus
acagctctgggataggaggcctctc

SEQ ID NO: 57926 - DNA, 25 bp, Saccharomyces pastorianus
actcggcgggtacagtttcatcgta

SEQ ID NO: 57927 - DNA, 25 bp, Saccharomyces pastorianus
taccacaccgtgtaaactctctaaa

SEQ ID NO: 57928 - DNA, 25 bp, Saccharomyces pastorianus
aagtcattatcttcctcaatgccgt

SEQ ID NO: 57929 - DNA, 25 bp, Saccharomyces pastorianus
gctgcggcagtaacgtctacactaa

SEQ ID NO: 57930 - DNA, 25 bp, Saccharomyces pastorianus
agtttcatcgtactccataccttct

SEQ ID NO: 57931 - DNA, 25 bp, Saccharomyces pastorianus
gatacaaacttgcactcggcgggta

SEQ ID NO: 57932 - DNA, 25 bp, Saccharomyces pastorianus
ttctacggtatcaagcaactacggg

SEQ ID NO: 57933 - DNA, 25 bp, Saccharomyces pastorianus
aaacggaggccggtgtgaacatgca

SEQ ID NO: 57934 - DNA, 25 bp, Saccharomyces pastorianus
gcagtgatcctgctttaccggcaga

SEQ ID NO: 57935 - DNA, 25 bp, Saccharomyces pastorianus
ggcatgaatgttgctgcgggaatta

SEQ ID NO: 57936 - DNA, 25 bp, Saccharomyces pastorianus
gtttaactcaacgattttccatggt

SEQ ID NO: 57937 - DNA, 25 bp, Saccharomyces pastorianus
cttggaataattgctgtgccacatt

SEQ ID NO: 57938 - DNA, 25 bp, Saccharomyces pastorianus
aagtccggtgagtggcagtgatcct

SEQ ID NO: 57939 - DNA, 25 bp, Saccharomyces pastorianus
gaacaaccactaaagtctcctgtca

SEQ ID NO: 57940 - DNA, 25 bp, Saccharomyces pastorianus
ctgtgccacattttattaagcggtt

SEQ ID NO: 57941 - DNA, 25 bp, Saccharomyces pastorianus
gaagatgacttttcctgtcttggaa

SEQ ID NO: 57942 - DNA, 25 bp, Saccharomyces pastorianus
gaacatgcactgtcaatgctggaca

SEQ ID NO: 57943 - DNA, 25 bp, Saccharomyces pastorianus
gaagagaccctacactacaagcagt

SEQ ID NO: 57944 - DNA, 25 bp, Saccharomyces pastorianus
cttcttctggagtgacttggtagaa

SEQ ID NO: 57945 - DNA, 25 bp, Saccharomyces pastorianus
tcttcttctggagtgacttggtaga

SEQ ID NO: 57946 - DNA, 25 bp, Saccharomyces pastorianus
gtgacttggtagaaggccaatctgt

SEQ ID NO: 57947 - DNA, 25 bp, Saccharomyces pastorianus
ccaatctgtattcgttggtcttggt

SEQ ID NO: 57948 - DNA, 25 bp, Saccharomyces pastorianus
gccaatctgtattcgttggtcttgg

SEQ ID NO: 57949 - DNA, 25 bp, Saccharomyces pastorianus
tctggagtgacttggtagaaggcca

SEQ ID NO: 57950 - DNA, 25 bp, Saccharomyces pastorianus
aggccaatctgtattcgttggtctt

SEQ ID NO: 57951 - DNA, 25 bp, Saccharomyces pastorianus
aaggccaatctgtattcgttggtct

SEQ ID NO: 57952 - DNA, 25 bp, Saccharomyces pastorianus
ggccaatctgtattcgttggtcttg

SEQ ID NO: 57953 - DNA, 25 bp, Saccharomyces pastorianus
gagtgacttggtagaaggccaatct

SEQ ID NO: 57954 - DNA, 25 bp, Saccharomyces pastorianus
gaaggccaatctgtattcgttggtc

SEQ ID NO: 57955 - DNA, 25 bp, Saccharomyces pastorianus
cattatcggaaagctaacggccacg

SEQ ID NO: 57956 - DNA, 25 bp, Saccharomyces pastorianus
acttcgtcaacagagactgcctgca

SEQ ID NO: 57957 - DNA, 25 bp, Saccharomyces pastorianus
attcctcatcgataccatcttagtg

SEQ ID NO: 57958 - DNA, 25 bp, Saccharomyces pastorianus
aaaaattcccgatccaattcctcat

SEQ ID NO: 57959 - DNA, 25 bp, Saccharomyces pastorianus
gatgccatcttctcatcctagaaag

SEQ ID NO: 57960 - DNA, 25 bp, Saccharomyces pastorianus
acgcttgaatgagaactgtgcccca

SEQ ID NO: 57961 - DNA, 25 bp, Saccharomyces pastorianus
ggacaacgagcccatggtctttaat

SEQ ID NO: 57962 - DNA, 25 bp, Saccharomyces pastorianus
tggatccaaagctcgactattctat

SEQ ID NO: 57963 - DNA, 25 bp, Saccharomyces pastorianus
ggtagttactcacacatcacgatca

SEQ ID NO: 57964 - DNA, 25 bp, Saccharomyces pastorianus
gagacttttcgtccaagtttgcctc

SEQ ID NO: 57965 - DNA, 25 bp, Saccharomyces pastorianus
ggatattgctgattggtctaccatt

SEQ ID NO: 57966 - DNA, 25 bp, Saccharomyces pastorianus
cattgattggtcatcgtgttctaaa

SEQ ID NO: 57967 - DNA, 25 bp, Saccharomyces pastorianus
gtttggtttcgctacatctttaaga

SEQ ID NO: 57968 - DNA, 25 bp, Saccharomyces pastorianus
ttcttaagagcgcaaccggtgatta

SEQ ID NO: 57969 - DNA, 25 bp, Saccharomyces pastorianus
gaacctatcatgaacgtgtcagtga

SEQ ID NO: 57970 - DNA, 25 bp, Saccharomyces pastorianus
aaccgcgattgttggtgggcgtatc

SEQ ID NO: 57971 - DNA, 25 bp, Saccharomyces pastorianus
gcgttccgcgatgccttcttaagag

SEQ ID NO: 57972 - DNA, 25 bp, Saccharomyces pastorianus
caaggtaatgtcatcggtcttttaa

SEQ ID NO: 57973 - DNA, 25 bp, Saccharomyces pastorianus
tccaacagcacctcatgtacagaag

SEQ ID NO: 57974 - DNA, 25 bp, Saccharomyces pastorianus
aacagtctggtggtgctggtcaatt

SEQ ID NO: 57975 - DNA, 25 bp, Saccharomyces pastorianus
agttattggtactctatcgcctgta

SEQ ID NO: 57976 - DNA, 25 bp, Saccharomyces pastorianus
aaaaccgctactatgtctgcgttcc

SEQ ID NO: 57977 - DNA, 25 bp, Saccharomyces pastorianus
gtcgattacaccaaagtctacggat

SEQ ID NO: 57978 - DNA, 25 bp, Saccharomyces pastorianus
gactttttaccaaatccttctgaag

SEQ ID NO: 57979 - DNA, 25 bp, Saccharomyces pastorianus
gggattcaacctgttcttgatgcta

SEQ ID NO: 57980 - DNA, 25 bp, Saccharomyces pastorianus
aaccgttcgttggactggcattcaa

SEQ ID NO: 57981 - DNA, 25 bp, Saccharomyces pastorianus
gagactacggtcaacctagtccctg

SEQ ID NO: 57982 - DNA, 25 bp, Saccharomyces pastorianus
gggtctgccttagcaaatactggga

SEQ ID NO: 57983 - DNA, 25 bp, Saccharomyces pastorianus
atgtgctacttttggcattgactgt

SEQ ID NO: 57984 - DNA, 25 bp, Saccharomyces pastorianus
atgccgttgtttctttgtcgattac

SEQ ID NO: 57985 - DNA, 25 bp, Saccharomyces pastorianus
atgttcgtgtctaccaaggacgctt

SEQ ID NO: 57986 - DNA, 25 bp, Saccharomyces pastorianus
agagctttcacaccggttttgatgg

SEQ ID NO: 57987 - DNA, 25 bp, Saccharomyces pastorianus
catgtatgttcctgatgccgttgtt

SEQ ID NO: 57988 - DNA, 25 bp, Saccharomyces pastorianus
gatcttgtagagttggtcgaccagt

SEQ ID NO: 57989 - DNA, 25 bp, Saccharomyces pastorianus
gacgaggtacatgtttcgctgggat

SEQ ID NO: 57990 - DNA, 25 bp, Saccharomyces pastorianus
gacggagattcttttacattgcgac

SEQ ID NO: 57991 - DNA, 25 bp, Saccharomyces pastorianus
ggatgcactcaatgcgttaccaagt

SEQ ID NO: 57992 - DNA, 25 bp, Saccharomyces pastorianus
aatcagtgccaccaaagatcttgta

SEQ ID NO: 57993 - DNA, 25 bp, Saccharomyces pastorianus
gtactgcccgagacgaatactgacg

SEQ ID NO: 57994 - DNA, 25 bp, Saccharomyces pastorianus
taagaacgacgttaccgtgcaccgg

SEQ ID NO: 57995 - DNA, 25 bp, Saccharomyces pastorianus
acgtcccgagtggtacaagcttcag

SEQ ID NO: 57996 - DNA, 25 bp, Saccharomyces pastorianus
aaaattgcgcccgagttggtactgc

SEQ ID NO: 57997 - DNA, 25 bp, Saccharomyces pastorianus
gctgttgacactgaatctgctgtac

SEQ ID NO: 57998 - DNA, 25 bp, Saccharomyces pastorianus
agtgttgcgtcatttgggtcaccaa

SEQ ID NO: 57999 - DNA, 25 bp, Saccharomyces pastorianus
aagggacttggacttgatctacaac

SEQ ID NO: 58000 - DNA, 25 bp, Saccharomyces pastorianus
ggaactgaagggtgtcccctacacg

SEQ ID NO: 58001 - DNA, 25 bp, Saccharomyces pastorianus
ctacacgcaggaggtgtctgacgct

SEQ ID NO: 58002 - DNA, 25 bp, Saccharomyces pastorianus
actgctatagcgctgaagacgcatt

SEQ ID NO: 58003 - DNA, 25 bp, Saccharomyces pastorianus
gggcaacattactgcatacactgtg

SEQ ID NO: 58004 - DNA, 25 bp, Saccharomyces pastorianus
aggagtccaacgaggtcttactgaa

SEQ ID NO: 58005 - DNA, 25 bp, Saccharomyces pastorianus
gagcatttggacaacgccttggcga

SEQ ID NO: 58006 - DNA, 25 bp, Saccharomyces pastorianus
cttggcgaacgttgccacgacagaa

SEQ ID NO: 58007 - DNA, 25 bp, Saccharomyces pastorianus
atctacaacgatctggccactaagg

SEQ ID NO: 58008 - DNA, 25 bp, Saccharomyces pastorianus
gaacaagttcttggaccgcatgaaa

SEQ ID NO: 58009 - DNA, 25 bp, Saccharomyces pastorianus
atatcacacactctgtgggtccaga

SEQ ID NO: 58010 - DNA, 25 bp, Saccharomyces pastorianus
aatgggtcaacaatcgttcgaggat

SEQ ID NO: 58011 - DNA, 25 bp, Saccharomyces pastorianus
gaggtaacgctcaactggactacat

SEQ ID NO: 58012 - DNA, 25 bp, Saccharomyces pastorianus
tgtttcggaacaaaccatttcttct

SEQ ID NO: 58013 - DNA, 25 bp, Saccharomyces pastorianus
aacggcggaggcctaccgctatatc

SEQ ID NO: 58014 - DNA, 25 bp, Saccharomyces pastorianus
caaatgtcaaatggcttcagaacgt

SEQ ID NO: 58015 - DNA, 25 bp, Saccharomyces pastorianus
gcttcagaacgttgggtgtttcgga

SEQ ID NO: 58016 - DNA, 25 bp, Saccharomyces pastorianus
atggaatctgataaccccttcagca

SEQ ID NO: 58017 - DNA, 25 bp, Saccharomyces pastorianus
cccttcagcacatcagaggcaatga

SEQ ID NO: 58018 - DNA, 25 bp, Saccharomyces pastorianus
gcagaaggagcagacggtttttgaa

SEQ ID NO: 58019 - DNA, 25 bp, Saccharomyces pastorianus
aaacttgtcttttggattgcattaa

SEQ ID NO: 58020 - DNA, 25 bp, Saccharomyces pastorianus
ggactacatcctggaaatgggtcaa

SEQ ID NO: 58021 - DNA, 25 bp, Saccharomyces pastorianus
acctttcccgaaatcttcagtcaag

SEQ ID NO: 58022 - DNA, 25 bp, Saccharomyces pastorianus
aatgggcttaattcacctcaacgct

SEQ ID NO: 58023 - DNA, 25 bp, Saccharomyces pastorianus
gaatagaatgctgtttcccactgaa

SEQ ID NO: 58024 - DNA, 25 bp, Saccharomyces pastorianus
gtttcccactgaaggtgtgcagcag

SEQ ID NO: 58025 - DNA, 25 bp, Saccharomyces pastorianus
aggtgataacgtttgaactggccaa

SEQ ID NO: 58026 - DNA, 25 bp, Saccharomyces pastorianus
ggcagttgcacttatcactcgatag

SEQ ID NO: 58027 - DNA, 25 bp, Saccharomyces pastorianus
aaccgttaggtcgtgtgaatagaat

SEQ ID NO: 58028 - DNA, 25 bp, Saccharomyces pastorianus
gaagaagcagccactcgggagatta

SEQ ID NO: 58029 - DNA, 25 bp, Saccharomyces pastorianus
gaattggaacaactattccccacaa

SEQ ID NO: 58030 - DNA, 25 bp, Saccharomyces pastorianus
gaagtcatcatcagatcagcacaag

SEQ ID NO: 58031 - DNA, 25 bp, Saccharomyces pastorianus
aatccctttgcatcggaagaagcag

SEQ ID NO: 58032 - DNA, 25 bp, Saccharomyces pastorianus
taactgtctattgttgggcgctgct

SEQ ID NO: 58033 - DNA, 25 bp, Saccharomyces pastorianus
ctttttatattttctgctacgccac

SEQ ID NO: 58034 - DNA, 25 bp, Saccharomyces pastorianus
caagtgtatggctttggcgtccgct

SEQ ID NO: 58035 - DNA, 25 bp, Saccharomyces pastorianus
gaagaggcgccgattacgatttaga

SEQ ID NO: 58036 - DNA, 25 bp, Saccharomyces pastorianus
aggctgggtgccttcgtctagaaga

SEQ ID NO: 58037 - DNA, 25 bp, Saccharomyces pastorianus
gtcgcttgggttattaccgccgaat

SEQ ID NO: 58038 - DNA, 25 bp, Saccharomyces pastorianus
cgccgaatcattcccattgagagta

SEQ ID NO: 58039 - DNA, 25 bp, Saccharomyces pastorianus
aaagctagggcgtcgtaactgtcta

SEQ ID NO: 58040 - DNA, 25 bp, Saccharomyces pastorianus
ggcgtccgcttctaactgggtatgg

SEQ ID NO: 58041 - DNA, 25 bp, Saccharomyces pastorianus
aattttgcttccactttcttcagtt

SEQ ID NO: 58042 - DNA, 25 bp, Saccharomyces pastorianus
cgtccattgtcattggtatcgtcaa

SEQ ID NO: 58043 - DNA, 25 bp, Saccharomyces pastorianus
gcaaccccaagctgctgatgaactg

SEQ ID NO: 58044 - DNA, 25 bp, Saccharomyces pastorianus
caatgacgaattgaaggctggcgag

SEQ ID NO: 58045 - DNA, 25 bp, Saccharomyces pastorianus
acacttaagcgcaccatctcaaaaa

SEQ ID NO: 58046 - DNA, 25 bp, Saccharomyces pastorianus
aagctgctgatgaactggtgtcttc

SEQ ID NO: 58047 - DNA, 25 bp, Saccharomyces pastorianus
ggtgtcttcgttaagtaatgactca

SEQ ID NO: 58048 - DNA, 25 bp, Saccharomyces pastorianus
ttaagcgcaccatctcaaaaatttt

SEQ ID NO: 58049 - DNA, 25 bp, Saccharomyces pastorianus
aaaagcaaagcccattgctccacag

SEQ ID NO: 58050 - DNA, 25 bp, Saccharomyces pastorianus
tgaactggtgtcttcgttaagtaat

SEQ ID NO: 58051 - DNA, 25 bp, Saccharomyces pastorianus
gctgatgaactggtgtcttcgttaa

SEQ ID NO: 58052 - DNA, 25 bp, Saccharomyces pastorianus
gtaatgactcacacttaagcgcacc

SEQ ID NO: 58053 - DNA, 25 bp, Saccharomyces pastorianus
agcaaagcccattgctccacagcaa

SEQ ID NO: 58054 - DNA, 25 bp, Saccharomyces pastorianus
aacggtccgagagaaacttcgagat

SEQ ID NO: 58055 - DNA, 25 bp, Saccharomyces pastorianus
acttcgagatgtcgtaatgactatt

SEQ ID NO: 58056 - DNA, 25 bp, Saccharomyces pastorianus
cgagatgtcgtaatgactattaata

SEQ ID NO: 58057 - DNA, 25 bp, Saccharomyces pastorianus
gacgatggtataacggtccgagaga

SEQ ID NO: 58058 - DNA, 25 bp, Saccharomyces pastorianus
aatagacgatggtataacggtccga

SEQ ID NO: 58059 - DNA, 25 bp, Saccharomyces pastorianus
ccgagagaaacttcgagatgtcgta

SEQ ID NO: 58060 - DNA, 25 bp, Saccharomyces pastorianus
gaaacttcgagatgtcgtaatgact

SEQ ID NO: 58061 - DNA, 25 bp, Saccharomyces pastorianus
gactattaataagcttcaggtagat

SEQ ID NO: 58062 - DNA, 25 bp, Saccharomyces pastorianus
ggtccgagagaaacttcgagatgtc

SEQ ID NO: 58063 - DNA, 25 bp, Saccharomyces pastorianus
ataagcttcaggtagatataagaga

SEQ ID NO: 58064 - DNA, 25 bp, Saccharomyces pastorianus
tataacggtccgagagaaacttcga

SEQ ID NO: 58065 - DNA, 25 bp, Saccharomyces pastorianus
gagcattaacagacttgagggccaa

SEQ ID NO: 58066 - DNA, 25 bp, Saccharomyces pastorianus
gaagaccaattttgtgtcaccaggt

SEQ ID NO: 58067 - DNA, 25 bp, Saccharomyces pastorianus
ttaagggttcctataacgtcgagat

SEQ ID NO: 58068 - DNA, 25 bp, Saccharomyces pastorianus
gtcaccaggtcatagctgagttttt

SEQ ID NO: 58069 - DNA, 25 bp, Saccharomyces pastorianus
agagtccattgatacgaccgatgaa

SEQ ID NO: 58070 - DNA, 25 bp, Saccharomyces pastorianus
ggcgatttccaagagcaatttagct

SEQ ID NO: 58071 - DNA, 25 bp, Saccharomyces pastorianus
caataatgatttgctccgtggagga

SEQ ID NO: 58072 - DNA, 25 bp, Saccharomyces pastorianus
gatattgctaaaactggcgatttcc

SEQ ID NO: 58073 - DNA, 25 bp, Saccharomyces pastorianus
atattgggctctcttacttgacaca

SEQ ID NO: 58074 - DNA, 25 bp, Saccharomyces pastorianus
cggacgttttatcgcaagcaaggac

SEQ ID NO: 58075 - DNA, 25 bp, Saccharomyces pastorianus
aatactgttcgtttcaaccagaaga

SEQ ID NO: 58076 - DNA, 25 bp, Saccharomyces pastorianus
gtttttattctccattccgttatca

SEQ ID NO: 58077 - DNA, 25 bp, Saccharomyces pastorianus
ggtgttattccagcaagtactttgt

SEQ ID NO: 58078 - DNA, 25 bp, Saccharomyces pastorianus
tatctgaaaactctaccggctactt

SEQ ID NO: 58079 - DNA, 25 bp, Saccharomyces pastorianus
gttgcgccctgtatgtatttatcca

SEQ ID NO: 58080 - DNA, 25 bp, Saccharomyces pastorianus
gacaacctcgttggtcactgtaatg

SEQ ID NO: 58081 - DNA, 25 bp, Saccharomyces pastorianus
gattttctacatgttcgggtttcta

SEQ ID NO: 58082 - DNA, 25 bp, Saccharomyces pastorianus
aatcggtttcattagcagcatgttc

SEQ ID NO: 58083 - DNA, 25 bp, Saccharomyces pastorianus
ttaattgctggtattttccccttcg

SEQ ID NO: 58084 - DNA, 25 bp, Saccharomyces pastorianus
aattgcaagacaaatccccttccaa

SEQ ID NO: 58085 - DNA, 25 bp, Saccharomyces pastorianus
cgttatcaattgctggttctctggt

SEQ ID NO: 58086 - DNA, 25 bp, Saccharomyces pastorianus
cttcggttctattgccgttgaattg

SEQ ID NO: 58087 - DNA, 25 bp, Saccharomyces pastorianus
ggcggtaccattgttgacgttccaa

SEQ ID NO: 58088 - DNA, 25 bp, Saccharomyces pastorianus
gagattgcctaagttcactcatcaa

SEQ ID NO: 58089 - DNA, 25 bp, Saccharomyces pastorianus
gacagatttacaacttcgagtcttg

SEQ ID NO: 58090 - DNA, 25 bp, Saccharomyces pastorianus
tatattgcgcttgaagagccacgga

SEQ ID NO: 58091 - DNA, 25 bp, Saccharomyces pastorianus
gagtcttggatgtctcagcagcact

SEQ ID NO: 58092 - DNA, 25 bp, Saccharomyces pastorianus
gcagttcgtcgttcgcaaacagcaa

SEQ ID NO: 58093 - DNA, 25 bp, Saccharomyces pastorianus
gagccacggattgaagtgcctcaaa

SEQ ID NO: 58094 - DNA, 25 bp, Saccharomyces pastorianus
ttcgcatgctctttctcagacaaaa

SEQ ID NO: 58095 - DNA, 25 bp, Saccharomyces pastorianus
ctcagcagcactttctacttcaaaa

SEQ ID NO: 58096 - DNA, 25 bp, Saccharomyces pastorianus
gatccccgtccaaaagctagtgtat

SEQ ID NO: 58097 - DNA, 25 bp, Saccharomyces pastorianus
gttgacgttccaaaacttgcagttc

SEQ ID NO: 58098 - DNA, 25 bp, Saccharomyces pastorianus
gatatgacctcactaaccgtgcatg

SEQ ID NO: 58099 - DNA, 25 bp, Saccharomyces pastorianus
aaccgtgcatgctgaaagaataaaa

SEQ ID NO: 58100 - DNA, 25 bp, Saccharomyces pastorianus
tcactaaccgtgcatgctgaaagaa

SEQ ID NO: 58101 - DNA, 25 bp, Saccharomyces pastorianus
tgacttggagaatatattgttatac

SEQ ID NO: 58102 - DNA, 25 bp, Saccharomyces pastorianus
ggtttggatataatgacttggagaa

SEQ ID NO: 58103 - DNA, 25 bp, Saccharomyces pastorianus
acctcactaaccgtgcatgctgaaa

SEQ ID NO: 58104 - DNA, 25 bp, Saccharomyces pastorianus
acgataccgagaccatcaatgatat

SEQ ID NO: 58105 - DNA, 25 bp, Saccharomyces pastorianus
tgttatacgataccgagaccatcaa

SEQ ID NO: 58106 - DNA, 25 bp, Saccharomyces pastorianus
tcaatgatatgacctcactaaccgt

SEQ ID NO: 58107 - DNA, 25 bp, Saccharomyces pastorianus
atgacctcactaaccgtgcatgctg

SEQ ID NO: 58108 - DNA, 25 bp, Saccharomyces pastorianus
tattgttatacgataccgagaccat

SEQ ID NO: 58109 - DNA, 25 bp, Saccharomyces pastorianus
atggccgtgctaaatggtacatcaa

SEQ ID NO: 58110 - DNA, 25 bp, Saccharomyces pastorianus
attgcattacatttcactgagctcg

SEQ ID NO: 58111 - DNA, 25 bp, Saccharomyces pastorianus
agtttcgatccctgtattgcattac

SEQ ID NO: 58112 - DNA, 25 bp, Saccharomyces pastorianus
ggtgatttgagcattgattctgaca

SEQ ID NO: 58113 - DNA, 25 bp, Saccharomyces pastorianus
agcatggtgtgctttctgaccttac

SEQ ID NO: 58114 - DNA, 25 bp, Saccharomyces pastorianus
actgagctcgttgttgattttagga

SEQ ID NO: 58115 - DNA, 25 bp, Saccharomyces pastorianus
gatgtacggattgccgccaacggaa

SEQ ID NO: 58116 - DNA, 25 bp, Saccharomyces pastorianus
tttcggtttggaacggtgctttgat

SEQ ID NO: 58117 - DNA, 25 bp, Saccharomyces pastorianus
ttagcgcctagtttggattcagagt

SEQ ID NO: 58118 - DNA, 25 bp, Saccharomyces pastorianus
ctgaccttaccattcacggacatag

SEQ ID NO: 58119 - DNA, 25 bp, Saccharomyces pastorianus
ttatacgacgtaacaatggtgccga

SEQ ID NO: 58120 - DNA, 25 bp, Saccharomyces pastorianus
tgtatgtttgcttcacgctagtgga

SEQ ID NO: 58121 - DNA, 25 bp, Saccharomyces pastorianus
attacgctgctgacttttacgatta

SEQ ID NO: 58122 - DNA, 25 bp, Saccharomyces pastorianus
aggactatgattccaacgccacgaa

SEQ ID NO: 58123 - DNA, 25 bp, Saccharomyces pastorianus
atggtgttgcccaaggtggtcgcca

SEQ ID NO: 58124 - DNA, 25 bp, Saccharomyces pastorianus
gaccacgacccgaaaactgtgtatg

SEQ ID NO: 58125 - DNA, 25 bp, Saccharomyces pastorianus
agaacgagtgtctctactagtggac

SEQ ID NO: 58126 - DNA, 25 bp, Saccharomyces pastorianus
agatcttgcccatcagagtactgag

SEQ ID NO: 58127 - DNA, 25 bp, Saccharomyces pastorianus
gatactagactgtttccatgaagag

SEQ ID NO: 58128 - DNA, 25 bp, Saccharomyces pastorianus
gagttcgcatgtaggccagatacta

SEQ ID NO: 58129 - DNA, 25 bp, Saccharomyces pastorianus
agtggatatacccaagatcttgccc

SEQ ID NO: 58130 - DNA, 25 bp, Saccharomyces pastorianus
gacgggtttgactgtttctactcca

SEQ ID NO: 58131 - DNA, 25 bp, Saccharomyces pastorianus
tcagtgaatctccaaaccagtttag

SEQ ID NO: 58132 - DNA, 25 bp, Saccharomyces pastorianus
aacaaaggccacctattgcgacttc

SEQ ID NO: 58133 - DNA, 25 bp, Saccharomyces pastorianus
atagttcaacatccacagcatcaag

SEQ ID NO: 58134 - DNA, 25 bp, Saccharomyces pastorianus
tcaaaggaactcatccatccctatg

SEQ ID NO: 58135 - DNA, 25 bp, Saccharomyces pastorianus
catccctatgtctccaatttctgga

SEQ ID NO: 58136 - DNA, 25 bp, Saccharomyces pastorianus
gcctctcgcaggtagtacgcatcaa

SEQ ID NO: 58137 - DNA, 25 bp, Saccharomyces pastorianus
aagtagctcgataaggcgccaaggc

SEQ ID NO: 58138 - DNA, 25 bp, Saccharomyces pastorianus
ttgcgacttcggtagtacctgcaat

SEQ ID NO: 58139 - DNA, 25 bp, Saccharomyces pastorianus
gctctcatccgcatcattggagtat

SEQ ID NO: 58140 - DNA, 25 bp, Saccharomyces pastorianus
atatctgaagagctctcatccgcat

SEQ ID NO: 58141 - DNA, 25 bp, Saccharomyces pastorianus
gagtggtataccattgacgcctctc

SEQ ID NO: 58142 - DNA, 25 bp, Saccharomyces pastorianus
gaggcaacaagaaccactttccgaa

SEQ ID NO: 58143 - DNA, 25 bp, Saccharomyces pastorianus
gcatacttcgccgacatctagaaag

SEQ ID NO: 58144 - DNA, 25 bp, Saccharomyces pastorianus
aattatctcaaagtgggcagtccca

SEQ ID NO: 58145 - DNA, 25 bp, Saccharomyces pastorianus
tgggcagtcccatcagcagaggcaa

SEQ ID NO: 58146 - DNA, 25 bp, Saccharomyces pastorianus
ggaacccttcctatatgacaaactc

SEQ ID NO: 58147 - DNA, 25 bp, Saccharomyces pastorianus
tagtcccggtcctagatctgtggag

SEQ ID NO: 58148 - DNA, 25 bp, Saccharomyces pastorianus
ctccggcaaggtctgcatcacaaaa

SEQ ID NO: 58149 - DNA, 25 bp, Saccharomyces pastorianus
tatcaacaatgttcggcgtcaccag

SEQ ID NO: 58150 - DNA, 25 bp, Saccharomyces pastorianus
gtaccgttataatacctccggcaag

SEQ ID NO: 58151 - DNA, 25 bp, Saccharomyces pastorianus
gctggtgtcttaaactctagtcccg

SEQ ID NO: 58152 - DNA, 25 bp, Saccharomyces pastorianus
gacaaccgccaacttatatgccgaa

SEQ ID NO: 58153 - DNA, 25 bp, Saccharomyces pastorianus
gtcgtgaaacattttgccatagata

SEQ ID NO: 58154 - DNA, 25 bp, Saccharomyces pastorianus
gatgaacctagttttgtcgtgaaac

SEQ ID NO: 58155 - DNA, 25 bp, Saccharomyces pastorianus
ggccaatgtctaagattactcacta

SEQ ID NO: 58156 - DNA, 25 bp, Saccharomyces pastorianus
cagagggctcatcgtcccttttaaa

SEQ ID NO: 58157 - DNA, 25 bp, Saccharomyces pastorianus
atacgtgttattggagtcttgggtt

SEQ ID NO: 58158 - DNA, 25 bp, Saccharomyces pastorianus
aatggctaagttccactgttgtgga

SEQ ID NO: 58159 - DNA, 25 bp, Saccharomyces pastorianus
aaatggcaatggaccttaatgggat

SEQ ID NO: 58160 - DNA, 25 bp, Saccharomyces pastorianus
gtatggttccaatgcagagggctca

SEQ ID NO: 58161 - DNA, 25 bp, Saccharomyces pastorianus
aatgcatctgattgttcgttgagga

SEQ ID NO: 58162 - DNA, 25 bp, Saccharomyces pastorianus
gagaaatcgttctatttttcaagag

SEQ ID NO: 58163 - DNA, 25 bp, Saccharomyces pastorianus
gactctatgcctttcaaaacctttg

SEQ ID NO: 58164 - DNA, 25 bp, Saccharomyces pastorianus
tagtttctgtgatttggtctttcag

SEQ ID NO: 58165 - DNA, 25 bp, Saccharomyces pastorianus
gggattctagtttctgtgatttggt

SEQ ID NO: 58166 - DNA, 25 bp, Saccharomyces pastorianus
tctagtttctgtgatttggtctttc

SEQ ID NO: 58167 - DNA, 25 bp, Saccharomyces pastorianus
cgggaattgtgtcattttaaatggg

SEQ ID NO: 58168 - DNA, 25 bp, Saccharomyces pastorianus
ctagtttctgtgatttggtctttca

SEQ ID NO: 58169 - DNA, 25 bp, Saccharomyces pastorianus
cacgggaattgtgtcattttaaatg

SEQ ID NO: 58170 - DNA, 25 bp, Saccharomyces pastorianus
ggattctagtttctgtgatttggtc

SEQ ID NO: 58171 - DNA, 25 bp, Saccharomyces pastorianus
attctagtttctgtgatttggtctt

SEQ ID NO: 58172 - DNA, 25 bp, Saccharomyces pastorianus
gattctagtttctgtgatttggtct

SEQ ID NO: 58173 - DNA, 25 bp, Saccharomyces pastorianus
atacacgggaattgtgtcattttaa

SEQ ID NO: 58174 - DNA, 25 bp, Saccharomyces pastorianus
atatatacacgggaattgtgtcatt

SEQ ID NO: 58175 - DNA, 25 bp, Saccharomyces pastorianus
tacagagattggtacgtcgtgcgag

SEQ ID NO: 58176 - DNA, 25 bp, Saccharomyces pastorianus
gagccttccaatggtttgggttcca

SEQ ID NO: 58177 - DNA, 25 bp, Saccharomyces pastorianus
gaactacctgagatgcttgcactaa

SEQ ID NO: 58178 - DNA, 25 bp, Saccharomyces pastorianus
aaaagacttgttgctgaatccatca

SEQ ID NO: 58179 - DNA, 25 bp, Saccharomyces pastorianus
aacgcgctcgtgcaatggcacataa

SEQ ID NO: 58180 - DNA, 25 bp, Saccharomyces pastorianus
gttcattccttcgatcaacagttca

SEQ ID NO: 58181 - DNA, 25 bp, Saccharomyces pastorianus
gccggtggtttgtccattgttaaat

SEQ ID NO: 58182 - DNA, 25 bp, Saccharomyces pastorianus
tacttggacactttcccgtttgaat

SEQ ID NO: 58183 - DNA, 25 bp, Saccharomyces pastorianus
atcatgttggttttcgttatcatcg

SEQ ID NO: 58184 - DNA, 25 bp, Saccharomyces pastorianus
aacattgacacaactcgaggccggt

SEQ ID NO: 58185 - DNA, 25 bp, Saccharomyces pastorianus
atcaaaatcttcgaacgcgctcgtg

SEQ ID NO: 58186 - DNA, 25 bp, Saccharomyces pastorianus
gctgaagaaaactcaaacacgcctg

SEQ ID NO: 58187 - DNA, 25 bp, Saccharomyces pastorianus
agatgatcccaacgcaattgacgat

SEQ ID NO: 58188 - DNA, 25 bp, Saccharomyces pastorianus
gacgacctgaacgaagatgatccca

SEQ ID NO: 58189 - DNA, 25 bp, Saccharomyces pastorianus
gtgcaagccgccgaaaacgacgaac

SEQ ID NO: 58190 - DNA, 25 bp, Saccharomyces pastorianus
atgaagatttgacagaggacgcaca

SEQ ID NO: 58191 - DNA, 25 bp, Saccharomyces pastorianus
gaagaagatgtgcaagccgccgaaa

SEQ ID NO: 58192 - DNA, 25 bp, Saccharomyces pastorianus
gaggttgacgacaaaaacttgcaag

SEQ ID NO: 58193 - DNA, 25 bp, Saccharomyces pastorianus
aacacgcctgaagatggagacgaag

SEQ ID NO: 58194 - DNA, 25 bp, Saccharomyces pastorianus
agaggaaaatgatgtcggcgagcaa

SEQ ID NO: 58195 - DNA, 25 bp, Saccharomyces pastorianus
gatggcgaaggtgctcaaaataata

SEQ ID NO: 58196 - DNA, 25 bp, Saccharomyces pastorianus
acttgcaagatggtacaggtttagg

SEQ ID NO: 58197 - DNA, 25 bp, Saccharomyces pastorianus
gacgctaagttcgattggcatttca

SEQ ID NO: 58198 - DNA, 25 bp, Saccharomyces pastorianus
caatccgacattactggtggcaata

SEQ ID NO: 58199 - DNA, 25 bp, Saccharomyces pastorianus
atttcaacgatgctgacttgcctgt

SEQ ID NO: 58200 - DNA, 25 bp, Saccharomyces pastorianus
gacagatcgatatatccgccacatt

SEQ ID NO: 58201 - DNA, 25 bp, Saccharomyces pastorianus
tgggttccccaccaaaggacgtgat

SEQ ID NO: 58202 - DNA, 25 bp, Saccharomyces pastorianus
aggctcaggcacaggttcagttaca

SEQ ID NO: 58203 - DNA, 25 bp, Saccharomyces pastorianus
acatttgatgaccaagtcgccgcag

SEQ ID NO: 58204 - DNA, 25 bp, Saccharomyces pastorianus
aattcgtcacttcattaccacatag

SEQ ID NO: 58205 - DNA, 25 bp, Saccharomyces pastorianus
tctatcatcaccgacctattgggtt

SEQ ID NO: 58206 - DNA, 25 bp, Saccharomyces pastorianus
agaccccatctcattttcggaaaga

SEQ ID NO: 58207 - DNA, 25 bp, Saccharomyces pastorianus
agagaatcaccgcagctgatgcctt

SEQ ID NO: 58208 - DNA, 25 bp, Saccharomyces pastorianus
agcggtagttacacagtcgccactg

SEQ ID NO: 58209 - DNA, 25 bp, Saccharomyces pastorianus
atggcaacgtatcagcggtagttac

SEQ ID NO: 58210 - DNA, 25 bp, Saccharomyces pastorianus
aaaggccctcgatatctccattgat

SEQ ID NO: 58211 - DNA, 25 bp, Saccharomyces pastorianus
cccctctgaactatttgatactgtc

SEQ ID NO: 58212 - DNA, 25 bp, Saccharomyces pastorianus
atctccattgattctgaactcgata

SEQ ID NO: 58213 - DNA, 25 bp, Saccharomyces pastorianus
taaggagactcttccacaagtcaat

SEQ ID NO: 58214 - DNA, 25 bp, Saccharomyces pastorianus
gaactcgataatcttctgaaatggc

SEQ ID NO: 58215 - DNA, 25 bp, Saccharomyces pastorianus
ggagtaaactggtcttgaagccgtt

SEQ ID NO: 58216 - DNA, 25 bp, Saccharomyces pastorianus
gccactgttgttggccgactagtta

SEQ ID NO: 58217 - DNA, 25 bp, Saccharomyces pastorianus
atggtactttcagctcctaaaaata

SEQ ID NO: 58218 - DNA, 25 bp, Saccharomyces pastorianus
aaaccggcgcattgtctattggtga

SEQ ID NO: 58219 - DNA, 25 bp, Saccharomyces pastorianus
gtagttctcgttattcagggttcac

SEQ ID NO: 58220 - DNA, 25 bp, Saccharomyces pastorianus
gaaaaacactgaggcctctgtggac

SEQ ID NO: 58221 - DNA, 25 bp, Saccharomyces pastorianus
gaggcctctgtggacatcattatac

SEQ ID NO: 58222 - DNA, 25 bp, Saccharomyces pastorianus
cagccaagacatcttagcaggcgat

SEQ ID NO: 58223 - DNA, 25 bp, Saccharomyces pastorianus
ggacaattcccaaaagcctttggca

SEQ ID NO: 58224 - DNA, 25 bp, Saccharomyces pastorianus
gatttcacgatgtttataccagatg

SEQ ID NO: 58225 - DNA, 25 bp, Saccharomyces pastorianus
cagggttcactggtgctgaagaaac

SEQ ID NO: 58226 - DNA, 25 bp, Saccharomyces pastorianus
gaagagccagtgacagaccgcatca

SEQ ID NO: 58227 - DNA, 25 bp, Saccharomyces pastorianus
caaaatgtttcctttcaatcctatt

SEQ ID NO: 58228 - DNA, 25 bp, Saccharomyces pastorianus
caaggacagtgttgcaggcgatgaa

SEQ ID NO: 58229 - DNA, 25 bp, Saccharomyces pastorianus
gaggaaacaccgtagttctcgttat

SEQ ID NO: 58230 - DNA, 25 bp, Saccharomyces pastorianus
atcgcgaaaccctctagaatcggaa

SEQ ID NO: 58231 - DNA, 25 bp, Saccharomyces pastorianus
acgcctcctcctggtttaagttcag

SEQ ID NO: 58232 - DNA, 25 bp, Saccharomyces pastorianus
aagccgctttgatggaaacgtgtct

SEQ ID NO: 58233 - DNA, 25 bp, Saccharomyces pastorianus
acggatggtcctcaaagattcccca

SEQ ID NO: 58234 - DNA, 25 bp, Saccharomyces pastorianus
aggagttccaggaatggctccacca

SEQ ID NO: 58235 - DNA, 25 bp, Saccharomyces pastorianus
acctccgcctggaatgactacagta

SEQ ID NO: 58236 - DNA, 25 bp, Saccharomyces pastorianus
aataataatggtgcctacccagccc

SEQ ID NO: 58237 - DNA, 25 bp, Saccharomyces pastorianus
caggtacgtttagctcaggagttcc

SEQ ID NO: 58238 - DNA, 25 bp, Saccharomyces pastorianus
tcaattgcaccaccacctggaatgg

SEQ ID NO: 58239 - DNA, 25 bp, Saccharomyces pastorianus
aggttccaagtatccaaggcatcgt

SEQ ID NO: 58240 - DNA, 25 bp, Saccharomyces pastorianus
tccagggctttttagtaccacagac

SEQ ID NO: 58241 - DNA, 25 bp, Saccharomyces pastorianus
gttcatcgatttaattctcttccgt

SEQ ID NO: 58242 - DNA, 25 bp, Saccharomyces pastorianus
caacctgtcgttatggaagaagaat

SEQ ID NO: 58243 - DNA, 25 bp, Saccharomyces pastorianus
gaaattactatcaaactgcgtacta

SEQ ID NO: 58244 - DNA, 25 bp, Saccharomyces pastorianus
cccaacgtcaacctgtcgttatgga

SEQ ID NO: 58245 - DNA, 25 bp, Saccharomyces pastorianus
gtatcaaaccatgttcaggattcaa

SEQ ID NO: 58246 - DNA, 25 bp, Saccharomyces pastorianus
gtactaatgattttgttcctccctc

SEQ ID NO: 58247 - DNA, 25 bp, Saccharomyces pastorianus
gatttaattctcttccgtccaaaat

SEQ ID NO: 58248 - DNA, 25 bp, Saccharomyces pastorianus
gggcgctcactagagaacaaattta

SEQ ID NO: 58249 - DNA, 25 bp, Saccharomyces pastorianus
gcaacagaaagcgatgttcatcgat

SEQ ID NO: 58250 - DNA, 25 bp, Saccharomyces pastorianus
tttattcgtatcaaaccatgttcag

SEQ ID NO: 58251 - DNA, 25 bp, Saccharomyces pastorianus
ttgttcctccctccagaaaaaacag

SEQ ID NO: 58252 - DNA, 25 bp, Saccharomyces pastorianus
ggctcttctagagaactgcagattc

SEQ ID NO: 58253 - DNA, 25 bp, Saccharomyces pastorianus
ggcaggactatcattccgagtttga

SEQ ID NO: 58254 - DNA, 25 bp, Saccharomyces pastorianus
gcatccatcgccaaatgtaccggag

SEQ ID NO: 58255 - DNA, 25 bp, Saccharomyces pastorianus
gagataaggttcaggctcttctaga

SEQ ID NO: 58256 - DNA, 25 bp, Saccharomyces pastorianus
gagttttgaagatctacatggccaa

SEQ ID NO: 58257 - DNA, 25 bp, Saccharomyces pastorianus
gtatgtgacgaagttcaacccttta

SEQ ID NO: 58258 - DNA, 25 bp, Saccharomyces pastorianus
gaatcatcgagtcaccagatgggct

SEQ ID NO: 58259 - DNA, 25 bp, Saccharomyces pastorianus
gggctggatcaattcatcaaggatt

SEQ ID NO: 58260 - DNA, 25 bp, Saccharomyces pastorianus
gattaagaacatccccttacctgaa

SEQ ID NO: 58261 - DNA, 25 bp, Saccharomyces pastorianus
aaatatgtggctagttggcaggact

SEQ ID NO: 58262 - DNA, 25 bp, Saccharomyces pastorianus
gttcgcaattagaagcttccatgag

SEQ ID NO: 58263 - DNA, 25 bp, Saccharomyces pastorianus
aagccggcccacaagagcattacca

SEQ ID NO: 58264 - DNA, 25 bp, Saccharomyces pastorianus
aagttctgggtcaagccacgggtca

SEQ ID NO: 58265 - DNA, 25 bp, Saccharomyces pastorianus
aagccacgggtcaagctctggatca

SEQ ID NO: 58266 - DNA, 25 bp, Saccharomyces pastorianus
agcaagtcgactacggtgccgagct

SEQ ID NO: 58267 - DNA, 25 bp, Saccharomyces pastorianus
gtgccgagctctagcaccaagccgg

SEQ ID NO: 58268 - DNA, 25 bp, Saccharomyces pastorianus
ggtcacgggtcaagttctgggtcaa

SEQ ID NO: 58269 - DNA, 25 bp, Saccharomyces pastorianus
ggtcatgcgtctggtcacgggtcaa

SEQ ID NO: 58270 - DNA, 25 bp, Saccharomyces pastorianus
ttccaaatcaggcactagctccgct

SEQ ID NO: 58271 - DNA, 25 bp, Saccharomyces pastorianus
gtaggtagtagcacaggccaccgca

SEQ ID NO: 58272 - DNA, 25 bp, Saccharomyces pastorianus
aagctctggatcaggcactaggtca

SEQ ID NO: 58273 - DNA, 25 bp, Saccharomyces pastorianus
acggcggcacagtccagcaagtcga

SEQ ID NO: 58274 - DNA, 25 bp, Saccharomyces pastorianus
cagtttctgaaacgctctggagcca

SEQ ID NO: 58275 - DNA, 25 bp, Saccharomyces pastorianus
tcgcgtattcgctcttcttgaatga

SEQ ID NO: 58276 - DNA, 25 bp, Saccharomyces pastorianus
tagtgtgctgtttggcgcagtcgac

SEQ ID NO: 58277 - DNA, 25 bp, Saccharomyces pastorianus
gagaacttcgtgctggccaacaagc

SEQ ID NO: 58278 - DNA, 25 bp, Saccharomyces pastorianus
cggccgacttatgggtctccagtaa

SEQ ID NO: 58279 - DNA, 25 bp, Saccharomyces pastorianus
gtttgccgtggccaataagtccaac

SEQ ID NO: 58280 - DNA, 25 bp, Saccharomyces pastorianus
gcctgcccatgctagaagtgacgta

SEQ ID NO: 58281 - DNA, 25 bp, Saccharomyces pastorianus
ggagccatcgatgcgatcgcgtatt

SEQ ID NO: 58282 - DNA, 25 bp, Saccharomyces pastorianus
tgaattgcgaccagtacggcgtgtt

SEQ ID NO: 58283 - DNA, 25 bp, Saccharomyces pastorianus
attgcgggtccacgatgaattgcga

SEQ ID NO: 58284 - DNA, 25 bp, Saccharomyces pastorianus
aatgatgagtcgcagacctccggta

SEQ ID NO: 58285 - DNA, 25 bp, Saccharomyces pastorianus
agacaggcaatgcaaccgccattct

SEQ ID NO: 58286 - DNA, 25 bp, Saccharomyces pastorianus
tactatgagtacgagtgcccggcca

SEQ ID NO: 58287 - DNA, 25 bp, Saccharomyces pastorianus
tgtcagacttcaccatgcagaccaa

SEQ ID NO: 58288 - DNA, 25 bp, Saccharomyces pastorianus
attgaagtcatcagatccaccgtcc

SEQ ID NO: 58289 - DNA, 25 bp, Saccharomyces pastorianus
tacgcctccggcaaagaagacattg

SEQ ID NO: 58290 - DNA, 25 bp, Saccharomyces pastorianus
tgcggagtgcctacgtggtctacga

SEQ ID NO: 58291 - DNA, 25 bp, Saccharomyces pastorianus
agtgacaacgccactagcgtggtct

SEQ ID NO: 58292 - DNA, 25 bp, Saccharomyces pastorianus
tggcgatcgtgcctcagacaggcaa

SEQ ID NO: 58293 - DNA, 25 bp, Saccharomyces pastorianus
attctcggtgactcgttcttgcgga

SEQ ID NO: 58294 - DNA, 25 bp, Saccharomyces pastorianus
ggccaagagtctgaacgctacgttt

SEQ ID NO: 58295 - DNA, 25 bp, Saccharomyces pastorianus
aacgtcggaacctgcgtcttggcga

SEQ ID NO: 58296 - DNA, 25 bp, Saccharomyces pastorianus
acgctgagttagttgcaaccttgca

SEQ ID NO: 58297 - DNA, 25 bp, Saccharomyces pastorianus
gagacgatctcgctgattcagtaca

SEQ ID NO: 58298 - DNA, 25 bp, Saccharomyces pastorianus
tgaagtggcagcatccatggaccgt

SEQ ID NO: 58299 - DNA, 25 bp, Saccharomyces pastorianus
gggcagcttcagaattaacgaacaa

SEQ ID NO: 58300 - DNA, 25 bp, Saccharomyces pastorianus
cttgcaagccaagggtataccactg

SEQ ID NO: 58301 - DNA, 25 bp, Saccharomyces pastorianus
ggaagcctatcctctagttagtgaa

SEQ ID NO: 58302 - DNA, 25 bp, Saccharomyces pastorianus
gtccaaaagggcttacgctgagtta

SEQ ID NO: 58303 - DNA, 25 bp, Saccharomyces pastorianus
tatctgagacaggaacaggcgtcac

SEQ ID NO: 58304 - DNA, 25 bp, Saccharomyces pastorianus
aggcgtcacgaaagtctgcaaacac

SEQ ID NO: 58305 - DNA, 25 bp, Saccharomyces pastorianus
gaagaacaccgttcagatacttctg

SEQ ID NO: 58306 - DNA, 25 bp, Saccharomyces pastorianus
tccatggaccgttcagatacttctg

SEQ ID NO: 58307 - DNA, 25 bp, Saccharomyces pastorianus
gacttgcaatacttcacagagatct

SEQ ID NO: 58308 - DNA, 25 bp, Saccharomyces pastorianus
atggttccgtttcctgcatgatgaa

SEQ ID NO: 58309 - DNA, 25 bp, Saccharomyces pastorianus
aaacgagagctttttctgtcggcgt

SEQ ID NO: 58310 - DNA, 25 bp, Saccharomyces pastorianus
aaggatgctctacacttccaaacat

SEQ ID NO: 58311 - DNA, 25 bp, Saccharomyces pastorianus
aggccttctagaggcatggttccgt

SEQ ID NO: 58312 - DNA, 25 bp, Saccharomyces pastorianus
gagatctacgactataccttccatt

SEQ ID NO: 58313 - DNA, 25 bp, Saccharomyces pastorianus
tacaatgaagctgcagcctggcctt

SEQ ID NO: 58314 - DNA, 25 bp, Saccharomyces pastorianus
atattggacactgcttttccagcca

SEQ ID NO: 58315 - DNA, 25 bp, Saccharomyces pastorianus
ctgtcggcgtggttcatgcaaggat

SEQ ID NO: 58316 - DNA, 25 bp, Saccharomyces pastorianus
gaagacttgggctacaatctggaag

SEQ ID NO: 58317 - DNA, 25 bp, Saccharomyces pastorianus
ggcatatgctgctccaatttttcaa

SEQ ID NO: 58318 - DNA, 25 bp, Saccharomyces pastorianus
gaatgtctgtatcctaactgtagca

SEQ ID NO: 58319 - DNA, 25 bp, Saccharomyces pastorianus
gatagaccatactcatgcgacttcc

SEQ ID NO: 58320 - DNA, 25 bp, Saccharomyces pastorianus
gacttccccagttgcgataaggcgt

SEQ ID NO: 58321 - DNA, 25 bp, Saccharomyces pastorianus
agattcaaccgcgaagatgccctga

SEQ ID NO: 58322 - DNA, 25 bp, Saccharomyces pastorianus
aagaagtatgtttgcccctgtggta

SEQ ID NO: 58323 - DNA, 25 bp, Saccharomyces pastorianus
gatgccctgatggtgcacagaagtc

SEQ ID NO: 58324 - DNA, 25 bp, Saccharomyces pastorianus
aagtcgtatgatttgcgcaggcggt

SEQ ID NO: 58325 - DNA, 25 bp, Saccharomyces pastorianus
aggtcacacatccaaactcatttgc

SEQ ID NO: 58326 - DNA, 25 bp, Saccharomyces pastorianus
acatgggttattggacccgacgccg

SEQ ID NO: 58327 - DNA, 25 bp, Saccharomyces pastorianus
gaggagcgtatttggcagcccgcat

SEQ ID NO: 58328 - DNA, 25 bp, Saccharomyces pastorianus
gataatagccaggacgacgcctatg

SEQ ID NO: 58329 - DNA, 25 bp, Saccharomyces pastorianus
tgacaacaacaaaccttcacactac

SEQ ID NO: 58330 - DNA, 25 bp, Saccharomyces pastorianus
agcaatccattttgaacatgtccaa

SEQ ID NO: 58331 - DNA, 25 bp, Saccharomyces pastorianus
ggtcccagtggtacagcaatatttg

SEQ ID NO: 58332 - DNA, 25 bp, Saccharomyces pastorianus
gatttggacattcccatagtgccct

SEQ ID NO: 58333 - DNA, 25 bp, Saccharomyces pastorianus
aggacaggcgatgaccctagtgata

SEQ ID NO: 58334 - DNA, 25 bp, Saccharomyces pastorianus
gcaatatttgggttcctgggtcata

SEQ ID NO: 58335 - DNA, 25 bp, Saccharomyces pastorianus
aatgaggatttcacccagatagagg

SEQ ID NO: 58336 - DNA, 25 bp, Saccharomyces pastorianus
gggacaaccatacttcaaggcagaa

SEQ ID NO: 58337 - DNA, 25 bp, Saccharomyces pastorianus
agaaatcaatggcttcgcacaagag

SEQ ID NO: 58338 - DNA, 25 bp, Saccharomyces pastorianus
aaagaccctcaacccatgggactga

SEQ ID NO: 58339 - DNA, 25 bp, Saccharomyces pastorianus
gctggaattttgctggtgacaacaa

SEQ ID NO: 58340 - DNA, 25 bp, Saccharomyces pastorianus
gaaaacctgtcgcagttgaccagaa

SEQ ID NO: 58341 - DNA, 25 bp, Saccharomyces pastorianus
gttggatctggaagtgacggctcta

SEQ ID NO: 58342 - DNA, 25 bp, Saccharomyces pastorianus
gcttgcattcatcccgagacaacga

SEQ ID NO: 58343 - DNA, 25 bp, Saccharomyces pastorianus
gaaaccgccacattagagctgccat

SEQ ID NO: 58344 - DNA, 25 bp, Saccharomyces pastorianus
gaaacgacacactcactgcatctgg

SEQ ID NO: 58345 - DNA, 25 bp, Saccharomyces pastorianus
agggtacgttgtgtggtccacgaca

SEQ ID NO: 58346 - DNA, 25 bp, Saccharomyces pastorianus
tttcgtcttggtacccaggtggaag

SEQ ID NO: 58347 - DNA, 25 bp, Saccharomyces pastorianus
tacgttctcgccatggacgtgatat

SEQ ID NO: 58348 - DNA, 25 bp, Saccharomyces pastorianus
ggacaagctcctctgtgtacgttct

SEQ ID NO: 58349 - DNA, 25 bp, Saccharomyces pastorianus
gttcttggtaactttgtcgacgtct

SEQ ID NO: 58350 - DNA, 25 bp, Saccharomyces pastorianus
gagctgtcactcttgggccggacaa

SEQ ID NO: 58351 - DNA, 25 bp, Saccharomyces pastorianus
agccgatagtgtgctttctctacaa

SEQ ID NO: 58352 - DNA, 25 bp, Saccharomyces pastorianus
tattgctaatggactgatggatgac

SEQ ID NO: 58353 - DNA, 25 bp, Saccharomyces pastorianus
tagtgacgtgatacctgcatattat

SEQ ID NO: 58354 - DNA, 25 bp, Saccharomyces pastorianus
acatcttctttattttcggtaccat

SEQ ID NO: 58355 - DNA, 25 bp, Saccharomyces pastorianus
tatcaagctcagacgaaggtggcct

SEQ ID NO: 58356 - DNA, 25 bp, Saccharomyces pastorianus
agagttgggccatgaagatttgata

SEQ ID NO: 58357 - DNA, 25 bp, Saccharomyces pastorianus
acaaggttcccttagacatcagtaa

SEQ ID NO: 58358 - DNA, 25 bp, Saccharomyces pastorianus
gatctaatcgtacatctattgccaa

SEQ ID NO: 58359 - DNA, 25 bp, Saccharomyces pastorianus
gcattaccatttccatgtagccaat

SEQ ID NO: 58360 - DNA, 25 bp, Saccharomyces pastorianus
ctattgccaaaagacgatgcggatg

SEQ ID NO: 58361 - DNA, 25 bp, Saccharomyces pastorianus
gacaacgctattttcaaattccggg

SEQ ID NO: 58362 - DNA, 25 bp, Saccharomyces pastorianus
attaccccagacagtttacgtagag

SEQ ID NO: 58363 - DNA, 25 bp, Saccharomyces pastorianus
gtgacgccgaacatattaccccaga

SEQ ID NO: 58364 - DNA, 25 bp, Saccharomyces pastorianus
ttgttcctgctatcatttctgctgt

SEQ ID NO: 58365 - DNA, 25 bp, Saccharomyces pastorianus
tgccggtagggatcacgatggttac

SEQ ID NO: 58366 - DNA, 25 bp, Saccharomyces pastorianus
gacacatacttgaagccttatcctg

SEQ ID NO: 58367 - DNA, 25 bp, Saccharomyces pastorianus
atcattctagtgagagacctgccaa

SEQ ID NO: 58368 - DNA, 25 bp, Saccharomyces pastorianus
agaagctgctgtcgtcggtatccca

SEQ ID NO: 58369 - DNA, 25 bp, Saccharomyces pastorianus
ggtgatttatccactttggccaact

SEQ ID NO: 58370 - DNA, 25 bp, Saccharomyces pastorianus
atccatggccagatccgtttggaac

SEQ ID NO: 58371 - DNA, 25 bp, Saccharomyces pastorianus
ataatgccgctgaaggtgacgccga

SEQ ID NO: 58372 - DNA, 25 bp, Saccharomyces pastorianus
ttatttcacaggtgacggtgccggt

SEQ ID NO: 58373 - DNA, 25 bp, Saccharomyces pastorianus
gaaaggtttctcaggttgccggtgt

SEQ ID NO: 58374 - DNA, 25 bp, Saccharomyces pastorianus
catacattcagtagtctttgccggg

SEQ ID NO: 58375 - DNA, 25 bp, Saccharomyces pastorianus
gatcgtgtcgttgacgcaaactcta

SEQ ID NO: 58376 - DNA, 25 bp, Saccharomyces pastorianus
ctgttgctcgtattggtgccataca

SEQ ID NO: 58377 - DNA, 25 bp, Saccharomyces pastorianus
agtcgttgctatgctggctgttgct

SEQ ID NO: 58378 - DNA, 25 bp, Saccharomyces pastorianus
aatgatcccagaggcagtcgttgct

SEQ ID NO: 58379 - DNA, 25 bp, Saccharomyces pastorianus
tttattatacacatccggttccacc

SEQ ID NO: 58380 - DNA, 25 bp, Saccharomyces pastorianus
gcctcctgtctcatgtgatgctgaa

SEQ ID NO: 58381 - DNA, 25 bp, Saccharomyces pastorianus
ttctggtggcacgaagaggctgcta

SEQ ID NO: 58382 - DNA, 25 bp, Saccharomyces pastorianus
gacaccgtcgctatatatttaccaa

SEQ ID NO: 58383 - DNA, 25 bp, Saccharomyces pastorianus
cggttctccaaagggtgtcgtccat

SEQ ID NO: 58384 - DNA, 25 bp, Saccharomyces pastorianus
ccaacagagaggacttcaatcatga

SEQ ID NO: 58385 - DNA, 25 bp, Saccharomyces pastorianus
ggacatcataggttgccaaacagca

SEQ ID NO: 58386 - DNA, 25 bp, Saccharomyces pastorianus
gaaggccacttagcagatattggaa

SEQ ID NO: 58387 - DNA, 25 bp, Saccharomyces pastorianus
tcaaagctatatttccaacagagag

SEQ ID NO: 58388 - DNA, 25 bp, Saccharomyces pastorianus
caaatttgccactttaagagaactg

SEQ ID NO: 58389 - DNA, 25 bp, Saccharomyces pastorianus
gggtagcgactttgatagacaaatt

SEQ ID NO: 58390 - DNA, 25 bp, Saccharomyces pastorianus
acctgaattactagaatcgttgacc

SEQ ID NO: 58391 - DNA, 25 bp, Saccharomyces pastorianus
gagaactggcaaacttatttactgt

SEQ ID NO: 58392 - DNA, 25 bp, Saccharomyces pastorianus
tcgtggttacaaaggacatcatagg

SEQ ID NO: 58393 - DNA, 25 bp, Saccharomyces pastorianus
aacttatttactgttcaacctgaat

SEQ ID NO: 58394 - DNA, 25 bp, Saccharomyces pastorianus
atcgttgaccaaagaaggccactta

SEQ ID NO: 58395 - DNA, 25 bp, Saccharomyces pastorianus
aaccattgcggtgatatctacgaaa

SEQ ID NO: 58396 - DNA, 25 bp, Saccharomyces pastorianus
attgcattagaagtggcctactgga

SEQ ID NO: 58397 - DNA, 25 bp, Saccharomyces pastorianus
atcaatttcaatcaagtccatcttc

SEQ ID NO: 58398 - DNA, 25 bp, Saccharomyces pastorianus
cgttgtggagtctaccgcaagagtt

SEQ ID NO: 58399 - DNA, 25 bp, Saccharomyces pastorianus
acaaataactctacgtccacacaat

SEQ ID NO: 58400 - DNA, 25 bp, Saccharomyces pastorianus
tacgaaattttccacaattctgtgt

SEQ ID NO: 58401 - DNA, 25 bp, Saccharomyces pastorianus
cgcacaaactctttatatggctcgt

SEQ ID NO: 58402 - DNA, 25 bp, Saccharomyces pastorianus
ggaactcattcctaacaaggcgcac

SEQ ID NO: 58403 - DNA, 25 bp, Saccharomyces pastorianus
gaattttctaaagctcattgcaatg

SEQ ID NO: 58404 - DNA, 25 bp, Saccharomyces pastorianus
gtccatcttcttgccactattgaat

SEQ ID NO: 58405 - DNA, 25 bp, Saccharomyces pastorianus
aaggcgcacctatacattttagaaa

SEQ ID NO: 58406 - DNA, 25 bp, Saccharomyces pastorianus
ctttaatctaatctttccttgtcta

SEQ ID NO: 58407 - DNA, 25 bp, Saccharomyces pastorianus
gcagacattgcagtataccatttct

SEQ ID NO: 58408 - DNA, 25 bp, Saccharomyces pastorianus
accactttgtggtcgctgtattcga

SEQ ID NO: 58409 - DNA, 25 bp, Saccharomyces pastorianus
aagactggcgtatcgcttatatacc

SEQ ID NO: 58410 - DNA, 25 bp, Saccharomyces pastorianus
aacagttcgttgtcgacatccggcg

SEQ ID NO: 58411 - DNA, 25 bp, Saccharomyces pastorianus
gatgttgcacattttaggcttcctt

SEQ ID NO: 58412 - DNA, 25 bp, Saccharomyces pastorianus
taccttaattgtgtcatctctgtgc

SEQ ID NO: 58413 - DNA, 25 bp, Saccharomyces pastorianus
ttggccttttcactagcagacattg

SEQ ID NO: 58414 - DNA, 25 bp, Saccharomyces pastorianus
atctctgtgcttttgtgtgtgtttg

SEQ ID NO: 58415 - DNA, 25 bp, Saccharomyces pastorianus
ttaggcttccttgctagaatcgtag

SEQ ID NO: 58416 - DNA, 25 bp, Saccharomyces pastorianus
gtttgtgtttgtaattactctcctg

SEQ ID NO: 58417 - DNA, 25 bp, Saccharomyces pastorianus
tgaacgagatccttttccagggctt

SEQ ID NO: 58418 - DNA, 25 bp, Saccharomyces pastorianus
gagaccattacatttgccgcaagag

SEQ ID NO: 58419 - DNA, 25 bp, Saccharomyces pastorianus
gctgatgcagctccaatttaacctt

SEQ ID NO: 58420 - DNA, 25 bp, Saccharomyces pastorianus
gattctttgattcctgtcgacatgc

SEQ ID NO: 58421 - DNA, 25 bp, Saccharomyces pastorianus
agcctagaactaactcggacattga

SEQ ID NO: 58422 - DNA, 25 bp, Saccharomyces pastorianus
aaagattgggtcaactccacgtcgc

SEQ ID NO: 58423 - DNA, 25 bp, Saccharomyces pastorianus
agggcttcacagtaatccatttcaa

SEQ ID NO: 58424 - DNA, 25 bp, Saccharomyces pastorianus
gcaacaatcgatgcgtcactcacga

SEQ ID NO: 58425 - DNA, 25 bp, Saccharomyces pastorianus
gtgaccaggttagcatcgacaccat

SEQ ID NO: 58426 - DNA, 25 bp, Saccharomyces pastorianus
gacattcgtgggtttcttcgatcta

SEQ ID NO: 58427 - DNA, 25 bp, Saccharomyces pastorianus
ggacaaatcgacctgtaccacaacg

SEQ ID NO: 58428 - DNA, 25 bp, Saccharomyces pastorianus
tagcaacgacccttcaatatccatt

SEQ ID NO: 58429 - DNA, 25 bp, Saccharomyces pastorianus
atgcgtactagcaacgacccttcaa

SEQ ID NO: 58430 - DNA, 25 bp, Saccharomyces pastorianus
gaagttttgtcaagtgtttgttaca

SEQ ID NO: 58431 - DNA, 25 bp, Saccharomyces pastorianus
gttatgggccaattattgaactatt

SEQ ID NO: 58432 - DNA, 25 bp, Saccharomyces pastorianus
ttgtttctcaataatgttatgggcc

SEQ ID NO: 58433 - DNA, 25 bp, Saccharomyces pastorianus
tttgaattcctccatgcgtactagc

SEQ ID NO: 58434 - DNA, 25 bp, Saccharomyces pastorianus
aaggttcaggaatgcattaatcggt

SEQ ID NO: 58435 - DNA, 25 bp, Saccharomyces pastorianus
gaatgcgaatcattgaaccaaatgg

SEQ ID NO: 58436 - DNA, 25 bp, Saccharomyces pastorianus
aagatgatgcgaattcagagacgaa

SEQ ID NO: 58437 - DNA, 25 bp, Saccharomyces pastorianus
aataatgcagcattggcagaagttt

SEQ ID NO: 58438 - DNA, 25 bp, Saccharomyces pastorianus
cctactatcatggttgtttctcaat

SEQ ID NO: 58439 - DNA, 25 bp, Saccharomyces pastorianus
actaatttgaagtctggcatcgaag

SEQ ID NO: 58440 - DNA, 25 bp, Saccharomyces pastorianus
tatgctaccacctaccgttttacta

SEQ ID NO: 58441 - DNA, 25 bp, Saccharomyces pastorianus
gttgcaagccatatcatccgaagac

SEQ ID NO: 58442 - DNA, 25 bp, Saccharomyces pastorianus
agacccgcaagatatcgataccgat

SEQ ID NO: 58443 - DNA, 25 bp, Saccharomyces pastorianus
atacgatgcagatgagccattcaaa

SEQ ID NO: 58444 - DNA, 25 bp, Saccharomyces pastorianus
gaagagtgttgtccctatgtttgaa

SEQ ID NO: 58445 - DNA, 25 bp, Saccharomyces pastorianus
aaaatcgattctatgctaccaccta

SEQ ID NO: 58446 - DNA, 25 bp, Saccharomyces pastorianus
atgtcttgcacacaattagtaccaa

SEQ ID NO: 58447 - DNA, 25 bp, Saccharomyces pastorianus
ttgggagtccagtgaatacgatgca

SEQ ID NO: 58448 - DNA, 25 bp, Saccharomyces pastorianus
ggatgatatgcttgacggtttgttg

SEQ ID NO: 58449 - DNA, 25 bp, Saccharomyces pastorianus
gatggtgacatttccaaattgctag

SEQ ID NO: 58450 - DNA, 25 bp, Saccharomyces pastorianus
gactccgagactggtaatttcctcc

SEQ ID NO: 58451 - DNA, 25 bp, Saccharomyces pastorianus
tgttaaatctgtttggcttgttcca

SEQ ID NO: 58452 - DNA, 25 bp, Saccharomyces pastorianus
ccccgataaattccccactaatgag

SEQ ID NO: 58453 - DNA, 25 bp, Saccharomyces pastorianus
atttcctacctattctgcagcagta

SEQ ID NO: 58454 - DNA, 25 bp, Saccharomyces pastorianus
tgtgactacaaacgaccaaggtgag

SEQ ID NO: 58455 - DNA, 25 bp, Saccharomyces pastorianus
cgcattatgggattgttgtgactac

SEQ ID NO: 58456 - DNA, 25 bp, Saccharomyces pastorianus
ggcttgttccaggacgcatttgaat

SEQ ID NO: 58457 - DNA, 25 bp, Saccharomyces pastorianus
atgagatcccattgacgctgactag

SEQ ID NO: 58458 - DNA, 25 bp, Saccharomyces pastorianus
gtggtgcgatacttgggacctcata

SEQ ID NO: 58459 - DNA, 25 bp, Saccharomyces pastorianus
caccacaaatagtgccagtttcaaa

SEQ ID NO: 58460 - DNA, 25 bp, Saccharomyces pastorianus
ttgacgctgactagagactccgaga

SEQ ID NO: 58461 - DNA, 25 bp, Saccharomyces pastorianus
gatacttgaaacacgtctcaagaag

SEQ ID NO: 58462 - DNA, 25 bp, Saccharomyces pastorianus
aaacacgtctcaagaagattcaaga

SEQ ID NO: 58463 - DNA, 25 bp, Saccharomyces pastorianus
aacacgtctcaagaagattcaagaa

SEQ ID NO: 58464 - DNA, 25 bp, Saccharomyces pastorianus
atgagatacttgaaacacgtctcaa

SEQ ID NO: 58465 - DNA, 25 bp, Saccharomyces pastorianus
cgtctcaagaagattcaagaacggt

SEQ ID NO: 58466 - DNA, 25 bp, Saccharomyces pastorianus
gaaacacgtctcaagaagattcaag

SEQ ID NO: 58467 - DNA, 25 bp, Saccharomyces pastorianus
tacttgaaacacgtctcaagaagat

SEQ ID NO: 58468 - DNA, 25 bp, Saccharomyces pastorianus
ttgaaacacgtctcaagaagattca

SEQ ID NO: 58469 - DNA, 25 bp, Saccharomyces pastorianus
tgagatacttgaaacacgtctcaag

SEQ ID NO: 58470 - DNA, 25 bp, Saccharomyces pastorianus
acacgtctcaagaagattcaagaac

SEQ ID NO: 58471 - DNA, 25 bp, Saccharomyces pastorianus
gagatacttgaaacacgtctcaaga

SEQ ID NO: 58472 - DNA, 25 bp, Saccharomyces pastorianus
acgtgtcacaccaggcggattttca

SEQ ID NO: 58473 - DNA, 25 bp, Saccharomyces pastorianus
taagaacgggcccattgaccactca

SEQ ID NO: 58474 - DNA, 25 bp, Saccharomyces pastorianus
gcaatctccgtcatatgctaacaga

SEQ ID NO: 58475 - DNA, 25 bp, Saccharomyces pastorianus
gaaatttacaaaccaacgcctcaca

SEQ ID NO: 58476 - DNA, 25 bp, Saccharomyces pastorianus
gcatcagagcgggaactcgccaatt

SEQ ID NO: 58477 - DNA, 25 bp, Saccharomyces pastorianus
agcacaattgcttcctctgagaaac

SEQ ID NO: 58478 - DNA, 25 bp, Saccharomyces pastorianus
ctggccgcccattggtcaatataag

SEQ ID NO: 58479 - DNA, 25 bp, Saccharomyces pastorianus
gaatccgttatacccatcacagcaa

SEQ ID NO: 58480 - DNA, 25 bp, Saccharomyces pastorianus
cggattttcacagtttatgccacct

SEQ ID NO: 58481 - DNA, 25 bp, Saccharomyces pastorianus
gccgctctaatcctcctataaagat

SEQ ID NO: 58482 - DNA, 25 bp, Saccharomyces pastorianus
tgaccactcaacctatgcatcagag

SEQ ID NO: 58483 - DNA, 25 bp, Saccharomyces pastorianus
ttctgcgcaggctcacaggagatac

SEQ ID NO: 58484 - DNA, 25 bp, Saccharomyces pastorianus
agaggcttacacagggtcgtttctt

SEQ ID NO: 58485 - DNA, 25 bp, Saccharomyces pastorianus
tatggtgtcctgttaggtacccaat

SEQ ID NO: 58486 - DNA, 25 bp, Saccharomyces pastorianus
gattgttactttactttctgcgcag

SEQ ID NO: 58487 - DNA, 25 bp, Saccharomyces pastorianus
aattgcatcaagacccactttcatc

SEQ ID NO: 58488 - DNA, 25 bp, Saccharomyces pastorianus
gtatgccatggaagcgttgttacgc

SEQ ID NO: 58489 - DNA, 25 bp, Saccharomyces pastorianus
gaaaatgttctcgttgtttccacaa

SEQ ID NO: 58490 - DNA, 25 bp, Saccharomyces pastorianus
ccaattggccttatgggatgctaat

SEQ ID NO: 58491 - DNA, 25 bp, Saccharomyces pastorianus
ttcgagttcactgctttacaagagg

SEQ ID NO: 58492 - DNA, 25 bp, Saccharomyces pastorianus
tgatgttaccagtacgggaggcaac

SEQ ID NO: 58493 - DNA, 25 bp, Saccharomyces pastorianus
gtcgtttctttcgagtagaggcgtt

SEQ ID NO: 58494 - DNA, 25 bp, Saccharomyces pastorianus
aaatactctacttcgccatttggta

SEQ ID NO: 58495 - DNA, 25 bp, Saccharomyces pastorianus
gaaatcacggattcgagtctcaaaa

SEQ ID NO: 58496 - DNA, 25 bp, Saccharomyces pastorianus
gacatctgggatgctcaatcaagag

SEQ ID NO: 58497 - DNA, 25 bp, Saccharomyces pastorianus
gatagctttaccactccaatgacat

SEQ ID NO: 58498 - DNA, 25 bp, Saccharomyces pastorianus
ggcaatatgtcttcagaggctctaa

SEQ ID NO: 58499 - DNA, 25 bp, Saccharomyces pastorianus
atagaagcttgacatcgggtctgaa

SEQ ID NO: 58500 - DNA, 25 bp, Saccharomyces pastorianus
gcctgacttatctgctctttatgac

SEQ ID NO: 58501 - DNA, 25 bp, Saccharomyces pastorianus
gaagcggactcttccaacaactttt

SEQ ID NO: 58502 - DNA, 25 bp, Saccharomyces pastorianus
aatcaacacgtgtctatcgtcacct

SEQ ID NO: 58503 - DNA, 25 bp, Saccharomyces pastorianus
gagagtttgaagagctttcccgaaa

SEQ ID NO: 58504 - DNA, 25 bp, Saccharomyces pastorianus
atataccactggctaatgcgcctga

SEQ ID NO: 58505 - DNA, 25 bp, Saccharomyces pastorianus
gcacactgttgcaccaaacttatca

SEQ ID NO: 58506 - DNA, 25 bp, Saccharomyces pastorianus
gaacaagggtcgtatttctagatac

SEQ ID NO: 58507 - DNA, 25 bp, Saccharomyces pastorianus
gaattctacaacactggtaagccaa

SEQ ID NO: 58508 - DNA, 25 bp, Saccharomyces pastorianus
gaagccatggaactttataacaaag

SEQ ID NO: 58509 - DNA, 25 bp, Saccharomyces pastorianus
tgaattagccattcaagaagccatg

SEQ ID NO: 58510 - DNA, 25 bp, Saccharomyces pastorianus
attactctgaggaaccatctaatgt

SEQ ID NO: 58511 - DNA, 25 bp, Saccharomyces pastorianus
agcaagcagcttcaacggttcaaat

SEQ ID NO: 58512 - DNA, 25 bp, Saccharomyces pastorianus
tatggcctctagaattgacaattac

SEQ ID NO: 58513 - DNA, 25 bp, Saccharomyces pastorianus
aatttctcacgcaggttccctaact

SEQ ID NO: 58514 - DNA, 25 bp, Saccharomyces pastorianus
gcaggttccctaactaatttatcta

SEQ ID NO: 58515 - DNA, 25 bp, Saccharomyces pastorianus
ttctaaggcctctgccaagaacaag

SEQ ID NO: 58516 - DNA, 25 bp, Saccharomyces pastorianus
tggtatggctggcatttccccgaac

SEQ ID NO: 58517 - DNA, 25 bp, Saccharomyces pastorianus
gtatggctggcatttccccgaactg

SEQ ID NO: 58518 - DNA, 25 bp, Saccharomyces pastorianus
atggctggcatttccccgaactggc

SEQ ID NO: 58519 - DNA, 25 bp, Saccharomyces pastorianus
agtggtatggctggcatttccccga

SEQ ID NO: 58520 - DNA, 25 bp, Saccharomyces pastorianus
agagtggtatggctggcatttcccc

SEQ ID NO: 58521 - DNA, 25 bp, Saccharomyces pastorianus
gcatttccccgaactggctaaattg

SEQ ID NO: 58522 - DNA, 25 bp, Saccharomyces pastorianus
ggcatttccccgaactggctaaatt

SEQ ID NO: 58523 - DNA, 25 bp, Saccharomyces pastorianus
gttaaagagtggtatggctggcatt

SEQ ID NO: 58524 - DNA, 25 bp, Saccharomyces pastorianus
ctacacttttgccaagttggttctt

SEQ ID NO: 58525 - DNA, 25 bp, Saccharomyces pastorianus
catttccccgaactggctaaattgg

SEQ ID NO: 58526 - DNA, 25 bp, Saccharomyces pastorianus
caactacacttttgccaagttggtt

SEQ ID NO: 58527 - DNA, 25 bp, Saccharomyces pastorianus
gtgccatcgtctttggagatgtgat

SEQ ID NO: 58528 - DNA, 25 bp, Saccharomyces pastorianus
aagagtgccatcgtctttggagatg

SEQ ID NO: 58529 - DNA, 25 bp, Saccharomyces pastorianus
tcgtctttggagatgtgatagtgca

SEQ ID NO: 58530 - DNA, 25 bp, Saccharomyces pastorianus
tgccatcgtctttggagatgtgata

SEQ ID NO: 58531 - DNA, 25 bp, Saccharomyces pastorianus
atcgtctttggagatgtgatagtgc

SEQ ID NO: 58532 - DNA, 25 bp, Saccharomyces pastorianus
agtgccatcgtctttggagatgtga

SEQ ID NO: 58533 - DNA, 25 bp, Saccharomyces pastorianus
gtctttggagatgtgatagtgcagc

SEQ ID NO: 58534 - DNA, 25 bp, Saccharomyces pastorianus
gccatcgtctttggagatgtgatag

SEQ ID NO: 58535 - DNA, 25 bp, Saccharomyces pastorianus
agagtgccatcgtctttggagatgt

SEQ ID NO: 58536 - DNA, 25 bp, Saccharomyces pastorianus
gaagagtgccatcgtctttggagat

SEQ ID NO: 58537 - DNA, 25 bp, Saccharomyces pastorianus
tctttggagatgtgatagtgcagcc

SEQ ID NO: 58538 - DNA, 25 bp, Saccharomyces pastorianus
ctctttgaaactgcgatccctgaat

SEQ ID NO: 58539 - DNA, 25 bp, Saccharomyces pastorianus
ttccgggagacttttgcttttgcaa

SEQ ID NO: 58540 - DNA, 25 bp, Saccharomyces pastorianus
aattgccctcgttggaacatttgtt

SEQ ID NO: 58541 - DNA, 25 bp, Saccharomyces pastorianus
ttcgagcacgtatatcggttcgcaa

SEQ ID NO: 58542 - DNA, 25 bp, Saccharomyces pastorianus
cggttcgcaattatttatggctcaa

SEQ ID NO: 58543 - DNA, 25 bp, Saccharomyces pastorianus
tatcccgagcgggtttctctttgaa

SEQ ID NO: 58544 - DNA, 25 bp, Saccharomyces pastorianus
tcattcgtccacagctgtcatggaa

SEQ ID NO: 58545 - DNA, 25 bp, Saccharomyces pastorianus
aagacaggtctcatgacttccggga

SEQ ID NO: 58546 - DNA, 25 bp, Saccharomyces pastorianus
gatatgatttactactccaacgaaa

SEQ ID NO: 58547 - DNA, 25 bp, Saccharomyces pastorianus
gtcacaattggctatcccgagcggg

SEQ ID NO: 58548 - DNA, 25 bp, Saccharomyces pastorianus
agttatgcgtttgggcgaatactac

SEQ ID NO: 58549 - DNA, 25 bp, Saccharomyces pastorianus
ggaaacaatcgcctcaatataaagt

SEQ ID NO: 58550 - DNA, 25 bp, Saccharomyces pastorianus
ttacgggaaacaatcgcctcaatat

SEQ ID NO: 58551 - DNA, 25 bp, Saccharomyces pastorianus
atcctggccttacaagaatacgttc

SEQ ID NO: 58552 - DNA, 25 bp, Saccharomyces pastorianus
aacccgctccatattaagcctctaa

SEQ ID NO: 58553 - DNA, 25 bp, Saccharomyces pastorianus
taacttacgggaaacaatcgcctca

SEQ ID NO: 58554 - DNA, 25 bp, Saccharomyces pastorianus
atataaagtactatcctggccttac

SEQ ID NO: 58555 - DNA, 25 bp, Saccharomyces pastorianus
tttatatcactcaaaccccatcgag

SEQ ID NO: 58556 - DNA, 25 bp, Saccharomyces pastorianus
aagtactatcctggccttacaagaa

SEQ ID NO: 58557 - DNA, 25 bp, Saccharomyces pastorianus
gcatctcttcgtttatatcactcaa

SEQ ID NO: 58558 - DNA, 25 bp, Saccharomyces pastorianus
agctgcgcatctcttcgtttatatc

SEQ ID NO: 58559 - DNA, 25 bp, Saccharomyces pastorianus
catattaagcctctaacttacggga

SEQ ID NO: 58560 - DNA, 25 bp, Saccharomyces pastorianus
tggatgttcagcaagggctctgcct

SEQ ID NO: 58561 - DNA, 25 bp, Saccharomyces pastorianus
gaaccgccgcgagttgatgagcaaa

SEQ ID NO: 58562 - DNA, 25 bp, Saccharomyces pastorianus
tttcgccggcggtaagctgataaga

SEQ ID NO: 58563 - DNA, 25 bp, Saccharomyces pastorianus
agtcgctgaacgagtttctggccac

SEQ ID NO: 58564 - DNA, 25 bp, Saccharomyces pastorianus
agggcatcttcgactggaacttcaa

SEQ ID NO: 58565 - DNA, 25 bp, Saccharomyces pastorianus
agatcatcagcgtcgcggagggcat

SEQ ID NO: 58566 - DNA, 25 bp, Saccharomyces pastorianus
gaacttcaacatcgtcgcggagatc

SEQ ID NO: 58567 - DNA, 25 bp, Saccharomyces pastorianus
gaacttcttcactttcagcgaactg

SEQ ID NO: 58568 - DNA, 25 bp, Saccharomyces pastorianus
ggacctgaagctgctgtactcgaat

SEQ ID NO: 58569 - DNA, 25 bp, Saccharomyces pastorianus
aagtgtgtcacctacgtgtacgagg

SEQ ID NO: 58570 - DNA, 25 bp, Saccharomyces pastorianus
tgctgcagcagttcgtcgacgacat

SEQ ID NO: 58571 - DNA, 25 bp, Saccharomyces pastorianus
gaacaacccattcttgaacagccaa

SEQ ID NO: 58572 - DNA, 25 bp, Saccharomyces pastorianus
tttaccaagtacaagcatcgtgccc

SEQ ID NO: 58573 - DNA, 25 bp, Saccharomyces pastorianus
ccggcgcagacacttttggtaacac

SEQ ID NO: 58574 - DNA, 25 bp, Saccharomyces pastorianus
tcgtgcccgcacaaacaggttatgg

SEQ ID NO: 58575 - DNA, 25 bp, Saccharomyces pastorianus
acagccaatacaccggtttaccaag

SEQ ID NO: 58576 - DNA, 25 bp, Saccharomyces pastorianus
gacttaaacgttttgctggcaactg

SEQ ID NO: 58577 - DNA, 25 bp, Saccharomyces pastorianus
aaaactaccaacaggcttcttcaca

SEQ ID NO: 58578 - DNA, 25 bp, Saccharomyces pastorianus
caaccaccaaatcctggcatgagtt

SEQ ID NO: 58579 - DNA, 25 bp, Saccharomyces pastorianus
caaaactccgctaacgtgaactact

SEQ ID NO: 58580 - DNA, 25 bp, Saccharomyces pastorianus
tgctggcaactggtaccggcgcaga

SEQ ID NO: 58581 - DNA, 25 bp, Saccharomyces pastorianus
acaggcaaccagtccgtatcagata

SEQ ID NO: 58582 - DNA, 25 bp, Saccharomyces pastorianus
agacactcttgatgatttggcgcag

SEQ ID NO: 58583 - DNA, 25 bp, Saccharomyces pastorianus
gaccttgagggagttcagacacgaa

SEQ ID NO: 58584 - DNA, 25 bp, Saccharomyces pastorianus
gaacgagaagcaacccgtacgattc

SEQ ID NO: 58585 - DNA, 25 bp, Saccharomyces pastorianus
agtactggagacacgtggccaagtc

SEQ ID NO: 58586 - DNA, 25 bp, Saccharomyces pastorianus
aaggccaaggaactggtctcgctgc

SEQ ID NO: 58587 - DNA, 25 bp, Saccharomyces pastorianus
tggccaagtcgctgaccgttctgga

SEQ ID NO: 58588 - DNA, 25 bp, Saccharomyces pastorianus
taagactgtgagacccagaccaaga

SEQ ID NO: 58589 - DNA, 25 bp, Saccharomyces pastorianus
agaactgcgttctctggtgcagaga

SEQ ID NO: 58590 - DNA, 25 bp, Saccharomyces pastorianus
gagaaccccgtcgatagacactctt

SEQ ID NO: 58591 - DNA, 25 bp, Saccharomyces pastorianus
ggactatcttgttcgcttcggtagc

SEQ ID NO: 58592 - DNA, 25 bp, Saccharomyces pastorianus
tggcgcagaggtcttacgattccgt

SEQ ID NO: 58593 - DNA, 25 bp, Saccharomyces pastorianus
gcaaaagtgcatctcgacgtcatca

SEQ ID NO: 58594 - DNA, 25 bp, Saccharomyces pastorianus
acacgtcttttattccggctataca

SEQ ID NO: 58595 - DNA, 25 bp, Saccharomyces pastorianus
ccaagattagtagcggctgctccga

SEQ ID NO: 58596 - DNA, 25 bp, Saccharomyces pastorianus
gtgtctgcattgtttattgctgcca

SEQ ID NO: 58597 - DNA, 25 bp, Saccharomyces pastorianus
gggccccatgccatttttaagaagg

SEQ ID NO: 58598 - DNA, 25 bp, Saccharomyces pastorianus
gctgctggtgcttattttttgagta

SEQ ID NO: 58599 - DNA, 25 bp, Saccharomyces pastorianus
tttgagattggttggccgggcccca

SEQ ID NO: 58600 - DNA, 25 bp, Saccharomyces pastorianus
ccggctatacatccgaccaaataat

SEQ ID NO: 58601 - DNA, 25 bp, Saccharomyces pastorianus
aatattccgatcagcgacattaccg

SEQ ID NO: 58602 - DNA, 25 bp, Saccharomyces pastorianus
atctcgacgtcatcattcaatctgg

SEQ ID NO: 58603 - DNA, 25 bp, Saccharomyces pastorianus
gcgacattaccgctgttctcaaatt

SEQ ID NO: 58604 - DNA, 25 bp, Saccharomyces pastorianus
agtacaacctccacggtctactttg

SEQ ID NO: 58605 - DNA, 25 bp, Saccharomyces pastorianus
gaaaatactgatcaagaggccgaaa

SEQ ID NO: 58606 - DNA, 25 bp, Saccharomyces pastorianus
gtttgacgggcgcacagtacaacct

SEQ ID NO: 58607 - DNA, 25 bp, Saccharomyces pastorianus
gaaaactactttaccatgagttcca

SEQ ID NO: 58608 - DNA, 25 bp, Saccharomyces pastorianus
tgacgggcgcacagtacaacctcca

SEQ ID NO: 58609 - DNA, 25 bp, Saccharomyces pastorianus
ctactttgacagatggcagtgacat

SEQ ID NO: 58610 - DNA, 25 bp, Saccharomyces pastorianus
acctccacggtctactttgacagat

SEQ ID NO: 58611 - DNA, 25 bp, Saccharomyces pastorianus
cagatggcagtgacattttgaatga

SEQ ID NO: 58612 - DNA, 25 bp, Saccharomyces pastorianus
cacggtctactttgacagatggcag

SEQ ID NO: 58613 - DNA, 25 bp, Saccharomyces pastorianus
gaggccgaaaactactttaccatga

SEQ ID NO: 58614 - DNA, 25 bp, Saccharomyces pastorianus
ctactttaccatgagttccaaaaga

SEQ ID NO: 58615 - DNA, 25 bp, Saccharomyces pastorianus
atggcatgaaaattgaccaaattgc

SEQ ID NO: 58616 - DNA, 25 bp, Saccharomyces pastorianus
aaaggaattagtactatatgagcaa

SEQ ID NO: 58617 - DNA, 25 bp, Saccharomyces pastorianus
agttgtctaatgaaatcgggagatt

SEQ ID NO: 58618 - DNA, 25 bp, Saccharomyces pastorianus
aagactaacttgagactggaacaat

SEQ ID NO: 58619 - DNA, 25 bp, Saccharomyces pastorianus
aaaagttgtctaatgaaatcgggag

SEQ ID NO: 58620 - DNA, 25 bp, Saccharomyces pastorianus
gaattagtactatatgagcaaaaca

SEQ ID NO: 58621 - DNA, 25 bp, Saccharomyces pastorianus
aaatcgggagattgagagaacgttg

SEQ ID NO: 58622 - DNA, 25 bp, Saccharomyces pastorianus
tatgagcaaaacaaattcaaggaat

SEQ ID NO: 58623 - DNA, 25 bp, Saccharomyces pastorianus
ttgggatagtttagtagaaagcgcc

SEQ ID NO: 58624 - DNA, 25 bp, Saccharomyces pastorianus
gattgagagaacgttgggatagttt

SEQ ID NO: 58625 - DNA, 25 bp, Saccharomyces pastorianus
gcatgaaaattgaccaaattgcaaa

SEQ ID NO: 58626 - DNA, 25 bp, Saccharomyces pastorianus
aaacagtatcggaatgctcaacaat

SEQ ID NO: 58627 - DNA, 25 bp, Saccharomyces pastorianus
gtgggcaatactagaaactgggata

SEQ ID NO: 58628 - DNA, 25 bp, Saccharomyces pastorianus
cttatcgggtctgttatcttgaata

SEQ ID NO: 58629 - DNA, 25 bp, Saccharomyces pastorianus
acttttgatcgataaacggtcacca

SEQ ID NO: 58630 - DNA, 25 bp, Saccharomyces pastorianus
aacggtcaccagaagaaaacagtat

SEQ ID NO: 58631 - DNA, 25 bp, Saccharomyces pastorianus
aaacgatcctattttgatttcaatt

SEQ ID NO: 58632 - DNA, 25 bp, Saccharomyces pastorianus
tcattgaaccccctaaacgatccta

SEQ ID NO: 58633 - DNA, 25 bp, Saccharomyces pastorianus
tttgaatcgcttgcaatttaatttg

SEQ ID NO: 58634 - DNA, 25 bp, Saccharomyces pastorianus
tatgcttatcgggtctgttatcttg

SEQ ID NO: 58635 - DNA, 25 bp, Saccharomyces pastorianus
gaatgctcaacaataatatgcttat

SEQ ID NO: 58636 - DNA, 25 bp, Saccharomyces pastorianus
cttcgataaatggagtgggcaatac

SEQ ID NO: 58637 - DNA, 25 bp, Saccharomyces pastorianus
accgatatggcgcttagggacctcg

SEQ ID NO: 58638 - DNA, 25 bp, Saccharomyces pastorianus
gggacctcgaaatggcaaccacttt

SEQ ID NO: 58639 - DNA, 25 bp, Saccharomyces pastorianus
ggcaaccactttccaaccgaaatga

SEQ ID NO: 58640 - DNA, 25 bp, Saccharomyces pastorianus
atggcaaccactttccaaccgaaat

SEQ ID NO: 58641 - DNA, 25 bp, Saccharomyces pastorianus
acctcgaaatggcaaccactttcca

SEQ ID NO: 58642 - DNA, 25 bp, Saccharomyces pastorianus
cgatatggcgcttagggacctcgaa

SEQ ID NO: 58643 - DNA, 25 bp, Saccharomyces pastorianus
tggcgcttagggacctcgaaatggc

SEQ ID NO: 58644 - DNA, 25 bp, Saccharomyces pastorianus
atatggcgcttagggacctcgaaat

SEQ ID NO: 58645 - DNA, 25 bp, Saccharomyces pastorianus
gcttagggacctcgaaatggcaacc

SEQ ID NO: 58646 - DNA, 25 bp, Saccharomyces pastorianus
gaaatggcaaccactttccaaccga

SEQ ID NO: 58647 - DNA, 25 bp, Saccharomyces pastorianus
tagggacctcgaaatggcaaccact

SEQ ID NO: 58648 - DNA, 25 bp, Saccharomyces pastorianus
caatgactgtggtgtgctgccagaa

SEQ ID NO: 58649 - DNA, 25 bp, Saccharomyces pastorianus
gacttgtccgcttgattgaaggcca

SEQ ID NO: 58650 - DNA, 25 bp, Saccharomyces pastorianus
atcagctgaaagtttccgtaccttt

SEQ ID NO: 58651 - DNA, 25 bp, Saccharomyces pastorianus
ttacttccacgtcaatgacaccgat

SEQ ID NO: 58652 - DNA, 25 bp, Saccharomyces pastorianus
gtaccgtcgtggactggcttacttc

SEQ ID NO: 58653 - DNA, 25 bp, Saccharomyces pastorianus
agattaccaggtaccggcggacgcg

SEQ ID NO: 58654 - DNA, 25 bp, Saccharomyces pastorianus
ggacttgactaaattcgataccgtt

SEQ ID NO: 58655 - DNA, 25 bp, Saccharomyces pastorianus
aaagccaaggctctgtaccgtcgtg

SEQ ID NO: 58656 - DNA, 25 bp, Saccharomyces pastorianus
agcaagtactagtggctgcatcaga

SEQ ID NO: 58657 - DNA, 25 bp, Saccharomyces pastorianus
ctgcatcagaggtgttatacgccga

SEQ ID NO: 58658 - DNA, 25 bp, Saccharomyces pastorianus
aaaactattcagtggcctttgagaa

SEQ ID NO: 58659 - DNA, 25 bp, Saccharomyces pastorianus
gaagtgctgggaaaacaacggcaac

SEQ ID NO: 58660 - DNA, 25 bp, Saccharomyces pastorianus
tgtgggatgcgaggatttctaagac

SEQ ID NO: 58661 - DNA, 25 bp, Saccharomyces pastorianus
acaagcaggcgctggaggagtacaa

SEQ ID NO: 58662 - DNA, 25 bp, Saccharomyces pastorianus
ctggcgactggagacagtgcttcaa

SEQ ID NO: 58663 - DNA, 25 bp, Saccharomyces pastorianus
aagcacggtcgacatggacaactcg

SEQ ID NO: 58664 - DNA, 25 bp, Saccharomyces pastorianus
gagagcgtgtaagcacggtcgacat

SEQ ID NO: 58665 - DNA, 25 bp, Saccharomyces pastorianus
acagctgtgccatgctgaaactggc

SEQ ID NO: 58666 - DNA, 25 bp, Saccharomyces pastorianus
gaggatttctaagaccggatgctac

SEQ ID NO: 58667 - DNA, 25 bp, Saccharomyces pastorianus
aacaacggcaacagagagcgtgtaa

SEQ ID NO: 58668 - DNA, 25 bp, Saccharomyces pastorianus
catgctgaaactggcgactggagac

SEQ ID NO: 58669 - DNA, 25 bp, Saccharomyces pastorianus
gttggcgagaattcagagtattaca

SEQ ID NO: 58670 - DNA, 25 bp, Saccharomyces pastorianus
tctgcgtttttgcttcctctcccct

SEQ ID NO: 58671 - DNA, 25 bp, Saccharomyces pastorianus
tcttttccttcttttttcaacatga

SEQ ID NO: 58672 - DNA, 25 bp, Saccharomyces pastorianus
tcttctcatccatatttttcatatt

SEQ ID NO: 58673 - DNA, 25 bp, Saccharomyces pastorianus
ttttttcaacatgacaatgtccgaa

SEQ ID NO: 58674 - DNA, 25 bp, Saccharomyces pastorianus
ctcatccatatttttcatatttgtt

SEQ ID NO: 58675 - DNA, 25 bp, Saccharomyces pastorianus
tttcaacatgacaatgtccgaaaaa

SEQ ID NO: 58676 - DNA, 25 bp, Saccharomyces pastorianus
tccttcttttttcaacatgacaatg

SEQ ID NO: 58677 - DNA, 25 bp, Saccharomyces pastorianus
ttttccttcttttttcaacatgaca

SEQ ID NO: 58678 - DNA, 25 bp, Saccharomyces pastorianus
tcttttttcaacatgacaatgtccg

SEQ ID NO: 58679 - DNA, 25 bp, Saccharomyces pastorianus
cctcttctcatccatatttttcata

SEQ ID NO: 58680 - DNA, 25 bp, Saccharomyces pastorianus
tttccttcttttttcaacatgacaa

SEQ ID NO: 58681 - DNA, 25 bp, Saccharomyces pastorianus
aaacgtcttgcctaagtcggcaaag

SEQ ID NO: 58682 - DNA, 25 bp, Saccharomyces pastorianus
aaatgttcgacaagcacacaacccg

SEQ ID NO: 58683 - DNA, 25 bp, Saccharomyces pastorianus
ggacgaagcaaatgtgagcgttcaa

SEQ ID NO: 58684 - DNA, 25 bp, Saccharomyces pastorianus
tccctgcatactcggacgaagcaaa

SEQ ID NO: 58685 - DNA, 25 bp, Saccharomyces pastorianus
gacattgtccgaaatatcatccaag

SEQ ID NO: 58686 - DNA, 25 bp, Saccharomyces pastorianus
gcaaagcatgccgttcaacaagagg

SEQ ID NO: 58687 - DNA, 25 bp, Saccharomyces pastorianus
agcgcgaatcaaccgctacagaaaa

SEQ ID NO: 58688 - DNA, 25 bp, Saccharomyces pastorianus
gagagtgttacagacccgctatgct

SEQ ID NO: 58689 - DNA, 25 bp, Saccharomyces pastorianus
aaacaaagcagtgggattcatcgaa

SEQ ID NO: 58690 - DNA, 25 bp, Saccharomyces pastorianus
gacggaattagaaacacatttcgca

SEQ ID NO: 58691 - DNA, 25 bp, Saccharomyces pastorianus
aaaggtggagcatagcgcgaatcaa

SEQ ID NO: 58692 - DNA, 25 bp, Saccharomyces pastorianus
tgctcatcggcacaggaagttttgt

SEQ ID NO: 58693 - DNA, 25 bp, Saccharomyces pastorianus
cattggcctcattactcaacgattt

SEQ ID NO: 58694 - DNA, 25 bp, Saccharomyces pastorianus
ttgggacatacgaacgctatacttg

SEQ ID NO: 58695 - DNA, 25 bp, Saccharomyces pastorianus
gctatacttgagattttggctacca

SEQ ID NO: 58696 - DNA, 25 bp, Saccharomyces pastorianus
tataatcggttgtcctttatcgacc

SEQ ID NO: 58697 - DNA, 25 bp, Saccharomyces pastorianus
gaatagtcccttgaattacccaaag

SEQ ID NO: 58698 - DNA, 25 bp, Saccharomyces pastorianus
ttgcactaactgactttaacgacga

SEQ ID NO: 58699 - DNA, 25 bp, Saccharomyces pastorianus
ttcctttttggatttcagcttcgat

SEQ ID NO: 58700 - DNA, 25 bp, Saccharomyces pastorianus
agttttgtacttcattggcctcatt

SEQ ID NO: 58701 - DNA, 25 bp, Saccharomyces pastorianus
gtagtggtcaaacctgcatggcaga

SEQ ID NO: 58702 - DNA, 25 bp, Saccharomyces pastorianus
aaagtgcttatcgaaccataggccg

SEQ ID NO: 58703 - DNA, 25 bp, Saccharomyces pastorianus
caatcgtcgcttgggtttgtggtat

SEQ ID NO: 58704 - DNA, 25 bp, Saccharomyces pastorianus
gagacaatactctatcaccaacgcc

SEQ ID NO: 58705 - DNA, 25 bp, Saccharomyces pastorianus
gcctgaattggccaagactagctct

SEQ ID NO: 58706 - DNA, 25 bp, Saccharomyces pastorianus
ggattactacggtgcattcactgac

SEQ ID NO: 58707 - DNA, 25 bp, Saccharomyces pastorianus
tatcaccaacgcctttattctaaag

SEQ ID NO: 58708 - DNA, 25 bp, Saccharomyces pastorianus
ttccctatcaagatcgttgtcaaac

SEQ ID NO: 58709 - DNA, 25 bp, Saccharomyces pastorianus
gttaattggagagcaatcgtcgctt

SEQ ID NO: 58710 - DNA, 25 bp, Saccharomyces pastorianus
actacggtgcattcactgacgaaga

SEQ ID NO: 58711 - DNA, 25 bp, Saccharomyces pastorianus
gatccgacgaagaagtgcctgaatt

SEQ ID NO: 58712 - DNA, 25 bp, Saccharomyces pastorianus
tggtattgttaacttcttctacggt

SEQ ID NO: 58713 - DNA, 25 bp, Saccharomyces pastorianus
gacctgacggatccgacgaagaagt

SEQ ID NO: 58714 - DNA, 25 bp, Saccharomyces pastorianus
atctgaggcttcactatcccgataa

SEQ ID NO: 58715 - DNA, 25 bp, Saccharomyces pastorianus
gaatagaccccaatggtgccatctt

SEQ ID NO: 58716 - DNA, 25 bp, Saccharomyces pastorianus
gctactgctttgtggcatactcaat

SEQ ID NO: 58717 - DNA, 25 bp, Saccharomyces pastorianus
caactttgtcaaatcctgtgctggt

SEQ ID NO: 58718 - DNA, 25 bp, Saccharomyces pastorianus
cacctttaatgaaacttccacctca

SEQ ID NO: 58719 - DNA, 25 bp, Saccharomyces pastorianus
cccagatgggcatttctttcacgca

SEQ ID NO: 58720 - DNA, 25 bp, Saccharomyces pastorianus
atcatggcattcttccttatctgag

SEQ ID NO: 58721 - DNA, 25 bp, Saccharomyces pastorianus
aatgctttactacctatcgtgatcg

SEQ ID NO: 58722 - DNA, 25 bp, Saccharomyces pastorianus
tggaggtgcggaatcatcaaactac

SEQ ID NO: 58723 - DNA, 25 bp, Saccharomyces pastorianus
tggttacattctaggccaggaccct

SEQ ID NO: 58724 - DNA, 25 bp, Saccharomyces pastorianus
gaagatgccacggtgcatttccaaa

SEQ ID NO: 58725 - DNA, 25 bp, Saccharomyces pastorianus
ggacctggcctcagggtatttttat

SEQ ID NO: 58726 - DNA, 25 bp, Saccharomyces pastorianus
catgttggaacttcctgttgtgttc

SEQ ID NO: 58727 - DNA, 25 bp, Saccharomyces pastorianus
ctaaatctagagttccccatgttgg

SEQ ID NO: 58728 - DNA, 25 bp, Saccharomyces pastorianus
accgcgcatgagaagggttccatat

SEQ ID NO: 58729 - DNA, 25 bp, Saccharomyces pastorianus
gggctgagcaccgacttacgagaac

SEQ ID NO: 58730 - DNA, 25 bp, Saccharomyces pastorianus
ggagctgttaggctcaacattcaaa

SEQ ID NO: 58731 - DNA, 25 bp, Saccharomyces pastorianus
ctctgaaattttacgaccctgacca

SEQ ID NO: 58732 - DNA, 25 bp, Saccharomyces pastorianus
aagaacaatcctgggctgagcaccg

SEQ ID NO: 58733 - DNA, 25 bp, Saccharomyces pastorianus
ctttcggttagatcatacgctgtaa

SEQ ID NO: 58734 - DNA, 25 bp, Saccharomyces pastorianus
caggcacgaggttaaccgcgcatga

SEQ ID NO: 58735 - DNA, 25 bp, Saccharomyces pastorianus
taagatcatcaactatcctccaggc

SEQ ID NO: 58736 - DNA, 25 bp, Saccharomyces pastorianus
ggtagtttaattggcttcccattag

SEQ ID NO: 58737 - DNA, 25 bp, Saccharomyces pastorianus
gagataattctctggttagctccat

SEQ ID NO: 58738 - DNA, 25 bp, Saccharomyces pastorianus
gatcatttgcctcattcgacaggga

SEQ ID NO: 58739 - DNA, 25 bp, Saccharomyces pastorianus
ggttagctccatcagcggcgaagaa

SEQ ID NO: 58740 - DNA, 25 bp, Saccharomyces pastorianus
ggattacagttaccacagccgattt

SEQ ID NO: 58741 - DNA, 25 bp, Saccharomyces pastorianus
actctacaatccacccatttttaat

SEQ ID NO: 58742 - DNA, 25 bp, Saccharomyces pastorianus
gaactacttgcctctatcgcaatat

SEQ ID NO: 58743 - DNA, 25 bp, Saccharomyces pastorianus
gattgctattgttccagttgaccat

SEQ ID NO: 58744 - DNA, 25 bp, Saccharomyces pastorianus
gttggcgtattttatcattggattc

SEQ ID NO: 58745 - DNA, 25 bp, Saccharomyces pastorianus
agaatcttatgcttacccttacgct

SEQ ID NO: 58746 - DNA, 25 bp, Saccharomyces pastorianus
ctttgcgacagatcatttgcctcat

SEQ ID NO: 58747 - DNA, 25 bp, Saccharomyces pastorianus
caacacctaccgcatttgtgacaat

SEQ ID NO: 58748 - DNA, 25 bp, Saccharomyces pastorianus
gttattccagtgtcatacctagcta

SEQ ID NO: 58749 - DNA, 25 bp, Saccharomyces pastorianus
caagctgtgttagaccctagggtac

SEQ ID NO: 58750 - DNA, 25 bp, Saccharomyces pastorianus
ggacgatggtgtactatactctcaa

SEQ ID NO: 58751 - DNA, 25 bp, Saccharomyces pastorianus
gccaacatcgtgaccggtttagtac

SEQ ID NO: 58752 - DNA, 25 bp, Saccharomyces pastorianus
taagtgggaccacgtttgcctttct

SEQ ID NO: 58753 - DNA, 25 bp, Saccharomyces pastorianus
gaaaggaacactactctgcaacacc

SEQ ID NO: 58754 - DNA, 25 bp, Saccharomyces pastorianus
gactctgtagctaacgcccagatgg

SEQ ID NO: 58755 - DNA, 25 bp, Saccharomyces pastorianus
gcacctgcgcctcatgatattaagt

SEQ ID NO: 58756 - DNA, 25 bp, Saccharomyces pastorianus
gaaagaacatcaatgggccgccaac

SEQ ID NO: 58757 - DNA, 25 bp, Saccharomyces pastorianus
aaggaacaaccccatcaaacgatca

SEQ ID NO: 58758 - DNA, 25 bp, Saccharomyces pastorianus
ttgtgaacttggatcctgctgcaga

SEQ ID NO: 58759 - DNA, 25 bp, Saccharomyces pastorianus
tatcgcacatgcaaaccataggacg

SEQ ID NO: 58760 - DNA, 25 bp, Saccharomyces pastorianus
gttttacccaacatagtacgtcatt

SEQ ID NO: 58761 - DNA, 25 bp, Saccharomyces pastorianus
gctgcagaggccaccaagtacgaat

SEQ ID NO: 58762 - DNA, 25 bp, Saccharomyces pastorianus
ttacacacatatccctgttttaccc

SEQ ID NO: 58763 - DNA, 25 bp, Saccharomyces pastorianus
cggtcagattgaactttacacacat

SEQ ID NO: 58764 - DNA, 25 bp, Saccharomyces pastorianus
aattctttagtggtgcactgtccgc

SEQ ID NO: 58765 - DNA, 25 bp, Saccharomyces pastorianus
gatgatattactagaactgccccac

SEQ ID NO: 58766 - DNA, 25 bp, Saccharomyces pastorianus
agaactgccccacatcaatgtgttg

SEQ ID NO: 58767 - DNA, 25 bp, Saccharomyces pastorianus
agtacgtcatttaacccaacaattg

SEQ ID NO: 58768 - DNA, 25 bp, Saccharomyces pastorianus
tgtccgccatgtcggcgatgatatt

SEQ ID NO: 58769 - DNA, 25 bp, Saccharomyces pastorianus
gatgaacccacctcaatcgaagtgt

SEQ ID NO: 58770 - DNA, 25 bp, Saccharomyces pastorianus
gtgtcccgtggaccataggaacttc

SEQ ID NO: 58771 - DNA, 25 bp, Saccharomyces pastorianus
ctcattctcactctcatcaaaggat

SEQ ID NO: 58772 - DNA, 25 bp, Saccharomyces pastorianus
gcatgaaaaacaccgctttgccatc

SEQ ID NO: 58773 - DNA, 25 bp, Saccharomyces pastorianus
tcctgtccagaagagatgtcccgtt

SEQ ID NO: 58774 - DNA, 25 bp, Saccharomyces pastorianus
acgtgtcatcgcgttgttcatcgaa

SEQ ID NO: 58775 - DNA, 25 bp, Saccharomyces pastorianus
aacgagacccgtgattgaccacaac

SEQ ID NO: 58776 - DNA, 25 bp, Saccharomyces pastorianus
aaatgttgcctcctaaacgtgtcat

SEQ ID NO: 58777 - DNA, 25 bp, Saccharomyces pastorianus
gaaggacccttctgccgatatggca

SEQ ID NO: 58778 - DNA, 25 bp, Saccharomyces pastorianus
aatttttcaagcacctataccctgc

SEQ ID NO: 58779 - DNA, 25 bp, Saccharomyces pastorianus
cgatatggcaaatcttcctcctaac

SEQ ID NO: 58780 - DNA, 25 bp, Saccharomyces pastorianus
ggagagcataccctgatcaattcaa

SEQ ID NO: 58781 - DNA, 25 bp, Saccharomyces pastorianus
tgcggacgattatttctctttgggc

SEQ ID NO: 58782 - DNA, 25 bp, Saccharomyces pastorianus
gtcgcaaggccgctaagtgtaccag

SEQ ID NO: 58783 - DNA, 25 bp, Saccharomyces pastorianus
aagtgtaccaggctcgccaagagat

SEQ ID NO: 58784 - DNA, 25 bp, Saccharomyces pastorianus
gcgtgaatcctgcagccgatgatga

SEQ ID NO: 58785 - DNA, 25 bp, Saccharomyces pastorianus
gtagatcgtcgctttaaagggccag

SEQ ID NO: 58786 - DNA, 25 bp, Saccharomyces pastorianus
gactatctgacttgttggactggaa

SEQ ID NO: 58787 - DNA, 25 bp, Saccharomyces pastorianus
tgggtgttccttctatcacaacgaa

SEQ ID NO: 58788 - DNA, 25 bp, Saccharomyces pastorianus
gactcctggtgatttagggacctta

SEQ ID NO: 58789 - DNA, 25 bp, Saccharomyces pastorianus
gatacaccccagcagaatgtaccgt

SEQ ID NO: 58790 - DNA, 25 bp, Saccharomyces pastorianus
cacaacgaacgtctctgggtttggg

SEQ ID NO: 58791 - DNA, 25 bp, Saccharomyces pastorianus
caataccttgtacttctttatcgct

SEQ ID NO: 58792 - DNA, 25 bp, Saccharomyces pastorianus
tagttacgattttcactacccacgc

SEQ ID NO: 58793 - DNA, 25 bp, Saccharomyces pastorianus
cagatgggatcttgcctaacgggct

SEQ ID NO: 58794 - DNA, 25 bp, Saccharomyces pastorianus
gattttgttagaggccactttcacg

SEQ ID NO: 58795 - DNA, 25 bp, Saccharomyces pastorianus
attccaagcattccatgagttccag

SEQ ID NO: 58796 - DNA, 25 bp, Saccharomyces pastorianus
gagttccagaatttgcatgctttga

SEQ ID NO: 58797 - DNA, 25 bp, Saccharomyces pastorianus
gtttattgtcatgcctgccaagaac

SEQ ID NO: 58798 - DNA, 25 bp, Saccharomyces pastorianus
atgtgcctctggtagtttcgatttt

SEQ ID NO: 58799 - DNA, 25 bp, Saccharomyces pastorianus
ggctgctttgatttcgacttggaca

SEQ ID NO: 58800 - DNA, 25 bp, Saccharomyces pastorianus
gaagctctagctcgtttaaactata

SEQ ID NO: 58801 - DNA, 25 bp, Saccharomyces pastorianus
aaaccgttgacgtcgatcatgaagc

SEQ ID NO: 58802 - DNA, 25 bp, Saccharomyces pastorianus
gccgtcattagagttggtggttcat

SEQ ID NO: 58803 - DNA, 25 bp, Saccharomyces pastorianus
ttatctggtggtgttgccgtcatta

SEQ ID NO: 58804 - DNA, 25 bp, Saccharomyces pastorianus
gctatcgttgatgcaccagaaccac

SEQ ID NO: 58805 - DNA, 25 bp, Saccharomyces pastorianus
gttacgacgccgctaagtctcaata

SEQ ID NO: 58806 - DNA, 25 bp, Saccharomyces pastorianus
atatcaccaccacaaactcttatga

SEQ ID NO: 58807 - DNA, 25 bp, Saccharomyces pastorianus
aagagttccatcgatatcaccacca

SEQ ID NO: 58808 - DNA, 25 bp, Saccharomyces pastorianus
aaaggcctctagagtcttggatgaa

SEQ ID NO: 58809 - DNA, 25 bp, Saccharomyces pastorianus
ggccattacaagacctgctaagcaa

SEQ ID NO: 58810 - DNA, 25 bp, Saccharomyces pastorianus
gaacgtttggccaaattatctggtg

SEQ ID NO: 58811 - DNA, 25 bp, Saccharomyces pastorianus
tggctaccactgaagttgctatcgt

SEQ ID NO: 58812 - DNA, 25 bp, Saccharomyces pastorianus
ggtgtcgcctcattattggctacca

SEQ ID NO: 58813 - DNA, 25 bp, Saccharomyces pastorianus
agatggtgttactgtggcaaaatcc

SEQ ID NO: 58814 - DNA, 25 bp, Saccharomyces pastorianus
tattgagtttttaaccgcaaataag

SEQ ID NO: 58815 - DNA, 25 bp, Saccharomyces pastorianus
gagactttagccgaagccgttgctg

SEQ ID NO: 58816 - DNA, 25 bp, Saccharomyces pastorianus
gccgtgcttactctactcacaaaga

SEQ ID NO: 58817 - DNA, 25 bp, Saccharomyces pastorianus
tttattacgccgtgcttactctact

SEQ ID NO: 58818 - DNA, 25 bp, Saccharomyces pastorianus
tgtggagactttagccgaagccgtt

SEQ ID NO: 58819 - DNA, 25 bp, Saccharomyces pastorianus
aagaacgtcgctgcaggctgtaacc

SEQ ID NO: 58820 - DNA, 25 bp, Saccharomyces pastorianus
ggtagaaatgtcttgattgaacaac

SEQ ID NO: 58821 - DNA, 25 bp, Saccharomyces pastorianus
gaagagcctcgcttttaaagggtgt

SEQ ID NO: 58822 - DNA, 25 bp, Saccharomyces pastorianus
gaatctgtaaagaacgtcgctgcag

SEQ ID NO: 58823 - DNA, 25 bp, Saccharomyces pastorianus
tgcaggctgtaacccaatggacttg

SEQ ID NO: 58824 - DNA, 25 bp, Saccharomyces pastorianus
tttcctttgtaacctttacaatgtg

SEQ ID NO: 58825 - DNA, 25 bp, Saccharomyces pastorianus
tcctttgtaacctttacaatgtgga

SEQ ID NO: 58826 - DNA, 25 bp, Saccharomyces pastorianus
cctttacaatgtggaagtcatgccg

SEQ ID NO: 58827 - DNA, 25 bp, Saccharomyces pastorianus
acctttacaatgtggaagtcatgcc

SEQ ID NO: 58828 - DNA, 25 bp, Saccharomyces pastorianus
tgtaacctttacaatgtggaagtca

SEQ ID NO: 58829 - DNA, 25 bp, Saccharomyces pastorianus
aacctttacaatgtggaagtcatgc

SEQ ID NO: 58830 - DNA, 25 bp, Saccharomyces pastorianus
ttgtaacctttacaatgtggaagtc

SEQ ID NO: 58831 - DNA, 25 bp, Saccharomyces pastorianus
gtaacctttacaatgtggaagtcat

SEQ ID NO: 58832 - DNA, 25 bp, Saccharomyces pastorianus
ttcctttgtaacctttacaatgtgg

SEQ ID NO: 58833 - DNA, 25 bp, Saccharomyces pastorianus
taacctttacaatgtggaagtcatg

SEQ ID NO: 58834 - DNA, 25 bp, Saccharomyces pastorianus
ctttgtaacctttacaatgtggaag

SEQ ID NO: 58835 - DNA, 25 bp, Saccharomyces pastorianus
gattggaccccaatatatccagcaa

SEQ ID NO: 58836 - DNA, 25 bp, Saccharomyces pastorianus
gtgaatcccagtaccgaccaaatta

SEQ ID NO: 58837 - DNA, 25 bp, Saccharomyces pastorianus
caaaggttcccatgtgttacacccg

SEQ ID NO: 58838 - DNA, 25 bp, Saccharomyces pastorianus
tacactctaagatcctcgcatataa

SEQ ID NO: 58839 - DNA, 25 bp, Saccharomyces pastorianus
taagatagtccccatgctggcaaac

SEQ ID NO: 58840 - DNA, 25 bp, Saccharomyces pastorianus
tttcctttggatgagggtgtgccta

SEQ ID NO: 58841 - DNA, 25 bp, Saccharomyces pastorianus
aatttttacggctctgtgaatccca

SEQ ID NO: 58842 - DNA, 25 bp, Saccharomyces pastorianus
gccttcagacggcactattgatatg

SEQ ID NO: 58843 - DNA, 25 bp, Saccharomyces pastorianus
actaaattctttccagcagcactgc

SEQ ID NO: 58844 - DNA, 25 bp, Saccharomyces pastorianus
gttacacccggaagttatacactct

SEQ ID NO: 58845 - DNA, 25 bp, Saccharomyces pastorianus
gaatggccccactattattaggact

SEQ ID NO: 58846 - DNA, 25 bp, Saccharomyces pastorianus
atcggaagtgtatggcctggcattc

SEQ ID NO: 58847 - DNA, 25 bp, Saccharomyces pastorianus
atcgatttgcgttaataccatttta

SEQ ID NO: 58848 - DNA, 25 bp, Saccharomyces pastorianus
caagttcttaacattttctggtaca

SEQ ID NO: 58849 - DNA, 25 bp, Saccharomyces pastorianus
gatttcttttcctcatcgatcttga

SEQ ID NO: 58850 - DNA, 25 bp, Saccharomyces pastorianus
aaggctttcaagcacatttcccaag

SEQ ID NO: 58851 - DNA, 25 bp, Saccharomyces pastorianus
gggttgaaactatctactatcctaa

SEQ ID NO: 58852 - DNA, 25 bp, Saccharomyces pastorianus
acatttcccaagatctctggtgtat

SEQ ID NO: 58853 - DNA, 25 bp, Saccharomyces pastorianus
cctggcattccataaactaacgttt

SEQ ID NO: 58854 - DNA, 25 bp, Saccharomyces pastorianus
ttcagggctgtttctaagtcctacc

SEQ ID NO: 58855 - DNA, 25 bp, Saccharomyces pastorianus
gggtcttgttcgataaagcaactca

SEQ ID NO: 58856 - DNA, 25 bp, Saccharomyces pastorianus
ctactatcctaatcaatccgctttt

SEQ ID NO: 58857 - DNA, 25 bp, Saccharomyces pastorianus
gatgccaaacggaagcctcgataat

SEQ ID NO: 58858 - DNA, 25 bp, Saccharomyces pastorianus
taagtcgtgtactttctgcaggaaa

SEQ ID NO: 58859 - DNA, 25 bp, Saccharomyces pastorianus
gaggagttcaactatcccgtgacta

SEQ ID NO: 58860 - DNA, 25 bp, Saccharomyces pastorianus
gataccggtgatgaatcgatgccaa

SEQ ID NO: 58861 - DNA, 25 bp, Saccharomyces pastorianus
tatgggtgcatcgtttggtactgaa

SEQ ID NO: 58862 - DNA, 25 bp, Saccharomyces pastorianus
ctgtattgttcagtcaggtgcccaa

SEQ ID NO: 58863 - DNA, 25 bp, Saccharomyces pastorianus
gctcaatgtacgtatttggcccgac

SEQ ID NO: 58864 - DNA, 25 bp, Saccharomyces pastorianus
gaagggtcctactccggtgacaaga

SEQ ID NO: 58865 - DNA, 25 bp, Saccharomyces pastorianus
ttggcccgacttcttggaaaacgct

SEQ ID NO: 58866 - DNA, 25 bp, Saccharomyces pastorianus
gataatccgctaaggtttctccgta

SEQ ID NO: 58867 - DNA, 25 bp, Saccharomyces pastorianus
gaaaacgctgtctttgttcgagcca

SEQ ID NO: 58868 - DNA, 25 bp, Saccharomyces pastorianus
agaacttgaagacagctcgagcgac

SEQ ID NO: 58869 - DNA, 25 bp, Saccharomyces pastorianus
gatggcaccttacgtttaacagcac

SEQ ID NO: 58870 - DNA, 25 bp, Saccharomyces pastorianus
agtgatgaattcagagcctccttaa

SEQ ID NO: 58871 - DNA, 25 bp, Saccharomyces pastorianus
gccccaagagaacaccatggctgtt

SEQ ID NO: 58872 - DNA, 25 bp, Saccharomyces pastorianus
aggcgttagccgactcagatatttt

SEQ ID NO: 58873 - DNA, 25 bp, Saccharomyces pastorianus
ggctgttatgatacgctcatctcca

SEQ ID NO: 58874 - DNA, 25 bp, Saccharomyces pastorianus
ttgtttttcaaagtcagcatcgcca

SEQ ID NO: 58875 - DNA, 25 bp, Saccharomyces pastorianus
ggaatgactctactgataccttgat

SEQ ID NO: 58876 - DNA, 25 bp, Saccharomyces pastorianus
ttttcgcctgtggataatatgcccc

SEQ ID NO: 58877 - DNA, 25 bp, Saccharomyces pastorianus
gaatcaacttctccttcacaattat

SEQ ID NO: 58878 - DNA, 25 bp, Saccharomyces pastorianus
gaaagaaagcataccgccccaagag

SEQ ID NO: 58879 - DNA, 25 bp, Saccharomyces pastorianus
gaaaatacctgttattatctcatta

SEQ ID NO: 58880 - DNA, 25 bp, Saccharomyces pastorianus
agcctttgatagacattgcaatatg

SEQ ID NO: 58881 - DNA, 25 bp, Saccharomyces pastorianus
aatagcaagggtaaaagcctttgat

SEQ ID NO: 58882 - DNA, 25 bp, Saccharomyces pastorianus
atgtccctcataaatgatgccatga

SEQ ID NO: 58883 - DNA, 25 bp, Saccharomyces pastorianus
gcaagttgtttttaagaggtgattc

SEQ ID NO: 58884 - DNA, 25 bp, Saccharomyces pastorianus
gggcaaaagtgtaataaatcgtgaa

SEQ ID NO: 58885 - DNA, 25 bp, Saccharomyces pastorianus
atacctgttattatctcattaagaa

SEQ ID NO: 58886 - DNA, 25 bp, Saccharomyces pastorianus
gtccctcataaatgatgccatgata

SEQ ID NO: 58887 - DNA, 25 bp, Saccharomyces pastorianus
gatgccatgataacgaaaatacctg

SEQ ID NO: 58888 - DNA, 25 bp, Saccharomyces pastorianus
gacattgcaatatggttctggaaaa

SEQ ID NO: 58889 - DNA, 25 bp, Saccharomyces pastorianus
gttctggaaaatgtcaaggagcttt

SEQ ID NO: 58890 - DNA, 25 bp, Saccharomyces pastorianus
aaactcgcaatgtctcatcttcagg

SEQ ID NO: 58891 - DNA, 25 bp, Saccharomyces pastorianus
taccctcaagtttcgcatatgttat

SEQ ID NO: 58892 - DNA, 25 bp, Saccharomyces pastorianus
acaagcggtcaaggcgcatcgaaga

SEQ ID NO: 58893 - DNA, 25 bp, Saccharomyces pastorianus
atcattccttcaattccaacatcaa

SEQ ID NO: 58894 - DNA, 25 bp, Saccharomyces pastorianus
ttatcacatcaacaagcaccacaac

SEQ ID NO: 58895 - DNA, 25 bp, Saccharomyces pastorianus
ataactctgttttggatgctttgaa

SEQ ID NO: 58896 - DNA, 25 bp, Saccharomyces pastorianus
gcgaactttaatccaccgcaaatga

SEQ ID NO: 58897 - DNA, 25 bp, Saccharomyces pastorianus
catcttcaggtgatatactcttcag

SEQ ID NO: 58898 - DNA, 25 bp, Saccharomyces pastorianus
tactcttcagtaatggtgcccatga

SEQ ID NO: 58899 - DNA, 25 bp, Saccharomyces pastorianus
ggatcattcaatgactgctaatgtc

SEQ ID NO: 58900 - DNA, 25 bp, Saccharomyces pastorianus
taatggtgcccatgatatgatcaat

SEQ ID NO: 58901 - DNA, 25 bp, Saccharomyces pastorianus
gttcaccccagaaatggaggcacaa

SEQ ID NO: 58902 - DNA, 25 bp, Saccharomyces pastorianus
cacagcgtgtagaagatggatcagc

SEQ ID NO: 58903 - DNA, 25 bp, Saccharomyces pastorianus
gatcaacaagtgcaactccaaagtg

SEQ ID NO: 58904 - DNA, 25 bp, Saccharomyces pastorianus
agaaaagttcctccacggtggcaga

SEQ ID NO: 58905 - DNA, 25 bp, Saccharomyces pastorianus
aactccaaagtgcagttgcgacacg

SEQ ID NO: 58906 - DNA, 25 bp, Saccharomyces pastorianus
acggcagtgccgctgatcaagaaga

SEQ ID NO: 58907 - DNA, 25 bp, Saccharomyces pastorianus
tcaagaagagcaagttcccgccgcg

SEQ ID NO: 58908 - DNA, 25 bp, Saccharomyces pastorianus
ggccgcagttcaccccagaaatgga

SEQ ID NO: 58909 - DNA, 25 bp, Saccharomyces pastorianus
cccggcggccagaagatcaacaagt

SEQ ID NO: 58910 - DNA, 25 bp, Saccharomyces pastorianus
gaggcacaatgcacagaaaagttcc

SEQ ID NO: 58911 - DNA, 25 bp, Saccharomyces pastorianus
agttgcgacacgatgccacgggcat

SEQ ID NO: 58912 - DNA, 25 bp, Saccharomyces pastorianus
aatggctgtccaattttgtcgctag

SEQ ID NO: 58913 - DNA, 25 bp, Saccharomyces pastorianus
ggcgttggtggcattatgtgacatc

SEQ ID NO: 58914 - DNA, 25 bp, Saccharomyces pastorianus
aagggttgtatttgcccagttgcct

SEQ ID NO: 58915 - DNA, 25 bp, Saccharomyces pastorianus
tgccaacttgggactggtcaccgaa

SEQ ID NO: 58916 - DNA, 25 bp, Saccharomyces pastorianus
gaaattgctgcagtcgaaccacatt

SEQ ID NO: 58917 - DNA, 25 bp, Saccharomyces pastorianus
tacactgtgcgagagcgggttcata

SEQ ID NO: 58918 - DNA, 25 bp, Saccharomyces pastorianus
gaaccacattgactcactgaacaag

SEQ ID NO: 58919 - DNA, 25 bp, Saccharomyces pastorianus
acggcgtatgagcacctgatgttca

SEQ ID NO: 58920 - DNA, 25 bp, Saccharomyces pastorianus
gcgtttatcaagcattccaaggttt

SEQ ID NO: 58921 - DNA, 25 bp, Saccharomyces pastorianus
gacggtttcgctgcctctaaagttt

SEQ ID NO: 58922 - DNA, 25 bp, Saccharomyces pastorianus
aaggtctacttgctgtacccatttg

SEQ ID NO: 58923 - DNA, 25 bp, Saccharomyces pastorianus
acggaaccgcacacttcagtatagt

SEQ ID NO: 58924 - DNA, 25 bp, Saccharomyces pastorianus
gtcaatctgttgtttggttccttag

SEQ ID NO: 58925 - DNA, 25 bp, Saccharomyces pastorianus
ggacgattttgctcagtttaacact

SEQ ID NO: 58926 - DNA, 25 bp, Saccharomyces pastorianus
agttttgaactagcaccctccatat

SEQ ID NO: 58927 - DNA, 25 bp, Saccharomyces pastorianus
gaagtcttccccaagagtgttgtca

SEQ ID NO: 58928 - DNA, 25 bp, Saccharomyces pastorianus
gaaagcttccccatggtgggcaaat

SEQ ID NO: 58929 - DNA, 25 bp, Saccharomyces pastorianus
gtgggcaaatctactctacgtactt

SEQ ID NO: 58930 - DNA, 25 bp, Saccharomyces pastorianus
gacactttacgatccagcatacgag

SEQ ID NO: 58931 - DNA, 25 bp, Saccharomyces pastorianus
gagtgttgtcaacgcagtccgaaac

SEQ ID NO: 58932 - DNA, 25 bp, Saccharomyces pastorianus
agggcaatgctgtttcgctgacgac

SEQ ID NO: 58933 - DNA, 25 bp, Saccharomyces pastorianus
ggcacccaccattgttctatcagaa

SEQ ID NO: 58934 - DNA, 25 bp, Saccharomyces pastorianus
gaccatgtctggaggctcagtcgat

SEQ ID NO: 58935 - DNA, 25 bp, Saccharomyces pastorianus
acaaagtatcattatcgggcttctt

SEQ ID NO: 58936 - DNA, 25 bp, Saccharomyces pastorianus
aatcctaatgatcccctaaataaag

SEQ ID NO: 58937 - DNA, 25 bp, Saccharomyces pastorianus
acgtctgtctaaatatacttcggga

SEQ ID NO: 58938 - DNA, 25 bp, Saccharomyces pastorianus
ggttccatcagtttcaacctggatt

SEQ ID NO: 58939 - DNA, 25 bp, Saccharomyces pastorianus
ggatactacaatcacggttccatca

SEQ ID NO: 58940 - DNA, 25 bp, Saccharomyces pastorianus
agcaaacctgttttgccaggaccaa

SEQ ID NO: 58941 - DNA, 25 bp, Saccharomyces pastorianus
ttcgggaagattggtcaccggctct

SEQ ID NO: 58942 - DNA, 25 bp, Saccharomyces pastorianus
gaaactgttatattgaccatgtctg

SEQ ID NO: 58943 - DNA, 25 bp, Saccharomyces pastorianus
taggatgcagctgcccaaattggaa

SEQ ID NO: 58944 - DNA, 25 bp, Saccharomyces pastorianus
ggtcaccggctctggatttacaaag

SEQ ID NO: 58945 - DNA, 25 bp, Saccharomyces pastorianus
attactgcctgtgatttccatgttg

SEQ ID NO: 58946 - DNA, 25 bp, Saccharomyces pastorianus
aggccacgtcggatgattctaacca

SEQ ID NO: 58947 - DNA, 25 bp, Saccharomyces pastorianus
gatacgatcatcaagctctttagaa

SEQ ID NO: 58948 - DNA, 25 bp, Saccharomyces pastorianus
gagttcctccgctaatgggaatggc

SEQ ID NO: 58949 - DNA, 25 bp, Saccharomyces pastorianus
atggaagcgtactgcggccgagcta

SEQ ID NO: 58950 - DNA, 25 bp, Saccharomyces pastorianus
gatctagttctatgagttcctccgc

SEQ ID NO: 58951 - DNA, 25 bp, Saccharomyces pastorianus
atattaggcgcaagacccaggccac

SEQ ID NO: 58952 - DNA, 25 bp, Saccharomyces pastorianus
cagtgagtctcatttgcccatagaa

SEQ ID NO: 58953 - DNA, 25 bp, Saccharomyces pastorianus
agaaatacacgcactgaagcttcgt

SEQ ID NO: 58954 - DNA, 25 bp, Saccharomyces pastorianus
aggtcaaggcactggattccgctaa

SEQ ID NO: 58955 - DNA, 25 bp, Saccharomyces pastorianus
ggcaatctctcaacagccagtgagt

SEQ ID NO: 58956 - DNA, 25 bp, Saccharomyces pastorianus
gcgtcataagaacgcagcgatgatc

SEQ ID NO: 58957 - DNA, 25 bp, Saccharomyces pastorianus
agagacgtcaaagacaatcgtgtct

SEQ ID NO: 58958 - DNA, 25 bp, Saccharomyces pastorianus
ttgtgaagactggaagcatcggtat

SEQ ID NO: 58959 - DNA, 25 bp, Saccharomyces pastorianus
aaaagaatcatccagccagcaaaat

SEQ ID NO: 58960 - DNA, 25 bp, Saccharomyces pastorianus
gatgatcgaggcttacgaaaccaaa

SEQ ID NO: 58961 - DNA, 25 bp, Saccharomyces pastorianus
ggattggaagactcacagcttgaaa

SEQ ID NO: 58962 - DNA, 25 bp, Saccharomyces pastorianus
agtaagagacatgctgaggactgta

SEQ ID NO: 58963 - DNA, 25 bp, Saccharomyces pastorianus
gaagtacgagtgttgatggcatcaa

SEQ ID NO: 58964 - DNA, 25 bp, Saccharomyces pastorianus
aatcgtgtctaatggctcgttgaac

SEQ ID NO: 58965 - DNA, 25 bp, Saccharomyces pastorianus
aaagcgctagtggattggaagactc

SEQ ID NO: 58966 - DNA, 25 bp, Saccharomyces pastorianus
aatggagctcgatgacttgcgtcat

SEQ ID NO: 58967 - DNA, 25 bp, Saccharomyces pastorianus
gaaggtcaagcattcaagattgtat

SEQ ID NO: 58968 - DNA, 25 bp, Saccharomyces pastorianus
gtaacgatactaactggtctatcaa

SEQ ID NO: 58969 - DNA, 25 bp, Saccharomyces pastorianus
cattcaagattgtataagtcggtat

SEQ ID NO: 58970 - DNA, 25 bp, Saccharomyces pastorianus
aaacgattaggaatgaaggtcaagc

SEQ ID NO: 58971 - DNA, 25 bp, Saccharomyces pastorianus
tcattccaggttttccgatttaaag

SEQ ID NO: 58972 - DNA, 25 bp, Saccharomyces pastorianus
gttcgtaacgatactaactggtcta

SEQ ID NO: 58973 - DNA, 25 bp, Saccharomyces pastorianus
ggtctatcaaacacttgaaacgatt

SEQ ID NO: 58974 - DNA, 25 bp, Saccharomyces pastorianus
caaacacttgaaacgattaggaatg

SEQ ID NO: 58975 - DNA, 25 bp, Saccharomyces pastorianus
ctaactggtctatcaaacacttgaa

SEQ ID NO: 58976 - DNA, 25 bp, Saccharomyces pastorianus
gattgtataagtcggtatcagaatg

SEQ ID NO: 58977 - DNA, 25 bp, Saccharomyces pastorianus
tactaactggtctatcaaacacttg

SEQ ID NO: 58978 - DNA, 25 bp, Saccharomyces pastorianus
gcaggcttcaaatcgcaacagttac

SEQ ID NO: 58979 - DNA, 25 bp, Saccharomyces pastorianus
acttggcccttgagtattttctgac

SEQ ID NO: 58980 - DNA, 25 bp, Saccharomyces pastorianus
gggaagtactacgtcgatttcgaca

SEQ ID NO: 58981 - DNA, 25 bp, Saccharomyces pastorianus
tatgactttttcgtacttggccctt

SEQ ID NO: 58982 - DNA, 25 bp, Saccharomyces pastorianus
gacgtcgctagtttctatgactttt

SEQ ID NO: 58983 - DNA, 25 bp, Saccharomyces pastorianus
cttatgattcaaccggcaactcttt

SEQ ID NO: 58984 - DNA, 25 bp, Saccharomyces pastorianus
gcatgttatcatgttgacgtcgcta

SEQ ID NO: 58985 - DNA, 25 bp, Saccharomyces pastorianus
tagtgtaactgcgacgtctatgaga

SEQ ID NO: 58986 - DNA, 25 bp, Saccharomyces pastorianus
gcagttctcaagaaggctctcacgt

SEQ ID NO: 58987 - DNA, 25 bp, Saccharomyces pastorianus
ggctgatcttgttattctttggtat

SEQ ID NO: 58988 - DNA, 25 bp, Saccharomyces pastorianus
aagtcaatgggctccctcagggaag

SEQ ID NO: 58989 - DNA, 25 bp, Saccharomyces pastorianus
aagggagatctccactcgttgacca

SEQ ID NO: 58990 - DNA, 25 bp, Saccharomyces pastorianus
ggcgcgattttatccactaatggtt

SEQ ID NO: 58991 - DNA, 25 bp, Saccharomyces pastorianus
atctgagccctttcatattctggaa

SEQ ID NO: 58992 - DNA, 25 bp, Saccharomyces pastorianus
gagtgcttttcaccgaaatccaggt

SEQ ID NO: 58993 - DNA, 25 bp, Saccharomyces pastorianus
gaaagggcttccaaattcatcgatg

SEQ ID NO: 58994 - DNA, 25 bp, Saccharomyces pastorianus
ggaaagccgcgagaatggaccactt

SEQ ID NO: 58995 - DNA, 25 bp, Saccharomyces pastorianus
agacagcatcggcattcatcaaatc

SEQ ID NO: 58996 - DNA, 25 bp, Saccharomyces pastorianus
gaccactttccttgcagttcaataa

SEQ ID NO: 58997 - DNA, 25 bp, Saccharomyces pastorianus
tgagaaaccctagtggagtgctttt

SEQ ID NO: 58998 - DNA, 25 bp, Saccharomyces pastorianus
gagtttgctaggttcacagtttttg

SEQ ID NO: 58999 - DNA, 25 bp, Saccharomyces pastorianus
caaatcgtttgcacacggttccaaa

SEQ ID NO: 59000 - DNA, 25 bp, Saccharomyces pastorianus
aactctaagtacgagggcttccagt

SEQ ID NO: 59001 - DNA, 25 bp, Saccharomyces pastorianus
gttgcccatcgaccatagcgtgatg

SEQ ID NO: 59002 - DNA, 25 bp, Saccharomyces pastorianus
tagcacgggcatcggcgctgtcaac

SEQ ID NO: 59003 - DNA, 25 bp, Saccharomyces pastorianus
tgagcgtctttgtcgacccatcaag

SEQ ID NO: 59004 - DNA, 25 bp, Saccharomyces pastorianus
atgctcgatgtgctcaatggcgctg

SEQ ID NO: 59005 - DNA, 25 bp, Saccharomyces pastorianus
cagcggcgacggctactgtatgaat

SEQ ID NO: 59006 - DNA, 25 bp, Saccharomyces pastorianus
agacgcgtatctgtgtctggattac

SEQ ID NO: 59007 - DNA, 25 bp, Saccharomyces pastorianus
gattacgacgtctacttgacgcacg

SEQ ID NO: 59008 - DNA, 25 bp, Saccharomyces pastorianus
ttcactcccgggtgagacgtgtgat

SEQ ID NO: 59009 - DNA, 25 bp, Saccharomyces pastorianus
agacgtgtgatcttcctttcgcaga

SEQ ID NO: 59010 - DNA, 25 bp, Saccharomyces pastorianus
gctgtcaacgaacatggctgcggca

SEQ ID NO: 59011 - DNA, 25 bp, Saccharomyces pastorianus
ctgcaattgagtttgagttactaac

SEQ ID NO: 59012 - DNA, 25 bp, Saccharomyces pastorianus
gagttactaactttcggatgtatac

SEQ ID NO: 59013 - DNA, 25 bp, Saccharomyces pastorianus
tcaccaactgcaattgagtttgagt

SEQ ID NO: 59014 - DNA, 25 bp, Saccharomyces pastorianus
gttactaactttcggatgtatacac

SEQ ID NO: 59015 - DNA, 25 bp, Saccharomyces pastorianus
gagtttgagttactaactttcggat

SEQ ID NO: 59016 - DNA, 25 bp, Saccharomyces pastorianus
actaactttcggatgtatacacgta

SEQ ID NO: 59017 - DNA, 25 bp, Saccharomyces pastorianus
gtttgagttactaactttcggatgt

SEQ ID NO: 59018 - DNA, 25 bp, Saccharomyces pastorianus
acgcccaaattaagtatgtattttg

SEQ ID NO: 59019 - DNA, 25 bp, Saccharomyces pastorianus
gaatcaccaactgcaattgagtttg

SEQ ID NO: 59020 - DNA, 25 bp, Saccharomyces pastorianus
ccaactgcaattgagtttgagttac

SEQ ID NO: 59021 - DNA, 25 bp, Saccharomyces pastorianus
taagtatgtattttgaatcaccaac

SEQ ID NO: 59022 - DNA, 25 bp, Saccharomyces pastorianus
atgttcgttgacagcgccgatgccc

SEQ ID NO: 59023 - DNA, 25 bp, Saccharomyces pastorianus
tgggtcgacaaagacgctcacgatg

SEQ ID NO: 59024 - DNA, 25 bp, Saccharomyces pastorianus
ttgacagcgccgatgcccgtgctag

SEQ ID NO: 59025 - DNA, 25 bp, Saccharomyces pastorianus
ccccatgtcgatcttatagtcgttc

SEQ ID NO: 59026 - DNA, 25 bp, Saccharomyces pastorianus
tagtcgttcaatatctggtcgttgg

SEQ ID NO: 59027 - DNA, 25 bp, Saccharomyces pastorianus
gcccgtgctagctcaactcgtactt

SEQ ID NO: 59028 - DNA, 25 bp, Saccharomyces pastorianus
agccatgttcgttgacagcgccgat

SEQ ID NO: 59029 - DNA, 25 bp, Saccharomyces pastorianus
cgttccagatcagcggccaatactt

SEQ ID NO: 59030 - DNA, 25 bp, Saccharomyces pastorianus
tgccgcagccatgttcgttgacagc

SEQ ID NO: 59031 - DNA, 25 bp, Saccharomyces pastorianus
gttgccgttccagatcagcggccaa

SEQ ID NO: 59032 - DNA, 25 bp, Saccharomyces pastorianus
gatgcccgtgctagctcaactcgta

SEQ ID NO: 59033 - DNA, 25 bp, Saccharomyces pastorianus
ggctacaaatctgcctttaaggacc

SEQ ID NO: 59034 - DNA, 25 bp, Saccharomyces pastorianus
aaggacctgcctattaacgacacgc

SEQ ID NO: 59035 - DNA, 25 bp, Saccharomyces pastorianus
cgctactgtcctcatgcaaatttac

SEQ ID NO: 59036 - DNA, 25 bp, Saccharomyces pastorianus
tataactgtgagctcccaatcaaat

SEQ ID NO: 59037 - DNA, 25 bp, Saccharomyces pastorianus
agaatagccgacgatttcctcataa

SEQ ID NO: 59038 - DNA, 25 bp, Saccharomyces pastorianus
attatccagttttgtgccatgcata

SEQ ID NO: 59039 - DNA, 25 bp, Saccharomyces pastorianus
atgacattggacatctgcccagcta

SEQ ID NO: 59040 - DNA, 25 bp, Saccharomyces pastorianus
gaaatctggaaacactcgagtacga

SEQ ID NO: 59041 - DNA, 25 bp, Saccharomyces pastorianus
aaatcttgcaatgcgcgggtttgaa

SEQ ID NO: 59042 - DNA, 25 bp, Saccharomyces pastorianus
aattctcttcattcttgtcgtgcat

SEQ ID NO: 59043 - DNA, 25 bp, Saccharomyces pastorianus
acactatattgagcgggttcctgga

SEQ ID NO: 59044 - DNA, 25 bp, Saccharomyces pastorianus
tttgtatcagttcataaccctcctc

SEQ ID NO: 59045 - DNA, 25 bp, Saccharomyces pastorianus
gggcattatgcattgagtgcgttac

SEQ ID NO: 59046 - DNA, 25 bp, Saccharomyces pastorianus
aattcgagcaagtatctcccgatga

SEQ ID NO: 59047 - DNA, 25 bp, Saccharomyces pastorianus
gatgaattttctgagctttgcaagc

SEQ ID NO: 59048 - DNA, 25 bp, Saccharomyces pastorianus
aaaagccgctttttcatcatctctt

SEQ ID NO: 59049 - DNA, 25 bp, Saccharomyces pastorianus
aggctttcacagttggatacgctta

SEQ ID NO: 59050 - DNA, 25 bp, Saccharomyces pastorianus
atgaatgtaccctgtcaaatcccac

SEQ ID NO: 59051 - DNA, 25 bp, Saccharomyces pastorianus
gagtgcgttacagacgatacgttta

SEQ ID NO: 59052 - DNA, 25 bp, Saccharomyces pastorianus
gcacacatttttgaagataggcccc

SEQ ID NO: 59053 - DNA, 25 bp, Saccharomyces pastorianus
gctttgcaagctacacagggcatta

SEQ ID NO: 59054 - DNA, 25 bp, Saccharomyces pastorianus
ttcagacctggttattgcacacatt

SEQ ID NO: 59055 - DNA, 25 bp, Saccharomyces pastorianus
agcatccattatgcaggccagcctt

SEQ ID NO: 59056 - DNA, 25 bp, Saccharomyces pastorianus
gactatttagactttcatacgccag

SEQ ID NO: 59057 - DNA, 25 bp, Saccharomyces pastorianus
aaatacttgcgcttactggcactgt

SEQ ID NO: 59058 - DNA, 25 bp, Saccharomyces pastorianus
tatatcctccaacaaagcaacccat

SEQ ID NO: 59059 - DNA, 25 bp, Saccharomyces pastorianus
ggagttcatacctttagttggcaag

SEQ ID NO: 59060 - DNA, 25 bp, Saccharomyces pastorianus
acgccagatgcgctcaagacgataa

SEQ ID NO: 59061 - DNA, 25 bp, Saccharomyces pastorianus
atactacaacaaccttctacatcga

SEQ ID NO: 59062 - DNA, 25 bp, Saccharomyces pastorianus
ctgtgtgagctgtctagttccaata

SEQ ID NO: 59063 - DNA, 25 bp, Saccharomyces pastorianus
gaagaatcgtctgaaccttttaatt

SEQ ID NO: 59064 - DNA, 25 bp, Saccharomyces pastorianus
caacccatgcgccaattaacgttta

SEQ ID NO: 59065 - DNA, 25 bp, Saccharomyces pastorianus
aatgttgtactcttcactggtggcc

SEQ ID NO: 59066 - DNA, 25 bp, Saccharomyces pastorianus
atgttcggttcaacttgggtccaga

SEQ ID NO: 59067 - DNA, 25 bp, Saccharomyces pastorianus
tttcaacttgcgtttgactctctaa

SEQ ID NO: 59068 - DNA, 25 bp, Saccharomyces pastorianus
gttgcggctgatttactgctcaaat

SEQ ID NO: 59069 - DNA, 25 bp, Saccharomyces pastorianus
aattccttgtagatgcgggcgtatt

SEQ ID NO: 59070 - DNA, 25 bp, Saccharomyces pastorianus
gaattaccttctccagtttactaag

SEQ ID NO: 59071 - DNA, 25 bp, Saccharomyces pastorianus
gactctctaattatcgatttctgcg

SEQ ID NO: 59072 - DNA, 25 bp, Saccharomyces pastorianus
acttggtggacattctttgcttata

SEQ ID NO: 59073 - DNA, 25 bp, Saccharomyces pastorianus
tatctactcttttagccttagccaa

SEQ ID NO: 59074 - DNA, 25 bp, Saccharomyces pastorianus
gtatccatgttttctaaggcgttgc

SEQ ID NO: 59075 - DNA, 25 bp, Saccharomyces pastorianus
gaaaacctctctattcggttgcggc

SEQ ID NO: 59076 - DNA, 25 bp, Saccharomyces pastorianus
gatttgatacctgcatccaatgaga

SEQ ID NO: 59077 - DNA, 25 bp, Saccharomyces pastorianus
cgaaaagatcgttgtcgtattcagc

SEQ ID NO: 59078 - DNA, 25 bp, Saccharomyces pastorianus
tatcatcctcgttggtcaatctgtt

SEQ ID NO: 59079 - DNA, 25 bp, Saccharomyces pastorianus
gatgttatcatcctcgttggtcaat

SEQ ID NO: 59080 - DNA, 25 bp, Saccharomyces pastorianus
cattatccttatagtgtgtgtcagt

SEQ ID NO: 59081 - DNA, 25 bp, Saccharomyces pastorianus
tgtttgctgggccattgtaaaaatg

SEQ ID NO: 59082 - DNA, 25 bp, Saccharomyces pastorianus
tagtgtgtgtcagtattggcaaagt

SEQ ID NO: 59083 - DNA, 25 bp, Saccharomyces pastorianus
aattgacgactttagctcttttatg

SEQ ID NO: 59084 - DNA, 25 bp, Saccharomyces pastorianus
ttggcaaagttggtaccgttcatgt

SEQ ID NO: 59085 - DNA, 25 bp, Saccharomyces pastorianus
gagaaacgacattatccttatagtg

SEQ ID NO: 59086 - DNA, 25 bp, Saccharomyces pastorianus
cgtattcagcataattgacgacttt

SEQ ID NO: 59087 - DNA, 25 bp, Saccharomyces pastorianus
gtaccgttcatgttgaattcatcga

SEQ ID NO: 59088 - DNA, 25 bp, Saccharomyces pastorianus
agatgacaacgaggagaaagagcag

SEQ ID NO: 59089 - DNA, 25 bp, Saccharomyces pastorianus
tggcaaaggtgctagatgacaacga

SEQ ID NO: 59090 - DNA, 25 bp, Saccharomyces pastorianus
caaaggtgctagatgacaacgagga

SEQ ID NO: 59091 - DNA, 25 bp, Saccharomyces pastorianus
cggttggcaaaggtgctagatgaca

SEQ ID NO: 59092 - DNA, 25 bp, Saccharomyces pastorianus
atgagagcaagggatcggttggcaa

SEQ ID NO: 59093 - DNA, 25 bp, Saccharomyces pastorianus
gcaaaggtgctagatgacaacgagg

SEQ ID NO: 59094 - DNA, 25 bp, Saccharomyces pastorianus
aaggtgctagatgacaacgaggaga

SEQ ID NO: 59095 - DNA, 25 bp, Saccharomyces pastorianus
ggcaaaggtgctagatgacaacgag

SEQ ID NO: 59096 - DNA, 25 bp, Saccharomyces pastorianus
atcggttggcaaaggtgctagatga

SEQ ID NO: 59097 - DNA, 25 bp, Saccharomyces pastorianus
aaaggtgctagatgacaacgaggag

SEQ ID NO: 59098 - DNA, 25 bp, Saccharomyces pastorianus
ggttggcaaaggtgctagatgacaa

SEQ ID NO: 59099 - DNA, 25 bp, Saccharomyces pastorianus
aacgaacgtgcatgaaactagagcc

SEQ ID NO: 59100 - DNA, 25 bp, Saccharomyces pastorianus
cgaacgtgcatgaaactagagccaa

SEQ ID NO: 59101 - DNA, 25 bp, Saccharomyces pastorianus
acaacgaacgtgcatgaaactagag

SEQ ID NO: 59102 - DNA, 25 bp, Saccharomyces pastorianus
aacacaacgaacgtgcatgaaacta

SEQ ID NO: 59103 - DNA, 25 bp, Saccharomyces pastorianus
gaacgtgcatgaaactagagccaag

SEQ ID NO: 59104 - DNA, 25 bp, Saccharomyces pastorianus
gagtgacaacacaacgaacgtgcat

SEQ ID NO: 59105 - DNA, 25 bp, Saccharomyces pastorianus
aacgtgcatgaaactagagccaagt

SEQ ID NO: 59106 - DNA, 25 bp, Saccharomyces pastorianus
atgagtgacaacacaacgaacgtgc

SEQ ID NO: 59107 - DNA, 25 bp, Saccharomyces pastorianus
gacaacacaacgaacgtgcatgaaa

SEQ ID NO: 59108 - DNA, 25 bp, Saccharomyces pastorianus
gtgacaacacaacgaacgtgcatga

SEQ ID NO: 59109 - DNA, 25 bp, Saccharomyces pastorianus
cgtgcatgaaactagagccaagttt

SEQ ID NO: 59110 - DNA, 25 bp, Saccharomyces pastorianus
gggccattcaagtaccaaattctaa

SEQ ID NO: 59111 - DNA, 25 bp, Saccharomyces pastorianus
actacagttatcttgtctccgattt

SEQ ID NO: 59112 - DNA, 25 bp, Saccharomyces pastorianus
ggtgttatccaattctaaacccatt

SEQ ID NO: 59113 - DNA, 25 bp, Saccharomyces pastorianus
atgaattcttgaacgaggcaccctc

SEQ ID NO: 59114 - DNA, 25 bp, Saccharomyces pastorianus
agtcattcggttgctagtcttctat

SEQ ID NO: 59115 - DNA, 25 bp, Saccharomyces pastorianus
attctccctggtccaaagtggcaag

SEQ ID NO: 59116 - DNA, 25 bp, Saccharomyces pastorianus
aatgggcctatttctcttgtcatac

SEQ ID NO: 59117 - DNA, 25 bp, Saccharomyces pastorianus
gcctgaaaacttccatttgcctgaa

SEQ ID NO: 59118 - DNA, 25 bp, Saccharomyces pastorianus
gttatgataacttggctgctcttgc

SEQ ID NO: 59119 - DNA, 25 bp, Saccharomyces pastorianus
gagcctcatgctgataatgggccta

SEQ ID NO: 59120 - DNA, 25 bp, Saccharomyces pastorianus
tactggcttggatctcggtggaata

SEQ ID NO: 59121 - DNA, 25 bp, Saccharomyces pastorianus
gggcagacgctgatttacaccacat

SEQ ID NO: 59122 - DNA, 25 bp, Saccharomyces pastorianus
gttagatcgtttttgctatctcacg

SEQ ID NO: 59123 - DNA, 25 bp, Saccharomyces pastorianus
gtggctacagtcaccggcgacaaaa

SEQ ID NO: 59124 - DNA, 25 bp, Saccharomyces pastorianus
gtgaaagaacttcctcttggttgat

SEQ ID NO: 59125 - DNA, 25 bp, Saccharomyces pastorianus
acaatatctgttgccgaattcggtt

SEQ ID NO: 59126 - DNA, 25 bp, Saccharomyces pastorianus
aagtccgcttattcatcagacgtgg

SEQ ID NO: 59127 - DNA, 25 bp, Saccharomyces pastorianus
agtcctggatcacttcaatcacgaa

SEQ ID NO: 59128 - DNA, 25 bp, Saccharomyces pastorianus
gatatttcttccacaaaagtccgct

SEQ ID NO: 59129 - DNA, 25 bp, Saccharomyces pastorianus
ttggctccatcttaccgtagggtgc

SEQ ID NO: 59130 - DNA, 25 bp, Saccharomyces pastorianus
agcgtactggctctgatgttagatc

SEQ ID NO: 59131 - DNA, 25 bp, Saccharomyces pastorianus
gaagtcattggtggctactactccc

SEQ ID NO: 59132 - DNA, 25 bp, Saccharomyces pastorianus
atatgcttccctctcaaaattctga

SEQ ID NO: 59133 - DNA, 25 bp, Saccharomyces pastorianus
tagttctttaaaatctccaccgcct

SEQ ID NO: 59134 - DNA, 25 bp, Saccharomyces pastorianus
atatcgtcaactcccctaagtgcga

SEQ ID NO: 59135 - DNA, 25 bp, Saccharomyces pastorianus
gacggagcttcttctaatagtgaca

SEQ ID NO: 59136 - DNA, 25 bp, Saccharomyces pastorianus
aaatttggaggcaagcgcatcgacc

SEQ ID NO: 59137 - DNA, 25 bp, Saccharomyces pastorianus
gagaatctacgctgcatcacaagca

SEQ ID NO: 59138 - DNA, 25 bp, Saccharomyces pastorianus
tagaccacgtccatttcaagccaaa

SEQ ID NO: 59139 - DNA, 25 bp, Saccharomyces pastorianus
gccggctgcatctttattacatgat

SEQ ID NO: 59140 - DNA, 25 bp, Saccharomyces pastorianus
taatgcctcacaaatgcctagacca

SEQ ID NO: 59141 - DNA, 25 bp, Saccharomyces pastorianus
aataagaatattgcgccggctgcat

SEQ ID NO: 59142 - DNA, 25 bp, Saccharomyces pastorianus
gaccacatttcctggtcgtacggaa

SEQ ID NO: 59143 - DNA, 25 bp, Saccharomyces pastorianus
acgctccaaagccagcaaactctgt

SEQ ID NO: 59144 - DNA, 25 bp, Saccharomyces pastorianus
aaactctgtcatgcagggccgtgat

SEQ ID NO: 59145 - DNA, 25 bp, Saccharomyces pastorianus
taggaggtggtgtcgtctcatcaac

SEQ ID NO: 59146 - DNA, 25 bp, Saccharomyces pastorianus
ggtgtcgtctcatcaacatctggga

SEQ ID NO: 59147 - DNA, 25 bp, Saccharomyces pastorianus
atgggtggtggcaacgctccaaagc

SEQ ID NO: 59148 - DNA, 25 bp, Saccharomyces pastorianus
atcaacatctgggagctctggtgcc

SEQ ID NO: 59149 - DNA, 25 bp, Saccharomyces pastorianus
atgatagaagtgctccaactgtagg

SEQ ID NO: 59150 - DNA, 25 bp, Saccharomyces pastorianus
ctcctccgccaacaatgggtggtgg

SEQ ID NO: 59151 - DNA, 25 bp, Saccharomyces pastorianus
atggttagtgctccagctcctcctc

SEQ ID NO: 59152 - DNA, 25 bp, Saccharomyces pastorianus
gccgtgatgcccttttaggtgacat

SEQ ID NO: 59153 - DNA, 25 bp, Saccharomyces pastorianus
ctctggtgccctcaacaacaataga

SEQ ID NO: 59154 - DNA, 25 bp, Saccharomyces pastorianus
ggcaccagagctcccagatgttgat

SEQ ID NO: 59155 - DNA, 25 bp, Saccharomyces pastorianus
acagagtttgctggctttggagcgt

SEQ ID NO: 59156 - DNA, 25 bp, Saccharomyces pastorianus
gtctattgttgttgagggcaccaga

SEQ ID NO: 59157 - DNA, 25 bp, Saccharomyces pastorianus
attccaccagccaaaataccacttt

SEQ ID NO: 59158 - DNA, 25 bp, Saccharomyces pastorianus
caccacccattgttggcggaggagg

SEQ ID NO: 59159 - DNA, 25 bp, Saccharomyces pastorianus
atcacggccctgcatgacagagttt

SEQ ID NO: 59160 - DNA, 25 bp, Saccharomyces pastorianus
cctacagttggagcacttctatcat

SEQ ID NO: 59161 - DNA, 25 bp, Saccharomyces pastorianus
ctatcattagtctctgcttttttca

SEQ ID NO: 59162 - DNA, 25 bp, Saccharomyces pastorianus
atgttgatgagacgacaccacctcc

SEQ ID NO: 59163 - DNA, 25 bp, Saccharomyces pastorianus
catgtttcagcttaggtattccacc

SEQ ID NO: 59164 - DNA, 25 bp, Saccharomyces pastorianus
ttttcagtctcattccttttctaat

SEQ ID NO: 59165 - DNA, 25 bp, Saccharomyces pastorianus
cataacgtccttgatttcgttcaag

SEQ ID NO: 59166 - DNA, 25 bp, Saccharomyces pastorianus
gcagcaactctcttggaaaccataa

SEQ ID NO: 59167 - DNA, 25 bp, Saccharomyces pastorianus
accataacgtccttgatttcgttca

SEQ ID NO: 59168 - DNA, 25 bp, Saccharomyces pastorianus
gattcgttagtgaaaatgaaaccca

SEQ ID NO: 59169 - DNA, 25 bp, Saccharomyces pastorianus
gatttcgttcaaggattcgttagtg

SEQ ID NO: 59170 - DNA, 25 bp, Saccharomyces pastorianus
gaaaccataacgtccttgatttcgt

SEQ ID NO: 59171 - DNA, 25 bp, Saccharomyces pastorianus
ttggaaaccataacgtccttgattt

SEQ ID NO: 59172 - DNA, 25 bp, Saccharomyces pastorianus
gggcagcaactctcttggaaaccat

SEQ ID NO: 59173 - DNA, 25 bp, Saccharomyces pastorianus
gcaactctcttggaaaccataacgt

SEQ ID NO: 59174 - DNA, 25 bp, Saccharomyces pastorianus
tctcttggaaaccataacgtccttg

SEQ ID NO: 59175 - DNA, 25 bp, Saccharomyces pastorianus
ttcgttcaaggattcgttagtgaaa

SEQ ID NO: 59176 - DNA, 25 bp, Saccharomyces pastorianus
agcaaagtattcagctttcttttca

SEQ ID NO: 59177 - DNA, 25 bp, Saccharomyces pastorianus
gtattctctcaacttagcaaagtat

SEQ ID NO: 59178 - DNA, 25 bp, Saccharomyces pastorianus
ccaagtattctctcaacttagcaaa

SEQ ID NO: 59179 - DNA, 25 bp, Saccharomyces pastorianus
attcttccaagtattctctcaactt

SEQ ID NO: 59180 - DNA, 25 bp, Saccharomyces pastorianus
ttgtattcttccaagtattctctca

SEQ ID NO: 59181 - DNA, 25 bp, Saccharomyces pastorianus
tctctcaacttagcaaagtattcag

SEQ ID NO: 59182 - DNA, 25 bp, Saccharomyces pastorianus
ttccaagtattctctcaacttagca

SEQ ID NO: 59183 - DNA, 25 bp, Saccharomyces pastorianus
tcttccaagtattctctcaacttag

SEQ ID NO: 59184 - DNA, 25 bp, Saccharomyces pastorianus
aacttagcaaagtattcagctttct

SEQ ID NO: 59185 - DNA, 25 bp, Saccharomyces pastorianus
gtattcttccaagtattctctcaac

SEQ ID NO: 59186 - DNA, 25 bp, Saccharomyces pastorianus
aagtattctctcaacttagcaaagt

SEQ ID NO: 59187 - DNA, 25 bp, Saccharomyces pastorianus
gactaatcttccactgtatgacagc

SEQ ID NO: 59188 - DNA, 25 bp, Saccharomyces pastorianus
gttccaaactgactggtactttcca

SEQ ID NO: 59189 - DNA, 25 bp, Saccharomyces pastorianus
agttaccatttattattatcccagg

SEQ ID NO: 59190 - DNA, 25 bp, Saccharomyces pastorianus
aacacgcttgcgtaaacgtatggtc

SEQ ID NO: 59191 - DNA, 25 bp, Saccharomyces pastorianus
gcgatcttaatttgccagttaccat

SEQ ID NO: 59192 - DNA, 25 bp, Saccharomyces pastorianus
aattcgtccaccaatttattctttg

SEQ ID NO: 59193 - DNA, 25 bp, Saccharomyces pastorianus
gttaaagccttctcgccaaattcgt

SEQ ID NO: 59194 - DNA, 25 bp, Saccharomyces pastorianus
caatacggctttctggactggtaaa

SEQ ID NO: 59195 - DNA, 25 bp, Saccharomyces pastorianus
ctgtggcttcgtctcacgttaaaaa

SEQ ID NO: 59196 - DNA, 25 bp, Saccharomyces pastorianus
agcattaatgctgactcgtgagttc

SEQ ID NO: 59197 - DNA, 25 bp, Saccharomyces pastorianus
tacatggcttggactcagccagcta

SEQ ID NO: 59198 - DNA, 25 bp, Saccharomyces pastorianus
ttgaacccagggagtatcgccgatc

SEQ ID NO: 59199 - DNA, 25 bp, Saccharomyces pastorianus
atatcatttccgattccccagagcg

SEQ ID NO: 59200 - DNA, 25 bp, Saccharomyces pastorianus
ttagctgttcgtatggaaccattgt

SEQ ID NO: 59201 - DNA, 25 bp, Saccharomyces pastorianus
gaaatttcatttagccccttttgca

SEQ ID NO: 59202 - DNA, 25 bp, Saccharomyces pastorianus
gaaaaagaacccacgacactggcct

SEQ ID NO: 59203 - DNA, 25 bp, Saccharomyces pastorianus
tatccttcggaatatgcagaatcat

SEQ ID NO: 59204 - DNA, 25 bp, Saccharomyces pastorianus
aatggcttgtacttgcgttgaacta

SEQ ID NO: 59205 - DNA, 25 bp, Saccharomyces pastorianus
atcgccgatctcactgatgaccaaa

SEQ ID NO: 59206 - DNA, 25 bp, Saccharomyces pastorianus
aaggatatcctcattattgctcatg

SEQ ID NO: 59207 - DNA, 25 bp, Saccharomyces pastorianus
ggagtcttaccacgacttagctgtt

SEQ ID NO: 59208 - DNA, 25 bp, Saccharomyces pastorianus
ttgcgttgaactaccaaacttggac

SEQ ID NO: 59209 - DNA, 25 bp, Saccharomyces pastorianus
atttctgcgtagttccaaagtcaaa

SEQ ID NO: 59210 - DNA, 25 bp, Saccharomyces pastorianus
aatatagcgctcgtattgcagtcga

SEQ ID NO: 59211 - DNA, 25 bp, Saccharomyces pastorianus
aaatccgccaaagatgtaccttctg

SEQ ID NO: 59212 - DNA, 25 bp, Saccharomyces pastorianus
accttctaccacaacaggatctgta

SEQ ID NO: 59213 - DNA, 25 bp, Saccharomyces pastorianus
atatatcccctggacaactttactc

SEQ ID NO: 59214 - DNA, 25 bp, Saccharomyces pastorianus
ggactcaggtaatctatttcacgct

SEQ ID NO: 59215 - DNA, 25 bp, Saccharomyces pastorianus
gaagaattctcgtcgtcctcgttgg

SEQ ID NO: 59216 - DNA, 25 bp, Saccharomyces pastorianus
atgtaccttctgattatttctgcgt

SEQ ID NO: 59217 - DNA, 25 bp, Saccharomyces pastorianus
gcaaccttctgtgaaatcggtgtta

SEQ ID NO: 59218 - DNA, 25 bp, Saccharomyces pastorianus
gcacttctggtcaactggccattta

SEQ ID NO: 59219 - DNA, 25 bp, Saccharomyces pastorianus
acaactttactccacggactcaggt

SEQ ID NO: 59220 - DNA, 25 bp, Saccharomyces pastorianus
gctacagtgtcagtggcgtattcta

SEQ ID NO: 59221 - DNA, 25 bp, Saccharomyces pastorianus
agtggcgtattctaccatcgtggtt

SEQ ID NO: 59222 - DNA, 25 bp, Saccharomyces pastorianus
gaactcgttgtctgctctattggct

SEQ ID NO: 59223 - DNA, 25 bp, Saccharomyces pastorianus
gtgtcagtggcgtattctaccatcg

SEQ ID NO: 59224 - DNA, 25 bp, Saccharomyces pastorianus
atgtttcagctacagtgtcagtggc

SEQ ID NO: 59225 - DNA, 25 bp, Saccharomyces pastorianus
gcagatgtttcagctacagtgtcag

SEQ ID NO: 59226 - DNA, 25 bp, Saccharomyces pastorianus
atggaagcagatgtttcagctacag

SEQ ID NO: 59227 - DNA, 25 bp, Saccharomyces pastorianus
gcattgaactcgttgtctgctctat

SEQ ID NO: 59228 - DNA, 25 bp, Saccharomyces pastorianus
aaagcagaggcacgagcattgaact

SEQ ID NO: 59229 - DNA, 25 bp, Saccharomyces pastorianus
ggcgtattctaccatcgtggttaaa

SEQ ID NO: 59230 - DNA, 25 bp, Saccharomyces pastorianus
tctaccatcgtggttaaagcggaaa

SEQ ID NO: 59231 - DNA, 25 bp, Saccharomyces pastorianus
ggatgcaaaatgactctgccttgga

SEQ ID NO: 59232 - DNA, 25 bp, Saccharomyces pastorianus
agaactatctggtcacgaagctcga

SEQ ID NO: 59233 - DNA, 25 bp, Saccharomyces pastorianus
gtgtttacaggatataccgccatga

SEQ ID NO: 59234 - DNA, 25 bp, Saccharomyces pastorianus
agactgggtcccttcacggtgttga

SEQ ID NO: 59235 - DNA, 25 bp, Saccharomyces pastorianus
gggaactttgcagacgtcgtgaaca

SEQ ID NO: 59236 - DNA, 25 bp, Saccharomyces pastorianus
gacgttgttcactgggtggaagccc

SEQ ID NO: 59237 - DNA, 25 bp, Saccharomyces pastorianus
gtaattccgcaggaccaggtgacca

SEQ ID NO: 59238 - DNA, 25 bp, Saccharomyces pastorianus
gctttgaagatcctggccgatgcca

SEQ ID NO: 59239 - DNA, 25 bp, Saccharomyces pastorianus
gtgttcgccggcagacgttatgaag

SEQ ID NO: 59240 - DNA, 25 bp, Saccharomyces pastorianus
ggtgaccaacatggcgtatctactg

SEQ ID NO: 59241 - DNA, 25 bp, Saccharomyces pastorianus
atgaaggcgggctcaagacgttgtt

SEQ ID NO: 59242 - DNA, 25 bp, Saccharomyces pastorianus
gcatcgaccattatatttcctaaat

SEQ ID NO: 59243 - DNA, 25 bp, Saccharomyces pastorianus
tcctaaattacctcttgacgcttgt

SEQ ID NO: 59244 - DNA, 25 bp, Saccharomyces pastorianus
ctaaattacctcttgacgcttgtga

SEQ ID NO: 59245 - DNA, 25 bp, Saccharomyces pastorianus
gaatgatgaagcagcatcgaccatt

SEQ ID NO: 59246 - DNA, 25 bp, Saccharomyces pastorianus
tttcctaaattacctcttgacgctt

SEQ ID NO: 59247 - DNA, 25 bp, Saccharomyces pastorianus
aagcagcatcgaccattatatttcc

SEQ ID NO: 59248 - DNA, 25 bp, Saccharomyces pastorianus
gcagcatcgaccattatatttccta

SEQ ID NO: 59249 - DNA, 25 bp, Saccharomyces pastorianus
aaattacctcttgacgcttgtgatg

SEQ ID NO: 59250 - DNA, 25 bp, Saccharomyces pastorianus
tgaagcagcatcgaccattatattt

SEQ ID NO: 59251 - DNA, 25 bp, Saccharomyces pastorianus
taggtaagacgaatgatgaagcagc

SEQ ID NO: 59252 - DNA, 25 bp, Saccharomyces pastorianus
attacctcttgacgcttgtgatgtt

SEQ ID NO: 59253 - DNA, 25 bp, Saccharomyces pastorianus
ttcttttcttgttggtgccggacca

SEQ ID NO: 59254 - DNA, 25 bp, Saccharomyces pastorianus
gactgttctaaacgtgggtcacctg

SEQ ID NO: 59255 - DNA, 25 bp, Saccharomyces pastorianus
taaacgtgggtcacctgagtttatt

SEQ ID NO: 59256 - DNA, 25 bp, Saccharomyces pastorianus
ttttcgatggtttcctccacttcct

SEQ ID NO: 59257 - DNA, 25 bp, Saccharomyces pastorianus
cataatatttcacctttcgtctttt

SEQ ID NO: 59258 - DNA, 25 bp, Saccharomyces pastorianus
catttactattacactgggacccct

SEQ ID NO: 59259 - DNA, 25 bp, Saccharomyces pastorianus
tattacactgggacccctaaaccat

SEQ ID NO: 59260 - DNA, 25 bp, Saccharomyces pastorianus
ctccacttcctcgtattctagtttt

SEQ ID NO: 59261 - DNA, 25 bp, Saccharomyces pastorianus
cactgggacccctaaaccataatat

SEQ ID NO: 59262 - DNA, 25 bp, Saccharomyces pastorianus
gaccatctgttcaacgactgttcta

SEQ ID NO: 59263 - DNA, 25 bp, Saccharomyces pastorianus
tggtgccggaccatctgttcaacga

SEQ ID NO: 59264 - DNA, 25 bp, Saccharomyces pastorianus
gacctattacggtgcttctcaggaa

SEQ ID NO: 59265 - DNA, 25 bp, Saccharomyces pastorianus
gaaataccctcttgggctacacaag

SEQ ID NO: 59266 - DNA, 25 bp, Saccharomyces pastorianus
agaagtcgtcaaacaatccgccact

SEQ ID NO: 59267 - DNA, 25 bp, Saccharomyces pastorianus
atacagacccacagctcttgaatta

SEQ ID NO: 59268 - DNA, 25 bp, Saccharomyces pastorianus
catgttaaacaactatggcccattt

SEQ ID NO: 59269 - DNA, 25 bp, Saccharomyces pastorianus
aatccgccactactgctaaagcaga

SEQ ID NO: 59270 - DNA, 25 bp, Saccharomyces pastorianus
gggctcagttttttggatgtcacca

SEQ ID NO: 59271 - DNA, 25 bp, Saccharomyces pastorianus
tatctttctcgaatacgttcctgga

SEQ ID NO: 59272 - DNA, 25 bp, Saccharomyces pastorianus
atatggtccactggttgtgttgtta

SEQ ID NO: 59273 - DNA, 25 bp, Saccharomyces pastorianus
gaggttcggtttcatccatgttaaa

SEQ ID NO: 59274 - DNA, 25 bp, Saccharomyces pastorianus
aagagcttctttgcagggctcagtt

SEQ ID NO: 59275 - DNA, 25 bp, Saccharomyces pastorianus
ttcgtcgaacttactctctcaaaac

SEQ ID NO: 59276 - DNA, 25 bp, Saccharomyces pastorianus
ggcactattgcagggtttggaccaa

SEQ ID NO: 59277 - DNA, 25 bp, Saccharomyces pastorianus
gttaaagcactcgaatgccgtggat

SEQ ID NO: 59278 - DNA, 25 bp, Saccharomyces pastorianus
aaaacagacctttgagcgccgaatc

SEQ ID NO: 59279 - DNA, 25 bp, Saccharomyces pastorianus
caaggccatatccacatccaagaaa

SEQ ID NO: 59280 - DNA, 25 bp, Saccharomyces pastorianus
atcagactccaagtgacaaggccat

SEQ ID NO: 59281 - DNA, 25 bp, Saccharomyces pastorianus
gttaatctcaaccaacttagcaggg

SEQ ID NO: 59282 - DNA, 25 bp, Saccharomyces pastorianus
aaccaagtagggtcatcttcgtcga

SEQ ID NO: 59283 - DNA, 25 bp, Saccharomyces pastorianus
agggtacttccctcatacagacatg

SEQ ID NO: 59284 - DNA, 25 bp, Saccharomyces pastorianus
atcgtttcgtcattcagctatgcta

SEQ ID NO: 59285 - DNA, 25 bp, Saccharomyces pastorianus
taagctcgacacaaccaaaattccg

SEQ ID NO: 59286 - DNA, 25 bp, Saccharomyces pastorianus
aagaaagagctcctctcttacggaa

SEQ ID NO: 59287 - DNA, 25 bp, Saccharomyces pastorianus
aacttaaggaaagctgctccgttgc

SEQ ID NO: 59288 - DNA, 25 bp, Saccharomyces pastorianus
cccacgtagggttacaaagaagcag

SEQ ID NO: 59289 - DNA, 25 bp, Saccharomyces pastorianus
tgctccgttgcaattgaaatctaaa

SEQ ID NO: 59290 - DNA, 25 bp, Saccharomyces pastorianus
aaagtcggccacttggagctgttga

SEQ ID NO: 59291 - DNA, 25 bp, Saccharomyces pastorianus
caaaagccgcttaaagtcactaaga

SEQ ID NO: 59292 - DNA, 25 bp, Saccharomyces pastorianus
agagctcctctcttacggaaactac

SEQ ID NO: 59293 - DNA, 25 bp, Saccharomyces pastorianus
ttggttgcaagtaaagtcggccact

SEQ ID NO: 59294 - DNA, 25 bp, Saccharomyces pastorianus
aggaaagctgctccgttgcaattga

SEQ ID NO: 59295 - DNA, 25 bp, Saccharomyces pastorianus
gaaactaccgaaagattggttgcaa

SEQ ID NO: 59296 - DNA, 25 bp, Saccharomyces pastorianus
taagaaagtcaaagacccacgtagg

SEQ ID NO: 59297 - DNA, 25 bp, Saccharomyces pastorianus
tcaagttttgttgagaccttcttcc

SEQ ID NO: 59298 - DNA, 25 bp, Saccharomyces pastorianus
tctgttttagccgacgctttaaatg

SEQ ID NO: 59299 - DNA, 25 bp, Saccharomyces pastorianus
tgttttagccgacgctttaaatgcc

SEQ ID NO: 59300 - DNA, 25 bp, Saccharomyces pastorianus
aagcgtcaagttttgttgagacctt

SEQ ID NO: 59301 - DNA, 25 bp, Saccharomyces pastorianus
tgacccgttcttctgttttagccga

SEQ ID NO: 59302 - DNA, 25 bp, Saccharomyces pastorianus
ttagccgacgctttaaatgccatta

SEQ ID NO: 59303 - DNA, 25 bp, Saccharomyces pastorianus
tcttctgttttagccgacgctttaa

SEQ ID NO: 59304 - DNA, 25 bp, Saccharomyces pastorianus
cgacgctttaaatgccattaacaac

SEQ ID NO: 59305 - DNA, 25 bp, Saccharomyces pastorianus
gttcttctgttttagccgacgcttt

SEQ ID NO: 59306 - DNA, 25 bp, Saccharomyces pastorianus
gccgacgctttaaatgccattaaca

SEQ ID NO: 59307 - DNA, 25 bp, Saccharomyces pastorianus
atgacccgttcttctgttttagccg

SEQ ID NO: 59308 - DNA, 25 bp, Saccharomyces pastorianus
aaatcgggtacttcttccaggatat

SEQ ID NO: 59309 - DNA, 25 bp, Saccharomyces pastorianus
gaaacccaggataccttatgtgctt

SEQ ID NO: 59310 - DNA, 25 bp, Saccharomyces pastorianus
gagactacgtccttttagatgatga

SEQ ID NO: 59311 - DNA, 25 bp, Saccharomyces pastorianus
ggtctctttttcaaaggctacgaca

SEQ ID NO: 59312 - DNA, 25 bp, Saccharomyces pastorianus
attggacagaatgcccttgaagaac

SEQ ID NO: 59313 - DNA, 25 bp, Saccharomyces pastorianus
gtgaattactacgatgcaagcccag

SEQ ID NO: 59314 - DNA, 25 bp, Saccharomyces pastorianus
tttccccagtggttccacgaactga

SEQ ID NO: 59315 - DNA, 25 bp, Saccharomyces pastorianus
gagaatgcaactcagcgcttacaca

SEQ ID NO: 59316 - DNA, 25 bp, Saccharomyces pastorianus
ggatgtaaccatgtactttgcattc

SEQ ID NO: 59317 - DNA, 25 bp, Saccharomyces pastorianus
gggctgatgccctttcgaggagatt

SEQ ID NO: 59318 - DNA, 25 bp, Saccharomyces pastorianus
gtgatataagagtccgcctagcaga

SEQ ID NO: 59319 - DNA, 25 bp, Saccharomyces pastorianus
gtcatggcctgttctggtccatctg

SEQ ID NO: 59320 - DNA, 25 bp, Saccharomyces pastorianus
tgctgcctatggttatttgatctta

SEQ ID NO: 59321 - DNA, 25 bp, Saccharomyces pastorianus
aattgatgggtcgtacttccgttga

SEQ ID NO: 59322 - DNA, 25 bp, Saccharomyces pastorianus
ggtccatctgttccgaagaagcctt

SEQ ID NO: 59323 - DNA, 25 bp, Saccharomyces pastorianus
atggtacacaggatgctgctgccta

SEQ ID NO: 59324 - DNA, 25 bp, Saccharomyces pastorianus
caagtactttagtcgtatcttacca

SEQ ID NO: 59325 - DNA, 25 bp, Saccharomyces pastorianus
ggttccgttggatctggttcttcta

SEQ ID NO: 59326 - DNA, 25 bp, Saccharomyces pastorianus
gaagctactgtttctacacacttat

SEQ ID NO: 59327 - DNA, 25 bp, Saccharomyces pastorianus
gggtcaccagattccaaatcatcca

SEQ ID NO: 59328 - DNA, 25 bp, Saccharomyces pastorianus
gaatccgaagtatctggttccgttg

SEQ ID NO: 59329 - DNA, 25 bp, Saccharomyces pastorianus
gtacttccgttgaatgggttccaat

SEQ ID NO: 59330 - DNA, 25 bp, Saccharomyces pastorianus
gctatcggaatcatcgtcgtctatt

SEQ ID NO: 59331 - DNA, 25 bp, Saccharomyces pastorianus
ggctaacgggtaccatgctatcgga

SEQ ID NO: 59332 - DNA, 25 bp, Saccharomyces pastorianus
gccgatcttctccaaggtttttgaa

SEQ ID NO: 59333 - DNA, 25 bp, Saccharomyces pastorianus
ctgcggaccagttccaggctttgaa

SEQ ID NO: 59334 - DNA, 25 bp, Saccharomyces pastorianus
ggctatccagccgaacaatttgagt

SEQ ID NO: 59335 - DNA, 25 bp, Saccharomyces pastorianus
gttatcttcggtggtcaagctatct

SEQ ID NO: 59336 - DNA, 25 bp, Saccharomyces pastorianus
aaagtttcatattccttccatcgaa

SEQ ID NO: 59337 - DNA, 25 bp, Saccharomyces pastorianus
ggtattgaattgtggccgatcttct

SEQ ID NO: 59338 - DNA, 25 bp, Saccharomyces pastorianus
gaactcttcctcattgggtttctta

SEQ ID NO: 59339 - DNA, 25 bp, Saccharomyces pastorianus
atgaatactactacctctgctgtcg

SEQ ID NO: 59340 - DNA, 25 bp, Saccharomyces pastorianus
gtcgtctattacatcgttatcttcg

SEQ ID NO: 59341 - DNA, 25 bp, Saccharomyces pastorianus
gctactgggatcaacaatcaataaa

SEQ ID NO: 59342 - DNA, 25 bp, Saccharomyces pastorianus
aatggcgcaattattggtcgcccgg

SEQ ID NO: 59343 - DNA, 25 bp, Saccharomyces pastorianus
atggcgcaattattggtcgcccggt

SEQ ID NO: 59344 - DNA, 25 bp, Saccharomyces pastorianus
gcgctactgggatcaacaatcaata

SEQ ID NO: 59345 - DNA, 25 bp, Saccharomyces pastorianus
cacggtcgcgcagcgctactgggat

SEQ ID NO: 59346 - DNA, 25 bp, Saccharomyces pastorianus
gcgcagcgctactgggatcaacaat

SEQ ID NO: 59347 - DNA, 25 bp, Saccharomyces pastorianus
gcgcaattattggtcgcccggtcac

SEQ ID NO: 59348 - DNA, 25 bp, Saccharomyces pastorianus
cagcgctactgggatcaacaatcaa

SEQ ID NO: 59349 - DNA, 25 bp, Saccharomyces pastorianus
gtcgcgcagcgctactgggatcaac

SEQ ID NO: 59350 - DNA, 25 bp, Saccharomyces pastorianus
gcaattattggtcgcccggtcacct

SEQ ID NO: 59351 - DNA, 25 bp, Saccharomyces pastorianus
cgcagcgctactgggatcaacaatc

SEQ ID NO: 59352 - DNA, 25 bp, Saccharomyces pastorianus
ggacgaggcctcaccattgtactgc

SEQ ID NO: 59353 - DNA, 25 bp, Saccharomyces pastorianus
acgtaacgtggttcatagcgctatt

SEQ ID NO: 59354 - DNA, 25 bp, Saccharomyces pastorianus
aacgtaacgtggttcatagcgctat

SEQ ID NO: 59355 - DNA, 25 bp, Saccharomyces pastorianus
tcaccattgtactgcctctcggctg

SEQ ID NO: 59356 - DNA, 25 bp, Saccharomyces pastorianus
gcaacgtaacgtggttcatagcgct

SEQ ID NO: 59357 - DNA, 25 bp, Saccharomyces pastorianus
gaggcctcaccattgtactgcctct

SEQ ID NO: 59358 - DNA, 25 bp, Saccharomyces pastorianus
tcatgttgggcagggccgggtgggc

SEQ ID NO: 59359 - DNA, 25 bp, Saccharomyces pastorianus
ggcggacgaggcctcaccattgtac

SEQ ID NO: 59360 - DNA, 25 bp, Saccharomyces pastorianus
tgaggcggacgaggcctcaccattg

SEQ ID NO: 59361 - DNA, 25 bp, Saccharomyces pastorianus
attgtactgcctctcggctgccttg

SEQ ID NO: 59362 - DNA, 25 bp, Saccharomyces pastorianus
gtaacgtggttcatagcgctattgt

SEQ ID NO: 59363 - DNA, 25 bp, Saccharomyces pastorianus
ggacgaggcctcaccattgtactgc

SEQ ID NO: 59364 - DNA, 25 bp, Saccharomyces pastorianus
acgtaacgtggttcatagcgctatt

SEQ ID NO: 59365 - DNA, 25 bp, Saccharomyces pastorianus
tcaccattgtactgcctctcggctg

SEQ ID NO: 59366 - DNA, 25 bp, Saccharomyces pastorianus
attgtttgcattactcatcgctcgc

SEQ ID NO: 59367 - DNA, 25 bp, Saccharomyces pastorianus
gcaacgtaacgtggttcatagcgct

SEQ ID NO: 59368 - DNA, 25 bp, Saccharomyces pastorianus
gaggcctcaccattgtactgcctct

SEQ ID NO: 59369 - DNA, 25 bp, Saccharomyces pastorianus
tcatgttgggcagggccgggtgggc

SEQ ID NO: 59370 - DNA, 25 bp, Saccharomyces pastorianus
ggcggacgaggcctcaccattgtac

SEQ ID NO: 59371 - DNA, 25 bp, Saccharomyces pastorianus
ggctgccttgataaggttgtcgaat

SEQ ID NO: 59372 - DNA, 25 bp, Saccharomyces pastorianus
attgtactgcctctcggctgccttg

SEQ ID NO: 59373 - DNA, 25 bp, Saccharomyces pastorianus
gtaacgtggttcatagcgctattgt

SEQ ID NO: 59374 - DNA, 25 bp, Saccharomyces pastorianus
ctgactacacacaaggctacgcatt

SEQ ID NO: 59375 - DNA, 25 bp, Saccharomyces pastorianus
gcacaattgaagtcgctgcaccaga

SEQ ID NO: 59376 - DNA, 25 bp, Saccharomyces pastorianus
ggcgtgttctcacgttgtgacacat

SEQ ID NO: 59377 - DNA, 25 bp, Saccharomyces pastorianus
aacttctatgctaacctgactacac

SEQ ID NO: 59378 - DNA, 25 bp, Saccharomyces pastorianus
gtgtccattcaactccactttgata

SEQ ID NO: 59379 - DNA, 25 bp, Saccharomyces pastorianus
atcgagccctgccaatgatgtcacg

SEQ ID NO: 59380 - DNA, 25 bp, Saccharomyces pastorianus
gagtacccacctggcactaagaaaa

SEQ ID NO: 59381 - DNA, 25 bp, Saccharomyces pastorianus
atactgtcccagtcaggagcgctat

SEQ ID NO: 59382 - DNA, 25 bp, Saccharomyces pastorianus
tctgtttcgcccaccgatgatgata

SEQ ID NO: 59383 - DNA, 25 bp, Saccharomyces pastorianus
aagcctttgaatttcgagacctcca

SEQ ID NO: 59384 - DNA, 25 bp, Saccharomyces pastorianus
gctacgcatttgacgccggaggata

SEQ ID NO: 59385 - DNA, 25 bp, Saccharomyces pastorianus
ggatctggcccaggattaaaaagat

SEQ ID NO: 59386 - DNA, 25 bp, Saccharomyces pastorianus
ggcacgcaaccagtacagagggtcc

SEQ ID NO: 59387 - DNA, 25 bp, Saccharomyces pastorianus
gcaaccagtacagagggtccgaggt

SEQ ID NO: 59388 - DNA, 25 bp, Saccharomyces pastorianus
acagagggtccgaggtttcactgga

SEQ ID NO: 59389 - DNA, 25 bp, Saccharomyces pastorianus
atgggcgagacacccagctccagca

SEQ ID NO: 59390 - DNA, 25 bp, Saccharomyces pastorianus
agtacagagggtccgaggtttcact

SEQ ID NO: 59391 - DNA, 25 bp, Saccharomyces pastorianus
tacagcgggatctggcccaggatta

SEQ ID NO: 59392 - DNA, 25 bp, Saccharomyces pastorianus
gtccgaggtttcactggacacgatc

SEQ ID NO: 59393 - DNA, 25 bp, Saccharomyces pastorianus
agctccagcagcgtaccacggttgg

SEQ ID NO: 59394 - DNA, 25 bp, Saccharomyces pastorianus
gagggtccgaggtttcactggacac

SEQ ID NO: 59395 - DNA, 25 bp, Saccharomyces pastorianus
ggcccaggattaaaaagatcagcag

SEQ ID NO: 59396 - DNA, 25 bp, Saccharomyces pastorianus
ccagaaattccggttccagagatcc

SEQ ID NO: 59397 - DNA, 25 bp, Saccharomyces pastorianus
attagcgaaaaagacagagagagag

SEQ ID NO: 59398 - DNA, 25 bp, Saccharomyces pastorianus
ttctattagcgaaaaagacagagag

SEQ ID NO: 59399 - DNA, 25 bp, Saccharomyces pastorianus
tattagcgaaaaagacagagagaga

SEQ ID NO: 59400 - DNA, 25 bp, Saccharomyces pastorianus
gggaagtttactacatcccagaaat

SEQ ID NO: 59401 - DNA, 25 bp, Saccharomyces pastorianus
cagaaattccggttccagagatcca

SEQ ID NO: 59402 - DNA, 25 bp, Saccharomyces pastorianus
agcgaaaaagacagagagagagtta

SEQ ID NO: 59403 - DNA, 25 bp, Saccharomyces pastorianus
agaaattccggttccagagatccaa

SEQ ID NO: 59404 - DNA, 25 bp, Saccharomyces pastorianus
ctattagcgaaaaagacagagagag

SEQ ID NO: 59405 - DNA, 25 bp, Saccharomyces pastorianus
agacagagagagagttaatgaaaac

SEQ ID NO: 59406 - DNA, 25 bp, Saccharomyces pastorianus
tagcgaaaaagacagagagagagtt

SEQ ID NO: 59407 - DNA, 25 bp, Saccharomyces pastorianus
aatgtggtctacaaggtcactctat

SEQ ID NO: 59408 - DNA, 25 bp, Saccharomyces pastorianus
acataggtacatcgatgctgctgat

SEQ ID NO: 59409 - DNA, 25 bp, Saccharomyces pastorianus
aatcgtatacggatgctgccatagc

SEQ ID NO: 59410 - DNA, 25 bp, Saccharomyces pastorianus
gcgaagtacctttcatcgattcaat

SEQ ID NO: 59411 - DNA, 25 bp, Saccharomyces pastorianus
atgctctagcactgtaccgttatga

SEQ ID NO: 59412 - DNA, 25 bp, Saccharomyces pastorianus
agacaacgaacctttgcgccgtaag

SEQ ID NO: 59413 - DNA, 25 bp, Saccharomyces pastorianus
gtaatacattacgttgaggctcatg

SEQ ID NO: 59414 - DNA, 25 bp, Saccharomyces pastorianus
aggctttagagcatctttccgaaat

SEQ ID NO: 59415 - DNA, 25 bp, Saccharomyces pastorianus
ctttgcgccgtaaggtcatgattga

SEQ ID NO: 59416 - DNA, 25 bp, Saccharomyces pastorianus
ggtcactctatctctgtatgatgtc

SEQ ID NO: 59417 - DNA, 25 bp, Saccharomyces pastorianus
gaggctattaccattgctgttcaga

SEQ ID NO: 59418 - DNA, 25 bp, Saccharomyces pastorianus
ccagaaattccggttccagagatcc

SEQ ID NO: 59419 - DNA, 25 bp, Saccharomyces pastorianus
attagcgaaaaagacagagagagag

SEQ ID NO: 59420 - DNA, 25 bp, Saccharomyces pastorianus
ttctattagcgaaaaagacagagag

SEQ ID NO: 59421 - DNA, 25 bp, Saccharomyces pastorianus
tattagcgaaaaagacagagagaga

SEQ ID NO: 59422 - DNA, 25 bp, Saccharomyces pastorianus
gggaagtttactacatcccagaaat

SEQ ID NO: 59423 - DNA, 25 bp, Saccharomyces pastorianus
cagaaattccggttccagagatcca

SEQ ID NO: 59424 - DNA, 25 bp, Saccharomyces pastorianus
agcgaaaaagacagagagagagtta

SEQ ID NO: 59425 - DNA, 25 bp, Saccharomyces pastorianus
agaaattccggttccagagatccaa

SEQ ID NO: 59426 - DNA, 25 bp, Saccharomyces pastorianus
ctattagcgaaaaagacagagagag

SEQ ID NO: 59427 - DNA, 25 bp, Saccharomyces pastorianus
agacagagagagagttaatgaaaac

SEQ ID NO: 59428 - DNA, 25 bp, Saccharomyces pastorianus
tagcgaaaaagacagagagagagtt

SEQ ID NO: 59429 - DNA, 25 bp, Saccharomyces pastorianus
acgttagatatggtcagtgtcggga

SEQ ID NO: 59430 - DNA, 25 bp, Saccharomyces pastorianus
agattgcgcaaggacgggaacctga

SEQ ID NO: 59431 - DNA, 25 bp, Saccharomyces pastorianus
atcgtgtgtctcgtgggcatctaca

SEQ ID NO: 59432 - DNA, 25 bp, Saccharomyces pastorianus
ggaacctgagatcggacgttcccat

SEQ ID NO: 59433 - DNA, 25 bp, Saccharomyces pastorianus
ggcacgaagttctttgagcccatcg

SEQ ID NO: 59434 - DNA, 25 bp, Saccharomyces pastorianus
catcgtgatcgatagattgcgcaag

SEQ ID NO: 59435 - DNA, 25 bp, Saccharomyces pastorianus
gggcatctacacaggcacgaagttc

SEQ ID NO: 59436 - DNA, 25 bp, Saccharomyces pastorianus
tcagtgtcgggatcgtgtgtctcgt

SEQ ID NO: 59437 - DNA, 25 bp, Saccharomyces pastorianus
gttcccatcccggactatgataggg

SEQ ID NO: 59438 - DNA, 25 bp, Saccharomyces pastorianus
actatgatagggacgggaacttggt

SEQ ID NO: 59439 - DNA, 25 bp, Saccharomyces pastorianus
ttctttgagcccatcgtgatcgata

SEQ ID NO: 59440 - DNA, 25 bp, Saccharomyces pastorianus
atcagcctaaatccaataagcccct

SEQ ID NO: 59441 - DNA, 25 bp, Saccharomyces pastorianus
gagagttctgatggttccgtgtttg

SEQ ID NO: 59442 - DNA, 25 bp, Saccharomyces pastorianus
tcaacccggttcaagtattttgtca

SEQ ID NO: 59443 - DNA, 25 bp, Saccharomyces pastorianus
ataagccccttctgaacttgaatga

SEQ ID NO: 59444 - DNA, 25 bp, Saccharomyces pastorianus
gttgaggctgaaataccgcctagat

SEQ ID NO: 59445 - DNA, 25 bp, Saccharomyces pastorianus
tgagttacgattgagggatcatcct

SEQ ID NO: 59446 - DNA, 25 bp, Saccharomyces pastorianus
gcaaacgggaactattcatctttga

SEQ ID NO: 59447 - DNA, 25 bp, Saccharomyces pastorianus
aggcaccgtgggaatagactttata

SEQ ID NO: 59448 - DNA, 25 bp, Saccharomyces pastorianus
tatttatttcgatccggcagccaaa

SEQ ID NO: 59449 - DNA, 25 bp, Saccharomyces pastorianus
ggttccgtgtttgagtgtgagttac

SEQ ID NO: 59450 - DNA, 25 bp, Saccharomyces pastorianus
ttaacgaggaggattacaggcaccg

SEQ ID NO: 59451 - DNA, 25 bp, Saccharomyces pastorianus
ggtgcgtatgactacagtttccagt

SEQ ID NO: 59452 - DNA, 25 bp, Saccharomyces pastorianus
gggatttttacagctctaatgatca

SEQ ID NO: 59453 - DNA, 25 bp, Saccharomyces pastorianus
gtatggaatgctcttgatggatctt

SEQ ID NO: 59454 - DNA, 25 bp, Saccharomyces pastorianus
gtgacaaggagcaacgcacggcttc

SEQ ID NO: 59455 - DNA, 25 bp, Saccharomyces pastorianus
gggttctcagagactttgacaaaga

SEQ ID NO: 59456 - DNA, 25 bp, Saccharomyces pastorianus
gaacagagagttttccctccagata

SEQ ID NO: 59457 - DNA, 25 bp, Saccharomyces pastorianus
cagtttccagtttgacaagtttcct

SEQ ID NO: 59458 - DNA, 25 bp, Saccharomyces pastorianus
taaaccgttccacagattaatcagg

SEQ ID NO: 59459 - DNA, 25 bp, Saccharomyces pastorianus
gatggatcttcaaagccgttcaaag

SEQ ID NO: 59460 - DNA, 25 bp, Saccharomyces pastorianus
aaggcagcatcttggtttaaaccgt

SEQ ID NO: 59461 - DNA, 25 bp, Saccharomyces pastorianus
taataggtccttccatactttgtta

SEQ ID NO: 59462 - DNA, 25 bp, Saccharomyces pastorianus
taattttggacaacttcttgggaag

SEQ ID NO: 59463 - DNA, 25 bp, Saccharomyces pastorianus
gtcgtgaagttaagactgcgtccat

SEQ ID NO: 59464 - DNA, 25 bp, Saccharomyces pastorianus
gtcgccttactatcggtgtttgttt

SEQ ID NO: 59465 - DNA, 25 bp, Saccharomyces pastorianus
gaacctgaagaaatagtcgccttac

SEQ ID NO: 59466 - DNA, 25 bp, Saccharomyces pastorianus
ggtaccgtggtcagagtcattacat

SEQ ID NO: 59467 - DNA, 25 bp, Saccharomyces pastorianus
cttaagtctactacctgattatgaa

SEQ ID NO: 59468 - DNA, 25 bp, Saccharomyces pastorianus
attgtcacaccaaggctagcaaagg

SEQ ID NO: 59469 - DNA, 25 bp, Saccharomyces pastorianus
ggaaatgcttggtgcttttagtaca

SEQ ID NO: 59470 - DNA, 25 bp, Saccharomyces pastorianus
atgagccctgaagccgaaggtaccg

SEQ ID NO: 59471 - DNA, 25 bp, Saccharomyces pastorianus
aattctggttatgaactggttctaa

SEQ ID NO: 59472 - DNA, 25 bp, Saccharomyces pastorianus
gaatgggctcgtggtttatcgttta

SEQ ID NO: 59473 - DNA, 25 bp, Saccharomyces pastorianus
gttcatcatggagggttgttgccta

SEQ ID NO: 59474 - DNA, 25 bp, Saccharomyces pastorianus
atggcctgaacttgtcaactaccta

SEQ ID NO: 59475 - DNA, 25 bp, Saccharomyces pastorianus
gtttagattctaccgggacagtcat

SEQ ID NO: 59476 - DNA, 25 bp, Saccharomyces pastorianus
gacagtcatcgtcatggcgtacagt

SEQ ID NO: 59477 - DNA, 25 bp, Saccharomyces pastorianus
agttctcctctatctatcactacat

SEQ ID NO: 59478 - DNA, 25 bp, Saccharomyces pastorianus
gtttgccacagaaacatttgccatg

SEQ ID NO: 59479 - DNA, 25 bp, Saccharomyces pastorianus
gagagttcactcaaatggctggtag

SEQ ID NO: 59480 - DNA, 25 bp, Saccharomyces pastorianus
gtaaccatgggtgttccaacaaggt

SEQ ID NO: 59481 - DNA, 25 bp, Saccharomyces pastorianus
atcagatccttgctggaacgtggta

SEQ ID NO: 59482 - DNA, 25 bp, Saccharomyces pastorianus
gccatgggtttgaacttacctacaa

SEQ ID NO: 59483 - DNA, 25 bp, Saccharomyces pastorianus
agaaggaattgctacccatggttgt

SEQ ID NO: 59484 - DNA, 25 bp, Saccharomyces pastorianus
gatgaaagctttgttttcgttccca

SEQ ID NO: 59485 - DNA, 25 bp, Saccharomyces pastorianus
agactacgcacaattctccatggag

SEQ ID NO: 59486 - DNA, 25 bp, Saccharomyces pastorianus
gtggtgccctgatcaagccatggat

SEQ ID NO: 59487 - DNA, 25 bp, Saccharomyces pastorianus
attgacagtgtcatggttgcccgtg

SEQ ID NO: 59488 - DNA, 25 bp, Saccharomyces pastorianus
tttaatgggcagcacggacgtcaac

SEQ ID NO: 59489 - DNA, 25 bp, Saccharomyces pastorianus
ttgcgagagatatcccgttcagttg

SEQ ID NO: 59490 - DNA, 25 bp, Saccharomyces pastorianus
ggctttctcaatgccgtagattctt

SEQ ID NO: 59491 - DNA, 25 bp, Saccharomyces pastorianus
acgtgggccaagttgctgatacatt

SEQ ID NO: 59492 - DNA, 25 bp, Saccharomyces pastorianus
gatacattcctatgggcatttgcga

SEQ ID NO: 59493 - DNA, 25 bp, Saccharomyces pastorianus
gttcatgtcctttttccacagatac

SEQ ID NO: 59494 - DNA, 25 bp, Saccharomyces pastorianus
gacgtcaacgactggatcaagctaa

SEQ ID NO: 59495 - DNA, 25 bp, Saccharomyces pastorianus
gatcatcgcaatcggttaatctgga

SEQ ID NO: 59496 - DNA, 25 bp, Saccharomyces pastorianus
ctaagtaacccagcactatttgcgg

SEQ ID NO: 59497 - DNA, 25 bp, Saccharomyces pastorianus
atcgccgataaaaatgtgcccgtta

SEQ ID NO: 59498 - DNA, 25 bp, Saccharomyces pastorianus
aaacttcgacttcaagcgtcacggc

SEQ ID NO: 59499 - DNA, 25 bp, Saccharomyces pastorianus
gagtttggcggtttgccgtttcagc

SEQ ID NO: 59500 - DNA, 25 bp, Saccharomyces pastorianus
gccaacggagactgcttcaaattat

SEQ ID NO: 59501 - DNA, 25 bp, Saccharomyces pastorianus
gaactgtgccggaacttatgtgata

SEQ ID NO: 59502 - DNA, 25 bp, Saccharomyces pastorianus
gattcacggtcgtacacgtagaact

SEQ ID NO: 59503 - DNA, 25 bp, Saccharomyces pastorianus
ttggatcaaacggtcgaactgtgcc

SEQ ID NO: 59504 - DNA, 25 bp, Saccharomyces pastorianus
tcatggctgtccgtgggttactaag

SEQ ID NO: 59505 - DNA, 25 bp, Saccharomyces pastorianus
agctggcccagcatcatttatattg

SEQ ID NO: 59506 - DNA, 25 bp, Saccharomyces pastorianus
tctcttacgttgaacctgtcttggt

SEQ ID NO: 59507 - DNA, 25 bp, Saccharomyces pastorianus
atgggtaccgaagatgtccgtctag

SEQ ID NO: 59508 - DNA, 25 bp, Saccharomyces pastorianus
gaacccattgttctcttacgttgaa

SEQ ID NO: 59509 - DNA, 25 bp, Saccharomyces pastorianus
gctccagaattgaaccaagctattt

SEQ ID NO: 59510 - DNA, 25 bp, Saccharomyces pastorianus
attgttctcttacgttgaacctgtc

SEQ ID NO: 59511 - DNA, 25 bp, Saccharomyces pastorianus
aagatgtccgtctagctccagaatt

SEQ ID NO: 59512 - DNA, 25 bp, Saccharomyces pastorianus
tgaacctgtcttggttgcctctgcc

SEQ ID NO: 59513 - DNA, 25 bp, Saccharomyces pastorianus
gctatttggaagagaggtgttaaag

SEQ ID NO: 59514 - DNA, 25 bp, Saccharomyces pastorianus
agctatttggaagagaggtgttaaa

SEQ ID NO: 59515 - DNA, 25 bp, Saccharomyces pastorianus
ttggaagagaggtgttaaaggtgtt

SEQ ID NO: 59516 - DNA, 25 bp, Saccharomyces pastorianus
tgtcttggttgcctctgccaagggt

SEQ ID NO: 59517 - DNA, 25 bp, Saccharomyces pastorianus
gagtgaggaatctagttccgctaac

SEQ ID NO: 59518 - DNA, 25 bp, Saccharomyces pastorianus
gagccactaaacctggaagacgctt

SEQ ID NO: 59519 - DNA, 25 bp, Saccharomyces pastorianus
actggcgacgatggagctgctcaca

SEQ ID NO: 59520 - DNA, 25 bp, Saccharomyces pastorianus
tcaacctcccgttacaacttcaaag

SEQ ID NO: 59521 - DNA, 25 bp, Saccharomyces pastorianus
ggagctgctcacagggaagtctttc

SEQ ID NO: 59522 - DNA, 25 bp, Saccharomyces pastorianus
aaccacttcccatattctgtcgaat

SEQ ID NO: 59523 - DNA, 25 bp, Saccharomyces pastorianus
gacaagcctttaagagagccactaa

SEQ ID NO: 59524 - DNA, 25 bp, Saccharomyces pastorianus
gaagacagctttggacacaacacaa

SEQ ID NO: 59525 - DNA, 25 bp, Saccharomyces pastorianus
gggcttccatgtctcaagtagggat

SEQ ID NO: 59526 - DNA, 25 bp, Saccharomyces pastorianus
gggaagtctttcaagccatacctga

SEQ ID NO: 59527 - DNA, 25 bp, Saccharomyces pastorianus
agattgaggcgctattcaccgtggc

SEQ ID NO: 59528 - DNA, 25 bp, Saccharomyces pastorianus
ggaacagaagcttcgaagacgttag

SEQ ID NO: 59529 - DNA, 25 bp, Saccharomyces pastorianus
aggaccgaagagctggaccgattac

SEQ ID NO: 59530 - DNA, 25 bp, Saccharomyces pastorianus
tagagaggtataccccgtatctggg

SEQ ID NO: 59531 - DNA, 25 bp, Saccharomyces pastorianus
gggcgcgctgaagttttacaaaaag

SEQ ID NO: 59532 - DNA, 25 bp, Saccharomyces pastorianus
caaatgtgtgttacctgctaatgac

SEQ ID NO: 59533 - DNA, 25 bp, Saccharomyces pastorianus
gcgacttcacgatgactcgtttaag

SEQ ID NO: 59534 - DNA, 25 bp, Saccharomyces pastorianus
atatagtcaactcaccaaatggaac

SEQ ID NO: 59535 - DNA, 25 bp, Saccharomyces pastorianus
gggatctccgaatcattgagatggc

SEQ ID NO: 59536 - DNA, 25 bp, Saccharomyces pastorianus
gaatttactgcgacttcacgatgac

SEQ ID NO: 59537 - DNA, 25 bp, Saccharomyces pastorianus
tgacatgttagagaggtataccccg

SEQ ID NO: 59538 - DNA, 25 bp, Saccharomyces pastorianus
gagctggaccgattacttgacaata

SEQ ID NO: 59539 - DNA, 25 bp, Saccharomyces pastorianus
agcgaaaagttcgacgtcgtcaagg

SEQ ID NO: 59540 - DNA, 25 bp, Saccharomyces pastorianus
gggtatccttatggaagtcttacaa

SEQ ID NO: 59541 - DNA, 25 bp, Saccharomyces pastorianus
gtcaaactggactttgggtatcctt

SEQ ID NO: 59542 - DNA, 25 bp, Saccharomyces pastorianus
gacgacaacaaacttccaggacgaa

SEQ ID NO: 59543 - DNA, 25 bp, Saccharomyces pastorianus
catgcgtataggtactggccttata

SEQ ID NO: 59544 - DNA, 25 bp, Saccharomyces pastorianus
tgaaaaccctggttctgatctttta

SEQ ID NO: 59545 - DNA, 25 bp, Saccharomyces pastorianus
agaattctgtgcctgacaagcgaaa

SEQ ID NO: 59546 - DNA, 25 bp, Saccharomyces pastorianus
gagggtgacctactgatagacaaac

SEQ ID NO: 59547 - DNA, 25 bp, Saccharomyces pastorianus
agcttgcgagcggtttgaacatcta

SEQ ID NO: 59548 - DNA, 25 bp, Saccharomyces pastorianus
gccaaaagaccgctattgattcttg

SEQ ID NO: 59549 - DNA, 25 bp, Saccharomyces pastorianus
agttgtgttgacgagggtgacctac

SEQ ID NO: 59550 - DNA, 25 bp, Saccharomyces pastorianus
aattctttgcccctgtggtagacgt

SEQ ID NO: 59551 - DNA, 25 bp, Saccharomyces pastorianus
agttttgcccatctcttgatgtgca

SEQ ID NO: 59552 - DNA, 25 bp, Saccharomyces pastorianus
cttccaccaatcgtacagctttgaa

SEQ ID NO: 59553 - DNA, 25 bp, Saccharomyces pastorianus
gcccgtccgttttgttcaagaactg

SEQ ID NO: 59554 - DNA, 25 bp, Saccharomyces pastorianus
tggcaccaagcaaacactctacgag

SEQ ID NO: 59555 - DNA, 25 bp, Saccharomyces pastorianus
atgtttggaggattcgacccaccgc

SEQ ID NO: 59556 - DNA, 25 bp, Saccharomyces pastorianus
atagttagttgctgcgatctgggcc

SEQ ID NO: 59557 - DNA, 25 bp, Saccharomyces pastorianus
tattcgcaatcaacgcattggcgcc

SEQ ID NO: 59558 - DNA, 25 bp, Saccharomyces pastorianus
tagacgtgaaccatctggccgccaa

SEQ ID NO: 59559 - DNA, 25 bp, Saccharomyces pastorianus
taccttactcgctacaacatatcat

SEQ ID NO: 59560 - DNA, 25 bp, Saccharomyces pastorianus
ttgtcaacatcgcaagtactctggg

SEQ ID NO: 59561 - DNA, 25 bp, Saccharomyces pastorianus
acaggtgttgtagtagatcttttca

SEQ ID NO: 59562 - DNA, 25 bp, Saccharomyces pastorianus
agaagctatgcctgatttggtatca

SEQ ID NO: 59563 - DNA, 25 bp, Saccharomyces pastorianus
aacaggctcgttttgaacttggcgt

SEQ ID NO: 59564 - DNA, 25 bp, Saccharomyces pastorianus
gactcggctttaccaattgccatgg

SEQ ID NO: 59565 - DNA, 25 bp, Saccharomyces pastorianus
gaacttggcgtctccatgatgattt

SEQ ID NO: 59566 - DNA, 25 bp, Saccharomyces pastorianus
tgctttggatgttgccgttgaaaat

SEQ ID NO: 59567 - DNA, 25 bp, Saccharomyces pastorianus
aaccggaacccgttgtagatgatga

SEQ ID NO: 59568 - DNA, 25 bp, Saccharomyces pastorianus
aagagtcattcacgttgaaggcgat

SEQ ID NO: 59569 - DNA, 25 bp, Saccharomyces pastorianus
gtggcccggactcttctgagaaaag

SEQ ID NO: 59570 - DNA, 25 bp, Saccharomyces pastorianus
gagacattgctgtatgctatggttg

SEQ ID NO: 59571 - DNA, 25 bp, Saccharomyces pastorianus
accaacgtcgaagatgactcggctt

SEQ ID NO: 59572 - DNA, 25 bp, Saccharomyces pastorianus
tactgcacttttcttagctttaggc

SEQ ID NO: 59573 - DNA, 25 bp, Saccharomyces pastorianus
agtgttgttgctgaagccaccattc

SEQ ID NO: 59574 - DNA, 25 bp, Saccharomyces pastorianus
gaagtcgtttctgtatccggtaatt

SEQ ID NO: 59575 - DNA, 25 bp, Saccharomyces pastorianus
agaatatctgtctctatgccctcga

SEQ ID NO: 59576 - DNA, 25 bp, Saccharomyces pastorianus
acagggcgctatgcttgatctctta

SEQ ID NO: 59577 - DNA, 25 bp, Saccharomyces pastorianus
cacttgctgctggtcatttggtaca

SEQ ID NO: 59578 - DNA, 25 bp, Saccharomyces pastorianus
gaactatctctgtgttctgcacttg

SEQ ID NO: 59579 - DNA, 25 bp, Saccharomyces pastorianus
taccgttttggaaccacagggcgct

SEQ ID NO: 59580 - DNA, 25 bp, Saccharomyces pastorianus
aaacttggtcggatctgcaatggct

SEQ ID NO: 59581 - DNA, 25 bp, Saccharomyces pastorianus
agctttaggccaagatccagcgcag

SEQ ID NO: 59582 - DNA, 25 bp, Saccharomyces pastorianus
atctgttggtggcttcaatgcgcat

SEQ ID NO: 59583 - DNA, 25 bp, Saccharomyces pastorianus
tgattgcctgtggtgctatcagtgc

SEQ ID NO: 59584 - DNA, 25 bp, Saccharomyces pastorianus
ttttaagaatgttcccttgatatgg

SEQ ID NO: 59585 - DNA, 25 bp, Saccharomyces pastorianus
cactcttgaagatggtagcgctgat

SEQ ID NO: 59586 - DNA, 25 bp, Saccharomyces pastorianus
ggatgagtttccagaagcattgaaa

SEQ ID NO: 59587 - DNA, 25 bp, Saccharomyces pastorianus
taacggattatgtggatgagtttcc

SEQ ID NO: 59588 - DNA, 25 bp, Saccharomyces pastorianus
gcttggagaattctgccactcttga

SEQ ID NO: 59589 - DNA, 25 bp, Saccharomyces pastorianus
gatggtagcgctgataattttaaga

SEQ ID NO: 59590 - DNA, 25 bp, Saccharomyces pastorianus
gttacggctttgttctaaccaagag

SEQ ID NO: 59591 - DNA, 25 bp, Saccharomyces pastorianus
aaacggccagatcggcttggagaat

SEQ ID NO: 59592 - DNA, 25 bp, Saccharomyces pastorianus
tcagtgcctataacgatccatcaaa

SEQ ID NO: 59593 - DNA, 25 bp, Saccharomyces pastorianus
gagaattctgccactcttgaagatg

SEQ ID NO: 59594 - DNA, 25 bp, Saccharomyces pastorianus
atgcaaaaggtgtccaacctggtga

SEQ ID NO: 59595 - DNA, 25 bp, Saccharomyces pastorianus
aaaattttggatttcctcgatggat

SEQ ID NO: 59596 - DNA, 25 bp, Saccharomyces pastorianus
aaacgaaaagtttgctcctggtgat

SEQ ID NO: 59597 - DNA, 25 bp, Saccharomyces pastorianus
ggatagctaaggtcttggcttctaa

SEQ ID NO: 59598 - DNA, 25 bp, Saccharomyces pastorianus
actggttggactacccacgttatag

SEQ ID NO: 59599 - DNA, 25 bp, Saccharomyces pastorianus
gctcctggtgattatgtctctgcaa

SEQ ID NO: 59600 - DNA, 25 bp, Saccharomyces pastorianus
gaatgcactttcgaactaactgaga

SEQ ID NO: 59601 - DNA, 25 bp, Saccharomyces pastorianus
gaaagaactctctccagaacaacta

SEQ ID NO: 59602 - DNA, 25 bp, Saccharomyces pastorianus
cccacgttatagttcctcaatcgga

SEQ ID NO: 59603 - DNA, 25 bp, Saccharomyces pastorianus
attacttgtctaatgatcctgctca

SEQ ID NO: 59604 - DNA, 25 bp, Saccharomyces pastorianus
aattttactgatcctgaatgcactt

SEQ ID NO: 59605 - DNA, 25 bp, Saccharomyces pastorianus
acgctacatcgtctaacggtgctga

SEQ ID NO: 59606 - DNA, 25 bp, Saccharomyces pastorianus
gtgacccagcaaaaggcactagagg

SEQ ID NO: 59607 - DNA, 25 bp, Saccharomyces pastorianus
gatacgctacatcgtctaacggtgc

SEQ ID NO: 59608 - DNA, 25 bp, Saccharomyces pastorianus
ggcactagaggaggacaaccagcag

SEQ ID NO: 59609 - DNA, 25 bp, Saccharomyces pastorianus
gagtcacagatacgctacatcgtct

SEQ ID NO: 59610 - DNA, 25 bp, Saccharomyces pastorianus
tataccagagtcacagatacgctac

SEQ ID NO: 59611 - DNA, 25 bp, Saccharomyces pastorianus
ctaacggtgctgacgctagttggtg

SEQ ID NO: 59612 - DNA, 25 bp, Saccharomyces pastorianus
tacatcgtctaacggtgctgacgct

SEQ ID NO: 59613 - DNA, 25 bp, Saccharomyces pastorianus
gtctaacggtgctgacgctagttgg

SEQ ID NO: 59614 - DNA, 25 bp, Saccharomyces pastorianus
gctgacgctagttggtggtacgtta

SEQ ID NO: 59615 - DNA, 25 bp, Saccharomyces pastorianus
gtctaaatatgcttggtataccaga

SEQ ID NO: 59616 - DNA, 25 bp, Saccharomyces pastorianus
acgctacatcgtctaacggtgctga

SEQ ID NO: 59617 - DNA, 25 bp, Saccharomyces pastorianus
gatacgctacatcgtctaacggtgc

SEQ ID NO: 59618 - DNA, 25 bp, Saccharomyces pastorianus
gtgacccagcaaaaggcactagagg

SEQ ID NO: 59619 - DNA, 25 bp, Saccharomyces pastorianus
ggcactagaggaggacaaccagcag

SEQ ID NO: 59620 - DNA, 25 bp, Saccharomyces pastorianus
gagtcacagatacgctacatcgtct

SEQ ID NO: 59621 - DNA, 25 bp, Saccharomyces pastorianus
tataccagagtcacagatacgctac

SEQ ID NO: 59622 - DNA, 25 bp, Saccharomyces pastorianus
tacatcgtctaacggtgctgacgct

SEQ ID NO: 59623 - DNA, 25 bp, Saccharomyces pastorianus
tctaacggtgctgacgctagttggt

SEQ ID NO: 59624 - DNA, 25 bp, Saccharomyces pastorianus
ggtacgttatacatgtccggtggct

SEQ ID NO: 59625 - DNA, 25 bp, Saccharomyces pastorianus
gctgacgctagttggtggtacgtta

SEQ ID NO: 59626 - DNA, 25 bp, Saccharomyces pastorianus
gtctaaatatgcttggtataccaga

SEQ ID NO: 59627 - DNA, 25 bp, Saccharomyces pastorianus
gagaatctctgaaactccagtggat

SEQ ID NO: 59628 - DNA, 25 bp, Saccharomyces pastorianus
aaagcgtgtcggtctattctcttac

SEQ ID NO: 59629 - DNA, 25 bp, Saccharomyces pastorianus
ggttccattgagcacttgcaatctg

SEQ ID NO: 59630 - DNA, 25 bp, Saccharomyces pastorianus
gattacaacgttttccacgtgccaa

SEQ ID NO: 59631 - DNA, 25 bp, Saccharomyces pastorianus
atgtacaccgcatccgtatatgctg

SEQ ID NO: 59632 - DNA, 25 bp, Saccharomyces pastorianus
ctaaccctgcattattcccagaagt

SEQ ID NO: 59633 - DNA, 25 bp, Saccharomyces pastorianus
cacgtgccaacctgtaaactagtca

SEQ ID NO: 59634 - DNA, 25 bp, Saccharomyces pastorianus
tctctattaaactacgtcggctctg

SEQ ID NO: 59635 - DNA, 25 bp, Saccharomyces pastorianus
gcaatctggcgtttactacttgacc

SEQ ID NO: 59636 - DNA, 25 bp, Saccharomyces pastorianus
tggctgcttctctatattcctgtaa

SEQ ID NO: 59637 - DNA, 25 bp, Saccharomyces pastorianus
gacctttgtcaatgttgctaagcca

SEQ ID NO: 59638 - DNA, 25 bp, Saccharomyces pastorianus
cagaattcatttcccattggtgtca

SEQ ID NO: 59639 - DNA, 25 bp, Saccharomyces pastorianus
aagagagccacccatgagtccaatt

SEQ ID NO: 59640 - DNA, 25 bp, Saccharomyces pastorianus
gatcggtatctgttacgagccacca

SEQ ID NO: 59641 - DNA, 25 bp, Saccharomyces pastorianus
gagtccaattccgtgtcagagatca

SEQ ID NO: 59642 - DNA, 25 bp, Saccharomyces pastorianus
caagttctgaactggcttctgtgga

SEQ ID NO: 59643 - DNA, 25 bp, Saccharomyces pastorianus
accgccattgccgaggcttggaaaa

SEQ ID NO: 59644 - DNA, 25 bp, Saccharomyces pastorianus
gagccgtttgtatgttatcccacac

SEQ ID NO: 59645 - DNA, 25 bp, Saccharomyces pastorianus
atacgctcctatcttgtccaataag

SEQ ID NO: 59646 - DNA, 25 bp, Saccharomyces pastorianus
gagccaccaaccgtaataccaagtt

SEQ ID NO: 59647 - DNA, 25 bp, Saccharomyces pastorianus
gcgtccttaaggttcgatggttcgt

SEQ ID NO: 59648 - DNA, 25 bp, Saccharomyces pastorianus
gtgtcatctgtaacagcgtccttaa

SEQ ID NO: 59649 - DNA, 25 bp, Saccharomyces pastorianus
acacggccttatgggctggaggttc

SEQ ID NO: 59650 - DNA, 25 bp, Saccharomyces pastorianus
atctcgggataggattagccacttt

SEQ ID NO: 59651 - DNA, 25 bp, Saccharomyces pastorianus
aatggatctttcattcccagcttct

SEQ ID NO: 59652 - DNA, 25 bp, Saccharomyces pastorianus
gaaatgcagcttgacccagatggga

SEQ ID NO: 59653 - DNA, 25 bp, Saccharomyces pastorianus
atgttatccttgttctttgggtggg

SEQ ID NO: 59654 - DNA, 25 bp, Saccharomyces pastorianus
gttgcattcaatgttggctcgataa

SEQ ID NO: 59655 - DNA, 25 bp, Saccharomyces pastorianus
gccagcgttacaccagttcatgagt

SEQ ID NO: 59656 - DNA, 25 bp, Saccharomyces pastorianus
actgttgtcaactattccatgtcat

SEQ ID NO: 59657 - DNA, 25 bp, Saccharomyces pastorianus
gctgctttactcgttggattttcca

SEQ ID NO: 59658 - DNA, 25 bp, Saccharomyces pastorianus
agcttcttccatcatcttcagtgat

SEQ ID NO: 59659 - DNA, 25 bp, Saccharomyces pastorianus
agttcatgagtcgtacttccgtact

SEQ ID NO: 59660 - DNA, 25 bp, Saccharomyces pastorianus
atcatctagatcagtgtccgtggaa

SEQ ID NO: 59661 - DNA, 25 bp, Saccharomyces pastorianus
agaactgctgtccatcatgttgctg

SEQ ID NO: 59662 - DNA, 25 bp, Saccharomyces pastorianus
atctttaagtgctgctgttgccacg

SEQ ID NO: 59663 - DNA, 25 bp, Saccharomyces pastorianus
aacgactattctcttcttggactgt

SEQ ID NO: 59664 - DNA, 25 bp, Saccharomyces pastorianus
ggaactcatcccgtatattttacta

SEQ ID NO: 59665 - DNA, 25 bp, Saccharomyces pastorianus
gaggatttggtccagtgcacagcct

SEQ ID NO: 59666 - DNA, 25 bp, Saccharomyces pastorianus
ttcaccgggcatctgtcaaaaggtt

SEQ ID NO: 59667 - DNA, 25 bp, Saccharomyces pastorianus
ttggactgttgcttctcggttacac

SEQ ID NO: 59668 - DNA, 25 bp, Saccharomyces pastorianus
acatgctctgtggtgtcgatattac

SEQ ID NO: 59669 - DNA, 25 bp, Saccharomyces pastorianus
acgccatcatgtcgatgcacttatc

SEQ ID NO: 59670 - DNA, 25 bp, Saccharomyces pastorianus
agggcccaggcgatctttaagtgct

SEQ ID NO: 59671 - DNA, 25 bp, Saccharomyces pastorianus
aagatttcagatactttacccttgc

SEQ ID NO: 59672 - DNA, 25 bp, Saccharomyces pastorianus
ggagctggcagttgagaacccgtta

SEQ ID NO: 59673 - DNA, 25 bp, Saccharomyces pastorianus
tacgacgctcctcaggtaactgcag

SEQ ID NO: 59674 - DNA, 25 bp, Saccharomyces pastorianus
acacagcccgttcttaatgggtcat

SEQ ID NO: 59675 - DNA, 25 bp, Saccharomyces pastorianus
gaacccgttagcaaagactatggca

SEQ ID NO: 59676 - DNA, 25 bp, Saccharomyces pastorianus
tgaacgttctgaggcgatttccaaa

SEQ ID NO: 59677 - DNA, 25 bp, Saccharomyces pastorianus
gagaaattccatatggtcctgattt

SEQ ID NO: 59678 - DNA, 25 bp, Saccharomyces pastorianus
tgaacgaaatcgtcccactacacag

SEQ ID NO: 59679 - DNA, 25 bp, Saccharomyces pastorianus
gtaactgcagcggagaaatcattca

SEQ ID NO: 59680 - DNA, 25 bp, Saccharomyces pastorianus
atggcagatgccgttcgtgaactag

SEQ ID NO: 59681 - DNA, 25 bp, Saccharomyces pastorianus
ttacccttgctactttgacgtgaac

SEQ ID NO: 59682 - DNA, 25 bp, Saccharomyces pastorianus
actggaattcgtcaagggtataagc

SEQ ID NO: 59683 - DNA, 25 bp, Saccharomyces pastorianus
aaagcccactgtcggtggctataca

SEQ ID NO: 59684 - DNA, 25 bp, Saccharomyces pastorianus
tatcacccagactacataacatttg

SEQ ID NO: 59685 - DNA, 25 bp, Saccharomyces pastorianus
tatactgttttactggaaagcccac

SEQ ID NO: 59686 - DNA, 25 bp, Saccharomyces pastorianus
gagaataatacccaccactctggaa

SEQ ID NO: 59687 - DNA, 25 bp, Saccharomyces pastorianus
gcctctttgtctcatattttggcaa

SEQ ID NO: 59688 - DNA, 25 bp, Saccharomyces pastorianus
agcaaattcttgacgcatccaaagt

SEQ ID NO: 59689 - DNA, 25 bp, Saccharomyces pastorianus
gagtcgtagaactagtcattggttt

SEQ ID NO: 59690 - DNA, 25 bp, Saccharomyces pastorianus
gcaatggtctgttgtctatcatcct

SEQ ID NO: 59691 - DNA, 25 bp, Saccharomyces pastorianus
tttacctgagacctgcctctttgtc

SEQ ID NO: 59692 - DNA, 25 bp, Saccharomyces pastorianus
gagtcaattaggcatcaaggtttta

SEQ ID NO: 59693 - DNA, 25 bp, Saccharomyces pastorianus
gagttctctagacactacaagcagc

SEQ ID NO: 59694 - DNA, 25 bp, Saccharomyces pastorianus
gaagataatggccagcagccaccta

SEQ ID NO: 59695 - DNA, 25 bp, Saccharomyces pastorianus
gcagccacctattacttcaaacttg

SEQ ID NO: 59696 - DNA, 25 bp, Saccharomyces pastorianus
aataacgcgtcgatcattcaagtaa

SEQ ID NO: 59697 - DNA, 25 bp, Saccharomyces pastorianus
gaatttctgacaatgctcacaccaa

SEQ ID NO: 59698 - DNA, 25 bp, Saccharomyces pastorianus
taattgctaatgtcgtggatccaag

SEQ ID NO: 59699 - DNA, 25 bp, Saccharomyces pastorianus
gtacccaattggatcactcacaaca

SEQ ID NO: 59700 - DNA, 25 bp, Saccharomyces pastorianus
ccccatttggtctcttcttatttga

SEQ ID NO: 59701 - DNA, 25 bp, Saccharomyces pastorianus
aaatccgatttgctagtatcacccc

SEQ ID NO: 59702 - DNA, 25 bp, Saccharomyces pastorianus
ttatcaagcttgtcgagttctctag

SEQ ID NO: 59703 - DNA, 25 bp, Saccharomyces pastorianus
tataacggttggtctctagtgggta

SEQ ID NO: 59704 - DNA, 25 bp, Saccharomyces pastorianus
gcgtcgatcgacacgtacgagcaga

SEQ ID NO: 59705 - DNA, 25 bp, Saccharomyces pastorianus
gacgagaccagcagcgtcgagccgt

SEQ ID NO: 59706 - DNA, 25 bp, Saccharomyces pastorianus
caaactgcgcttgggcgtcgatcga

SEQ ID NO: 59707 - DNA, 25 bp, Saccharomyces pastorianus
gttcacgaccccacgcgaaacggtg

SEQ ID NO: 59708 - DNA, 25 bp, Saccharomyces pastorianus
cgtccgtggacgagaccagcagcgt

SEQ ID NO: 59709 - DNA, 25 bp, Saccharomyces pastorianus
gagcagaacccgtccgtggacgaga

SEQ ID NO: 59710 - DNA, 25 bp, Saccharomyces pastorianus
gatcctcgcaccaaactgcgcttgg

SEQ ID NO: 59711 - DNA, 25 bp, Saccharomyces pastorianus
gtacgagcagaacccgtccgtggac

SEQ ID NO: 59712 - DNA, 25 bp, Saccharomyces pastorianus
ggtgggcgggttcttggcggctacg

SEQ ID NO: 59713 - DNA, 25 bp, Saccharomyces pastorianus
ttggcggctacgtcgtcgcccggtt

SEQ ID NO: 59714 - DNA, 25 bp, Saccharomyces pastorianus
atcgacacgtacgagcagaacccgt

SEQ ID NO: 59715 - DNA, 25 bp, Saccharomyces pastorianus
tggtgtgcattttcgtgttcaccgt

SEQ ID NO: 59716 - DNA, 25 bp, Saccharomyces pastorianus
gtgttcatactggtcttggtgtgca

SEQ ID NO: 59717 - DNA, 25 bp, Saccharomyces pastorianus
aggaatgccaagcaggcgcccacgc

SEQ ID NO: 59718 - DNA, 25 bp, Saccharomyces pastorianus
tggccccgcacgtgcagcaacagaa

SEQ ID NO: 59719 - DNA, 25 bp, Saccharomyces pastorianus
aaggtcgtgcaagacctcagggcca

SEQ ID NO: 59720 - DNA, 25 bp, Saccharomyces pastorianus
ggacggatcaactacagtgttcata

SEQ ID NO: 59721 - DNA, 25 bp, Saccharomyces pastorianus
tgttcaccgtgcagcgcaggaatgc

SEQ ID NO: 59722 - DNA, 25 bp, Saccharomyces pastorianus
tcgagatcgtgatgaccatggcccc

SEQ ID NO: 59723 - DNA, 25 bp, Saccharomyces pastorianus
aaagacccgtcaacaaggacatggt

SEQ ID NO: 59724 - DNA, 25 bp, Saccharomyces pastorianus
gccgcccagcgcgtgaacaggaaaa

SEQ ID NO: 59725 - DNA, 25 bp, Saccharomyces pastorianus
agagcctctgccagaagcgcatgcc

SEQ ID NO: 59726 - DNA, 25 bp, Saccharomyces pastorianus
agtggagaccctttgttatcgattt

SEQ ID NO: 59727 - DNA, 25 bp, Saccharomyces pastorianus
gagcgcaacttgaaccgcgatgata

SEQ ID NO: 59728 - DNA, 25 bp, Saccharomyces pastorianus
tagtcgaagtagacgttccttatga

SEQ ID NO: 59729 - DNA, 25 bp, Saccharomyces pastorianus
tgagttttccaccaatgatatcccc

SEQ ID NO: 59730 - DNA, 25 bp, Saccharomyces pastorianus
tccttagttcgcctcatggtgaaag

SEQ ID NO: 59731 - DNA, 25 bp, Saccharomyces pastorianus
tattgcgtttttctttgcctcaaag

SEQ ID NO: 59732 - DNA, 25 bp, Saccharomyces pastorianus
agagctattcaatttggcgccaaga

SEQ ID NO: 59733 - DNA, 25 bp, Saccharomyces pastorianus
atacccctttttggatgaacatgtt

SEQ ID NO: 59734 - DNA, 25 bp, Saccharomyces pastorianus
atggacttgtctatcgctattgcgt

SEQ ID NO: 59735 - DNA, 25 bp, Saccharomyces pastorianus
ataagccgcctcatgaactcgtgga

SEQ ID NO: 59736 - DNA, 25 bp, Saccharomyces pastorianus
tattcttcggaaagtggcttctcaa

SEQ ID NO: 59737 - DNA, 25 bp, Saccharomyces pastorianus
tctttgaccatcgaggcccagataa

SEQ ID NO: 59738 - DNA, 25 bp, Saccharomyces pastorianus
tgaagcgatgagcaagcagcaacaa

SEQ ID NO: 59739 - DNA, 25 bp, Saccharomyces pastorianus
gaaaaaagcgccaatgcagcaattt

SEQ ID NO: 59740 - DNA, 25 bp, Saccharomyces pastorianus
aagacccaatactctttgaccatcg

SEQ ID NO: 59741 - DNA, 25 bp, Saccharomyces pastorianus
acaaaagctactggttcctgcatct

SEQ ID NO: 59742 - DNA, 25 bp, Saccharomyces pastorianus
ttcatggtagacatcggaaccggat

SEQ ID NO: 59743 - DNA, 25 bp, Saccharomyces pastorianus
caatgcagcaattttgttctaccaa

SEQ ID NO: 59744 - DNA, 25 bp, Saccharomyces pastorianus
gacaggctgctatcagacagcatga

SEQ ID NO: 59745 - DNA, 25 bp, Saccharomyces pastorianus
gaggcccagataagacaggctgcta

SEQ ID NO: 59746 - DNA, 25 bp, Saccharomyces pastorianus
atcaaaacagtttcccagccagaaa

SEQ ID NO: 59747 - DNA, 25 bp, Saccharomyces pastorianus
aagcttaacaaggaatctgtgcaaa

SEQ ID NO: 59748 - DNA, 25 bp, Saccharomyces pastorianus
aaacccagagttactaggctacact

SEQ ID NO: 59749 - DNA, 25 bp, Saccharomyces pastorianus
ttcacatcgccttactaacactaaa

SEQ ID NO: 59750 - DNA, 25 bp, Saccharomyces pastorianus
gccataatcggtgatgaaaacccag

SEQ ID NO: 59751 - DNA, 25 bp, Saccharomyces pastorianus
gaggatgctattcacatcgccttac

SEQ ID NO: 59752 - DNA, 25 bp, Saccharomyces pastorianus
gtcgatccttctggttcttacttcc

SEQ ID NO: 59753 - DNA, 25 bp, Saccharomyces pastorianus
atgatgaattggaactcgaggatgc

SEQ ID NO: 59754 - DNA, 25 bp, Saccharomyces pastorianus
ggtgacaccatagaattagccataa

SEQ ID NO: 59755 - DNA, 25 bp, Saccharomyces pastorianus
gtggctgcaaagacctttttggaga

SEQ ID NO: 59756 - DNA, 25 bp, Saccharomyces pastorianus
gaaaaggttcggtggctgcaaagac

SEQ ID NO: 59757 - DNA, 25 bp, Saccharomyces pastorianus
tggtattccaactgacaaaggtcct

SEQ ID NO: 59758 - DNA, 25 bp, Saccharomyces pastorianus
gacaaaggtcctagattcagaaaat

SEQ ID NO: 59759 - DNA, 25 bp, Saccharomyces pastorianus
tatatggccacctgtctattataca

SEQ ID NO: 59760 - DNA, 25 bp, Saccharomyces pastorianus
agagccgtatgtatgctatcaaaca

SEQ ID NO: 59761 - DNA, 25 bp, Saccharomyces pastorianus
gatttgacggttcactaaatgtgga

SEQ ID NO: 59762 - DNA, 25 bp, Saccharomyces pastorianus
atcaaacactacatccattgctgag

SEQ ID NO: 59763 - DNA, 25 bp, Saccharomyces pastorianus
tagtcgattggtgcccaactggttt

SEQ ID NO: 59764 - DNA, 25 bp, Saccharomyces pastorianus
gttcaactagtcgattggtgcccaa

SEQ ID NO: 59765 - DNA, 25 bp, Saccharomyces pastorianus
acgaatccaattccgtctcagagat

SEQ ID NO: 59766 - DNA, 25 bp, Saccharomyces pastorianus
aatggtcaaatgtgatcctagagat

SEQ ID NO: 59767 - DNA, 25 bp, Saccharomyces pastorianus
caagtcaaaggcattccacgaatcc

SEQ ID NO: 59768 - DNA, 25 bp, Saccharomyces pastorianus
caaactcccaattggcttctgtgga

SEQ ID NO: 59769 - DNA, 25 bp, Saccharomyces pastorianus
tctgtgacagcgtctttaagatttg

SEQ ID NO: 59770 - DNA, 25 bp, Saccharomyces pastorianus
taagcatgcacacagggatcatccc

SEQ ID NO: 59771 - DNA, 25 bp, Saccharomyces pastorianus
acgctttgaaatccctcgatcatga

SEQ ID NO: 59772 - DNA, 25 bp, Saccharomyces pastorianus
aatcacgttatcaagccatcgctat

SEQ ID NO: 59773 - DNA, 25 bp, Saccharomyces pastorianus
acatcattatctaacgcttgcacca

SEQ ID NO: 59774 - DNA, 25 bp, Saccharomyces pastorianus
ggatcatccctacaggcaacttttt

SEQ ID NO: 59775 - DNA, 25 bp, Saccharomyces pastorianus
atattatccttcaaccatagcacca

SEQ ID NO: 59776 - DNA, 25 bp, Saccharomyces pastorianus
ggtaactgaccctacgcatctgaaa

SEQ ID NO: 59777 - DNA, 25 bp, Saccharomyces pastorianus
tcaacggtggacattgccatcccat

SEQ ID NO: 59778 - DNA, 25 bp, Saccharomyces pastorianus
ggtcaaattcgaatccgtcaacggt

SEQ ID NO: 59779 - DNA, 25 bp, Saccharomyces pastorianus
aatcctccttcgagtcgctgtgtat

SEQ ID NO: 59780 - DNA, 25 bp, Saccharomyces pastorianus
gtgtatcctatctttcgagcagttc

SEQ ID NO: 59781 - DNA, 25 bp, Saccharomyces pastorianus
tagcggctggccatttagtgcagag

SEQ ID NO: 59782 - DNA, 25 bp, Saccharomyces pastorianus
acggctgttttcttggcattgggac

SEQ ID NO: 59783 - DNA, 25 bp, Saccharomyces pastorianus
aagaattgtcgcatgtgccgtcctg

SEQ ID NO: 59784 - DNA, 25 bp, Saccharomyces pastorianus
atgccatccatcgaagtcggaacca

SEQ ID NO: 59785 - DNA, 25 bp, Saccharomyces pastorianus
aagaatttctgtatccatgccatcc

SEQ ID NO: 59786 - DNA, 25 bp, Saccharomyces pastorianus
gtgccatgctagacctattgggtgt

SEQ ID NO: 59787 - DNA, 25 bp, Saccharomyces pastorianus
aagagtgttgttgccgaagctacta

SEQ ID NO: 59788 - DNA, 25 bp, Saccharomyces pastorianus
gcagagtcatatggcgcacaacagg

SEQ ID NO: 59789 - DNA, 25 bp, Saccharomyces pastorianus
ggatgccactgacatcaatcgtttg

SEQ ID NO: 59790 - DNA, 25 bp, Saccharomyces pastorianus
gtgggtttaacgcacacgcagccaa

SEQ ID NO: 59791 - DNA, 25 bp, Saccharomyces pastorianus
tgaactatccttatgtgctgcccta

SEQ ID NO: 59792 - DNA, 25 bp, Saccharomyces pastorianus
agctcggccgtggtgaagtcatcaa

SEQ ID NO: 59793 - DNA, 25 bp, Saccharomyces pastorianus
tggtaaaccattcgctttcaagctc

SEQ ID NO: 59794 - DNA, 25 bp, Saccharomyces pastorianus
gacttgacaccagacgaagacgaaa

SEQ ID NO: 59795 - DNA, 25 bp, Saccharomyces pastorianus
agcgaacgtagaatcgtcatcccag

SEQ ID NO: 59796 - DNA, 25 bp, Saccharomyces pastorianus
catcggtgttgctggcatgtgcgtc

SEQ ID NO: 59797 - DNA, 25 bp, Saccharomyces pastorianus
caggcattcctgcaaactctgaact

SEQ ID NO: 59798 - DNA, 25 bp, Saccharomyces pastorianus
atacgcctacggtagccaagcctta

SEQ ID NO: 59799 - DNA, 25 bp, Saccharomyces pastorianus
gggtgacggcccacaagctaagaga

SEQ ID NO: 59800 - DNA, 25 bp, Saccharomyces pastorianus
ttgtcatcgaagaccgtgccatggg

SEQ ID NO: 59801 - DNA, 25 bp, Saccharomyces pastorianus
catgtgcgtcggtagcgaacgtaga

SEQ ID NO: 59802 - DNA, 25 bp, Saccharomyces pastorianus
tcttggaaggcggtattgtcatcga

SEQ ID NO: 59803 - DNA, 25 bp, Saccharomyces pastorianus
attagctacctacaacttgaacgtt

SEQ ID NO: 59804 - DNA, 25 bp, Saccharomyces pastorianus
actccggttccagccatcgatgtaa

SEQ ID NO: 59805 - DNA, 25 bp, Saccharomyces pastorianus
taacgatgcccattaccatccgtat

SEQ ID NO: 59806 - DNA, 25 bp, Saccharomyces pastorianus
tcgatgtaacgatgcccattaccat

SEQ ID NO: 59807 - DNA, 25 bp, Saccharomyces pastorianus
ctttaaatcctgaagccatcgatga

SEQ ID NO: 59808 - DNA, 25 bp, Saccharomyces pastorianus
attaccatccgtatcaccatggctg

SEQ ID NO: 59809 - DNA, 25 bp, Saccharomyces pastorianus
tccgtatcaccatggctgctttaaa

SEQ ID NO: 59810 - DNA, 25 bp, Saccharomyces pastorianus
accatggctgctttaaatcctgaag

SEQ ID NO: 59811 - DNA, 25 bp, Saccharomyces pastorianus
gctaccattagctacctacaacttg

SEQ ID NO: 59812 - DNA, 25 bp, Saccharomyces pastorianus
tgaacgttgaaccttacactccggt

SEQ ID NO: 59813 - DNA, 25 bp, Saccharomyces pastorianus
gccatcgatgaagacaataaaccgt

SEQ ID NO: 59814 - DNA, 25 bp, Saccharomyces pastorianus
atcgcttgagattgcacttgacact

SEQ ID NO: 59815 - DNA, 25 bp, Saccharomyces pastorianus
aaaggatgcgttgtctcaagccgtt

SEQ ID NO: 59816 - DNA, 25 bp, Saccharomyces pastorianus
gcggttggtacctacgactttgaca

SEQ ID NO: 59817 - DNA, 25 bp, Saccharomyces pastorianus
gagagcgaaccacacatcacggaat

SEQ ID NO: 59818 - DNA, 25 bp, Saccharomyces pastorianus
gatatcgtggccaaatcgcttgaga

SEQ ID NO: 59819 - DNA, 25 bp, Saccharomyces pastorianus
tatcctgttgtctggtttttcgcac

SEQ ID NO: 59820 - DNA, 25 bp, Saccharomyces pastorianus
agccaaattcggtagagcctcgtat

SEQ ID NO: 59821 - DNA, 25 bp, Saccharomyces pastorianus
gactttgacacctttgccaagtgga

SEQ ID NO: 59822 - DNA, 25 bp, Saccharomyces pastorianus
tttttcgcacgggttgatccaagtc

SEQ ID NO: 59823 - DNA, 25 bp, Saccharomyces pastorianus
atgtcggcgactcctctaaagtgga

SEQ ID NO: 59824 - DNA, 25 bp, Saccharomyces pastorianus
gaaggcgctaagtctactgcaacat

SEQ ID NO: 59825 - DNA, 25 bp, Saccharomyces pastorianus
gcgatatgttcgtttttggtctact

SEQ ID NO: 59826 - DNA, 25 bp, Saccharomyces pastorianus
ggattcacgtaaagcgccactggaa

SEQ ID NO: 59827 - DNA, 25 bp, Saccharomyces pastorianus
tggctctaatcaccgttatgggacc

SEQ ID NO: 59828 - DNA, 25 bp, Saccharomyces pastorianus
agccattgtccattgttgtttccga

SEQ ID NO: 59829 - DNA, 25 bp, Saccharomyces pastorianus
ggatgaacccttaactgcttatgtc

SEQ ID NO: 59830 - DNA, 25 bp, Saccharomyces pastorianus
gtctattacacatccgttgttccaa

SEQ ID NO: 59831 - DNA, 25 bp, Saccharomyces pastorianus
gttgtcgtatggtgacttctaccca

SEQ ID NO: 59832 - DNA, 25 bp, Saccharomyces pastorianus
tgaactttgctcacgtcatcaacga

SEQ ID NO: 59833 - DNA, 25 bp, Saccharomyces pastorianus
atggctgtcacatattcggatccgt

SEQ ID NO: 59834 - DNA, 25 bp, Saccharomyces pastorianus
tgcctcatggattttcacgtttctg

SEQ ID NO: 59835 - DNA, 25 bp, Saccharomyces pastorianus
tcacgtttctggacatggctctaat

SEQ ID NO: 59836 - DNA, 25 bp, Saccharomyces pastorianus
acacgaggtaccgaagactttatag

SEQ ID NO: 59837 - DNA, 25 bp, Saccharomyces pastorianus
tcagagcattggtgaagaaacgaca

SEQ ID NO: 59838 - DNA, 25 bp, Saccharomyces pastorianus
gactttatagaagaccaagatacga

SEQ ID NO: 59839 - DNA, 25 bp, Saccharomyces pastorianus
cgaccagctggctgagaaacgtggc

SEQ ID NO: 59840 - DNA, 25 bp, Saccharomyces pastorianus
tggcggagatgaacagaatacagtc

SEQ ID NO: 59841 - DNA, 25 bp, Saccharomyces pastorianus
ccaagatacgatcagtgaagcggtg

SEQ ID NO: 59842 - DNA, 25 bp, Saccharomyces pastorianus
gaaaacgatcgtcagagcattggtg

SEQ ID NO: 59843 - DNA, 25 bp, Saccharomyces pastorianus
aggcaggaaacgaccagctggctga

SEQ ID NO: 59844 - DNA, 25 bp, Saccharomyces pastorianus
aacagaatacagtctatggatgaaa

SEQ ID NO: 59845 - DNA, 25 bp, Saccharomyces pastorianus
gaaacgacacgaggtaccgaagact

SEQ ID NO: 59846 - DNA, 25 bp, Saccharomyces pastorianus
gccatgaatatgatgaccaggacga

SEQ ID NO: 59847 - DNA, 25 bp, Saccharomyces pastorianus
taaagagtatccatagcaggctgct

SEQ ID NO: 59848 - DNA, 25 bp, Saccharomyces pastorianus
atgtcaacaagataccctggccaaa

SEQ ID NO: 59849 - DNA, 25 bp, Saccharomyces pastorianus
aagagcttggtggtgatttggttaa

SEQ ID NO: 59850 - DNA, 25 bp, Saccharomyces pastorianus
acagcttcgatttttgggcctgcaa

SEQ ID NO: 59851 - DNA, 25 bp, Saccharomyces pastorianus
gcctgcaatcctcaatcgatacaaa

SEQ ID NO: 59852 - DNA, 25 bp, Saccharomyces pastorianus
cttaggagccaaattgcctgaatta

SEQ ID NO: 59853 - DNA, 25 bp, Saccharomyces pastorianus
gtaaagctgaggctctgactaaaga

SEQ ID NO: 59854 - DNA, 25 bp, Saccharomyces pastorianus
atcagaagggcgtacaagtctcgtt

SEQ ID NO: 59855 - DNA, 25 bp, Saccharomyces pastorianus
aagtctcgttgtaacacgctcagaa

SEQ ID NO: 59856 - DNA, 25 bp, Saccharomyces pastorianus
ttgcaaggtcttcacgattccgtaa

SEQ ID NO: 59857 - DNA, 25 bp, Saccharomyces pastorianus
agcaggctgcttctacgtattggaa

SEQ ID NO: 59858 - DNA, 25 bp, Saccharomyces pastorianus
atcgagctcgttcattggtggccga

SEQ ID NO: 59859 - DNA, 25 bp, Saccharomyces pastorianus
tcgttcattggtggccgacaaacgt

SEQ ID NO: 59860 - DNA, 25 bp, Saccharomyces pastorianus
ttcattggtggccgacaaacgtaat

SEQ ID NO: 59861 - DNA, 25 bp, Saccharomyces pastorianus
aacagactcaaacgataatcgagct

SEQ ID NO: 59862 - DNA, 25 bp, Saccharomyces pastorianus
atgttacaaaggcatagcagaaaga

SEQ ID NO: 59863 - DNA, 25 bp, Saccharomyces pastorianus
tcaaccgaaaacagactcaaacgat

SEQ ID NO: 59864 - DNA, 25 bp, Saccharomyces pastorianus
gctcgttcattggtggccgacaaac

SEQ ID NO: 59865 - DNA, 25 bp, Saccharomyces pastorianus
gcatagcagaaagagatttcaaccg

SEQ ID NO: 59866 - DNA, 25 bp, Saccharomyces pastorianus
gagctcgttcattggtggccgacaa

SEQ ID NO: 59867 - DNA, 25 bp, Saccharomyces pastorianus
gagatttcaaccgaaaacagactca

SEQ ID NO: 59868 - DNA, 25 bp, Saccharomyces pastorianus
taatcgagctcgttcattggtggcc

SEQ ID NO: 59869 - DNA, 25 bp, Saccharomyces pastorianus
gtggacgccactttagttaatggat

SEQ ID NO: 59870 - DNA, 25 bp, Saccharomyces pastorianus
gattcctcggtttttgattttatga

SEQ ID NO: 59871 - DNA, 25 bp, Saccharomyces pastorianus
gtacatgtgttcaatgccatcgatg

SEQ ID NO: 59872 - DNA, 25 bp, Saccharomyces pastorianus
aacggagattgcctttagtgagatt

SEQ ID NO: 59873 - DNA, 25 bp, Saccharomyces pastorianus
gggttttgctaaaagctctacagac

SEQ ID NO: 59874 - DNA, 25 bp, Saccharomyces pastorianus
gttacagaatttcctagccccaaag

SEQ ID NO: 59875 - DNA, 25 bp, Saccharomyces pastorianus
gacgaacgtgtctctccattagatt

SEQ ID NO: 59876 - DNA, 25 bp, Saccharomyces pastorianus
aaactaccaggtcgcgtacatgtgt

SEQ ID NO: 59877 - DNA, 25 bp, Saccharomyces pastorianus
aatggatcccttggcaaagttattg

SEQ ID NO: 59878 - DNA, 25 bp, Saccharomyces pastorianus
tgcatttaaaagtaggcgcccaagt

SEQ ID NO: 59879 - DNA, 25 bp, Saccharomyces pastorianus
cccatctatgccctcggataaatta

SEQ ID NO: 59880 - DNA, 25 bp, Saccharomyces pastorianus
gcggcgccctgtctaatggtataga

SEQ ID NO: 59881 - DNA, 25 bp, Saccharomyces pastorianus
tggcggttgccaaagtctctaggat

SEQ ID NO: 59882 - DNA, 25 bp, Saccharomyces pastorianus
catcaggcaattcaacatgacccca

SEQ ID NO: 59883 - DNA, 25 bp, Saccharomyces pastorianus
gctggtagcaatcttgaacatctgt

SEQ ID NO: 59884 - DNA, 25 bp, Saccharomyces pastorianus
gacgaagctctatccacttttgaaa

SEQ ID NO: 59885 - DNA, 25 bp, Saccharomyces pastorianus
aaagtcaccgagatgctggtagcaa

SEQ ID NO: 59886 - DNA, 25 bp, Saccharomyces pastorianus
gcgcaaatatacctccatcctggat

SEQ ID NO: 59887 - DNA, 25 bp, Saccharomyces pastorianus
gtctctaggatgtattctgtcctaa

SEQ ID NO: 59888 - DNA, 25 bp, Saccharomyces pastorianus
gaaattgccccaggtaagccaacca

SEQ ID NO: 59889 - DNA, 25 bp, Saccharomyces pastorianus
agaaataagatcttggcggttgcca

SEQ ID NO: 59890 - DNA, 25 bp, Saccharomyces pastorianus
gaagaactggttggcactgataaga

SEQ ID NO: 59891 - DNA, 25 bp, Saccharomyces pastorianus
ggttgcctcgtcacgaattcttaag

SEQ ID NO: 59892 - DNA, 25 bp, Saccharomyces pastorianus
cgatcactgtctgcggtgacatcca

SEQ ID NO: 59893 - DNA, 25 bp, Saccharomyces pastorianus
gaaaactgtctttggcgcaggcggc

SEQ ID NO: 59894 - DNA, 25 bp, Saccharomyces pastorianus
gtagattccaagctcgcttctgctg

SEQ ID NO: 59895 - DNA, 25 bp, Saccharomyces pastorianus
aagagaccatttcaagcgcgaagga

SEQ ID NO: 59896 - DNA, 25 bp, Saccharomyces pastorianus
tcacacagtataccctcgataacgg

SEQ ID NO: 59897 - DNA, 25 bp, Saccharomyces pastorianus
ctcgctaccgaactcttgagcaaag

SEQ ID NO: 59898 - DNA, 25 bp, Saccharomyces pastorianus
atggccagtacttcgatcttctgaa

SEQ ID NO: 59899 - DNA, 25 bp, Saccharomyces pastorianus
gaatcatgagcaaggtgcccgccat

SEQ ID NO: 59900 - DNA, 25 bp, Saccharomyces pastorianus
gaatcgttcgcgactgccgtagatt

SEQ ID NO: 59901 - DNA, 25 bp, Saccharomyces pastorianus
aaggaccgtggcgacgaaccataga

SEQ ID NO: 59902 - DNA, 25 bp, Saccharomyces pastorianus
attcttgtcaagatatcggtcacac

SEQ ID NO: 59903 - DNA, 25 bp, Saccharomyces pastorianus
agtcagatttgagttcagaaccgcc

SEQ ID NO: 59904 - DNA, 25 bp, Saccharomyces pastorianus
gtttacaacgttagtcaattcgcta

SEQ ID NO: 59905 - DNA, 25 bp, Saccharomyces pastorianus
aaaaccggtagctcgggcaatgcct

SEQ ID NO: 59906 - DNA, 25 bp, Saccharomyces pastorianus
tgtttctggttctgttgttgacaag

SEQ ID NO: 59907 - DNA, 25 bp, Saccharomyces pastorianus
aaactgaccatgtgttggttgcaca

SEQ ID NO: 59908 - DNA, 25 bp, Saccharomyces pastorianus
tatttctctgaaactgaccatgtgt

SEQ ID NO: 59909 - DNA, 25 bp, Saccharomyces pastorianus
cgggcaatgcctctacttctcgtta

SEQ ID NO: 59910 - DNA, 25 bp, Saccharomyces pastorianus
tatcggtcacacatcattgacccta

SEQ ID NO: 59911 - DNA, 25 bp, Saccharomyces pastorianus
cagaaccgcctctgctcaattggaa

SEQ ID NO: 59912 - DNA, 25 bp, Saccharomyces pastorianus
caattcgctaacgaattcggcgttc

SEQ ID NO: 59913 - DNA, 25 bp, Saccharomyces pastorianus
ggtttcatcaactctccaattgtca

SEQ ID NO: 59914 - DNA, 25 bp, Saccharomyces pastorianus
aatggctatcagcatggctttgttg

SEQ ID NO: 59915 - DNA, 25 bp, Saccharomyces pastorianus
acttcccatcttctgccgttagttt

SEQ ID NO: 59916 - DNA, 25 bp, Saccharomyces pastorianus
tctctggtcttccagttactggtat

SEQ ID NO: 59917 - DNA, 25 bp, Saccharomyces pastorianus
gaaagccttagaacacttgaagaca

SEQ ID NO: 59918 - DNA, 25 bp, Saccharomyces pastorianus
gaagatatctttgaacactccattt

SEQ ID NO: 59919 - DNA, 25 bp, Saccharomyces pastorianus
attgtcatttctccaactactactg

SEQ ID NO: 59920 - DNA, 25 bp, Saccharomyces pastorianus
gatttcttggttttaccagggctgg

SEQ ID NO: 59921 - DNA, 25 bp, Saccharomyces pastorianus
atgactgctccaatggaccacaaga

SEQ ID NO: 59922 - DNA, 25 bp, Saccharomyces pastorianus
aaagatggtctttcagtccaggaat

SEQ ID NO: 59923 - DNA, 25 bp, Saccharomyces pastorianus
ttaccagggctggttgacttcccat

SEQ ID NO: 59924 - DNA, 25 bp, Saccharomyces pastorianus
agattggagcttggtttgcggccat

SEQ ID NO: 59925 - DNA, 25 bp, Saccharomyces pastorianus
acaccaaaactgtccttcaaagatt

SEQ ID NO: 59926 - DNA, 25 bp, Saccharomyces pastorianus
gtgggccccgacattattaaagcct

SEQ ID NO: 59927 - DNA, 25 bp, Saccharomyces pastorianus
gcggccattacaatagagacgctaa

SEQ ID NO: 59928 - DNA, 25 bp, Saccharomyces pastorianus
agaggaatttgcatcctttctggat

SEQ ID NO: 59929 - DNA, 25 bp, Saccharomyces pastorianus
accatctcaccaagttcgccataag

SEQ ID NO: 59930 - DNA, 25 bp, Saccharomyces pastorianus
atctacccacacaatttgaggcttt

SEQ ID NO: 59931 - DNA, 25 bp, Saccharomyces pastorianus
attggtggccatgtttttgctggaa

SEQ ID NO: 59932 - DNA, 25 bp, Saccharomyces pastorianus
aaagattacttaagcggccaggcca

SEQ ID NO: 59933 - DNA, 25 bp, Saccharomyces pastorianus
gaaggagctcttcagacaccaaaac

SEQ ID NO: 59934 - DNA, 25 bp, Saccharomyces pastorianus
actggactcattgtggtttggaaaa

SEQ ID NO: 59935 - DNA, 25 bp, Saccharomyces pastorianus
ggttttgaacgtgtcagcttgccag

SEQ ID NO: 59936 - DNA, 25 bp, Saccharomyces pastorianus
caagatcaaaccatatgttactgcc

SEQ ID NO: 59937 - DNA, 25 bp, Saccharomyces pastorianus
gtcagcttgccagaacttcattctg

SEQ ID NO: 59938 - DNA, 25 bp, Saccharomyces pastorianus
tgttactgccaaaagctaaactcaa

SEQ ID NO: 59939 - DNA, 25 bp, Saccharomyces pastorianus
gcactttttcatcgtggttttgaac

SEQ ID NO: 59940 - DNA, 25 bp, Saccharomyces pastorianus
agaacttcattctgccacccaacaa

SEQ ID NO: 59941 - DNA, 25 bp, Saccharomyces pastorianus
accttacatcaacgtgcactttttc

SEQ ID NO: 59942 - DNA, 25 bp, Saccharomyces pastorianus
ggattattaccttacatcaacgtgc

SEQ ID NO: 59943 - DNA, 25 bp, Saccharomyces pastorianus
caacgtgcactttttcatcgtggtt

SEQ ID NO: 59944 - DNA, 25 bp, Saccharomyces pastorianus
tgccacccaacaagatcaaaccata

SEQ ID NO: 59945 - DNA, 25 bp, Saccharomyces pastorianus
aaagctaaactcaaggctgccatca

SEQ ID NO: 59946 - DNA, 25 bp, Saccharomyces pastorianus
gaagttattatgctcctgtgcgtat

SEQ ID NO: 59947 - DNA, 25 bp, Saccharomyces pastorianus
ggtgctttattccattattatccaa

SEQ ID NO: 59948 - DNA, 25 bp, Saccharomyces pastorianus
tgctcctgtgcgtatggttatcgac

SEQ ID NO: 59949 - DNA, 25 bp, Saccharomyces pastorianus
gtgaattatcagacggcaccatcaa

SEQ ID NO: 59950 - DNA, 25 bp, Saccharomyces pastorianus
gatcgtattccattgtaggcagaga

SEQ ID NO: 59951 - DNA, 25 bp, Saccharomyces pastorianus
agcatctcaaattctgataggccag

SEQ ID NO: 59952 - DNA, 25 bp, Saccharomyces pastorianus
ggttatcgacggtgacctatgtgaa

SEQ ID NO: 59953 - DNA, 25 bp, Saccharomyces pastorianus
ggcaccatcaagtacccattgaatt

SEQ ID NO: 59954 - DNA, 25 bp, Saccharomyces pastorianus
tgatgtactaaaccacctctacgtt

SEQ ID NO: 59955 - DNA, 25 bp, Saccharomyces pastorianus
agaggaacccgccagtgtcgtgtta

SEQ ID NO: 59956 - DNA, 25 bp, Saccharomyces pastorianus
gtcgtgttacacaggcgaggtgata

SEQ ID NO: 59957 - DNA, 25 bp, Saccharomyces pastorianus
cacggcagagatgcgtctgctatat

SEQ ID NO: 59958 - DNA, 25 bp, Saccharomyces pastorianus
atatgagcaagccacgacgacgatg

SEQ ID NO: 59959 - DNA, 25 bp, Saccharomyces pastorianus
tgagcaagccacgacgacgatgagc

SEQ ID NO: 59960 - DNA, 25 bp, Saccharomyces pastorianus
aatagtaggattgtcgccccacacg

SEQ ID NO: 59961 - DNA, 25 bp, Saccharomyces pastorianus
ccacacggcagagatgcgtctgcta

SEQ ID NO: 59962 - DNA, 25 bp, Saccharomyces pastorianus
gcgtctgctatatgagcaagccacg

SEQ ID NO: 59963 - DNA, 25 bp, Saccharomyces pastorianus
cagagatgcgtctgctatatgagca

SEQ ID NO: 59964 - DNA, 25 bp, Saccharomyces pastorianus
gcaagccacgacgacgatgagcttt

SEQ ID NO: 59965 - DNA, 25 bp, Saccharomyces pastorianus
gatgcgtctgctatatgagcaagcc

SEQ ID NO: 59966 - DNA, 25 bp, Saccharomyces pastorianus
gtggcaaaacggcaatagtaggatt

SEQ ID NO: 59967 - DNA, 25 bp, Saccharomyces pastorianus
gcaatagtaggattgtcgccccaca

SEQ ID NO: 59968 - DNA, 25 bp, Saccharomyces pastorianus
cttctccttcttctaacagcaataa

SEQ ID NO: 59969 - DNA, 25 bp, Saccharomyces pastorianus
agagagccacttatgacgattatca

SEQ ID NO: 59970 - DNA, 25 bp, Saccharomyces pastorianus
tagattcactgcttctactttcaca

SEQ ID NO: 59971 - DNA, 25 bp, Saccharomyces pastorianus
gccggtgaaggtttccaaagtcgct

SEQ ID NO: 59972 - DNA, 25 bp, Saccharomyces pastorianus
tagccactttggttaagctcagaag

SEQ ID NO: 59973 - DNA, 25 bp, Saccharomyces pastorianus
atggtaagaaccctgcaggcgccag

SEQ ID NO: 59974 - DNA, 25 bp, Saccharomyces pastorianus
ctacagggccggtgccatcaggaaa

SEQ ID NO: 59975 - DNA, 25 bp, Saccharomyces pastorianus
tttgagagacatggcttctccttct

SEQ ID NO: 59976 - DNA, 25 bp, Saccharomyces pastorianus
gaaagccgcagctccaggtattcaa

SEQ ID NO: 59977 - DNA, 25 bp, Saccharomyces pastorianus
gtgcgacagacttgaagaccctttt

SEQ ID NO: 59978 - DNA, 25 bp, Saccharomyces pastorianus
atgggtggtccagttgctgcctaca

SEQ ID NO: 59979 - DNA, 25 bp, Saccharomyces pastorianus
tggaattgaacgactccaagccgct

SEQ ID NO: 59980 - DNA, 25 bp, Saccharomyces pastorianus
gcgttccaggtgtcgaacgacgaca

SEQ ID NO: 59981 - DNA, 25 bp, Saccharomyces pastorianus
gttgagcgcgactatgcgttccagg

SEQ ID NO: 59982 - DNA, 25 bp, Saccharomyces pastorianus
ggccaactagttgttcctcagtgga

SEQ ID NO: 59983 - DNA, 25 bp, Saccharomyces pastorianus
tagaaagattttcccctccaagacg

SEQ ID NO: 59984 - DNA, 25 bp, Saccharomyces pastorianus
aggtggctgtttgatgtttcattac

SEQ ID NO: 59985 - DNA, 25 bp, Saccharomyces pastorianus
aggccttcaatcttccacgagaaaa

SEQ ID NO: 59986 - DNA, 25 bp, Saccharomyces pastorianus
gaacgacgacaccatcaataacaag

SEQ ID NO: 59987 - DNA, 25 bp, Saccharomyces pastorianus
gatatctgtccgaaggtggctgttt

SEQ ID NO: 59988 - DNA, 25 bp, Saccharomyces pastorianus
ttaatggtgctcaggccttcaatct

SEQ ID NO: 59989 - DNA, 25 bp, Saccharomyces pastorianus
gtttcattacgacgctgataacgaa

SEQ ID NO: 59990 - DNA, 25 bp, Saccharomyces pastorianus
cgaccacgccatttacacattatac

SEQ ID NO: 59991 - DNA, 25 bp, Saccharomyces pastorianus
ttatgcgtagcgaccacgccattta

SEQ ID NO: 59992 - DNA, 25 bp, Saccharomyces pastorianus
tccacttttttattcgcagatttat

SEQ ID NO: 59993 - DNA, 25 bp, Saccharomyces pastorianus
acattatgcgtagcgaccacgccat

SEQ ID NO: 59994 - DNA, 25 bp, Saccharomyces pastorianus
gcgaccacgccatttacacattata

SEQ ID NO: 59995 - DNA, 25 bp, Saccharomyces pastorianus
tagcgaccacgccatttacacatta

SEQ ID NO: 59996 - DNA, 25 bp, Saccharomyces pastorianus
atacattatgcgtagcgaccacgcc

SEQ ID NO: 59997 - DNA, 25 bp, Saccharomyces pastorianus
ccacttttttattcgcagatttata

SEQ ID NO: 59998 - DNA, 25 bp, Saccharomyces pastorianus
tttacacattatactaacttcttct

SEQ ID NO: 59999 - DNA, 25 bp, Saccharomyces pastorianus
ttattcgcagatttataaattgaac

SEQ ID NO: 60000 - DNA, 25 bp, Saccharomyces pastorianus
atgcgtagcgaccacgccatttaca

SEQ ID NO: 60001 - DNA, 25 bp, Saccharomyces pastorianus
agtatcgatatcgttctttgaacaa

SEQ ID NO: 60002 - DNA, 25 bp, Saccharomyces pastorianus
gagcttatctgcctaaactttcaca

SEQ ID NO: 60003 - DNA, 25 bp, Saccharomyces pastorianus
acatcttttgcatttgttgacccta

SEQ ID NO: 60004 - DNA, 25 bp, Saccharomyces pastorianus
gaccggtgtagagatcgagtttaac

SEQ ID NO: 60005 - DNA, 25 bp, Saccharomyces pastorianus
gagtgtgtattgtgcctttcaccca

SEQ ID NO: 60006 - DNA, 25 bp, Saccharomyces pastorianus
gaattatcttctatagtgaccggtg

SEQ ID NO: 60007 - DNA, 25 bp, Saccharomyces pastorianus
atcagcgatgccttccaaaaatttg

SEQ ID NO: 60008 - DNA, 25 bp, Saccharomyces pastorianus
tgaccctaaattgatctgttcgcag

SEQ ID NO: 60009 - DNA, 25 bp, Saccharomyces pastorianus
gagcgatttatcaacatcttttgca

SEQ ID NO: 60010 - DNA, 25 bp, Saccharomyces pastorianus
atattccgctatttacaagactcta

SEQ ID NO: 60011 - DNA, 25 bp, Saccharomyces pastorianus
gaacaactggccaacgaattatctt

SEQ ID NO: 60012 - DNA, 25 bp, Saccharomyces pastorianus
agctcaaatcaatgtccagttcaga

SEQ ID NO: 60013 - DNA, 25 bp, Saccharomyces pastorianus
gaatgcatatttgagcgtagtccaa

SEQ ID NO: 60014 - DNA, 25 bp, Saccharomyces pastorianus
gacatcttcctttcggatatcgtgg

SEQ ID NO: 60015 - DNA, 25 bp, Saccharomyces pastorianus
ggccgatttggctgatgtttttact

SEQ ID NO: 60016 - DNA, 25 bp, Saccharomyces pastorianus
ggagcccaatggtccaaatgatcca

SEQ ID NO: 60017 - DNA, 25 bp, Saccharomyces pastorianus
aatttgaccgaaatacgcggcgaca

SEQ ID NO: 60018 - DNA, 25 bp, Saccharomyces pastorianus
aatacgcggcgacattatgaaatgc

SEQ ID NO: 60019 - DNA, 25 bp, Saccharomyces pastorianus
gaaggccaagatcgaaggactaatt

SEQ ID NO: 60020 - DNA, 25 bp, Saccharomyces pastorianus
atggatagggccgttggagcccaat

SEQ ID NO: 60021 - DNA, 25 bp, Saccharomyces pastorianus
aattacgtgacatcttcctttcgga

SEQ ID NO: 60022 - DNA, 25 bp, Saccharomyces pastorianus
gaaggactaattacgcaaactatgg

SEQ ID NO: 60023 - DNA, 25 bp, Saccharomyces pastorianus
gtggtcatgaagtgccatcacatcg

SEQ ID NO: 60024 - DNA, 25 bp, Saccharomyces pastorianus
gaagattcttctgatctcattcgaa

SEQ ID NO: 60025 - DNA, 25 bp, Saccharomyces pastorianus
ggcaccatccaaatttgatttctta

SEQ ID NO: 60026 - DNA, 25 bp, Saccharomyces pastorianus
aaacctgaatgtattccttgtccat

SEQ ID NO: 60027 - DNA, 25 bp, Saccharomyces pastorianus
atccttggagttcctaagggctaag

SEQ ID NO: 60028 - DNA, 25 bp, Saccharomyces pastorianus
gggccccttggatccgcgatgatga

SEQ ID NO: 60029 - DNA, 25 bp, Saccharomyces pastorianus
tcggcgtattcatagtcattcctgc

SEQ ID NO: 60030 - DNA, 25 bp, Saccharomyces pastorianus
gtttttgggcaaatctctacttgca

SEQ ID NO: 60031 - DNA, 25 bp, Saccharomyces pastorianus
ttgcaaccatcctattcggcgtatt

SEQ ID NO: 60032 - DNA, 25 bp, Saccharomyces pastorianus
tattcaatgaagcaagggccccttg

SEQ ID NO: 60033 - DNA, 25 bp, Saccharomyces pastorianus
ggaatttgctatccatacatgaaac

SEQ ID NO: 60034 - DNA, 25 bp, Saccharomyces pastorianus
aaccaagcgacgagggtattgtgaa

SEQ ID NO: 60035 - DNA, 25 bp, Saccharomyces pastorianus
gtatctgaacgttcaaccaagcgac

SEQ ID NO: 60036 - DNA, 25 bp, Saccharomyces pastorianus
ttctcctctggctaaacagttcagg

SEQ ID NO: 60037 - DNA, 25 bp, Saccharomyces pastorianus
tcttcctcttcttcagcatcttcta

SEQ ID NO: 60038 - DNA, 25 bp, Saccharomyces pastorianus
agattaaaccgcaggtgcagcagtt

SEQ ID NO: 60039 - DNA, 25 bp, Saccharomyces pastorianus
gacgaagttggtgatcttttgatta

SEQ ID NO: 60040 - DNA, 25 bp, Saccharomyces pastorianus
ttcagcatcttctactcgcaagagt

SEQ ID NO: 60041 - DNA, 25 bp, Saccharomyces pastorianus
gggaaagatcagcttctcctctggc

SEQ ID NO: 60042 - DNA, 25 bp, Saccharomyces pastorianus
gattatatctagtgatccaatgagg

SEQ ID NO: 60043 - DNA, 25 bp, Saccharomyces pastorianus
gtgaagatggaccatccttcttctt

SEQ ID NO: 60044 - DNA, 25 bp, Saccharomyces pastorianus
actcgcaagagtagacggtcccgtg

SEQ ID NO: 60045 - DNA, 25 bp, Saccharomyces pastorianus
gctttcaagaaaaccgccgtcgtcg

SEQ ID NO: 60046 - DNA, 25 bp, Saccharomyces pastorianus
aacaaggtgcgcaagtccttttcgc

SEQ ID NO: 60047 - DNA, 25 bp, Saccharomyces pastorianus
atacacaatggtcgctcaagttcaa

SEQ ID NO: 60048 - DNA, 25 bp, Saccharomyces pastorianus
agattattcggtgcgtggcttccca

SEQ ID NO: 60049 - DNA, 25 bp, Saccharomyces pastorianus
aactgaaatcatcgccttctctgaa

SEQ ID NO: 60050 - DNA, 25 bp, Saccharomyces pastorianus
ttaacatcccattattggccgacac

SEQ ID NO: 60051 - DNA, 25 bp, Saccharomyces pastorianus
taagtacgtcgtcttggcctttatc

SEQ ID NO: 60052 - DNA, 25 bp, Saccharomyces pastorianus
actccttgtccaaagactacggtgt

SEQ ID NO: 60053 - DNA, 25 bp, Saccharomyces pastorianus
ggcttcccacgtacattgtctttta

SEQ ID NO: 60054 - DNA, 25 bp, Saccharomyces pastorianus
ttcactttcgtttgcccaactgaaa

SEQ ID NO: 60055 - DNA, 25 bp, Saccharomyces pastorianus
tgagaggtcttttcatcattgatcc

SEQ ID NO: 60056 - DNA, 25 bp, Saccharomyces pastorianus
cccactacaagattccagcttggtt

SEQ ID NO: 60057 - DNA, 25 bp, Saccharomyces pastorianus
aacgacatcaccgatggtaaggatt

SEQ ID NO: 60058 - DNA, 25 bp, Saccharomyces pastorianus
cgacatcaccgatggtaaggattac

SEQ ID NO: 60059 - DNA, 25 bp, Saccharomyces pastorianus
caacccactacaagattccagcttg

SEQ ID NO: 60060 - DNA, 25 bp, Saccharomyces pastorianus
acaagattccagcttggtttttgaa

SEQ ID NO: 60061 - DNA, 25 bp, Saccharomyces pastorianus
gattccagcttggtttttgaaccgt

SEQ ID NO: 60062 - DNA, 25 bp, Saccharomyces pastorianus
cactacaagattccagcttggtttt

SEQ ID NO: 60063 - DNA, 25 bp, Saccharomyces pastorianus
ctacaagattccagcttggtttttg

SEQ ID NO: 60064 - DNA, 25 bp, Saccharomyces pastorianus
agattccagcttggtttttgaaccg

SEQ ID NO: 60065 - DNA, 25 bp, Saccharomyces pastorianus
aacccactacaagattccagcttgg

SEQ ID NO: 60066 - DNA, 25 bp, Saccharomyces pastorianus
caagattccagcttggtttttgaac

SEQ ID NO: 60067 - DNA, 25 bp, Saccharomyces pastorianus
gacttgaacgcgttagacatcttaa

SEQ ID NO: 60068 - DNA, 25 bp, Saccharomyces pastorianus
gacatcttaaagacggacacacttg

SEQ ID NO: 60069 - DNA, 25 bp, Saccharomyces pastorianus
gagaagccatcttcaggaagttctt

SEQ ID NO: 60070 - DNA, 25 bp, Saccharomyces pastorianus
gtgctagggcactcgcaagaactgc

SEQ ID NO: 60071 - DNA, 25 bp, Saccharomyces pastorianus
gcacaaaccgtcttcattgaactgg

SEQ ID NO: 60072 - DNA, 25 bp, Saccharomyces pastorianus
aaacgattacaccacagagctgcca

SEQ ID NO: 60073 - DNA, 25 bp, Saccharomyces pastorianus
taaagtcgacttgatatcacccacc

SEQ ID NO: 60074 - DNA, 25 bp, Saccharomyces pastorianus
atgacatactgagagcacaaaccgt

SEQ ID NO: 60075 - DNA, 25 bp, Saccharomyces pastorianus
ggctgatgaaatgttctgacccata

SEQ ID NO: 60076 - DNA, 25 bp, Saccharomyces pastorianus
gggcaagagactacttttcattact

SEQ ID NO: 60077 - DNA, 25 bp, Saccharomyces pastorianus
tgatatcacccaccccggaaataga

SEQ ID NO: 60078 - DNA, 25 bp, Saccharomyces pastorianus
caagagactttgtgatgaaatcgcc

SEQ ID NO: 60079 - DNA, 25 bp, Saccharomyces pastorianus
aaccaacaagagactttgtgatgaa

SEQ ID NO: 60080 - DNA, 25 bp, Saccharomyces pastorianus
agagactttgtgatgaaatcgccac

SEQ ID NO: 60081 - DNA, 25 bp, Saccharomyces pastorianus
aaaccaacaagagactttgtgatga

SEQ ID NO: 60082 - DNA, 25 bp, Saccharomyces pastorianus
ccaaaccaacaagagactttgtgat

SEQ ID NO: 60083 - DNA, 25 bp, Saccharomyces pastorianus
gatttccaaaccaacaagagacttt

SEQ ID NO: 60084 - DNA, 25 bp, Saccharomyces pastorianus
atttccaaaccaacaagagactttg

SEQ ID NO: 60085 - DNA, 25 bp, Saccharomyces pastorianus
aagagactttgtgatgaaatcgcca

SEQ ID NO: 60086 - DNA, 25 bp, Saccharomyces pastorianus
tttccaaaccaacaagagactttgt

SEQ ID NO: 60087 - DNA, 25 bp, Saccharomyces pastorianus
cccatttgatgaagagaatccaaaa

SEQ ID NO: 60088 - DNA, 25 bp, Saccharomyces pastorianus
ttccaaaccaacaagagactttgtg

SEQ ID NO: 60089 - DNA, 25 bp, Saccharomyces pastorianus
gcaagactgtgttattattctgaca

SEQ ID NO: 60090 - DNA, 25 bp, Saccharomyces pastorianus
aggttattgatctagtcgagctgga

SEQ ID NO: 60091 - DNA, 25 bp, Saccharomyces pastorianus
gtatgcttactggtccttttacgat

SEQ ID NO: 60092 - DNA, 25 bp, Saccharomyces pastorianus
gctggattgttttgcatttaccgaa

SEQ ID NO: 60093 - DNA, 25 bp, Saccharomyces pastorianus
tatacccttattagccgaaggtacg

SEQ ID NO: 60094 - DNA, 25 bp, Saccharomyces pastorianus
ttggaaattgaaccgcctttattgt

SEQ ID NO: 60095 - DNA, 25 bp, Saccharomyces pastorianus
atcggatggcgtctcattttgcaat

SEQ ID NO: 60096 - DNA, 25 bp, Saccharomyces pastorianus
atcatccagggaatctcacgaacgc

SEQ ID NO: 60097 - DNA, 25 bp, Saccharomyces pastorianus
gctatccgagatatccaaagacacg

SEQ ID NO: 60098 - DNA, 25 bp, Saccharomyces pastorianus
cgcctctttcaacgatatcttgcag

SEQ ID NO: 60099 - DNA, 25 bp, Saccharomyces pastorianus
ttactccaagaatcgttgcggatga

SEQ ID NO: 60100 - DNA, 25 bp, Saccharomyces pastorianus
tgtcgccaagcccttcaatggtagc

SEQ ID NO: 60101 - DNA, 25 bp, Saccharomyces pastorianus
cttgaagcagagcacggcagcgtct

SEQ ID NO: 60102 - DNA, 25 bp, Saccharomyces pastorianus
gtctgcggccaactggctgatcttt

SEQ ID NO: 60103 - DNA, 25 bp, Saccharomyces pastorianus
ttgtatcgggctgctcgtccttgaa

SEQ ID NO: 60104 - DNA, 25 bp, Saccharomyces pastorianus
aactggctgatcttttcctggaggg

SEQ ID NO: 60105 - DNA, 25 bp, Saccharomyces pastorianus
ctgcggtgcttgtatcgggctgctc

SEQ ID NO: 60106 - DNA, 25 bp, Saccharomyces pastorianus
agcacggcagcgtctgcggccaact

SEQ ID NO: 60107 - DNA, 25 bp, Saccharomyces pastorianus
aagcccttcaatggtagctgcggtg

SEQ ID NO: 60108 - DNA, 25 bp, Saccharomyces pastorianus
ggctgctcgtccttgaagcagagca

SEQ ID NO: 60109 - DNA, 25 bp, Saccharomyces pastorianus
gatcttttcctggagggcgctggcc

SEQ ID NO: 60110 - DNA, 25 bp, Saccharomyces pastorianus
tcaatggtagctgcggtgcttgtat

SEQ ID NO: 60111 - DNA, 25 bp, Saccharomyces pastorianus
atatggctaccggtggtattactgc

SEQ ID NO: 60112 - DNA, 25 bp, Saccharomyces pastorianus
aatacacacggtggctcaggtggtg

SEQ ID NO: 60113 - DNA, 25 bp, Saccharomyces pastorianus
attactgcgggagcttccgcatcta

SEQ ID NO: 60114 - DNA, 25 bp, Saccharomyces pastorianus
tgtaaatacacacggtggctcaggt

SEQ ID NO: 60115 - DNA, 25 bp, Saccharomyces pastorianus
ctaccggtctgagcggtggtatgac

SEQ ID NO: 60116 - DNA, 25 bp, Saccharomyces pastorianus
ttagtgcgcccagaaatatggctac

SEQ ID NO: 60117 - DNA, 25 bp, Saccharomyces pastorianus
agttatgttagtgcgcccagaaata

SEQ ID NO: 60118 - DNA, 25 bp, Saccharomyces pastorianus
cggtggtattactgcgggagcttcc

SEQ ID NO: 60119 - DNA, 25 bp, Saccharomyces pastorianus
gtccaagttatgttagtgcgcccag

SEQ ID NO: 60120 - DNA, 25 bp, Saccharomyces pastorianus
acaggcaagaatgggtccaagttat

SEQ ID NO: 60121 - DNA, 25 bp, Saccharomyces pastorianus
gagcttccgcatctaccggtctgag

SEQ ID NO: 60122 - DNA, 25 bp, Saccharomyces pastorianus
ggacctgttgccaccatcttgatta

SEQ ID NO: 60123 - DNA, 25 bp, Saccharomyces pastorianus
tcgacttgtttccttgattgttcca

SEQ ID NO: 60124 - DNA, 25 bp, Saccharomyces pastorianus
gtactcttgttcttattgttaccac

SEQ ID NO: 60125 - DNA, 25 bp, Saccharomyces pastorianus
ttcttattgttaccaccccaagtgg

SEQ ID NO: 60126 - DNA, 25 bp, Saccharomyces pastorianus
ttgccaccatcttgattaccccaag

SEQ ID NO: 60127 - DNA, 25 bp, Saccharomyces pastorianus
ttgattaccccaagcagaagctcca

SEQ ID NO: 60128 - DNA, 25 bp, Saccharomyces pastorianus
tgattgttccaagcggacctgttgc

SEQ ID NO: 60129 - DNA, 25 bp, Saccharomyces pastorianus
ttgttcttattgttaccaccccaag

SEQ ID NO: 60130 - DNA, 25 bp, Saccharomyces pastorianus
tattaccaccatagttcgacttgtt

SEQ ID NO: 60131 - DNA, 25 bp, Saccharomyces pastorianus
accatctcttgtactcttgttctta

SEQ ID NO: 60132 - DNA, 25 bp, Saccharomyces pastorianus
gtttccttgattgttccaagcggac

SEQ ID NO: 60133 - DNA, 25 bp, Saccharomyces pastorianus
aacagtgttatcaagctattatcca

SEQ ID NO: 60134 - DNA, 25 bp, Saccharomyces pastorianus
caagctattatccactgcagcgagt

SEQ ID NO: 60135 - DNA, 25 bp, Saccharomyces pastorianus
atcatcttcgtatatatgtgctgaa

SEQ ID NO: 60136 - DNA, 25 bp, Saccharomyces pastorianus
gttccccttcggtatggagcaataa

SEQ ID NO: 60137 - DNA, 25 bp, Saccharomyces pastorianus
agtcaagtccaagaacagtgttatc

SEQ ID NO: 60138 - DNA, 25 bp, Saccharomyces pastorianus
gacaccacaatcatcttcgtatata

SEQ ID NO: 60139 - DNA, 25 bp, Saccharomyces pastorianus
gaaaggtgcacctttagtcactcaa

SEQ ID NO: 60140 - DNA, 25 bp, Saccharomyces pastorianus
actgcagcgagtgggtattctcgtt

SEQ ID NO: 60141 - DNA, 25 bp, Saccharomyces pastorianus
tgggtattctcgttacatatcggta

SEQ ID NO: 60142 - DNA, 25 bp, Saccharomyces pastorianus
ttaactgttccccttcggtatggag

SEQ ID NO: 60143 - DNA, 25 bp, Saccharomyces pastorianus
gagcaataaaactacgacaccacaa

SEQ ID NO: 60144 - DNA, 25 bp, Saccharomyces pastorianus
gaaagatttggtttagccccagaag

SEQ ID NO: 60145 - DNA, 25 bp, Saccharomyces pastorianus
aacaccttcgacagagtttacgcca

SEQ ID NO: 60146 - DNA, 25 bp, Saccharomyces pastorianus
tagtcgccggtggtagatccaagtt

SEQ ID NO: 60147 - DNA, 25 bp, Saccharomyces pastorianus
gatgttccatgtcgatgtagccaag

SEQ ID NO: 60148 - DNA, 25 bp, Saccharomyces pastorianus
gggtgacggtatccccaagatgttc

SEQ ID NO: 60149 - DNA, 25 bp, Saccharomyces pastorianus
aacgctgcagttggtttagtcgccg

SEQ ID NO: 60150 - DNA, 25 bp, Saccharomyces pastorianus
gagtttacgccattgaagccacttg

SEQ ID NO: 60151 - DNA, 25 bp, Saccharomyces pastorianus
tcgtcgctaagaaacctgctgaggt

SEQ ID NO: 60152 - DNA, 25 bp, Saccharomyces pastorianus
ctccaatgatgttattcgtcgctaa

SEQ ID NO: 60153 - DNA, 25 bp, Saccharomyces pastorianus
gaagccacttgtcatgctccaaaat

SEQ ID NO: 60154 - DNA, 25 bp, Saccharomyces pastorianus
aatctagctaacttggccacattct

SEQ ID NO: 60155 - DNA, 25 bp, Saccharomyces pastorianus
aattctcgccacttttccggatatt

SEQ ID NO: 60156 - DNA, 25 bp, Saccharomyces pastorianus
ttcctcgaccacagtgacgatgcat

SEQ ID NO: 60157 - DNA, 25 bp, Saccharomyces pastorianus
gtctcttgccctctagtagacaagg

SEQ ID NO: 60158 - DNA, 25 bp, Saccharomyces pastorianus
atattaatctgggtctcttgccctc

SEQ ID NO: 60159 - DNA, 25 bp, Saccharomyces pastorianus
gataaagacttttgcaccagatgtt

SEQ ID NO: 60160 - DNA, 25 bp, Saccharomyces pastorianus
ttacttgacaaagggtgccagggcc

SEQ ID NO: 60161 - DNA, 25 bp, Saccharomyces pastorianus
gacaagggtggccattagcgcttaa

SEQ ID NO: 60162 - DNA, 25 bp, Saccharomyces pastorianus
atgcgggtataggttatttcacttt

SEQ ID NO: 60163 - DNA, 25 bp, Saccharomyces pastorianus
gaatttcaagctcagcatccagatt

SEQ ID NO: 60164 - DNA, 25 bp, Saccharomyces pastorianus
ttcatttacagggagcttcctcgac

SEQ ID NO: 60165 - DNA, 25 bp, Saccharomyces pastorianus
cagggccctttttgcgtttgaattg

SEQ ID NO: 60166 - DNA, 25 bp, Saccharomyces pastorianus
gtccgtgttaagaacccaaccagat

SEQ ID NO: 60167 - DNA, 25 bp, Saccharomyces pastorianus
gaaggacattgccttcgcactggac

SEQ ID NO: 60168 - DNA, 25 bp, Saccharomyces pastorianus
ggagacagtgttttttcatgcgaaa

SEQ ID NO: 60169 - DNA, 25 bp, Saccharomyces pastorianus
gtaagttgtgatgatgctggcgccc

SEQ ID NO: 60170 - DNA, 25 bp, Saccharomyces pastorianus
tgacccaaatttccagtaccataac

SEQ ID NO: 60171 - DNA, 25 bp, Saccharomyces pastorianus
caaggttatggccacatttgcgtaa

SEQ ID NO: 60172 - DNA, 25 bp, Saccharomyces pastorianus
ccatatctgtttttctgtctctgac

SEQ ID NO: 60173 - DNA, 25 bp, Saccharomyces pastorianus
actggaccccgatggatactggatt

SEQ ID NO: 60174 - DNA, 25 bp, Saccharomyces pastorianus
acaccgtggattcggccatatctgt

SEQ ID NO: 60175 - DNA, 25 bp, Saccharomyces pastorianus
aattcaccttatatttcttgggcta

SEQ ID NO: 60176 - DNA, 25 bp, Saccharomyces pastorianus
tggcgataagattcagtggtctcct

SEQ ID NO: 60177 - DNA, 25 bp, Saccharomyces pastorianus
ggaaggtcaccaatgccaaagctgc

SEQ ID NO: 60178 - DNA, 25 bp, Saccharomyces pastorianus
aaagtacggctggtaccgctagtca

SEQ ID NO: 60179 - DNA, 25 bp, Saccharomyces pastorianus
gagcagcggctgtctgttcaaatca

SEQ ID NO: 60180 - DNA, 25 bp, Saccharomyces pastorianus
agctgccgatgcttttacaacgagc

SEQ ID NO: 60181 - DNA, 25 bp, Saccharomyces pastorianus
aagcatgtctggatcaacgtactat

SEQ ID NO: 60182 - DNA, 25 bp, Saccharomyces pastorianus
gtaccgttcagctattcaaatccat

SEQ ID NO: 60183 - DNA, 25 bp, Saccharomyces pastorianus
agacgcttatgccagccttctgaaa

SEQ ID NO: 60184 - DNA, 25 bp, Saccharomyces pastorianus
atattgtcattcaaagcgagcctga

SEQ ID NO: 60185 - DNA, 25 bp, Saccharomyces pastorianus
gaaacattacggtgaactcttgagt

SEQ ID NO: 60186 - DNA, 25 bp, Saccharomyces pastorianus
gctagtcatattccacttggcggtt

SEQ ID NO: 60187 - DNA, 25 bp, Saccharomyces pastorianus
ggcatttcctagtacagttaaacca

SEQ ID NO: 60188 - DNA, 25 bp, Saccharomyces pastorianus
gcaaatcctcctctactaacaagaa

SEQ ID NO: 60189 - DNA, 25 bp, Saccharomyces pastorianus
caagatgtcttactccgactcagaa

SEQ ID NO: 60190 - DNA, 25 bp, Saccharomyces pastorianus
aagtcagtctcaggtttaggcaaca

SEQ ID NO: 60191 - DNA, 25 bp, Saccharomyces pastorianus
gaacgctactttaccatccgaatgt

SEQ ID NO: 60192 - DNA, 25 bp, Saccharomyces pastorianus
aaaatgggtttgaggccgccacgat

SEQ ID NO: 60193 - DNA, 25 bp, Saccharomyces pastorianus
aactccagacattcgttcaacggta

SEQ ID NO: 60194 - DNA, 25 bp, Saccharomyces pastorianus
agtgactctggattcttaggctgtg

SEQ ID NO: 60195 - DNA, 25 bp, Saccharomyces pastorianus
gttgcgacgcaacaaacttgaccga

SEQ ID NO: 60196 - DNA, 25 bp, Saccharomyces pastorianus
ggtttaaatttgtccttcccatatg

SEQ ID NO: 60197 - DNA, 25 bp, Saccharomyces pastorianus
gaccgatttagattacatcccacct

SEQ ID NO: 60198 - DNA, 25 bp, Saccharomyces pastorianus
aatgccttagtggactactccggat

SEQ ID NO: 60199 - DNA, 25 bp, Saccharomyces pastorianus
caagattggtgtcgcctgttccggt

SEQ ID NO: 60200 - DNA, 25 bp, Saccharomyces pastorianus
tgacaagcactctggcctggaataa

SEQ ID NO: 60201 - DNA, 25 bp, Saccharomyces pastorianus
caacatctctttggccgacgtatgg

SEQ ID NO: 60202 - DNA, 25 bp, Saccharomyces pastorianus
gactgcatccaactcaatctgggac

SEQ ID NO: 60203 - DNA, 25 bp, Saccharomyces pastorianus
aatttctggccaagcttgtaccgtg

SEQ ID NO: 60204 - DNA, 25 bp, Saccharomyces pastorianus
ggcggtatcaacatcttcaagactg

SEQ ID NO: 60205 - DNA, 25 bp, Saccharomyces pastorianus
tacggtcgcagacggtaggtaccca

SEQ ID NO: 60206 - DNA, 25 bp, Saccharomyces pastorianus
tggacctctgtgcaagacatcgtgg

SEQ ID NO: 60207 - DNA, 25 bp, Saccharomyces pastorianus
tggacaaccgtactgttggcgccaa

SEQ ID NO: 60208 - DNA, 25 bp, Saccharomyces pastorianus
tagtaattcctccaacatgcccaag

SEQ ID NO: 60209 - DNA, 25 bp, Saccharomyces pastorianus
aatctgggacatctctcactcgatt

SEQ ID NO: 60210 - DNA, 25 bp, Saccharomyces pastorianus
tgttctccttcttctatgtcttttt

SEQ ID NO: 60211 - DNA, 25 bp, Saccharomyces pastorianus
ttctccttcttctatgtctttttct

SEQ ID NO: 60212 - DNA, 25 bp, Saccharomyces pastorianus
ctccttcttctatgtctttttcttt

SEQ ID NO: 60213 - DNA, 25 bp, Saccharomyces pastorianus
ctttgtctgtgaaactaaaggtttg

SEQ ID NO: 60214 - DNA, 25 bp, Saccharomyces pastorianus
tctccttcttctatgtctttttctt

SEQ ID NO: 60215 - DNA, 25 bp, Saccharomyces pastorianus
gttctccttcttctatgtctttttc

SEQ ID NO: 60216 - DNA, 25 bp, Saccharomyces pastorianus
gtgttctccttcttctatgtctttt

SEQ ID NO: 60217 - DNA, 25 bp, Saccharomyces pastorianus
gtagaaggtgtcaagccatggaagt

SEQ ID NO: 60218 - DNA, 25 bp, Saccharomyces pastorianus
tggtgttctccttcttctatgtctt

SEQ ID NO: 60219 - DNA, 25 bp, Saccharomyces pastorianus
gtctgtgaaactaaaggtttgactt

SEQ ID NO: 60220 - DNA, 25 bp, Saccharomyces pastorianus
ggtgttctccttcttctatgtcttt

SEQ ID NO: 60221 - DNA, 25 bp, Saccharomyces pastorianus
ttttgttatcttctccaccgttggt

SEQ ID NO: 60222 - DNA, 25 bp, Saccharomyces pastorianus
tttctgaatcttatcccttacgtgt

SEQ ID NO: 60223 - DNA, 25 bp, Saccharomyces pastorianus
aaccctcttctaaggctgctggtaa

SEQ ID NO: 60224 - DNA, 25 bp, Saccharomyces pastorianus
agatggtaaggaccaaccctcttct

SEQ ID NO: 60225 - DNA, 25 bp, Saccharomyces pastorianus
ccaccgttggtgttacaagcttgta

SEQ ID NO: 60226 - DNA, 25 bp, Saccharomyces pastorianus
taggtatcgtcaactttgcctctac

SEQ ID NO: 60227 - DNA, 25 bp, Saccharomyces pastorianus
ttctttgctatcagttgggctccaa

SEQ ID NO: 60228 - DNA, 25 bp, Saccharomyces pastorianus
aagtgtctactaggtggctctgctt

SEQ ID NO: 60229 - DNA, 25 bp, Saccharomyces pastorianus
ctgctttcatggctatctgttttgt

SEQ ID NO: 60230 - DNA, 25 bp, Saccharomyces pastorianus
aagggtgccattttacctcgtgtca

SEQ ID NO: 60231 - DNA, 25 bp, Saccharomyces pastorianus
ttgcctctactttcgttgctttata

SEQ ID NO: 60232 - DNA, 25 bp, Saccharomyces pastorianus
cggtcaactgcgtttttcgaatgtt

SEQ ID NO: 60233 - DNA, 25 bp, Saccharomyces pastorianus
gatttccacatttcacgacggtcaa

SEQ ID NO: 60234 - DNA, 25 bp, Saccharomyces pastorianus
cacatttcacgacggtcaactgcgt

SEQ ID NO: 60235 - DNA, 25 bp, Saccharomyces pastorianus
ttcacgacggtcaactgcgtttttc

SEQ ID NO: 60236 - DNA, 25 bp, Saccharomyces pastorianus
acggtcaactgcgtttttcgaatgt

SEQ ID NO: 60237 - DNA, 25 bp, Saccharomyces pastorianus
tttccacatttcacgacggtcaact

SEQ ID NO: 60238 - DNA, 25 bp, Saccharomyces pastorianus
cgacggtcaactgcgtttttcgaat

SEQ ID NO: 60239 - DNA, 25 bp, Saccharomyces pastorianus
atgatttccacatttcacgacggtc

SEQ ID NO: 60240 - DNA, 25 bp, Saccharomyces pastorianus
tttcacgacggtcaactgcgttttt

SEQ ID NO: 60241 - DNA, 25 bp, Saccharomyces pastorianus
cacgacggtcaactgcgtttttcga

SEQ ID NO: 60242 - DNA, 25 bp, Saccharomyces pastorianus
atttcacgacggtcaactgcgtttt

SEQ ID NO: 60243 - DNA, 25 bp, Saccharomyces pastorianus
ggtggctaaacctgtcacaattatt

SEQ ID NO: 60244 - DNA, 25 bp, Saccharomyces pastorianus
gagggattctgccttgcaattagaa

SEQ ID NO: 60245 - DNA, 25 bp, Saccharomyces pastorianus
aaaaattccgggttgccttctgatg

SEQ ID NO: 60246 - DNA, 25 bp, Saccharomyces pastorianus
aatgctccctgaatgcttatggtgc

SEQ ID NO: 60247 - DNA, 25 bp, Saccharomyces pastorianus
ctattcttcgttccctggtggctaa

SEQ ID NO: 60248 - DNA, 25 bp, Saccharomyces pastorianus
agggatcgccgtcacacaaagtaaa

SEQ ID NO: 60249 - DNA, 25 bp, Saccharomyces pastorianus
gagactctaccgacgttttcgatga

SEQ ID NO: 60250 - DNA, 25 bp, Saccharomyces pastorianus
taatatcactaccttgaacgcctca

SEQ ID NO: 60251 - DNA, 25 bp, Saccharomyces pastorianus
atggcgatgatacccctaacaagaa

SEQ ID NO: 60252 - DNA, 25 bp, Saccharomyces pastorianus
gaatcttcgcttggtacagatcatg

SEQ ID NO: 60253 - DNA, 25 bp, Saccharomyces pastorianus
tgtatcatctatatgcacgcaggga

SEQ ID NO: 60254 - DNA, 25 bp, Saccharomyces pastorianus
tgagatcctgaaaaacgacgtgttt

SEQ ID NO: 60255 - DNA, 25 bp, Saccharomyces pastorianus
tatccaatagtgagtgtatcttgca

SEQ ID NO: 60256 - DNA, 25 bp, Saccharomyces pastorianus
aaacttcaaacacctgtctcaatcg

SEQ ID NO: 60257 - DNA, 25 bp, Saccharomyces pastorianus
tcgagtccgattgttgtttccaaaa

SEQ ID NO: 60258 - DNA, 25 bp, Saccharomyces pastorianus
aacacctgtctcaatcgagtgccga

SEQ ID NO: 60259 - DNA, 25 bp, Saccharomyces pastorianus
ataggttcggcgtaagttatccaat

SEQ ID NO: 60260 - DNA, 25 bp, Saccharomyces pastorianus
gacaatgatatcgtcatggccacag

SEQ ID NO: 60261 - DNA, 25 bp, Saccharomyces pastorianus
gatacgcatctgacggaatagctaa

SEQ ID NO: 60262 - DNA, 25 bp, Saccharomyces pastorianus
atcgagtgccgattcgagtccgatt

SEQ ID NO: 60263 - DNA, 25 bp, Saccharomyces pastorianus
atcgtcatggccacagaaaatctaa

SEQ ID NO: 60264 - DNA, 25 bp, Saccharomyces pastorianus
gagttcttgaactctaaagactttg

SEQ ID NO: 60265 - DNA, 25 bp, Saccharomyces pastorianus
caatcttgcaagacgggatcagact

SEQ ID NO: 60266 - DNA, 25 bp, Saccharomyces pastorianus
aaggtcgaaaaatcttcaatcttgc

SEQ ID NO: 60267 - DNA, 25 bp, Saccharomyces pastorianus
aacaatatcaaacgtttacgggatg

SEQ ID NO: 60268 - DNA, 25 bp, Saccharomyces pastorianus
acggatatgatattccatggagtgg

SEQ ID NO: 60269 - DNA, 25 bp, Saccharomyces pastorianus
ttacgggatgaaattttctctttca

SEQ ID NO: 60270 - DNA, 25 bp, Saccharomyces pastorianus
agtcatctttagtgaacaggttaac

SEQ ID NO: 60271 - DNA, 25 bp, Saccharomyces pastorianus
ttgattttgctgatgataatagcca

SEQ ID NO: 60272 - DNA, 25 bp, Saccharomyces pastorianus
aatgttggtaagtcatctttagtga

SEQ ID NO: 60273 - DNA, 25 bp, Saccharomyces pastorianus
ttttctctttcattcaaaaggtcga

SEQ ID NO: 60274 - DNA, 25 bp, Saccharomyces pastorianus
acgggatcagactagtattactcgg

SEQ ID NO: 60275 - DNA, 25 bp, Saccharomyces pastorianus
gacaatacggatatgatattccatg

SEQ ID NO: 60276 - DNA, 25 bp, Saccharomyces pastorianus
aagagcagtgaataggttgtccgga

SEQ ID NO: 60277 - DNA, 25 bp, Saccharomyces pastorianus
atcctcttctttgcaaaagagcagt

SEQ ID NO: 60278 - DNA, 25 bp, Saccharomyces pastorianus
ttcgaatcctcttctttgcaaaaga

SEQ ID NO: 60279 - DNA, 25 bp, Saccharomyces pastorianus
cagtgaataggttgtccggatttac

SEQ ID NO: 60280 - DNA, 25 bp, Saccharomyces pastorianus
gtccggatttacaaagcctgcaact

SEQ ID NO: 60281 - DNA, 25 bp, Saccharomyces pastorianus
tacaaagcctgcaacttcacaccta

SEQ ID NO: 60282 - DNA, 25 bp, Saccharomyces pastorianus
acacctaccaacaatctatgcctgt

SEQ ID NO: 60283 - DNA, 25 bp, Saccharomyces pastorianus
acttcacacctaccaacaatctatg

SEQ ID NO: 60284 - DNA, 25 bp, Saccharomyces pastorianus
ggttgtccggatttacaaagcctgc

SEQ ID NO: 60285 - DNA, 25 bp, Saccharomyces pastorianus
gtttcgaatcctcttctttgcaaaa

SEQ ID NO: 60286 - DNA, 25 bp, Saccharomyces pastorianus
gatttacaaagcctgcaacttcaca

SEQ ID NO: 60287 - DNA, 25 bp, Saccharomyces pastorianus
gtactgttacgaacctcttgctcaa

SEQ ID NO: 60288 - DNA, 25 bp, Saccharomyces pastorianus
agctgccactgatgccttgatgaaa

SEQ ID NO: 60289 - DNA, 25 bp, Saccharomyces pastorianus
gaactggccatgctatgtcgcagag

SEQ ID NO: 60290 - DNA, 25 bp, Saccharomyces pastorianus
aatttctcggagacaagtgcccttg

SEQ ID NO: 60291 - DNA, 25 bp, Saccharomyces pastorianus
ggtagactatccaaatcgcctgttt

SEQ ID NO: 60292 - DNA, 25 bp, Saccharomyces pastorianus
aatggagcctttcgaattcacctta

SEQ ID NO: 60293 - DNA, 25 bp, Saccharomyces pastorianus
aactacatctgttttgtctcgttat

SEQ ID NO: 60294 - DNA, 25 bp, Saccharomyces pastorianus
atcgcctgttttcatcgtacatgta

SEQ ID NO: 60295 - DNA, 25 bp, Saccharomyces pastorianus
tagctgccatttgggccgtgacaga

SEQ ID NO: 60296 - DNA, 25 bp, Saccharomyces pastorianus
gaatgccgcggtaaacgcttacata

SEQ ID NO: 60297 - DNA, 25 bp, Saccharomyces pastorianus
gagagactctcaagcggtttacaaa

SEQ ID NO: 60298 - DNA, 25 bp, Saccharomyces pastorianus
cgacgtacaggtcggtttgcctgaa

SEQ ID NO: 60299 - DNA, 25 bp, Saccharomyces pastorianus
gctaccaacggtatcacgtctttga

SEQ ID NO: 60300 - DNA, 25 bp, Saccharomyces pastorianus
tttgcctgaaggtctcgatgctaaa

SEQ ID NO: 60301 - DNA, 25 bp, Saccharomyces pastorianus
tgaatttttcccaagtggccaaccg

SEQ ID NO: 60302 - DNA, 25 bp, Saccharomyces pastorianus
agacctgagagaccgtgaatttttc

SEQ ID NO: 60303 - DNA, 25 bp, Saccharomyces pastorianus
cagagcccttgatttctttgccaag

SEQ ID NO: 60304 - DNA, 25 bp, Saccharomyces pastorianus
aaggatttcgacatcttagtccaag

SEQ ID NO: 60305 - DNA, 25 bp, Saccharomyces pastorianus
aatgctagcagctttcctgttagaa

SEQ ID NO: 60306 - DNA, 25 bp, Saccharomyces pastorianus
tcttccatgccaaggatatcccata

SEQ ID NO: 60307 - DNA, 25 bp, Saccharomyces pastorianus
gactagccaccaaatgtatcttcca

SEQ ID NO: 60308 - DNA, 25 bp, Saccharomyces pastorianus
tgggcaagttcatttcgagtggcga

SEQ ID NO: 60309 - DNA, 25 bp, Saccharomyces pastorianus
tactcaagggtatttctaatcgtgt

SEQ ID NO: 60310 - DNA, 25 bp, Saccharomyces pastorianus
aaagctagatctgtgctacctgcta

SEQ ID NO: 60311 - DNA, 25 bp, Saccharomyces pastorianus
gtttatggcaagctctactgcgttt

SEQ ID NO: 60312 - DNA, 25 bp, Saccharomyces pastorianus
gaatatgtgcagtgtcctacaataa

SEQ ID NO: 60313 - DNA, 25 bp, Saccharomyces pastorianus
gggcaactattgaaggaccatttaa

SEQ ID NO: 60314 - DNA, 25 bp, Saccharomyces pastorianus
aatatcattattgtcggcggtacta

SEQ ID NO: 60315 - DNA, 25 bp, Saccharomyces pastorianus
ttgggcgctcaaattgtttctaaac

SEQ ID NO: 60316 - DNA, 25 bp, Saccharomyces pastorianus
gtgctacctgctacaacgaaaaaga

SEQ ID NO: 60317 - DNA, 25 bp, Saccharomyces pastorianus
aatatccggactattttcccgagtg

SEQ ID NO: 60318 - DNA, 25 bp, Saccharomyces pastorianus
gcggtactacgtcaattccagggtt

SEQ ID NO: 60319 - DNA, 25 bp, Saccharomyces pastorianus
tactgcgtttatcccaagcatagaa

SEQ ID NO: 60320 - DNA, 25 bp, Saccharomyces pastorianus
aagagtttctagtggttcgtcaata

SEQ ID NO: 60321 - DNA, 25 bp, Saccharomyces pastorianus
tggcttggacaactcatcatatttt

SEQ ID NO: 60322 - DNA, 25 bp, Saccharomyces pastorianus
cgcctccaaaactatctctaaatca

SEQ ID NO: 60323 - DNA, 25 bp, Saccharomyces pastorianus
tcatttaaatttgaaccgcctccaa

SEQ ID NO: 60324 - DNA, 25 bp, Saccharomyces pastorianus
gaaaatttctctcccatattcagta

SEQ ID NO: 60325 - DNA, 25 bp, Saccharomyces pastorianus
taaatcctccatgagcagcaacagt

SEQ ID NO: 60326 - DNA, 25 bp, Saccharomyces pastorianus
gtgaagattttcctagacctgctag

SEQ ID NO: 60327 - DNA, 25 bp, Saccharomyces pastorianus
tacagcatcgtcagcattatcattt

SEQ ID NO: 60328 - DNA, 25 bp, Saccharomyces pastorianus
caggattttacttttgttggttcag

SEQ ID NO: 60329 - DNA, 25 bp, Saccharomyces pastorianus
ccccaatcttcgatgactacagcat

SEQ ID NO: 60330 - DNA, 25 bp, Saccharomyces pastorianus
ggatgacagaagcaccaaccggcaa

SEQ ID NO: 60331 - DNA, 25 bp, Saccharomyces pastorianus
gtccactggctttcgattcgacaaa

SEQ ID NO: 60332 - DNA, 25 bp, Saccharomyces pastorianus
atttcacttcagtatcatccagtcc

SEQ ID NO: 60333 - DNA, 25 bp, Saccharomyces pastorianus
atgccagccattttacaattcgtgt

SEQ ID NO: 60334 - DNA, 25 bp, Saccharomyces pastorianus
gaggtccagctcattttcgagatca

SEQ ID NO: 60335 - DNA, 25 bp, Saccharomyces pastorianus
aaagttctgcatggtgatactcaca

SEQ ID NO: 60336 - DNA, 25 bp, Saccharomyces pastorianus
gaatttagttcccatcgagggccgc

SEQ ID NO: 60337 - DNA, 25 bp, Saccharomyces pastorianus
cgtgttgtattgtagactgccgatt

SEQ ID NO: 60338 - DNA, 25 bp, Saccharomyces pastorianus
attttttccctcgtatatctccaga

SEQ ID NO: 60339 - DNA, 25 bp, Saccharomyces pastorianus
aaaagtgttacgagtcatgcctggg

SEQ ID NO: 60340 - DNA, 25 bp, Saccharomyces pastorianus
atacaggcggccacattatgaattc

SEQ ID NO: 60341 - DNA, 25 bp, Saccharomyces pastorianus
gccgctattggcatcccatttgaga

SEQ ID NO: 60342 - DNA, 25 bp, Saccharomyces pastorianus
gaaacagcccatcaagtacatcgaa

SEQ ID NO: 60343 - DNA, 25 bp, Saccharomyces pastorianus
gagaataccagcacgagcccaaata

SEQ ID NO: 60344 - DNA, 25 bp, Saccharomyces pastorianus
cgcccactacatccaagactaaaga

SEQ ID NO: 60345 - DNA, 25 bp, Saccharomyces pastorianus
tcgaaaacaagacccgcagacacgt

SEQ ID NO: 60346 - DNA, 25 bp, Saccharomyces pastorianus
aactccggcctggtgtacacgttca

SEQ ID NO: 60347 - DNA, 25 bp, Saccharomyces pastorianus
ggaggagccaactactgtcggcaat

SEQ ID NO: 60348 - DNA, 25 bp, Saccharomyces pastorianus
caacggctccagtatcagagtgctg

SEQ ID NO: 60349 - DNA, 25 bp, Saccharomyces pastorianus
gcctccatcggagttggtgcaagac

SEQ ID NO: 60350 - DNA, 25 bp, Saccharomyces pastorianus
agacacgtcaccttctctaaaaggc

SEQ ID NO: 60351 - DNA, 25 bp, Saccharomyces pastorianus
ggcgatcaattcgaacggatccgta

SEQ ID NO: 60352 - DNA, 25 bp, Saccharomyces pastorianus
aaaaggcatacgagctctctgtcct

SEQ ID NO: 60353 - DNA, 25 bp, Saccharomyces pastorianus
acgacgacaatggtgacgacaacga

SEQ ID NO: 60354 - DNA, 25 bp, Saccharomyces pastorianus
gagcctatagctacagaacatgccg

SEQ ID NO: 60355 - DNA, 25 bp, Saccharomyces pastorianus
ggaactcaaggcctttcaagcgtta

SEQ ID NO: 60356 - DNA, 25 bp, Saccharomyces pastorianus
acagatccagttttgagagagtaca

SEQ ID NO: 60357 - DNA, 25 bp, Saccharomyces pastorianus
atgatgcagcagtcttgggaactca

SEQ ID NO: 60358 - DNA, 25 bp, Saccharomyces pastorianus
atctatcacctttctgcgagtaaca

SEQ ID NO: 60359 - DNA, 25 bp, Saccharomyces pastorianus
agaatataccgtctaaggaaccata

SEQ ID NO: 60360 - DNA, 25 bp, Saccharomyces pastorianus
agaacatgccgatgctacgaacgcg

SEQ ID NO: 60361 - DNA, 25 bp, Saccharomyces pastorianus
gaacaagggcctgctgaactgaaca

SEQ ID NO: 60362 - DNA, 25 bp, Saccharomyces pastorianus
agcggcctcactcaatatacaagat

SEQ ID NO: 60363 - DNA, 25 bp, Saccharomyces pastorianus
gcggaactagttacagcggcctcac

SEQ ID NO: 60364 - DNA, 25 bp, Saccharomyces pastorianus
ggttgtttggcaacagttctttgca

SEQ ID NO: 60365 - DNA, 25 bp, Saccharomyces pastorianus
gtaaggccagtatatgctcggcgat

SEQ ID NO: 60366 - DNA, 25 bp, Saccharomyces pastorianus
gacggatttgaagcacgatactatc

SEQ ID NO: 60367 - DNA, 25 bp, Saccharomyces pastorianus
gatctgatgaccactagtaacccct

SEQ ID NO: 60368 - DNA, 25 bp, Saccharomyces pastorianus
agtaacccctcttatgaagctctgt

SEQ ID NO: 60369 - DNA, 25 bp, Saccharomyces pastorianus
gggaacggttgctcagtacgtgaaa

SEQ ID NO: 60370 - DNA, 25 bp, Saccharomyces pastorianus
cttgaagatgttgagccgccgttat

SEQ ID NO: 60371 - DNA, 25 bp, Saccharomyces pastorianus
gagccgccgttatttgacggatttg

SEQ ID NO: 60372 - DNA, 25 bp, Saccharomyces pastorianus
gcagctccttcttcatgagatgcaa

SEQ ID NO: 60373 - DNA, 25 bp, Saccharomyces pastorianus
atgctcggcgatggatcccaagaat

SEQ ID NO: 60374 - DNA, 25 bp, Saccharomyces pastorianus
tattgacaacaagcagcagctcctt

SEQ ID NO: 60375 - DNA, 25 bp, Saccharomyces pastorianus
gacagatctagacacactcgttcat

SEQ ID NO: 60376 - DNA, 25 bp, Saccharomyces pastorianus
tatgcgaagataccaagcgagctat

SEQ ID NO: 60377 - DNA, 25 bp, Saccharomyces pastorianus
aagggcaatcccattaatttgtcac

SEQ ID NO: 60378 - DNA, 25 bp, Saccharomyces pastorianus
tgaaaactgcatttcctccaaggat

SEQ ID NO: 60379 - DNA, 25 bp, Saccharomyces pastorianus
caagtttttcggcagccatcggaat

SEQ ID NO: 60380 - DNA, 25 bp, Saccharomyces pastorianus
gatcctgtgttgctatttcaaactt

SEQ ID NO: 60381 - DNA, 25 bp, Saccharomyces pastorianus
gggtccaacaacagtagctggtcta

SEQ ID NO: 60382 - DNA, 25 bp, Saccharomyces pastorianus
aatttgtcacacgatattctcacga

SEQ ID NO: 60383 - DNA, 25 bp, Saccharomyces pastorianus
gttcataatattcacggaggttccg

SEQ ID NO: 60384 - DNA, 25 bp, Saccharomyces pastorianus
aatgaatgcactctgggtccaacaa

SEQ ID NO: 60385 - DNA, 25 bp, Saccharomyces pastorianus
gatcagtagtggtaagtctcccgtt

SEQ ID NO: 60386 - DNA, 25 bp, Saccharomyces pastorianus
tttggcgacgtcatgattcatcaag

SEQ ID NO: 60387 - DNA, 25 bp, Saccharomyces pastorianus
gaacatctggctcaacaacgacatt

SEQ ID NO: 60388 - DNA, 25 bp, Saccharomyces pastorianus
gttctgcttaaactgtatctcccat

SEQ ID NO: 60389 - DNA, 25 bp, Saccharomyces pastorianus
acgcgttcagttctaaggattcagg

SEQ ID NO: 60390 - DNA, 25 bp, Saccharomyces pastorianus
atacctgcgtctttgggcgctatca

SEQ ID NO: 60391 - DNA, 25 bp, Saccharomyces pastorianus
tggaaggtacctctgcaatgctgca

SEQ ID NO: 60392 - DNA, 25 bp, Saccharomyces pastorianus
tatcactggcacacgcacaattgtc

SEQ ID NO: 60393 - DNA, 25 bp, Saccharomyces pastorianus
atatcaacagtgtcacggacggcac

SEQ ID NO: 60394 - DNA, 25 bp, Saccharomyces pastorianus
attcaggttcgcctttagcggtgat

SEQ ID NO: 60395 - DNA, 25 bp, Saccharomyces pastorianus
gggacatgaccatatcaaacgcgtt

SEQ ID NO: 60396 - DNA, 25 bp, Saccharomyces pastorianus
gattcataccatcgagttctgctta

SEQ ID NO: 60397 - DNA, 25 bp, Saccharomyces pastorianus
gggtatgcacatatgacgtattcct

SEQ ID NO: 60398 - DNA, 25 bp, Saccharomyces pastorianus
caaggatgacaagcctgctccaggt

SEQ ID NO: 60399 - DNA, 25 bp, Saccharomyces pastorianus
ttcaaatctggttggcaatggcccc

SEQ ID NO: 60400 - DNA, 25 bp, Saccharomyces pastorianus
ttttgacatggcatacactggtaga

SEQ ID NO: 60401 - DNA, 25 bp, Saccharomyces pastorianus
gtattcatgcagtcgatatttggtt

SEQ ID NO: 60402 - DNA, 25 bp, Saccharomyces pastorianus
gatcattatttcctggacaagccaa

SEQ ID NO: 60403 - DNA, 25 bp, Saccharomyces pastorianus
gactatgcatggcacggtaccgata

SEQ ID NO: 60404 - DNA, 25 bp, Saccharomyces pastorianus
aatcaatatgtttttggcaccagga

SEQ ID NO: 60405 - DNA, 25 bp, Saccharomyces pastorianus
agttgtactattgcttgcggcgctg

SEQ ID NO: 60406 - DNA, 25 bp, Saccharomyces pastorianus
caatggccccacacctttaggaaag

SEQ ID NO: 60407 - DNA, 25 bp, Saccharomyces pastorianus
ttcatccctggattagtattcatgc

SEQ ID NO: 60408 - DNA, 25 bp, Saccharomyces pastorianus
aaactctgggacttcatgttcgcgt

SEQ ID NO: 60409 - DNA, 25 bp, Saccharomyces pastorianus
gagatttacggaatgccctccatac

SEQ ID NO: 60410 - DNA, 25 bp, Saccharomyces pastorianus
acatcctgtttgttgtagcgttcct

SEQ ID NO: 60411 - DNA, 25 bp, Saccharomyces pastorianus
aggcggaaggcccagttcaacgaat

SEQ ID NO: 60412 - DNA, 25 bp, Saccharomyces pastorianus
ttgacgtttccctcaggatcatcga

SEQ ID NO: 60413 - DNA, 25 bp, Saccharomyces pastorianus
agataataccgacctacttgaccaa

SEQ ID NO: 60414 - DNA, 25 bp, Saccharomyces pastorianus
tactcacgctttccagttgcaataa

SEQ ID NO: 60415 - DNA, 25 bp, Saccharomyces pastorianus
atggcgctaagctacttgacgtttc

SEQ ID NO: 60416 - DNA, 25 bp, Saccharomyces pastorianus
agctgttctccaagctgtgttacga

SEQ ID NO: 60417 - DNA, 25 bp, Saccharomyces pastorianus
tattgccaagattcctgctcagatt

SEQ ID NO: 60418 - DNA, 25 bp, Saccharomyces pastorianus
gttcccggatttcgatgctgatgag

SEQ ID NO: 60419 - DNA, 25 bp, Saccharomyces pastorianus
aagagggcgtctactcgctgtttaa

SEQ ID NO: 60420 - DNA, 25 bp, Saccharomyces pastorianus
tcagggcaggccgttaagtacgacg

SEQ ID NO: 60421 - DNA, 25 bp, Saccharomyces pastorianus
gatgatgacctcagggcaggccgtt

SEQ ID NO: 60422 - DNA, 25 bp, Saccharomyces pastorianus
ggccggtgttatctcgctgtatgac

SEQ ID NO: 60423 - DNA, 25 bp, Saccharomyces pastorianus
tacgacggcgccatggactgtatga

SEQ ID NO: 60424 - DNA, 25 bp, Saccharomyces pastorianus
tgtttaagggttgcggcgccaacat

SEQ ID NO: 60425 - DNA, 25 bp, Saccharomyces pastorianus
gcgtctactcgctgtttaagggttg

SEQ ID NO: 60426 - DNA, 25 bp, Saccharomyces pastorianus
atggactgtatgaggaaaatcgttc

SEQ ID NO: 60427 - DNA, 25 bp, Saccharomyces pastorianus
aatcgttcagcaagagggcgtctac

SEQ ID NO: 60428 - DNA, 25 bp, Saccharomyces pastorianus
tgttatctcgctgtatgaccagttg

SEQ ID NO: 60429 - DNA, 25 bp, Saccharomyces pastorianus
ggcgccaacatcttcagaggcgtgg

SEQ ID NO: 60430 - DNA, 25 bp, Saccharomyces pastorianus
gcaggcgctgaatttcgcgttcaag

SEQ ID NO: 60431 - DNA, 25 bp, Saccharomyces pastorianus
gtggtttgccggtaatctgttttca

SEQ ID NO: 60432 - DNA, 25 bp, Saccharomyces pastorianus
catgagggcattctgtcgttctgga

SEQ ID NO: 60433 - DNA, 25 bp, Saccharomyces pastorianus
gtcgctgatgtttgtgtattcgctg

SEQ ID NO: 60434 - DNA, 25 bp, Saccharomyces pastorianus
gtattcgctggactatgctaggaca

SEQ ID NO: 60435 - DNA, 25 bp, Saccharomyces pastorianus
aaacggaaccgcagactcagaagtc

SEQ ID NO: 60436 - DNA, 25 bp, Saccharomyces pastorianus
cagaagtcgcatttcggcgtggact

SEQ ID NO: 60437 - DNA, 25 bp, Saccharomyces pastorianus
gctggactcgcggtacctgggcatc

SEQ ID NO: 60438 - DNA, 25 bp, Saccharomyces pastorianus
gtaacacggccaatgtgcttcggta

SEQ ID NO: 60439 - DNA, 25 bp, Saccharomyces pastorianus
ctgggcatcgcggagtgctttaaga

SEQ ID NO: 60440 - DNA, 25 bp, Saccharomyces pastorianus
gctttaagaggactgccgcacatga

SEQ ID NO: 60441 - DNA, 25 bp, Saccharomyces pastorianus
gtttaggccttgtccttgtggaaga

SEQ ID NO: 60442 - DNA, 25 bp, Saccharomyces pastorianus
aaggtaatgctgctgccaacacaca

SEQ ID NO: 60443 - DNA, 25 bp, Saccharomyces pastorianus
agattcaaagccgacaaccctggtg

SEQ ID NO: 60444 - DNA, 25 bp, Saccharomyces pastorianus
aacacggcactattccttctgggtt

SEQ ID NO: 60445 - DNA, 25 bp, Saccharomyces pastorianus
acgatgctttgggtgaagttcctca

SEQ ID NO: 60446 - DNA, 25 bp, Saccharomyces pastorianus
gggtattatcacgattgccatctat

SEQ ID NO: 60447 - DNA, 25 bp, Saccharomyces pastorianus
gggtattatcgctatgacattctct

SEQ ID NO: 60448 - DNA, 25 bp, Saccharomyces pastorianus
tggtatccaagatgctcactctcaa

SEQ ID NO: 60449 - DNA, 25 bp, Saccharomyces pastorianus
gtgtcagccctgaagtcttgatgga

SEQ ID NO: 60450 - DNA, 25 bp, Saccharomyces pastorianus
acattctcttgtttcgctggtatct

SEQ ID NO: 60451 - DNA, 25 bp, Saccharomyces pastorianus
tcctcacagtttcgacgcagatgac

SEQ ID NO: 60452 - DNA, 25 bp, Saccharomyces pastorianus
aggtgatcatggcatgtccccagta

SEQ ID NO: 60453 - DNA, 25 bp, Saccharomyces pastorianus
gagaggatacttttggccatcatta

SEQ ID NO: 60454 - DNA, 25 bp, Saccharomyces pastorianus
gtccccagtacagcagacagagttt

SEQ ID NO: 60455 - DNA, 25 bp, Saccharomyces pastorianus
gaaaactttcttacgctggagtgct

SEQ ID NO: 60456 - DNA, 25 bp, Saccharomyces pastorianus
acttttgcaagacgttttaccatgg

SEQ ID NO: 60457 - DNA, 25 bp, Saccharomyces pastorianus
gacagagtttattttgcccatcaat

SEQ ID NO: 60458 - DNA, 25 bp, Saccharomyces pastorianus
gtttactcaaaggacgtcctccaca

SEQ ID NO: 60459 - DNA, 25 bp, Saccharomyces pastorianus
ggacgtcctccacataaattaagca

SEQ ID NO: 60460 - DNA, 25 bp, Saccharomyces pastorianus
gcttgagccaagtctttacacaatt

SEQ ID NO: 60461 - DNA, 25 bp, Saccharomyces pastorianus
acaattatgcgattcagtcactgag

SEQ ID NO: 60462 - DNA, 25 bp, Saccharomyces pastorianus
tttgcccatcaatatgtctcagtac

SEQ ID NO: 60463 - DNA, 25 bp, Saccharomyces pastorianus
tattgagtgtcatacctaaacgcca

SEQ ID NO: 60464 - DNA, 25 bp, Saccharomyces pastorianus
gtgtcatacctaaacgccaatattt

SEQ ID NO: 60465 - DNA, 25 bp, Saccharomyces pastorianus
aactaccagcagaagttcttgattt

SEQ ID NO: 60466 - DNA, 25 bp, Saccharomyces pastorianus
gggctcagaactaccagcagaagtt

SEQ ID NO: 60467 - DNA, 25 bp, Saccharomyces pastorianus
gagtgtcatacctaaacgccaatat

SEQ ID NO: 60468 - DNA, 25 bp, Saccharomyces pastorianus
accagcagaagttcttgatttattg

SEQ ID NO: 60469 - DNA, 25 bp, Saccharomyces pastorianus
tttaacactaatttgctagatgcac

SEQ ID NO: 60470 - DNA, 25 bp, Saccharomyces pastorianus
tcttgatttattgagtgtcatacct

SEQ ID NO: 60471 - DNA, 25 bp, Saccharomyces pastorianus
gctagatgcacaaaagttagttaac

SEQ ID NO: 60472 - DNA, 25 bp, Saccharomyces pastorianus
taaacgccaatattttaacactaat

SEQ ID NO: 60473 - DNA, 25 bp, Saccharomyces pastorianus
gttagttaacttcttgaatgatcaa

SEQ ID NO: 60474 - DNA, 25 bp, Saccharomyces pastorianus
gactcacaaattaaaaccttatttg

SEQ ID NO: 60475 - DNA, 25 bp, Saccharomyces pastorianus
gatccagttgaaagcaatttacaaa

SEQ ID NO: 60476 - DNA, 25 bp, Saccharomyces pastorianus
aaagttcaagatttgatccagttga

SEQ ID NO: 60477 - DNA, 25 bp, Saccharomyces pastorianus
ggaattaacctacatgtacaatgag

SEQ ID NO: 60478 - DNA, 25 bp, Saccharomyces pastorianus
gattttttgaaagattccctcaaga

SEQ ID NO: 60479 - DNA, 25 bp, Saccharomyces pastorianus
gataagctatgaatccaagtttggt

SEQ ID NO: 60480 - DNA, 25 bp, Saccharomyces pastorianus
agattccctcaagaaaacttaattg

SEQ ID NO: 60481 - DNA, 25 bp, Saccharomyces pastorianus
gaaacatccgttgaaaaagttcaag

SEQ ID NO: 60482 - DNA, 25 bp, Saccharomyces pastorianus
gggtctaaaatatttccaaaatgat

SEQ ID NO: 60483 - DNA, 25 bp, Saccharomyces pastorianus
caagatttgatccagttgaaagcaa

SEQ ID NO: 60484 - DNA, 25 bp, Saccharomyces pastorianus
tggaactgggtctaaaatatttcca

SEQ ID NO: 60485 - DNA, 25 bp, Saccharomyces pastorianus
agctatattgacaactctcacgaaa

SEQ ID NO: 60486 - DNA, 25 bp, Saccharomyces pastorianus
taaccgtcgtatcattacaaaaccg

SEQ ID NO: 60487 - DNA, 25 bp, Saccharomyces pastorianus
aactgatgaataacgagtcgctcct

SEQ ID NO: 60488 - DNA, 25 bp, Saccharomyces pastorianus
aaatacatcccagttgtcatccaag

SEQ ID NO: 60489 - DNA, 25 bp, Saccharomyces pastorianus
gtcatccaagaactttgtttcaaat

SEQ ID NO: 60490 - DNA, 25 bp, Saccharomyces pastorianus
gagtcgctcctgaaaagaattccac

SEQ ID NO: 60491 - DNA, 25 bp, Saccharomyces pastorianus
gaagactttgaagccattccagcta

SEQ ID NO: 60492 - DNA, 25 bp, Saccharomyces pastorianus
gagatttggtcagtttattgtcatt

SEQ ID NO: 60493 - DNA, 25 bp, Saccharomyces pastorianus
gtcattattaccatatcctacaaaa

SEQ ID NO: 60494 - DNA, 25 bp, Saccharomyces pastorianus
cttcagatccttcccacttttataa

SEQ ID NO: 60495 - DNA, 25 bp, Saccharomyces pastorianus
aagttccgaatcttcgttatccgct

SEQ ID NO: 60496 - DNA, 25 bp, Saccharomyces pastorianus
aacagagacatttcctgtgtccatg

SEQ ID NO: 60497 - DNA, 25 bp, Saccharomyces pastorianus
attccaccactaccagtaataacgc

SEQ ID NO: 60498 - DNA, 25 bp, Saccharomyces pastorianus
gacatctactgtcgcattctcaaca

SEQ ID NO: 60499 - DNA, 25 bp, Saccharomyces pastorianus
aatcgtggctgaaaagacatctact

SEQ ID NO: 60500 - DNA, 25 bp, Saccharomyces pastorianus
atcttcaactacaacaattccacca

SEQ ID NO: 60501 - DNA, 25 bp, Saccharomyces pastorianus
ctgtgtccatggtgcttgagcagac

SEQ ID NO: 60502 - DNA, 25 bp, Saccharomyces pastorianus
gaagacggcaacagcttcgatccga

SEQ ID NO: 60503 - DNA, 25 bp, Saccharomyces pastorianus
agacaacctcttacagcacatgaaa

SEQ ID NO: 60504 - DNA, 25 bp, Saccharomyces pastorianus
acatccatcaatgccagttttgcga

SEQ ID NO: 60505 - DNA, 25 bp, Saccharomyces pastorianus
gccttcgtccgaccaaaaatacatc

SEQ ID NO: 60506 - DNA, 25 bp, Saccharomyces pastorianus
gcttcgatccgaacatcaagacttt

SEQ ID NO: 60507 - DNA, 25 bp, Saccharomyces pastorianus
gccaggctggcccaattaaaaagca

SEQ ID NO: 60508 - DNA, 25 bp, Saccharomyces pastorianus
gaggtgacaattctgctcctgtagg

SEQ ID NO: 60509 - DNA, 25 bp, Saccharomyces pastorianus
aaaaagcaatggtggcggcgccaat

SEQ ID NO: 60510 - DNA, 25 bp, Saccharomyces pastorianus
gctcctgtaggtgcagctattgcta

SEQ ID NO: 60511 - DNA, 25 bp, Saccharomyces pastorianus
ggatccggagttgcaagccattaga

SEQ ID NO: 60512 - DNA, 25 bp, Saccharomyces pastorianus
cccaggcggtggaggcatatctaaa

SEQ ID NO: 60513 - DNA, 25 bp, Saccharomyces pastorianus
aagctttggagaggttgtcccgcgt

SEQ ID NO: 60514 - DNA, 25 bp, Saccharomyces pastorianus
caagcgtgtgtttagttatggatcc

SEQ ID NO: 60515 - DNA, 25 bp, Saccharomyces pastorianus
gctattgctagcttcttagagcctc

SEQ ID NO: 60516 - DNA, 25 bp, Saccharomyces pastorianus
aatggcgacagaaatggcggtgcta

SEQ ID NO: 60517 - DNA, 25 bp, Saccharomyces pastorianus
gattggcacgaacaatgtcacccat

SEQ ID NO: 60518 - DNA, 25 bp, Saccharomyces pastorianus
aaatacactaccatcaagaagacga

SEQ ID NO: 60519 - DNA, 25 bp, Saccharomyces pastorianus
aatcaaggatattgcctcattaata

SEQ ID NO: 60520 - DNA, 25 bp, Saccharomyces pastorianus
taccgactacagttacaaccgagat

SEQ ID NO: 60521 - DNA, 25 bp, Saccharomyces pastorianus
gaactgtcaaatgtagtggtaccaa

SEQ ID NO: 60522 - DNA, 25 bp, Saccharomyces pastorianus
tttccaatttcaggaggacttaatt

SEQ ID NO: 60523 - DNA, 25 bp, Saccharomyces pastorianus
attccatgcaattcaacgacttttc

SEQ ID NO: 60524 - DNA, 25 bp, Saccharomyces pastorianus
gaatgacggcaacatccaaattatg

SEQ ID NO: 60525 - DNA, 25 bp, Saccharomyces pastorianus
ggtaccaaacgaactaaattccatg

SEQ ID NO: 60526 - DNA, 25 bp, Saccharomyces pastorianus
acgacttttccagtgatgatatcag

SEQ ID NO: 60527 - DNA, 25 bp, Saccharomyces pastorianus
ctatgggaccttaaggaactgtcaa

SEQ ID NO: 60528 - DNA, 25 bp, Saccharomyces pastorianus
aattgggtgccagaatgacggcaac

SEQ ID NO: 60529 - DNA, 25 bp, Saccharomyces pastorianus
aagtcgccttcacattgcgacagtt

SEQ ID NO: 60530 - DNA, 25 bp, Saccharomyces pastorianus
tcagcatcttctctatcttcgactt

SEQ ID NO: 60531 - DNA, 25 bp, Saccharomyces pastorianus
caccagcacgataaccttttacttg

SEQ ID NO: 60532 - DNA, 25 bp, Saccharomyces pastorianus
taaatgaaccctccaccactatgga

SEQ ID NO: 60533 - DNA, 25 bp, Saccharomyces pastorianus
gacagtcctctcagaatgttaatta

SEQ ID NO: 60534 - DNA, 25 bp, Saccharomyces pastorianus
gaaaatcattacttgtgacggtaca

SEQ ID NO: 60535 - DNA, 25 bp, Saccharomyces pastorianus
tatcttcgacttcctccaaagagaa

SEQ ID NO: 60536 - DNA, 25 bp, Saccharomyces pastorianus
aagaaggatgccagcaagtcgcctt

SEQ ID NO: 60537 - DNA, 25 bp, Saccharomyces pastorianus
gaaacgacgtttaaacaccagcacg

SEQ ID NO: 60538 - DNA, 25 bp, Saccharomyces pastorianus
agacctccattactggattgccgtt

SEQ ID NO: 60539 - DNA, 25 bp, Saccharomyces pastorianus
aaaagcgtcctaagagacagtcctc

SEQ ID NO: 60540 - DNA, 25 bp, Saccharomyces pastorianus
gggtattgccattttgtgatgcatt

SEQ ID NO: 60541 - DNA, 25 bp, Saccharomyces pastorianus
ggattcaataatctttttcagacac

SEQ ID NO: 60542 - DNA, 25 bp, Saccharomyces pastorianus
gctggtttgctgttattattgtcgt

SEQ ID NO: 60543 - DNA, 25 bp, Saccharomyces pastorianus
tttagttcgtttggtaccactacat

SEQ ID NO: 60544 - DNA, 25 bp, Saccharomyces pastorianus
ggtaccactacatttgacagttcct

SEQ ID NO: 60545 - DNA, 25 bp, Saccharomyces pastorianus
gaggcaatatccttgattttattat

SEQ ID NO: 60546 - DNA, 25 bp, Saccharomyces pastorianus
gatatcatcactggaaaagtcgttg

SEQ ID NO: 60547 - DNA, 25 bp, Saccharomyces pastorianus
gattttattatcttgggtattgcca

SEQ ID NO: 60548 - DNA, 25 bp, Saccharomyces pastorianus
aggtcccatagtttttgtagattat

SEQ ID NO: 60549 - DNA, 25 bp, Saccharomyces pastorianus
gacagttccttaaggtcccatagtt

SEQ ID NO: 60550 - DNA, 25 bp, Saccharomyces pastorianus
attattgtcgttacttatttggaag

SEQ ID NO: 60551 - DNA, 25 bp, Saccharomyces pastorianus
ttttacccacaatactaccacaaga

SEQ ID NO: 60552 - DNA, 25 bp, Saccharomyces pastorianus
ttaagcctttcttggatcctgttac

SEQ ID NO: 60553 - DNA, 25 bp, Saccharomyces pastorianus
tggccacctggtagagacttcatgt

SEQ ID NO: 60554 - DNA, 25 bp, Saccharomyces pastorianus
gccattgattgccaagttttaccca

SEQ ID NO: 60555 - DNA, 25 bp, Saccharomyces pastorianus
gttacatctgaagagcgcatgctga

SEQ ID NO: 60556 - DNA, 25 bp, Saccharomyces pastorianus
tttctagtgcatacagcgtcatgtc

SEQ ID NO: 60557 - DNA, 25 bp, Saccharomyces pastorianus
ttggatcctgttaccgtttcaaaga

SEQ ID NO: 60558 - DNA, 25 bp, Saccharomyces pastorianus
aatgctccatttggtttctctaccg

SEQ ID NO: 60559 - DNA, 25 bp, Saccharomyces pastorianus
gtaagtccgaagttaatgagtccac

SEQ ID NO: 60560 - DNA, 25 bp, Saccharomyces pastorianus
agattccagccgaaaacttgcctgt

SEQ ID NO: 60561 - DNA, 25 bp, Saccharomyces pastorianus
tcatgtcatacgtcagggaagcctc

SEQ ID NO: 60562 - DNA, 25 bp, Saccharomyces pastorianus
gcgtaccacccgctattagttgtaa

SEQ ID NO: 60563 - DNA, 25 bp, Saccharomyces pastorianus
atgcaccgggtatgcaggcgtacca

SEQ ID NO: 60564 - DNA, 25 bp, Saccharomyces pastorianus
gagcctgttttcaacgcaatgtgga

SEQ ID NO: 60565 - DNA, 25 bp, Saccharomyces pastorianus
taaggtatatcattcacgtcccgac

SEQ ID NO: 60566 - DNA, 25 bp, Saccharomyces pastorianus
tattatttacgatacccattccaac

SEQ ID NO: 60567 - DNA, 25 bp, Saccharomyces pastorianus
gataccatactgttggatctgcaac

SEQ ID NO: 60568 - DNA, 25 bp, Saccharomyces pastorianus
gattcgacaaatcctcttaatacag

SEQ ID NO: 60569 - DNA, 25 bp, Saccharomyces pastorianus
tcagctcctatatttgattcgacaa

SEQ ID NO: 60570 - DNA, 25 bp, Saccharomyces pastorianus
atgctttgatgcatgctccaaacgg

SEQ ID NO: 60571 - DNA, 25 bp, Saccharomyces pastorianus
aaattcattcggctatctgggaggg

SEQ ID NO: 60572 - DNA, 25 bp, Saccharomyces pastorianus
tattatccctgggttatgcaccggg

SEQ ID NO: 60573 - DNA, 25 bp, Saccharomyces pastorianus
cgcctttgtcccaggtatggctaag

SEQ ID NO: 60574 - DNA, 25 bp, Saccharomyces pastorianus
taggcatctagtggctggtctatca

SEQ ID NO: 60575 - DNA, 25 bp, Saccharomyces pastorianus
gaaattgcactaaccacatccaata

SEQ ID NO: 60576 - DNA, 25 bp, Saccharomyces pastorianus
gaaacttcaccagtccttcaggaat

SEQ ID NO: 60577 - DNA, 25 bp, Saccharomyces pastorianus
gggatgaatcctctttagaaccact

SEQ ID NO: 60578 - DNA, 25 bp, Saccharomyces pastorianus
ggcagattggatcgctgtagtttta

SEQ ID NO: 60579 - DNA, 25 bp, Saccharomyces pastorianus
tacggtaatacgctagaaacttcac

SEQ ID NO: 60580 - DNA, 25 bp, Saccharomyces pastorianus
tggtctatcatctggtctactagcc

SEQ ID NO: 60581 - DNA, 25 bp, Saccharomyces pastorianus
agctgtgccgtttctcctagtacgg

SEQ ID NO: 60582 - DNA, 25 bp, Saccharomyces pastorianus
aagcattagatagcgcctttgtccc

SEQ ID NO: 60583 - DNA, 25 bp, Saccharomyces pastorianus
gtaaggtcagcatctgtagtggcag

SEQ ID NO: 60584 - DNA, 25 bp, Saccharomyces pastorianus
ctcgatgtcgctcatagctcaaagg

SEQ ID NO: 60585 - DNA, 25 bp, Saccharomyces pastorianus
acttgcgcgggattgatctttctaa

SEQ ID NO: 60586 - DNA, 25 bp, Saccharomyces pastorianus
aaagtgcctggctgctaacgactat

SEQ ID NO: 60587 - DNA, 25 bp, Saccharomyces pastorianus
aaagacacccgaggagctggccaag

SEQ ID NO: 60588 - DNA, 25 bp, Saccharomyces pastorianus
tcattatccccggtggagagtccac

SEQ ID NO: 60589 - DNA, 25 bp, Saccharomyces pastorianus
tgcctttttggagcacgcaaaccat

SEQ ID NO: 60590 - DNA, 25 bp, Saccharomyces pastorianus
tggccaagtgcgatgctctcattat

SEQ ID NO: 60591 - DNA, 25 bp, Saccharomyces pastorianus
gtgacttttccaaattcatccctgg

SEQ ID NO: 60592 - DNA, 25 bp, Saccharomyces pastorianus
gaacgtggttgtagctgcacagcaa

SEQ ID NO: 60593 - DNA, 25 bp, Saccharomyces pastorianus
gaaattttggatcctattgcggtta

SEQ ID NO: 60594 - DNA, 25 bp, Saccharomyces pastorianus
ataccctcacctatacaagttcgtt

SEQ ID NO: 60595 - DNA, 25 bp, Saccharomyces pastorianus
tatggccaaactttagcttccttgc

SEQ ID NO: 60596 - DNA, 25 bp, Saccharomyces pastorianus
attcagtgatacgttatggccaaac

SEQ ID NO: 60597 - DNA, 25 bp, Saccharomyces pastorianus
catacgattcaaggttcagttcaag

SEQ ID NO: 60598 - DNA, 25 bp, Saccharomyces pastorianus
gggcgatttcacactatacatatgt

SEQ ID NO: 60599 - DNA, 25 bp, Saccharomyces pastorianus
gtatgaaggtgtcccctcaatacta

SEQ ID NO: 60600 - DNA, 25 bp, Saccharomyces pastorianus
gattgtccgattacatgttatggca

SEQ ID NO: 60601 - DNA, 25 bp, Saccharomyces pastorianus
gaagacttctatatcattacatcaa

SEQ ID NO: 60602 - DNA, 25 bp, Saccharomyces pastorianus
atatgttttccatacacatcgagaa

SEQ ID NO: 60603 - DNA, 25 bp, Saccharomyces pastorianus
tagtggtcatagaagattgtccgat

SEQ ID NO: 60604 - DNA, 25 bp, Saccharomyces pastorianus
attactgatcagaactagtggtcat

SEQ ID NO: 60605 - DNA, 25 bp, Saccharomyces pastorianus
agcttccttgccatgtatctaatga

SEQ ID NO: 60606 - DNA, 25 bp, Saccharomyces pastorianus
ggtacctgagcatgtctcctttatc

SEQ ID NO: 60607 - DNA, 25 bp, Saccharomyces pastorianus
gtgtatctgcctatgcattttcaat

SEQ ID NO: 60608 - DNA, 25 bp, Saccharomyces pastorianus
cgttcagtctgttttcatggcttta

SEQ ID NO: 60609 - DNA, 25 bp, Saccharomyces pastorianus
ggtaatcggaggtacgccaaatcac

SEQ ID NO: 60610 - DNA, 25 bp, Saccharomyces pastorianus
gagcagttttgctttgccataaaaa

SEQ ID NO: 60611 - DNA, 25 bp, Saccharomyces pastorianus
tactaaccttactctatatatgcaa

SEQ ID NO: 60612 - DNA, 25 bp, Saccharomyces pastorianus
gtattaagcgtagggccggtacctg

SEQ ID NO: 60613 - DNA, 25 bp, Saccharomyces pastorianus
attcacgataaagctggacgagttt

SEQ ID NO: 60614 - DNA, 25 bp, Saccharomyces pastorianus
agcaggcggattaacattactaacc

SEQ ID NO: 60615 - DNA, 25 bp, Saccharomyces pastorianus
aagaaggctcctggcagagaccaag

SEQ ID NO: 60616 - DNA, 25 bp, Saccharomyces pastorianus
tcgggtggattatgtcgttcagtct

SEQ ID NO: 60617 - DNA, 25 bp, Saccharomyces pastorianus
gagtagcagtggagccgtacctctc

SEQ ID NO: 60618 - DNA, 25 bp, Saccharomyces pastorianus
ttttggtgatggtttggctaatgca

SEQ ID NO: 60619 - DNA, 25 bp, Saccharomyces pastorianus
aatggcactccaacaagtgtttccc

SEQ ID NO: 60620 - DNA, 25 bp, Saccharomyces pastorianus
gaaaccacattctgggagtagcagt

SEQ ID NO: 60621 - DNA, 25 bp, Saccharomyces pastorianus
aatgcactagctgcgagagcaaaca

SEQ ID NO: 60622 - DNA, 25 bp, Saccharomyces pastorianus
ggtttggctaatgcactagctgcga

SEQ ID NO: 60623 - DNA, 25 bp, Saccharomyces pastorianus
caacaagtgtttccccagcagctaa

SEQ ID NO: 60624 - DNA, 25 bp, Saccharomyces pastorianus
aatttctcctcagcctgttcaaaat

SEQ ID NO: 60625 - DNA, 25 bp, Saccharomyces pastorianus
gaacagcagaacaatggcactccaa

SEQ ID NO: 60626 - DNA, 25 bp, Saccharomyces pastorianus
ccccagcagctaaccaagcaagttt

SEQ ID NO: 60627 - DNA, 25 bp, Saccharomyces pastorianus
gaatgtaatttctcctcagcctgtt

SEQ ID NO: 60628 - DNA, 25 bp, Saccharomyces pastorianus
ggaacctatgtttgaggcagcctat

SEQ ID NO: 60629 - DNA, 25 bp, Saccharomyces pastorianus
gcacctgctgctatagttcaaacca

SEQ ID NO: 60630 - DNA, 25 bp, Saccharomyces pastorianus
gccaagtcagtgaatcagctcccaa

SEQ ID NO: 60631 - DNA, 25 bp, Saccharomyces pastorianus
ttcctactgctccaacttcgagaaa

SEQ ID NO: 60632 - DNA, 25 bp, Saccharomyces pastorianus
gctcaatttctccagtgtatcgtac

SEQ ID NO: 60633 - DNA, 25 bp, Saccharomyces pastorianus
ataggcccaacacttgagtaccaaa

SEQ ID NO: 60634 - DNA, 25 bp, Saccharomyces pastorianus
agagaagtactgctgcacctgctgc

SEQ ID NO: 60635 - DNA, 25 bp, Saccharomyces pastorianus
atctagcactatatctgttcgtcgt

SEQ ID NO: 60636 - DNA, 25 bp, Saccharomyces pastorianus
ctcaccatctgagctacctttgaag

SEQ ID NO: 60637 - DNA, 25 bp, Saccharomyces pastorianus
agtgtatcgtactagtccctcggaa

SEQ ID NO: 60638 - DNA, 25 bp, Saccharomyces pastorianus
gcagcctatgactttccgggttcag

SEQ ID NO: 60639 - DNA, 25 bp, Saccharomyces pastorianus
agaggcgtcgcaggtgactttcata

SEQ ID NO: 60640 - DNA, 25 bp, Saccharomyces pastorianus
gtggaaagtcaactgtgctctatgt

SEQ ID NO: 60641 - DNA, 25 bp, Saccharomyces pastorianus
ataaagctcttggacgaaaacgttg

SEQ ID NO: 60642 - DNA, 25 bp, Saccharomyces pastorianus
aaatcaactacgcagttgcgcaagg

SEQ ID NO: 60643 - DNA, 25 bp, Saccharomyces pastorianus
tgaatctgtaaaaccgcaatttgag

SEQ ID NO: 60644 - DNA, 25 bp, Saccharomyces pastorianus
agttgcgcaaggaaataaagctctt

SEQ ID NO: 60645 - DNA, 25 bp, Saccharomyces pastorianus
gcagaagcgtttgaagtcgttaaat

SEQ ID NO: 60646 - DNA, 25 bp, Saccharomyces pastorianus
gcagccaccatatgtgcagaagcgt

SEQ ID NO: 60647 - DNA, 25 bp, Saccharomyces pastorianus
tgctctatgttgcaagaggcgtcgc

SEQ ID NO: 60648 - DNA, 25 bp, Saccharomyces pastorianus
ggaacaagactactacccattaacg

SEQ ID NO: 60649 - DNA, 25 bp, Saccharomyces pastorianus
acgaggaaacacagccatgcagcca

SEQ ID NO: 60650 - DNA, 25 bp, Saccharomyces pastorianus
actgccaccggtatcaaggtcttct

SEQ ID NO: 60651 - DNA, 25 bp, Saccharomyces pastorianus
tgccaccggtatcaaggtcttctct

SEQ ID NO: 60652 - DNA, 25 bp, Saccharomyces pastorianus
caccggtatcaaggtcttctctttg

SEQ ID NO: 60653 - DNA, 25 bp, Saccharomyces pastorianus
ctactgccaccggtatcaaggtctt

SEQ ID NO: 60654 - DNA, 25 bp, Saccharomyces pastorianus
gtctgctcaagacgaagtcttctct

SEQ ID NO: 60655 - DNA, 25 bp, Saccharomyces pastorianus
tattggttagctgccgctactgcca

SEQ ID NO: 60656 - DNA, 25 bp, Saccharomyces pastorianus
acagatattggttagctgccgctac

SEQ ID NO: 60657 - DNA, 25 bp, Saccharomyces pastorianus
aaacagatattggttagctgccgct

SEQ ID NO: 60658 - DNA, 25 bp, Saccharomyces pastorianus
tcaagacgaagtcttctctttggct

SEQ ID NO: 60659 - DNA, 25 bp, Saccharomyces pastorianus
cactttgtctgctcaagacgaagtc

SEQ ID NO: 60660 - DNA, 25 bp, Saccharomyces pastorianus
gatattggttagctgccgctactgc

SEQ ID NO: 60661 - DNA, 25 bp, Saccharomyces pastorianus
ttgttgtccgcttcccgtgataaga

SEQ ID NO: 60662 - DNA, 25 bp, Saccharomyces pastorianus
ggtgtcccagttagatctttcaagg

SEQ ID NO: 60663 - DNA, 25 bp, Saccharomyces pastorianus
gtgataagactttgatctcctggaa

SEQ ID NO: 60664 - DNA, 25 bp, Saccharomyces pastorianus
actttgactgctgacggtgcttacg

SEQ ID NO: 60665 - DNA, 25 bp, Saccharomyces pastorianus
gttcccgtgacaagaccatcaaggt

SEQ ID NO: 60666 - DNA, 25 bp, Saccharomyces pastorianus
gatctcctggaagttgactggtgac

SEQ ID NO: 60667 - DNA, 25 bp, Saccharomyces pastorianus
ttacgctttgtctgcttcttgggac

SEQ ID NO: 60668 - DNA, 25 bp, Saccharomyces pastorianus
acaagtccgatgttatgtccgttga

SEQ ID NO: 60669 - DNA, 25 bp, Saccharomyces pastorianus
gatctttcaagggtcacagtcacat

SEQ ID NO: 60670 - DNA, 25 bp, Saccharomyces pastorianus
ggtttcccaagtcagagttgttcca

SEQ ID NO: 60671 - DNA, 25 bp, Saccharomyces pastorianus
tggctacttctgctggtcaaccaaa

SEQ ID NO: 60672 - DNA, 25 bp, Saccharomyces pastorianus
attagcgaactatccttggtcaagt

SEQ ID NO: 60673 - DNA, 25 bp, Saccharomyces pastorianus
tcgttgcattgctgttgaccttgat

SEQ ID NO: 60674 - DNA, 25 bp, Saccharomyces pastorianus
tgtgtttgaaccagggaccacccca

SEQ ID NO: 60675 - DNA, 25 bp, Saccharomyces pastorianus
atcactgttatctggttcattagcg

SEQ ID NO: 60676 - DNA, 25 bp, Saccharomyces pastorianus
ttatttacgccacgcacggcaacat

SEQ ID NO: 60677 - DNA, 25 bp, Saccharomyces pastorianus
gaaagcgggaacaccactggcagtt

SEQ ID NO: 60678 - DNA, 25 bp, Saccharomyces pastorianus
ctacgttctgttcggcatttctctt

SEQ ID NO: 60679 - DNA, 25 bp, Saccharomyces pastorianus
atttctcttttgctctggatcactg

SEQ ID NO: 60680 - DNA, 25 bp, Saccharomyces pastorianus
tgaccttgatgtggcttatttacgc

SEQ ID NO: 60681 - DNA, 25 bp, Saccharomyces pastorianus
ggcaacattcacttctacgttctgt

SEQ ID NO: 60682 - DNA, 25 bp, Saccharomyces pastorianus
atggctagttttttcgtcaagttat

SEQ ID NO: 60683 - DNA, 25 bp, Saccharomyces pastorianus
tcaaacgggtttcctggtggcagac

SEQ ID NO: 60684 - DNA, 25 bp, Saccharomyces pastorianus
gacaatgctattccacatgaaccaa

SEQ ID NO: 60685 - DNA, 25 bp, Saccharomyces pastorianus
atgcaggtttgattacttccaaaac

SEQ ID NO: 60686 - DNA, 25 bp, Saccharomyces pastorianus
tagcggatagattcattagcggcat

SEQ ID NO: 60687 - DNA, 25 bp, Saccharomyces pastorianus
ataacggtttggttgaagccactgc

SEQ ID NO: 60688 - DNA, 25 bp, Saccharomyces pastorianus
gaagctgttctgacattctggaatt

SEQ ID NO: 60689 - DNA, 25 bp, Saccharomyces pastorianus
tggaattctaatcctcaaacgggtt

SEQ ID NO: 60690 - DNA, 25 bp, Saccharomyces pastorianus
agatctgaagaccatatttgacaag

SEQ ID NO: 60691 - DNA, 25 bp, Saccharomyces pastorianus
gtatgttacagcaattgggttcgtt

SEQ ID NO: 60692 - DNA, 25 bp, Saccharomyces pastorianus
ggtggcagacgccttcaaatatgca

SEQ ID NO: 60693 - DNA, 25 bp, Saccharomyces pastorianus
aagccactgctatcgaagctgtctt

SEQ ID NO: 60694 - DNA, 25 bp, Saccharomyces pastorianus
gcaaccacaaaagcaagctgccgtt

SEQ ID NO: 60695 - DNA, 25 bp, Saccharomyces pastorianus
attcctcccgttgttcaattatgta

SEQ ID NO: 60696 - DNA, 25 bp, Saccharomyces pastorianus
aagctgccgttgctttgttaaccat

SEQ ID NO: 60697 - DNA, 25 bp, Saccharomyces pastorianus
gaagactatttcaatgacgccttat

SEQ ID NO: 60698 - DNA, 25 bp, Saccharomyces pastorianus
aatgaatacggccatgaagactatt

SEQ ID NO: 60699 - DNA, 25 bp, Saccharomyces pastorianus
aagagacaaagaattcctcccgttg

SEQ ID NO: 60700 - DNA, 25 bp, Saccharomyces pastorianus
aacgttgctgggaaaagtatcatca

SEQ ID NO: 60701 - DNA, 25 bp, Saccharomyces pastorianus
atacttcaaatgaaactgggccatg

SEQ ID NO: 60702 - DNA, 25 bp, Saccharomyces pastorianus
gacgccttattgagtacttttaacg

SEQ ID NO: 60703 - DNA, 25 bp, Saccharomyces pastorianus
cgttgctttgttaaccatggtcgta

SEQ ID NO: 60704 - DNA, 25 bp, Saccharomyces pastorianus
agattcttatctattttgtcaccaa

SEQ ID NO: 60705 - DNA, 25 bp, Saccharomyces pastorianus
ccgacctcgatcttgaataacctgg

SEQ ID NO: 60706 - DNA, 25 bp, Saccharomyces pastorianus
atgattaacattccgtacatccccg

SEQ ID NO: 60707 - DNA, 25 bp, Saccharomyces pastorianus
caggttttgtcgatcatgttgccat

SEQ ID NO: 60708 - DNA, 25 bp, Saccharomyces pastorianus
tacatccccgttttgtctacaagga

SEQ ID NO: 60709 - DNA, 25 bp, Saccharomyces pastorianus
gagcagatgctctatttccggatga

SEQ ID NO: 60710 - DNA, 25 bp, Saccharomyces pastorianus
gagcgttactgttatgtggtcccta

SEQ ID NO: 60711 - DNA, 25 bp, Saccharomyces pastorianus
ggaagggtcttctcttgacgtacag

SEQ ID NO: 60712 - DNA, 25 bp, Saccharomyces pastorianus
gtgtgatatcgcaagtacgccatta

SEQ ID NO: 60713 - DNA, 25 bp, Saccharomyces pastorianus
taaagagtgacattcctagcgccat

SEQ ID NO: 60714 - DNA, 25 bp, Saccharomyces pastorianus
ggtccctaggtttggatctacagtg

SEQ ID NO: 60715 - DNA, 25 bp, Saccharomyces pastorianus
ataaacttatcacccacggagcgtt

SEQ ID NO: 60716 - DNA, 25 bp, Saccharomyces pastorianus
catgaccgatggtgtcttactacga

SEQ ID NO: 60717 - DNA, 25 bp, Saccharomyces pastorianus
agtttcctgtatctgttcatttcaa

SEQ ID NO: 60718 - DNA, 25 bp, Saccharomyces pastorianus
agtagacgcaagacagtttcctgta

SEQ ID NO: 60719 - DNA, 25 bp, Saccharomyces pastorianus
ttgcgcctcctgtcttacaagtaga

SEQ ID NO: 60720 - DNA, 25 bp, Saccharomyces pastorianus
aagagtggcagctgtgtctatggcc

SEQ ID NO: 60721 - DNA, 25 bp, Saccharomyces pastorianus
aacaaggctttatttccaattgcgc

SEQ ID NO: 60722 - DNA, 25 bp, Saccharomyces pastorianus
taagattcgactccacaacgaagga

SEQ ID NO: 60723 - DNA, 25 bp, Saccharomyces pastorianus
ggtcggtattacacagcccagaaga

SEQ ID NO: 60724 - DNA, 25 bp, Saccharomyces pastorianus
atttcaatcgtagaaccgcgttcaa

SEQ ID NO: 60725 - DNA, 25 bp, Saccharomyces pastorianus
tgtaagatccaccagaagcttccac

SEQ ID NO: 60726 - DNA, 25 bp, Saccharomyces pastorianus
ggccgggcgtgtgaccaatgaatta

SEQ ID NO: 60727 - DNA, 25 bp, Saccharomyces pastorianus
taactatacacccaattccttcagt

SEQ ID NO: 60728 - DNA, 25 bp, Saccharomyces pastorianus
gatgcgccaaagatccacttattag

SEQ ID NO: 60729 - DNA, 25 bp, Saccharomyces pastorianus
gaaacgcacaaggtcactgatatat

SEQ ID NO: 60730 - DNA, 25 bp, Saccharomyces pastorianus
agatcccaggttgttgaaacgcaca

SEQ ID NO: 60731 - DNA, 25 bp, Saccharomyces pastorianus
gagccaggtgtcatatccatcaatt

SEQ ID NO: 60732 - DNA, 25 bp, Saccharomyces pastorianus
gtcgattttacgaaccctggtctga

SEQ ID NO: 60733 - DNA, 25 bp, Saccharomyces pastorianus
tacaccaccattctgcttaacttat

SEQ ID NO: 60734 - DNA, 25 bp, Saccharomyces pastorianus
atatgacttcaatggcgttcctttg

SEQ ID NO: 60735 - DNA, 25 bp, Saccharomyces pastorianus
tccacttattagatccttccaacga

SEQ ID NO: 60736 - DNA, 25 bp, Saccharomyces pastorianus
tcagtcactgtatctcaagggaatt

SEQ ID NO: 60737 - DNA, 25 bp, Saccharomyces pastorianus
ttcgtttccattactgatgcgccaa

SEQ ID NO: 60738 - DNA, 25 bp, Saccharomyces pastorianus
tagactcctcaattacacaagacgg

SEQ ID NO: 60739 - DNA, 25 bp, Saccharomyces pastorianus
gtgacaatgccagtcgcaccaaata

SEQ ID NO: 60740 - DNA, 25 bp, Saccharomyces pastorianus
gggttcagacattccatatgttgtt

SEQ ID NO: 60741 - DNA, 25 bp, Saccharomyces pastorianus
ggtgctccaacctactattataata

SEQ ID NO: 60742 - DNA, 25 bp, Saccharomyces pastorianus
gccgatcttccaggtacttacaatt

SEQ ID NO: 60743 - DNA, 25 bp, Saccharomyces pastorianus
gttgttagcttatcctatgcagaca

SEQ ID NO: 60744 - DNA, 25 bp, Saccharomyces pastorianus
taaagtgtttcaggccgatcttcca

SEQ ID NO: 60745 - DNA, 25 bp, Saccharomyces pastorianus
gagttgtcatttaccggtgctccaa

SEQ ID NO: 60746 - DNA, 25 bp, Saccharomyces pastorianus
atggaattccacgtgtggcgctaga

SEQ ID NO: 60747 - DNA, 25 bp, Saccharomyces pastorianus
gatggacttcacaagttttccagaa

SEQ ID NO: 60748 - DNA, 25 bp, Saccharomyces pastorianus
gaatccaagttttgtcctggtgtaa

SEQ ID NO: 60749 - DNA, 25 bp, Saccharomyces pastorianus
gaactcggccgaagatccatattgg

SEQ ID NO: 60750 - DNA, 25 bp, Saccharomyces pastorianus
aagccttttggtgcggtttgatgaa

SEQ ID NO: 60751 - DNA, 25 bp, Saccharomyces pastorianus
tgttcaagccagacatccgactagc

SEQ ID NO: 60752 - DNA, 25 bp, Saccharomyces pastorianus
atccgactagctcttgtccaatgta

SEQ ID NO: 60753 - DNA, 25 bp, Saccharomyces pastorianus
ccatattggtggagagcgtgctgaa

SEQ ID NO: 60754 - DNA, 25 bp, Saccharomyces pastorianus
agccgaataggatacgactgtgcag

SEQ ID NO: 60755 - DNA, 25 bp, Saccharomyces pastorianus
gggacattggcggacaacggacatt

SEQ ID NO: 60756 - DNA, 25 bp, Saccharomyces pastorianus
gactgtgcagtcattatcgcactaa

SEQ ID NO: 60757 - DNA, 25 bp, Saccharomyces pastorianus
gggataactacttcgacaagacgca

SEQ ID NO: 60758 - DNA, 25 bp, Saccharomyces pastorianus
gacattgaggccgttttgggataac

SEQ ID NO: 60759 - DNA, 25 bp, Saccharomyces pastorianus
ttgtccaatgtagcgggatcaccgg

SEQ ID NO: 60760 - DNA, 25 bp, Saccharomyces pastorianus
tgacaaaagactcaggtcccgtctc

SEQ ID NO: 60761 - DNA, 25 bp, Saccharomyces pastorianus
aaaagactcttttgcgcacgagcgt

SEQ ID NO: 60762 - DNA, 25 bp, Saccharomyces pastorianus
caacgtatttacttgccgcagagga

SEQ ID NO: 60763 - DNA, 25 bp, Saccharomyces pastorianus
aacctatttccaagccttcatcgag

SEQ ID NO: 60764 - DNA, 25 bp, Saccharomyces pastorianus
gaagaagacttacgtggcacactaa

SEQ ID NO: 60765 - DNA, 25 bp, Saccharomyces pastorianus
acgcctttacaagtggcctagtaca

SEQ ID NO: 60766 - DNA, 25 bp, Saccharomyces pastorianus
tgcgtcttccgtatcaacctatttc

SEQ ID NO: 60767 - DNA, 25 bp, Saccharomyces pastorianus
agcatcgatctgaacgtaggcaccg

SEQ ID NO: 60768 - DNA, 25 bp, Saccharomyces pastorianus
aactgctattgagctacgcctttac

SEQ ID NO: 60769 - DNA, 25 bp, Saccharomyces pastorianus
gaggtgttttggatcatcgtcattt

SEQ ID NO: 60770 - DNA, 25 bp, Saccharomyces pastorianus
aaatctcatgccagccaaggaattg

SEQ ID NO: 60771 - DNA, 25 bp, Saccharomyces pastorianus
ggcacctgtagaatcatcggcacaa

SEQ ID NO: 60772 - DNA, 25 bp, Saccharomyces pastorianus
aaactctttatacgtgtggcacctg

SEQ ID NO: 60773 - DNA, 25 bp, Saccharomyces pastorianus
gatgtgcccatcttaaccaatacta

SEQ ID NO: 60774 - DNA, 25 bp, Saccharomyces pastorianus
taacatggcttacggttcttatcct

SEQ ID NO: 60775 - DNA, 25 bp, Saccharomyces pastorianus
ttgtatgctcgacatatggccctcc

SEQ ID NO: 60776 - DNA, 25 bp, Saccharomyces pastorianus
acacgtttgtcctctccatggagat

SEQ ID NO: 60777 - DNA, 25 bp, Saccharomyces pastorianus
gagtttcaattggtggcctcgacac

SEQ ID NO: 60778 - DNA, 25 bp, Saccharomyces pastorianus
cctccggtttcttcagagtttcaat

SEQ ID NO: 60779 - DNA, 25 bp, Saccharomyces pastorianus
atgttttcgaaccagcatcatctct

SEQ ID NO: 60780 - DNA, 25 bp, Saccharomyces pastorianus
ggttcttatccttatcagtgctatg

SEQ ID NO: 60781 - DNA, 25 bp, Saccharomyces pastorianus
ttagaaatctcttgcattgacacga

SEQ ID NO: 60782 - DNA, 25 bp, Saccharomyces pastorianus
aatactgcgctgtttttaccctact

SEQ ID NO: 60783 - DNA, 25 bp, Saccharomyces pastorianus
atactgcgctgtttttaccctactg

SEQ ID NO: 60784 - DNA, 25 bp, Saccharomyces pastorianus
gttttggcgctaattggacatacgt

SEQ ID NO: 60785 - DNA, 25 bp, Saccharomyces pastorianus
tttggcgctaattggacatacgttt

SEQ ID NO: 60786 - DNA, 25 bp, Saccharomyces pastorianus
gcgctgtttttaccctactgttcgt

SEQ ID NO: 60787 - DNA, 25 bp, Saccharomyces pastorianus
actgcgctgtttttaccctactgtt

SEQ ID NO: 60788 - DNA, 25 bp, Saccharomyces pastorianus
ttcgttttggcgctaattggacata

SEQ ID NO: 60789 - DNA, 25 bp, Saccharomyces pastorianus
ggaatactgcgctgtttttacccta

SEQ ID NO: 60790 - DNA, 25 bp, Saccharomyces pastorianus
ctactgttcgttttggcgctaattg

SEQ ID NO: 60791 - DNA, 25 bp, Saccharomyces pastorianus
taccctactgttcgttttggcgcta

SEQ ID NO: 60792 - DNA, 25 bp, Saccharomyces pastorianus
ccctactgttcgttttggcgctaat

SEQ ID NO: 60793 - DNA, 25 bp, Saccharomyces pastorianus
aattacataggttcgccagtgcgcc

SEQ ID NO: 60794 - DNA, 25 bp, Saccharomyces pastorianus
tggtctatcaggcatggtattttca

SEQ ID NO: 60795 - DNA, 25 bp, Saccharomyces pastorianus
ggtgacgtgcggtagcatgatctta

SEQ ID NO: 60796 - DNA, 25 bp, Saccharomyces pastorianus
tcttcaccagccgttcatgaaaatt

SEQ ID NO: 60797 - DNA, 25 bp, Saccharomyces pastorianus
gaaacttcagaattttatggccttg

SEQ ID NO: 60798 - DNA, 25 bp, Saccharomyces pastorianus
tatcgaatcgaccattgttaccgcc

SEQ ID NO: 60799 - DNA, 25 bp, Saccharomyces pastorianus
tacaaagcttaaagtcttcgacctt

SEQ ID NO: 60800 - DNA, 25 bp, Saccharomyces pastorianus
gatcttagctggttacttttcattg

SEQ ID NO: 60801 - DNA, 25 bp, Saccharomyces pastorianus
tcctgtgtcactttatggtctatca

SEQ ID NO: 60802 - DNA, 25 bp, Saccharomyces pastorianus
tttctccccacgtactaagtatgac

SEQ ID NO: 60803 - DNA, 25 bp, Saccharomyces pastorianus
tcgacctttatttgttattacgtag

SEQ ID NO: 60804 - DNA, 25 bp, Saccharomyces pastorianus
ttattccaagacaatagtggcgcaa

SEQ ID NO: 60805 - DNA, 25 bp, Saccharomyces pastorianus
gaggcccatttgagcgaattattcc

SEQ ID NO: 60806 - DNA, 25 bp, Saccharomyces pastorianus
gacgatgctttactgaagaccctga

SEQ ID NO: 60807 - DNA, 25 bp, Saccharomyces pastorianus
gtaacactatccaccatgacgatgc

SEQ ID NO: 60808 - DNA, 25 bp, Saccharomyces pastorianus
atgccgagaggctaaatgacgaact

SEQ ID NO: 60809 - DNA, 25 bp, Saccharomyces pastorianus
gaagaccctgacagtactgcaacaa

SEQ ID NO: 60810 - DNA, 25 bp, Saccharomyces pastorianus
agtggcactatcgaaaacaacgttt

SEQ ID NO: 60811 - DNA, 25 bp, Saccharomyces pastorianus
gagcattcaaaattggtcaccaggt

SEQ ID NO: 60812 - DNA, 25 bp, Saccharomyces pastorianus
gtggcgcaattggtggtaacactat

SEQ ID NO: 60813 - DNA, 25 bp, Saccharomyces pastorianus
atgacgaactcatcagtggcactat

SEQ ID NO: 60814 - DNA, 25 bp, Saccharomyces pastorianus
gatcgaaacaatagagaggcccatt

SEQ ID NO: 60815 - DNA, 25 bp, Saccharomyces pastorianus
aagggagattctgagcgttttagcc

SEQ ID NO: 60816 - DNA, 25 bp, Saccharomyces pastorianus
aacccactgagtcctaagcatttgt

SEQ ID NO: 60817 - DNA, 25 bp, Saccharomyces pastorianus
gcattgcaactaaaaccggacctgt

SEQ ID NO: 60818 - DNA, 25 bp, Saccharomyces pastorianus
agatctcgatactcctacgagcata

SEQ ID NO: 60819 - DNA, 25 bp, Saccharomyces pastorianus
ggtattaaggctttccatctcatta

SEQ ID NO: 60820 - DNA, 25 bp, Saccharomyces pastorianus
tactctgatatttacgacgacgatt

SEQ ID NO: 60821 - DNA, 25 bp, Saccharomyces pastorianus
gaaaataccggttcctcatcaacgt

SEQ ID NO: 60822 - DNA, 25 bp, Saccharomyces pastorianus
tcatcaacgtctttactaccagaag

SEQ ID NO: 60823 - DNA, 25 bp, Saccharomyces pastorianus
aatgactttttgcagtttgtacagt

SEQ ID NO: 60824 - DNA, 25 bp, Saccharomyces pastorianus
aacttatcaagactggtctccacct

SEQ ID NO: 60825 - DNA, 25 bp, Saccharomyces pastorianus
aatggtcctcaattcaaccacgaac

SEQ ID NO: 60826 - DNA, 25 bp, Saccharomyces pastorianus
atgaaggccagtaacgttccccagt

SEQ ID NO: 60827 - DNA, 25 bp, Saccharomyces pastorianus
ccttagctgcttcgtcttatgtaga

SEQ ID NO: 60828 - DNA, 25 bp, Saccharomyces pastorianus
gttatcaatgtccagagccggttcc

SEQ ID NO: 60829 - DNA, 25 bp, Saccharomyces pastorianus
gttccccagttacatgtcagcagca

SEQ ID NO: 60830 - DNA, 25 bp, Saccharomyces pastorianus
gtagaaaacgcctcgtctcatgatg

SEQ ID NO: 60831 - DNA, 25 bp, Saccharomyces pastorianus
ggttcctggatctccacctaataaa

SEQ ID NO: 60832 - DNA, 25 bp, Saccharomyces pastorianus
atcttcggccacagcaacgagtatt

SEQ ID NO: 60833 - DNA, 25 bp, Saccharomyces pastorianus
gtcgacgcccaataaatcctcaaaa

SEQ ID NO: 60834 - DNA, 25 bp, Saccharomyces pastorianus
tgaattaggctcacctcttgcgtca

SEQ ID NO: 60835 - DNA, 25 bp, Saccharomyces pastorianus
taaaagtagctcaacgtcgacgccc

SEQ ID NO: 60836 - DNA, 25 bp, Saccharomyces pastorianus
atcaaggagggcatcttcggccaca

SEQ ID NO: 60837 - DNA, 25 bp, Saccharomyces pastorianus
tcatcagtgacattgacggcaccat

SEQ ID NO: 60838 - DNA, 25 bp, Saccharomyces pastorianus
gtgccggacaagctgactcaacgag

SEQ ID NO: 60839 - DNA, 25 bp, Saccharomyces pastorianus
cgagatttctcggaatggctacaat

SEQ ID NO: 60840 - DNA, 25 bp, Saccharomyces pastorianus
gccctaggtcatgtcttggctatga

SEQ ID NO: 60841 - DNA, 25 bp, Saccharomyces pastorianus
acaaaatccgatgccctaggtcatg

SEQ ID NO: 60842 - DNA, 25 bp, Saccharomyces pastorianus
cttgaagttttcagtggaccacggg

SEQ ID NO: 60843 - DNA, 25 bp, Saccharomyces pastorianus
gaagtgcttgaatctaacctatggt

SEQ ID NO: 60844 - DNA, 25 bp, Saccharomyces pastorianus
gggatgttccgattgtcatcagtga

SEQ ID NO: 60845 - DNA, 25 bp, Saccharomyces pastorianus
ggacctgtcattttgtcaccagata

SEQ ID NO: 60846 - DNA, 25 bp, Saccharomyces pastorianus
agcaaactgcccaacggacctgtca

SEQ ID NO: 60847 - DNA, 25 bp, Saccharomyces pastorianus
cacgggaaagccattgtcacttcaa

SEQ ID NO: 60848 - DNA, 25 bp, Saccharomyces pastorianus
cgtccaatgacgaagatgttactgt

SEQ ID NO: 60849 - DNA, 25 bp, Saccharomyces pastorianus
cgaagatgttactgttccttttggt

SEQ ID NO: 60850 - DNA, 25 bp, Saccharomyces pastorianus
atgacgaagatgttactgttccttt

SEQ ID NO: 60851 - DNA, 25 bp, Saccharomyces pastorianus
acaggaggagatattcggaccggtc

SEQ ID NO: 60852 - DNA, 25 bp, Saccharomyces pastorianus
aggacaaagtggtgtcgatacctat

SEQ ID NO: 60853 - DNA, 25 bp, Saccharomyces pastorianus
aatcgtctagattgttacaggagga

SEQ ID NO: 60854 - DNA, 25 bp, Saccharomyces pastorianus
aactgtttgggtgaactcgtccaat

SEQ ID NO: 60855 - DNA, 25 bp, Saccharomyces pastorianus
ttactgacgtcccacaatcgtctag

SEQ ID NO: 60856 - DNA, 25 bp, Saccharomyces pastorianus
atttttactgacgtcccacaatcgt

SEQ ID NO: 60857 - DNA, 25 bp, Saccharomyces pastorianus
tgacgtcccacaatcgtctagattg

SEQ ID NO: 60858 - DNA, 25 bp, Saccharomyces pastorianus
tttgggtgaactcgtccaatgacga

SEQ ID NO: 60859 - DNA, 25 bp, Saccharomyces pastorianus
tatgcagccgccaagttattcagat

SEQ ID NO: 60860 - DNA, 25 bp, Saccharomyces pastorianus
taatctggactccttacctatgcag

SEQ ID NO: 60861 - DNA, 25 bp, Saccharomyces pastorianus
gaagactacgggaaggacactctat

SEQ ID NO: 60862 - DNA, 25 bp, Saccharomyces pastorianus
agtccggcgcactattggaacaagc

SEQ ID NO: 60863 - DNA, 25 bp, Saccharomyces pastorianus
agacaaaatcttaccagtccggcgc

SEQ ID NO: 60864 - DNA, 25 bp, Saccharomyces pastorianus
gggattcgaattcaccatgtcacct

SEQ ID NO: 60865 - DNA, 25 bp, Saccharomyces pastorianus
gacgatgatctttcagatggcgaca

SEQ ID NO: 60866 - DNA, 25 bp, Saccharomyces pastorianus
taaatttcggtacttatggcttcgt

SEQ ID NO: 60867 - DNA, 25 bp, Saccharomyces pastorianus
taattggctccaatgtgccttgtca

SEQ ID NO: 60868 - DNA, 25 bp, Saccharomyces pastorianus
aagcggcggcgaagacaatgatttt

SEQ ID NO: 60869 - DNA, 25 bp, Saccharomyces pastorianus
atggcttcgtttacatcgaggcaaa

SEQ ID NO: 60870 - DNA, 25 bp, Saccharomyces pastorianus
ttacaggatactaaaggcacccact

SEQ ID NO: 60871 - DNA, 25 bp, Saccharomyces pastorianus
agaagttctaccttaccatcgcact

SEQ ID NO: 60872 - DNA, 25 bp, Saccharomyces pastorianus
gaaagtctctgccaataagcgtaga

SEQ ID NO: 60873 - DNA, 25 bp, Saccharomyces pastorianus
aagcatcacgatgagccagcaggca

SEQ ID NO: 60874 - DNA, 25 bp, Saccharomyces pastorianus
taacgttgacgacgatggttatcaa

SEQ ID NO: 60875 - DNA, 25 bp, Saccharomyces pastorianus
aggcacccactgacgtgaagacaat

SEQ ID NO: 60876 - DNA, 25 bp, Saccharomyces pastorianus
agccagcaggcagacacaactcaaa

SEQ ID NO: 60877 - DNA, 25 bp, Saccharomyces pastorianus
gaggtgattctctcaatggtagaag

SEQ ID NO: 60878 - DNA, 25 bp, Saccharomyces pastorianus
gggaaaccgtctatcaagtaccttg

SEQ ID NO: 60879 - DNA, 25 bp, Saccharomyces pastorianus
gacggaaaagactctacaagttcat

SEQ ID NO: 60880 - DNA, 25 bp, Saccharomyces pastorianus
tcaagtaccttgagtccaaatacgg

SEQ ID NO: 60881 - DNA, 25 bp, Saccharomyces pastorianus
gttccaacaataatgattcttatgg

SEQ ID NO: 60882 - DNA, 25 bp, Saccharomyces pastorianus
tatggttccaacaataatgattctt

SEQ ID NO: 60883 - DNA, 25 bp, Saccharomyces pastorianus
ttccaacaataatgattcttatggt

SEQ ID NO: 60884 - DNA, 25 bp, Saccharomyces pastorianus
tcgtatggttccaacaataatgatt

SEQ ID NO: 60885 - DNA, 25 bp, Saccharomyces pastorianus
aacgatggttcgtatggttccaaca

SEQ ID NO: 60886 - DNA, 25 bp, Saccharomyces pastorianus
ttatggttcatctaacaatggtggc

SEQ ID NO: 60887 - DNA, 25 bp, Saccharomyces pastorianus
atggttccaacaataatgattctta

SEQ ID NO: 60888 - DNA, 25 bp, Saccharomyces pastorianus
cgtatggttccaacaataatgattc

SEQ ID NO: 60889 - DNA, 25 bp, Saccharomyces pastorianus
gtatggttccaacaataatgattct

SEQ ID NO: 60890 - DNA, 25 bp, Saccharomyces pastorianus
tggttccaacaataatgattcttat

SEQ ID NO: 60891 - DNA, 25 bp, Saccharomyces pastorianus
ggttccaacaataatgattcttatg

SEQ ID NO: 60892 - DNA, 25 bp, Saccharomyces pastorianus
gatgattcgtatggttcatccaaca

SEQ ID NO: 60893 - DNA, 25 bp, Saccharomyces pastorianus
aacaactcttctaacgattctaaca

SEQ ID NO: 60894 - DNA, 25 bp, Saccharomyces pastorianus
gtcaagatagactcgaccgtttaaa

SEQ ID NO: 60895 - DNA, 25 bp, Saccharomyces pastorianus
ttctttaagtgacaacagcgacaac

SEQ ID NO: 60896 - DNA, 25 bp, Saccharomyces pastorianus
ctagagttcgtgataagctttccaa

SEQ ID NO: 60897 - DNA, 25 bp, Saccharomyces pastorianus
gattctaacaacaagtcctcctacg

SEQ ID NO: 60898 - DNA, 25 bp, Saccharomyces pastorianus
gttctggcaacgatggtcaaaatga

SEQ ID NO: 60899 - DNA, 25 bp, Saccharomyces pastorianus
gtgataagctttccaaaacttcttt

SEQ ID NO: 60900 - DNA, 25 bp, Saccharomyces pastorianus
aaatgattatctctccaaggctgaa

SEQ ID NO: 60901 - DNA, 25 bp, Saccharomyces pastorianus
aacgacaacaatagttctggcaacg

SEQ ID NO: 60902 - DNA, 25 bp, Saccharomyces pastorianus
gtgaggcaattcaccaacaacgaca

SEQ ID NO: 60903 - DNA, 25 bp, Saccharomyces pastorianus
gttaccgacacgaccatttctaatt

SEQ ID NO: 60904 - DNA, 25 bp, Saccharomyces pastorianus
aagtgcctggttacaacgattgccc

SEQ ID NO: 60905 - DNA, 25 bp, Saccharomyces pastorianus
gagctttcaaaattgcctcgaggct

SEQ ID NO: 60906 - DNA, 25 bp, Saccharomyces pastorianus
aacgattgccccacagttttgttct

SEQ ID NO: 60907 - DNA, 25 bp, Saccharomyces pastorianus
agattttacacaccgatcacacgag

SEQ ID NO: 60908 - DNA, 25 bp, Saccharomyces pastorianus
aacgatacccagtcacaggtggtga

SEQ ID NO: 60909 - DNA, 25 bp, Saccharomyces pastorianus
ttctaattggtgtcctgctttctta

SEQ ID NO: 60910 - DNA, 25 bp, Saccharomyces pastorianus
gaaattgtgcctgcaatgggccaaa

SEQ ID NO: 60911 - DNA, 25 bp, Saccharomyces pastorianus
gcctggctcaaagttggcctcgaaa

SEQ ID NO: 60912 - DNA, 25 bp, Saccharomyces pastorianus
caatgatctttgtgggcctggctca

SEQ ID NO: 60913 - DNA, 25 bp, Saccharomyces pastorianus
gtaggccctactcaacaagaaccgg

SEQ ID NO: 60914 - DNA, 25 bp, Saccharomyces pastorianus
atacctccccttgttgatttttatg

SEQ ID NO: 60915 - DNA, 25 bp, Saccharomyces pastorianus
gaagttttcatcaactacatccgat

SEQ ID NO: 60916 - DNA, 25 bp, Saccharomyces pastorianus
gtacagtacgggactcgacatgctc

SEQ ID NO: 60917 - DNA, 25 bp, Saccharomyces pastorianus
tgaggtccaatgataaaacgccgtt

SEQ ID NO: 60918 - DNA, 25 bp, Saccharomyces pastorianus
attaaagggcttactgcattgtgcg

SEQ ID NO: 60919 - DNA, 25 bp, Saccharomyces pastorianus
gcattgtgcgaattagaccctgaaa

SEQ ID NO: 60920 - DNA, 25 bp, Saccharomyces pastorianus
gaacggccacataatcatcctgagg

SEQ ID NO: 60921 - DNA, 25 bp, Saccharomyces pastorianus
gaagggccttccagatcgaattcat

SEQ ID NO: 60922 - DNA, 25 bp, Saccharomyces pastorianus
atctgtctcgatatcgtgaggtcca

SEQ ID NO: 60923 - DNA, 25 bp, Saccharomyces pastorianus
gtacacttgatacacgacctgttgt

SEQ ID NO: 60924 - DNA, 25 bp, Saccharomyces pastorianus
ggtatgtgccttcaagttaatgcga

SEQ ID NO: 60925 - DNA, 25 bp, Saccharomyces pastorianus
ataggttgcggtactgcagccgtca

SEQ ID NO: 60926 - DNA, 25 bp, Saccharomyces pastorianus
ttgctaagcattccactgacttctt

SEQ ID NO: 60927 - DNA, 25 bp, Saccharomyces pastorianus
acgcagttggtataccgttttagca

SEQ ID NO: 60928 - DNA, 25 bp, Saccharomyces pastorianus
agccgtcagctggtcgagtctgaag

SEQ ID NO: 60929 - DNA, 25 bp, Saccharomyces pastorianus
ggaggtcttctgctgaacatttttc

SEQ ID NO: 60930 - DNA, 25 bp, Saccharomyces pastorianus
aatggtcacctaattgttctccttc

SEQ ID NO: 60931 - DNA, 25 bp, Saccharomyces pastorianus
aatatcgtcaaagccgccggaaaca

SEQ ID NO: 60932 - DNA, 25 bp, Saccharomyces pastorianus
aaccatgtggtttctgttgatgagt

SEQ ID NO: 60933 - DNA, 25 bp, Saccharomyces pastorianus
gtcgagtctgaagctctacgctaat

SEQ ID NO: 60934 - DNA, 25 bp, Saccharomyces pastorianus
agagattcctcgacctaatgtacaa

SEQ ID NO: 60935 - DNA, 25 bp, Saccharomyces pastorianus
aatactctattcgaatttggccaca

SEQ ID NO: 60936 - DNA, 25 bp, Saccharomyces pastorianus
tttcagacccaactaattcgccgaa

SEQ ID NO: 60937 - DNA, 25 bp, Saccharomyces pastorianus
atatgggacacacgacctatttggg

SEQ ID NO: 60938 - DNA, 25 bp, Saccharomyces pastorianus
aacgttgctacattaagtggctata

SEQ ID NO: 60939 - DNA, 25 bp, Saccharomyces pastorianus
accagtcttaagtgcctagttgatg

SEQ ID NO: 60940 - DNA, 25 bp, Saccharomyces pastorianus
taattcgccgaagggtgccgatcta

SEQ ID NO: 60941 - DNA, 25 bp, Saccharomyces pastorianus
gtatgataccacatggctgctgcac

SEQ ID NO: 60942 - DNA, 25 bp, Saccharomyces pastorianus
gcatgttgagcttttcctttcagac

SEQ ID NO: 60943 - DNA, 25 bp, Saccharomyces pastorianus
gatctacccatcataaccagtctta

SEQ ID NO: 60944 - DNA, 25 bp, Saccharomyces pastorianus
atgactactttctcattgactgaaa

SEQ ID NO: 60945 - DNA, 25 bp, Saccharomyces pastorianus
gatatgcctagaagaatccacgtat

SEQ ID NO: 60946 - DNA, 25 bp, Saccharomyces pastorianus
gcacacatgctgttgcaacctacaa

SEQ ID NO: 60947 - DNA, 25 bp, Saccharomyces pastorianus
tagtactgctttttcacccgttcta

SEQ ID NO: 60948 - DNA, 25 bp, Saccharomyces pastorianus
aatccagcccattatttgccgaaaa

SEQ ID NO: 60949 - DNA, 25 bp, Saccharomyces pastorianus
aggtacatcctcaacctgttgcgtt

SEQ ID NO: 60950 - DNA, 25 bp, Saccharomyces pastorianus
tgtggtctcttgttgacgaagcctc

SEQ ID NO: 60951 - DNA, 25 bp, Saccharomyces pastorianus
atatgctgatgcttctctggacatt

SEQ ID NO: 60952 - DNA, 25 bp, Saccharomyces pastorianus
ctgttgcgttcaagaggctgtctca

SEQ ID NO: 60953 - DNA, 25 bp, Saccharomyces pastorianus
gaaaaattatggttcgttgcccaca

SEQ ID NO: 60954 - DNA, 25 bp, Saccharomyces pastorianus
acaagatccgagtacacttcccaaa

SEQ ID NO: 60955 - DNA, 25 bp, Saccharomyces pastorianus
atgtcatttctagatcccgctttgt

SEQ ID NO: 60956 - DNA, 25 bp, Saccharomyces pastorianus
ttgcccacaacttttcatcgaaaca

SEQ ID NO: 60957 - DNA, 25 bp, Saccharomyces pastorianus
atgaatcagcttctgtacccatgtc

SEQ ID NO: 60958 - DNA, 25 bp, Saccharomyces pastorianus
aacttattcaagatgctatgacgga

SEQ ID NO: 60959 - DNA, 25 bp, Saccharomyces pastorianus
aaaccgatacggaaagtgatcctct

SEQ ID NO: 60960 - DNA, 25 bp, Saccharomyces pastorianus
gtgacaattgcaaacgaactagtga

SEQ ID NO: 60961 - DNA, 25 bp, Saccharomyces pastorianus
gtgatcctctttccttaaacaattg

SEQ ID NO: 60962 - DNA, 25 bp, Saccharomyces pastorianus
gtttcaatcgtatatgttcctaatg

SEQ ID NO: 60963 - DNA, 25 bp, Saccharomyces pastorianus
aaccggttgaagatcgagtccgtat

SEQ ID NO: 60964 - DNA, 25 bp, Saccharomyces pastorianus
gagcagtacaaatcaatcaccgaaa

SEQ ID NO: 60965 - DNA, 25 bp, Saccharomyces pastorianus
atggctgaagcaattagcactgcaa

SEQ ID NO: 60966 - DNA, 25 bp, Saccharomyces pastorianus
gcactgcaagcaaaaacggtgtttt

SEQ ID NO: 60967 - DNA, 25 bp, Saccharomyces pastorianus
gatcgagtccgtattgaatgaaaac

SEQ ID NO: 60968 - DNA, 25 bp, Saccharomyces pastorianus
acagaagcatgtacgcaaattggaa

SEQ ID NO: 60969 - DNA, 25 bp, Saccharomyces pastorianus
tgaccccagccccaaagatctctta

SEQ ID NO: 60970 - DNA, 25 bp, Saccharomyces pastorianus
cagatctttggttagagaaatcgcc

SEQ ID NO: 60971 - DNA, 25 bp, Saccharomyces pastorianus
gagattgggttctttcatcagagcc

SEQ ID NO: 60972 - DNA, 25 bp, Saccharomyces pastorianus
cgatctaataagaaactctggtgaa

SEQ ID NO: 60973 - DNA, 25 bp, Saccharomyces pastorianus
agaagattgatcgatctaataagaa

SEQ ID NO: 60974 - DNA, 25 bp, Saccharomyces pastorianus
cagaaccaagttcgtcagatctttg

SEQ ID NO: 60975 - DNA, 25 bp, Saccharomyces pastorianus
agccccaaagatctcttacaagaag

SEQ ID NO: 60976 - DNA, 25 bp, Saccharomyces pastorianus
gccggtttgtctccatacgaaagaa

SEQ ID NO: 60977 - DNA, 25 bp, Saccharomyces pastorianus
ggttctttcatcagagccaaggcta

SEQ ID NO: 60978 - DNA, 25 bp, Saccharomyces pastorianus
aagggtgctgcttccaacagaacca

SEQ ID NO: 60979 - DNA, 25 bp, Saccharomyces pastorianus
agaaatcgccggtttgtctccatac

SEQ ID NO: 60980 - DNA, 25 bp, Saccharomyces pastorianus
ccccatctctggtcgaagtctataa

SEQ ID NO: 60981 - DNA, 25 bp, Saccharomyces pastorianus
tacttcgaccaaaacgcttcttcat

SEQ ID NO: 60982 - DNA, 25 bp, Saccharomyces pastorianus
attcagttccactaacatcgaccat

SEQ ID NO: 60983 - DNA, 25 bp, Saccharomyces pastorianus
accaaagtgcttgcgacagtactat

SEQ ID NO: 60984 - DNA, 25 bp, Saccharomyces pastorianus
ggcgccaactatactccaatgagaa

SEQ ID NO: 60985 - DNA, 25 bp, Saccharomyces pastorianus
gcatatgtacaccttcaaccagttc

SEQ ID NO: 60986 - DNA, 25 bp, Saccharomyces pastorianus
agcctgcctaatcagacccaaaatg

SEQ ID NO: 60987 - DNA, 25 bp, Saccharomyces pastorianus
gcaattggcctctaccatagatcta

SEQ ID NO: 60988 - DNA, 25 bp, Saccharomyces pastorianus
ggccacggaccatcatcaagtaatt

SEQ ID NO: 60989 - DNA, 25 bp, Saccharomyces pastorianus
atctttagtgttctcatcaatggca

SEQ ID NO: 60990 - DNA, 25 bp, Saccharomyces pastorianus
gtggtatcttccagaactcagctga

SEQ ID NO: 60991 - DNA, 25 bp, Saccharomyces pastorianus
tgggcacatgtctttggttggcagc

SEQ ID NO: 60992 - DNA, 25 bp, Saccharomyces pastorianus
tcgtatacctcgtctttctgaattg

SEQ ID NO: 60993 - DNA, 25 bp, Saccharomyces pastorianus
cggtcccaatccaagagctcgtata

SEQ ID NO: 60994 - DNA, 25 bp, Saccharomyces pastorianus
agacaatctcaatcttccgaagaca

SEQ ID NO: 60995 - DNA, 25 bp, Saccharomyces pastorianus
gttctccgcaaagcactggattgga

SEQ ID NO: 60996 - DNA, 25 bp, Saccharomyces pastorianus
tggtaggttctacggtcccaatcca

SEQ ID NO: 60997 - DNA, 25 bp, Saccharomyces pastorianus
catatcttggataccttgagctggg

SEQ ID NO: 60998 - DNA, 25 bp, Saccharomyces pastorianus
ggatgtttacgaacccatgattaat

SEQ ID NO: 60999 - DNA, 25 bp, Saccharomyces pastorianus
gattggatggcgctacaaccaccat

SEQ ID NO: 61000 - DNA, 25 bp, Saccharomyces pastorianus
gtacgaaatcagcaacggcgtattt

SEQ ID NO: 61001 - DNA, 25 bp, Saccharomyces pastorianus
gaacacatcagcagttctccgcaaa

SEQ ID NO: 61002 - DNA, 25 bp, Saccharomyces pastorianus
gatctcttcaagctgcaagtctgca

SEQ ID NO: 61003 - DNA, 25 bp, Saccharomyces pastorianus
tcctcattctggtacctttgcaaga

SEQ ID NO: 61004 - DNA, 25 bp, Saccharomyces pastorianus
gggctcaagaatacaccaacaggtt

SEQ ID NO: 61005 - DNA, 25 bp, Saccharomyces pastorianus
aaggcccatgttcataacttcagtg

SEQ ID NO: 61006 - DNA, 25 bp, Saccharomyces pastorianus
ttgagaagcccaatcctcattctgg

SEQ ID NO: 61007 - DNA, 25 bp, Saccharomyces pastorianus
gaccacccagaaaaatacgccttat

SEQ ID NO: 61008 - DNA, 25 bp, Saccharomyces pastorianus
gacgaagagttgttccataggcttg

SEQ ID NO: 61009 - DNA, 25 bp, Saccharomyces pastorianus
gcgaagtggaggcttttgcattcaa

SEQ ID NO: 61010 - DNA, 25 bp, Saccharomyces pastorianus
actgctgtatgaaaatgctccgccc

SEQ ID NO: 61011 - DNA, 25 bp, Saccharomyces pastorianus
gagatggaccctgttttacacgatc

SEQ ID NO: 61012 - DNA, 25 bp, Saccharomyces pastorianus
gactgatcccgaattgaatgacgaa

SEQ ID NO: 61013 - DNA, 25 bp, Saccharomyces pastorianus
tcagcatgttcatctatgtccgtct

SEQ ID NO: 61014 - DNA, 25 bp, Saccharomyces pastorianus
gctaacactaaccaccagttcatag

SEQ ID NO: 61015 - DNA, 25 bp, Saccharomyces pastorianus
gtggccagcctttggacatatcgag

SEQ ID NO: 61016 - DNA, 25 bp, Saccharomyces pastorianus
aagaaaactccctgacgacgacaat

SEQ ID NO: 61017 - DNA, 25 bp, Saccharomyces pastorianus
atatgtacttcaactgcagctctcg

SEQ ID NO: 61018 - DNA, 25 bp, Saccharomyces pastorianus
tatgtccgtctcagatccgaataac

SEQ ID NO: 61019 - DNA, 25 bp, Saccharomyces pastorianus
gcggcgacttcaagggcggctaaac

SEQ ID NO: 61020 - DNA, 25 bp, Saccharomyces pastorianus
gaaattccatcgctgttaagtttga

SEQ ID NO: 61021 - DNA, 25 bp, Saccharomyces pastorianus
aatgcgtgcataacttgtcgccaag

SEQ ID NO: 61022 - DNA, 25 bp, Saccharomyces pastorianus
atatgaaacgaatagcgcccgccct

SEQ ID NO: 61023 - DNA, 25 bp, Saccharomyces pastorianus
gctaggaggttcagcgattcgcaca

SEQ ID NO: 61024 - DNA, 25 bp, Saccharomyces pastorianus
aaaggcgtaattgttggcagagcac

SEQ ID NO: 61025 - DNA, 25 bp, Saccharomyces pastorianus
gatcccaccattaatccagagcaaa

SEQ ID NO: 61026 - DNA, 25 bp, Saccharomyces pastorianus
atggatcgttcattgttgacgcttt

SEQ ID NO: 61027 - DNA, 25 bp, Saccharomyces pastorianus
gggttgttgtagatcccaccattaa

SEQ ID NO: 61028 - DNA, 25 bp, Saccharomyces pastorianus
aggctcgttttttgagacgttgtct

SEQ ID NO: 61029 - DNA, 25 bp, Saccharomyces pastorianus
gttaccactgattattttagccaat

SEQ ID NO: 61030 - DNA, 25 bp, Saccharomyces pastorianus
aggtattcctgtgggtgtgattgca

SEQ ID NO: 61031 - DNA, 25 bp, Saccharomyces pastorianus
atatatcccgcctttaggtgaacta

SEQ ID NO: 61032 - DNA, 25 bp, Saccharomyces pastorianus
gactggattcgacgtatggacattt

SEQ ID NO: 61033 - DNA, 25 bp, Saccharomyces pastorianus
tatcgaagacgtgatccctgctgat

SEQ ID NO: 61034 - DNA, 25 bp, Saccharomyces pastorianus
gctgatccagctaacctgaagtcat

SEQ ID NO: 61035 - DNA, 25 bp, Saccharomyces pastorianus
agacagtattcacccaacgctaaaa

SEQ ID NO: 61036 - DNA, 25 bp, Saccharomyces pastorianus
aaacggctacgtgagattcgtggtt

SEQ ID NO: 61037 - DNA, 25 bp, Saccharomyces pastorianus
gaccttttacacaacagtattcggg

SEQ ID NO: 61038 - DNA, 25 bp, Saccharomyces pastorianus
gttcgcccttggatatgaccgggat

SEQ ID NO: 61039 - DNA, 25 bp, Saccharomyces pastorianus
gaccgggatgtgaaaatacgacctt

SEQ ID NO: 61040 - DNA, 25 bp, Saccharomyces pastorianus
cagttgagggctttatcggcggatt

SEQ ID NO: 61041 - DNA, 25 bp, Saccharomyces pastorianus
tatgagtctatgtaccaaggttact

SEQ ID NO: 61042 - DNA, 25 bp, Saccharomyces pastorianus
gattccattgaattgtcagcattga

SEQ ID NO: 61043 - DNA, 25 bp, Saccharomyces pastorianus
gaaggatcttgtgcaaacgtacgaa

SEQ ID NO: 61044 - DNA, 25 bp, Saccharomyces pastorianus
acatatgtaacttgttcgcccttgg

SEQ ID NO: 61045 - DNA, 25 bp, Saccharomyces pastorianus
acagtattcgggtcaaacagagttt

SEQ ID NO: 61046 - DNA, 25 bp, Saccharomyces pastorianus
gtgtgatgacacaggctagctcctt

SEQ ID NO: 61047 - DNA, 25 bp, Saccharomyces pastorianus
actaatatagttttggcccttgtag

SEQ ID NO: 61048 - DNA, 25 bp, Saccharomyces pastorianus
aagtcaatatctcgtcacctagtct

SEQ ID NO: 61049 - DNA, 25 bp, Saccharomyces pastorianus
tatctcgtcacctagtctgaaacta

SEQ ID NO: 61050 - DNA, 25 bp, Saccharomyces pastorianus
ggctagctccttgacaactaatata

SEQ ID NO: 61051 - DNA, 25 bp, Saccharomyces pastorianus
tttgatgactctactaaggcagaac

SEQ ID NO: 61052 - DNA, 25 bp, Saccharomyces pastorianus
gaacaagtcgttgcagaagtggttt

SEQ ID NO: 61053 - DNA, 25 bp, Saccharomyces pastorianus
gtatcgaatgtggaaaagcttttgt

SEQ ID NO: 61054 - DNA, 25 bp, Saccharomyces pastorianus
accagcacaacccaaaaagtcaata

SEQ ID NO: 61055 - DNA, 25 bp, Saccharomyces pastorianus
gaatccagacatacgatattgtgtg

SEQ ID NO: 61056 - DNA, 25 bp, Saccharomyces pastorianus
tggcccttgtagtagttttgatgac

SEQ ID NO: 61057 - DNA, 25 bp, Saccharomyces pastorianus
tagagacttcaactggaggccacgt

SEQ ID NO: 61058 - DNA, 25 bp, Saccharomyces pastorianus
gatcgaatgcgctatttccatgagt

SEQ ID NO: 61059 - DNA, 25 bp, Saccharomyces pastorianus
gttccactcttcgtatttcattaat

SEQ ID NO: 61060 - DNA, 25 bp, Saccharomyces pastorianus
tgaaatccaatccttacactctgct

SEQ ID NO: 61061 - DNA, 25 bp, Saccharomyces pastorianus
aatgggttcacatttctactcgcct

SEQ ID NO: 61062 - DNA, 25 bp, Saccharomyces pastorianus
agaactccattcgtagctgtgcatg

SEQ ID NO: 61063 - DNA, 25 bp, Saccharomyces pastorianus
aatccattcgatttgttccactctt

SEQ ID NO: 61064 - DNA, 25 bp, Saccharomyces pastorianus
gctgtgcatgctatggatgacccaa

SEQ ID NO: 61065 - DNA, 25 bp, Saccharomyces pastorianus
aatccgcacggttaagcaattcgac

SEQ ID NO: 61066 - DNA, 25 bp, Saccharomyces pastorianus
gggccaaaacttgctacgtatggtt

SEQ ID NO: 61067 - DNA, 25 bp, Saccharomyces pastorianus
gtagtgataatcttcccattggccc

SEQ ID NO: 61068 - DNA, 25 bp, Saccharomyces pastorianus
aggcgacctggtcatcgagttcaga

SEQ ID NO: 61069 - DNA, 25 bp, Saccharomyces pastorianus
gggtcatagtgcaagtgctccgcat

SEQ ID NO: 61070 - DNA, 25 bp, Saccharomyces pastorianus
cacgcggtggtctccaatggtgaga

SEQ ID NO: 61071 - DNA, 25 bp, Saccharomyces pastorianus
tacgtagtcgtcatgccaaaggcac

SEQ ID NO: 61072 - DNA, 25 bp, Saccharomyces pastorianus
gctccgcatgggtatcatgacgcaa

SEQ ID NO: 61073 - DNA, 25 bp, Saccharomyces pastorianus
gtacagaacagaagtcctctcggcc

SEQ ID NO: 61074 - DNA, 25 bp, Saccharomyces pastorianus
gttaagttatccagacccgcacacg

SEQ ID NO: 61075 - DNA, 25 bp, Saccharomyces pastorianus
aactggcccagtgtccagattgtca

SEQ ID NO: 61076 - DNA, 25 bp, Saccharomyces pastorianus
gaaaagggtccggacttcgacgcag

SEQ ID NO: 61077 - DNA, 25 bp, Saccharomyces pastorianus
gttgccatggtagtggttccgccga

SEQ ID NO: 61078 - DNA, 25 bp, Saccharomyces pastorianus
acgaacaaattcttccacgtcgacg

SEQ ID NO: 61079 - DNA, 25 bp, Saccharomyces pastorianus
tatgaagtatcctcggacacaccga

SEQ ID NO: 61080 - DNA, 25 bp, Saccharomyces pastorianus
tcagaccgacgaaaaccctgttgat

SEQ ID NO: 61081 - DNA, 25 bp, Saccharomyces pastorianus
atgttgcctcggatgattcacccag

SEQ ID NO: 61082 - DNA, 25 bp, Saccharomyces pastorianus
agttgtgacgcaacagcgcctgtat

SEQ ID NO: 61083 - DNA, 25 bp, Saccharomyces pastorianus
gcgcctgtattagatgttgcctcgg

SEQ ID NO: 61084 - DNA, 25 bp, Saccharomyces pastorianus
tgattcacccagtcataatgtaggc

SEQ ID NO: 61085 - DNA, 25 bp, Saccharomyces pastorianus
gaagatagtgctcctggtacaagaa

SEQ ID NO: 61086 - DNA, 25 bp, Saccharomyces pastorianus
ttctgatcctccatccgatacggaa

SEQ ID NO: 61087 - DNA, 25 bp, Saccharomyces pastorianus
cggacacaccgattgaagttctagt

SEQ ID NO: 61088 - DNA, 25 bp, Saccharomyces pastorianus
tgggaacaggtgacgcactactcaa

SEQ ID NO: 61089 - DNA, 25 bp, Saccharomyces pastorianus
ggaattataccatcgacggaccttc

SEQ ID NO: 61090 - DNA, 25 bp, Saccharomyces pastorianus
tgtttccgactattcttccaaggtt

SEQ ID NO: 61091 - DNA, 25 bp, Saccharomyces pastorianus
tggacgcataccacattcaacatga

SEQ ID NO: 61092 - DNA, 25 bp, Saccharomyces pastorianus
gaacccattccctataaatcttgtc

SEQ ID NO: 61093 - DNA, 25 bp, Saccharomyces pastorianus
tctattttcgatgtgttgcttccaa

SEQ ID NO: 61094 - DNA, 25 bp, Saccharomyces pastorianus
gtggcgttgtttctataccgttcat

SEQ ID NO: 61095 - DNA, 25 bp, Saccharomyces pastorianus
ggatagccctcctggtagtatatag

SEQ ID NO: 61096 - DNA, 25 bp, Saccharomyces pastorianus
attattcactacttctactgccata

SEQ ID NO: 61097 - DNA, 25 bp, Saccharomyces pastorianus
ggtcctgcatgggaaatctgcctta

SEQ ID NO: 61098 - DNA, 25 bp, Saccharomyces pastorianus
tttgcacttgttgccatgctaagaa

SEQ ID NO: 61099 - DNA, 25 bp, Saccharomyces pastorianus
gggttgattccaaattctttcacct

SEQ ID NO: 61100 - DNA, 25 bp, Saccharomyces pastorianus
accgttcatcgggttgctcttggat

SEQ ID NO: 61101 - DNA, 25 bp, Saccharomyces pastorianus
gatccagtcagaaatcatctcagac

SEQ ID NO: 61102 - DNA, 25 bp, Saccharomyces pastorianus
atcccgccagcacaacgaaacatgg

SEQ ID NO: 61103 - DNA, 25 bp, Saccharomyces pastorianus
ttgccagactagtgcttgctgccat

SEQ ID NO: 61104 - DNA, 25 bp, Saccharomyces pastorianus
aagcccattgtgaaagtgacataca

SEQ ID NO: 61105 - DNA, 25 bp, Saccharomyces pastorianus
aagagttggaagtcgacccgtcgag

SEQ ID NO: 61106 - DNA, 25 bp, Saccharomyces pastorianus
gacccgtcgagtatgaatttccaag

SEQ ID NO: 61107 - DNA, 25 bp, Saccharomyces pastorianus
tatcagccaaggttgccagactagt

SEQ ID NO: 61108 - DNA, 25 bp, Saccharomyces pastorianus
acaatagacaacatcggtttccgat

SEQ ID NO: 61109 - DNA, 25 bp, Saccharomyces pastorianus
ggtttccgatcttcttatcagccaa

SEQ ID NO: 61110 - DNA, 25 bp, Saccharomyces pastorianus
catgggcacgcagatccagtcagaa

SEQ ID NO: 61111 - DNA, 25 bp, Saccharomyces pastorianus
gactacaataaggtcaagcccattg

SEQ ID NO: 61112 - DNA, 25 bp, Saccharomyces pastorianus
atgctactctaaatcacggtacatg

SEQ ID NO: 61113 - DNA, 25 bp, Saccharomyces pastorianus
acaaggctctcaatgattctacaga

SEQ ID NO: 61114 - DNA, 25 bp, Saccharomyces pastorianus
gagacaggtctagtcaataatcttg

SEQ ID NO: 61115 - DNA, 25 bp, Saccharomyces pastorianus
atagccaactgtgataccgtcagga

SEQ ID NO: 61116 - DNA, 25 bp, Saccharomyces pastorianus
aggatctacaaaacaaggctctcaa

SEQ ID NO: 61117 - DNA, 25 bp, Saccharomyces pastorianus
tactttaatccataatacggttgaa

SEQ ID NO: 61118 - DNA, 25 bp, Saccharomyces pastorianus
tggcccttccttggagatcctagtg

SEQ ID NO: 61119 - DNA, 25 bp, Saccharomyces pastorianus
gtaagaaaagactggcccttccttg

SEQ ID NO: 61120 - DNA, 25 bp, Saccharomyces pastorianus
tcttgacatcctacaatgctactct

SEQ ID NO: 61121 - DNA, 25 bp, Saccharomyces pastorianus
attccactcgcaaaaatcatagcca

SEQ ID NO: 61122 - DNA, 25 bp, Saccharomyces pastorianus
tacggttgaatgtatcttactgaac

SEQ ID NO: 61123 - DNA, 25 bp, Saccharomyces pastorianus
atcgaccatgtgtttgtcatacata

SEQ ID NO: 61124 - DNA, 25 bp, Saccharomyces pastorianus
ctggttcatcaagcttttattcgga

SEQ ID NO: 61125 - DNA, 25 bp, Saccharomyces pastorianus
aagcaactccatgtataacttcagt

SEQ ID NO: 61126 - DNA, 25 bp, Saccharomyces pastorianus
atgccatttggaactgctccgttag

SEQ ID NO: 61127 - DNA, 25 bp, Saccharomyces pastorianus
gacattattgattccagtttacaga

SEQ ID NO: 61128 - DNA, 25 bp, Saccharomyces pastorianus
aaaagttatgcttctcgacacggga

SEQ ID NO: 61129 - DNA, 25 bp, Saccharomyces pastorianus
cttctctactttctggttcatcaag

SEQ ID NO: 61130 - DNA, 25 bp, Saccharomyces pastorianus
gtgaggcacctttcggtgcattttt

SEQ ID NO: 61131 - DNA, 25 bp, Saccharomyces pastorianus
gagactgttagtgatacctctagta

SEQ ID NO: 61132 - DNA, 25 bp, Saccharomyces pastorianus
gcatcttttaaagcctccagacaac

SEQ ID NO: 61133 - DNA, 25 bp, Saccharomyces pastorianus
tgaagacccgttttcgcatctttta

SEQ ID NO: 61134 - DNA, 25 bp, Saccharomyces pastorianus
aaagcccttcaaatcctattttcag

SEQ ID NO: 61135 - DNA, 25 bp, Saccharomyces pastorianus
attttcagttgatttggaccctcaa

SEQ ID NO: 61136 - DNA, 25 bp, Saccharomyces pastorianus
gaatgacttacagaaccccgaggat

SEQ ID NO: 61137 - DNA, 25 bp, Saccharomyces pastorianus
aggactgaaagcactgactctaaca

SEQ ID NO: 61138 - DNA, 25 bp, Saccharomyces pastorianus
atcggctcctctacagaagtttctg

SEQ ID NO: 61139 - DNA, 25 bp, Saccharomyces pastorianus
gaagatggtgcccatttttggtaaa

SEQ ID NO: 61140 - DNA, 25 bp, Saccharomyces pastorianus
gcgtccaacccagatgaaataagtc

SEQ ID NO: 61141 - DNA, 25 bp, Saccharomyces pastorianus
aggaggtccttatcaatcgagatca

SEQ ID NO: 61142 - DNA, 25 bp, Saccharomyces pastorianus
gaaaagttcttttatcggctcctct

SEQ ID NO: 61143 - DNA, 25 bp, Saccharomyces pastorianus
agaaccccgaggatcgtcgagaaat

SEQ ID NO: 61144 - DNA, 25 bp, Saccharomyces pastorianus
actctaacagcatttcagtccgaaa

SEQ ID NO: 61145 - DNA, 25 bp, Saccharomyces pastorianus
ttttctgagcctgtggctcaactgg

SEQ ID NO: 61146 - DNA, 25 bp, Saccharomyces pastorianus
ttctgagcctgtggctcaactggtt

SEQ ID NO: 61147 - DNA, 25 bp, Saccharomyces pastorianus
ctgtggctcaactggttgacgataa

SEQ ID NO: 61148 - DNA, 25 bp, Saccharomyces pastorianus
gctcaactggttgacgataacattc

SEQ ID NO: 61149 - DNA, 25 bp, Saccharomyces pastorianus
gattttctgagcctgtggctcaact

SEQ ID NO: 61150 - DNA, 25 bp, Saccharomyces pastorianus
tgagcctgtggctcaactggttgac

SEQ ID NO: 61151 - DNA, 25 bp, Saccharomyces pastorianus
ctagattttctgagcctgtggctca

SEQ ID NO: 61152 - DNA, 25 bp, Saccharomyces pastorianus
agcctgtggctcaactggttgacga

SEQ ID NO: 61153 - DNA, 25 bp, Saccharomyces pastorianus
gtggctcaactggttgacgataaca

SEQ ID NO: 61154 - DNA, 25 bp, Saccharomyces pastorianus
tctagattttctgagcctgtggctc

SEQ ID NO: 61155 - DNA, 25 bp, Saccharomyces pastorianus
gcctgtggctcaactggttgacgat

SEQ ID NO: 61156 - DNA, 25 bp, Saccharomyces pastorianus
acagttttcatggtcgggttcggtg

SEQ ID NO: 61157 - DNA, 25 bp, Saccharomyces pastorianus
ggtctataccgtggtgttactccaa

SEQ ID NO: 61158 - DNA, 25 bp, Saccharomyces pastorianus
gagtgtgttcaagactatttaccaa

SEQ ID NO: 61159 - DNA, 25 bp, Saccharomyces pastorianus
attacaagacacaaatccgccactg

SEQ ID NO: 61160 - DNA, 25 bp, Saccharomyces pastorianus
ggtgtcactcaagcttatttgacca

SEQ ID NO: 61161 - DNA, 25 bp, Saccharomyces pastorianus
aaatacatttatcagtccaacggtt

SEQ ID NO: 61162 - DNA, 25 bp, Saccharomyces pastorianus
aaaggtgtcaatgctgttgccatca

SEQ ID NO: 61163 - DNA, 25 bp, Saccharomyces pastorianus
aaagatcagtgccagtgccgtaggt

SEQ ID NO: 61164 - DNA, 25 bp, Saccharomyces pastorianus
cagtccaacggtttgaagggtctat

SEQ ID NO: 61165 - DNA, 25 bp, Saccharomyces pastorianus
gttgccatcagacaaatgaccaatt

SEQ ID NO: 61166 - DNA, 25 bp, Saccharomyces pastorianus
aagcaactttgcatcgggtataatg

SEQ ID NO: 61167 - DNA, 25 bp, Saccharomyces pastorianus
agagttgctgctgttgaaactttat

SEQ ID NO: 61168 - DNA, 25 bp, Saccharomyces pastorianus
tgttgaaactttataccaagacatg

SEQ ID NO: 61169 - DNA, 25 bp, Saccharomyces pastorianus
tctagagttgctgctgttgaaactt

SEQ ID NO: 61170 - DNA, 25 bp, Saccharomyces pastorianus
gagacgtttctagagttgctgctgt

SEQ ID NO: 61171 - DNA, 25 bp, Saccharomyces pastorianus
acgtttctagagttgctgctgttga

SEQ ID NO: 61172 - DNA, 25 bp, Saccharomyces pastorianus
agacgtttctagagttgctgctgtt

SEQ ID NO: 61173 - DNA, 25 bp, Saccharomyces pastorianus
cgtttctagagttgctgctgttgaa

SEQ ID NO: 61174 - DNA, 25 bp, Saccharomyces pastorianus
gctgctgttgaaactttataccaag

SEQ ID NO: 61175 - DNA, 25 bp, Saccharomyces pastorianus
tacaaggaaattagagacgtttcta

SEQ ID NO: 61176 - DNA, 25 bp, Saccharomyces pastorianus
gttgctgctgttgaaactttatacc

SEQ ID NO: 61177 - DNA, 25 bp, Saccharomyces pastorianus
tgccgacgttaagagacaatacgtc

SEQ ID NO: 61178 - DNA, 25 bp, Saccharomyces pastorianus
taagaacttcggtgtctgggtcaga

SEQ ID NO: 61179 - DNA, 25 bp, Saccharomyces pastorianus
tgttgaaactttataccaagacatg

SEQ ID NO: 61180 - DNA, 25 bp, Saccharomyces pastorianus
tctagagttgctgctgttgaaactt

SEQ ID NO: 61181 - DNA, 25 bp, Saccharomyces pastorianus
gagacgtttctagagttgctgctgt

SEQ ID NO: 61182 - DNA, 25 bp, Saccharomyces pastorianus
acgtttctagagttgctgctgttga

SEQ ID NO: 61183 - DNA, 25 bp, Saccharomyces pastorianus
ggacttgaaattcccattgccacac

SEQ ID NO: 61184 - DNA, 25 bp, Saccharomyces pastorianus
gctgctgttgaaactttataccaag

SEQ ID NO: 61185 - DNA, 25 bp, Saccharomyces pastorianus
tacaaggaaattagagacgtttcta

SEQ ID NO: 61186 - DNA, 25 bp, Saccharomyces pastorianus
taacgaagctcacccaactaaggtt

SEQ ID NO: 61187 - DNA, 25 bp, Saccharomyces pastorianus
gttgctgctgttgaaactttatacc

SEQ ID NO: 61188 - DNA, 25 bp, Saccharomyces pastorianus
tgccgacgttaagagacaatacgtc

SEQ ID NO: 61189 - DNA, 25 bp, Saccharomyces pastorianus
aggcactggaagaacacgtccctgg

SEQ ID NO: 61190 - DNA, 25 bp, Saccharomyces pastorianus
agaacattggctctgtccaggcact

SEQ ID NO: 61191 - DNA, 25 bp, Saccharomyces pastorianus
acattggctctgtccaggcactgga

SEQ ID NO: 61192 - DNA, 25 bp, Saccharomyces pastorianus
gtccaggcactggaagaacacgtcc

SEQ ID NO: 61193 - DNA, 25 bp, Saccharomyces pastorianus
tggcgtccagaacattggctctgtc

SEQ ID NO: 61194 - DNA, 25 bp, Saccharomyces pastorianus
gtccagaacattggctctgtccagg

SEQ ID NO: 61195 - DNA, 25 bp, Saccharomyces pastorianus
atgatcttgccgttcttggggtcgg

SEQ ID NO: 61196 - DNA, 25 bp, Saccharomyces pastorianus
gcactggaagaacacgtccctggac

SEQ ID NO: 61197 - DNA, 25 bp, Saccharomyces pastorianus
ttggctctgtccaggcactggaaga

SEQ ID NO: 61198 - DNA, 25 bp, Saccharomyces pastorianus
ggtggcgtccagaacattggctctg

SEQ ID NO: 61199 - DNA, 25 bp, Saccharomyces pastorianus
tcggtggcgtccagaacattggctc

SEQ ID NO: 61200 - DNA, 25 bp, Saccharomyces pastorianus
tcgctttgactgaggacggttggtt

SEQ ID NO: 61201 - DNA, 25 bp, Saccharomyces pastorianus
gaattactactaaagggtgcacccg

SEQ ID NO: 61202 - DNA, 25 bp, Saccharomyces pastorianus
aaatgggcttgttacatccgctcag

SEQ ID NO: 61203 - DNA, 25 bp, Saccharomyces pastorianus
aacccttatgtgcaaaacgtctgtg

SEQ ID NO: 61204 - DNA, 25 bp, Saccharomyces pastorianus
aacgtctgtgtttatgctgatgaaa

SEQ ID NO: 61205 - DNA, 25 bp, Saccharomyces pastorianus
acaactgccacatctcaaggtttga

SEQ ID NO: 61206 - DNA, 25 bp, Saccharomyces pastorianus
gtgcacccgtcttatctgaatacta

SEQ ID NO: 61207 - DNA, 25 bp, Saccharomyces pastorianus
gtgacgtcgctgagtggacttccag

SEQ ID NO: 61208 - DNA, 25 bp, Saccharomyces pastorianus
gaagagatatcttagccgccgtctt

SEQ ID NO: 61209 - DNA, 25 bp, Saccharomyces pastorianus
ttggttccgtactggtgacgtcgct

SEQ ID NO: 61210 - DNA, 25 bp, Saccharomyces pastorianus
tgggacctttatccaatctggccat

SEQ ID NO: 61211 - DNA, 25 bp, Saccharomyces pastorianus
gaagccatcgatcccaatgacaaga

SEQ ID NO: 61212 - DNA, 25 bp, Saccharomyces pastorianus
gtgacttggtcgagttcaagcccac

SEQ ID NO: 61213 - DNA, 25 bp, Saccharomyces pastorianus
gtcgccgccgtatgggaaacaatca

SEQ ID NO: 61214 - DNA, 25 bp, Saccharomyces pastorianus
ggtattgacccatcgcaacattgtt

SEQ ID NO: 61215 - DNA, 25 bp, Saccharomyces pastorianus
ggatggatcaactcttcagaccgtg

SEQ ID NO: 61216 - DNA, 25 bp, Saccharomyces pastorianus
gcccctggctcatattttcgaattg

SEQ ID NO: 61217 - DNA, 25 bp, Saccharomyces pastorianus
ggcaaggccgccgttgataagatca

SEQ ID NO: 61218 - DNA, 25 bp, Saccharomyces pastorianus
ggtgtgggccacaatgtctacggat

SEQ ID NO: 61219 - DNA, 25 bp, Saccharomyces pastorianus
ggaacagtcttctagggtacgccag

SEQ ID NO: 61220 - DNA, 25 bp, Saccharomyces pastorianus
cgagttgcctagcttgtcccaaaag

SEQ ID NO: 61221 - DNA, 25 bp, Saccharomyces pastorianus
gggtacgccagcatcaagactttga

SEQ ID NO: 61222 - DNA, 25 bp, Saccharomyces pastorianus
gaacgggtccgtgttagattctttg

SEQ ID NO: 61223 - DNA, 25 bp, Saccharomyces pastorianus
taacgttggttctttgacgaacact

SEQ ID NO: 61224 - DNA, 25 bp, Saccharomyces pastorianus
tgctgtggataggaagctaccttca

SEQ ID NO: 61225 - DNA, 25 bp, Saccharomyces pastorianus
aaattcgtctctcaatttgtctccc

SEQ ID NO: 61226 - DNA, 25 bp, Saccharomyces pastorianus
aatggttcaggtcttcgggcaataa

SEQ ID NO: 61227 - DNA, 25 bp, Saccharomyces pastorianus
gggcatgtctttacaaatggttcag

SEQ ID NO: 61228 - DNA, 25 bp, Saccharomyces pastorianus
gttactctatcttacatgctgtgga

SEQ ID NO: 61229 - DNA, 25 bp, Saccharomyces pastorianus
atcattggcatgaacgggtccgtgt

SEQ ID NO: 61230 - DNA, 25 bp, Saccharomyces pastorianus
gttggagatctctttcagattacca

SEQ ID NO: 61231 - DNA, 25 bp, Saccharomyces pastorianus
gaatgtgccatttgttactctatct

SEQ ID NO: 61232 - DNA, 25 bp, Saccharomyces pastorianus
gatggatcggctaacgtctagtgac

SEQ ID NO: 61233 - DNA, 25 bp, Saccharomyces pastorianus
atgctcttccatctgataagtggga

SEQ ID NO: 61234 - DNA, 25 bp, Saccharomyces pastorianus
tatttcactgttgcgtatactctca

SEQ ID NO: 61235 - DNA, 25 bp, Saccharomyces pastorianus
ttatgtatgatattccaacctgggt

SEQ ID NO: 61236 - DNA, 25 bp, Saccharomyces pastorianus
gaaacggtgccgaagttcttaatga

SEQ ID NO: 61237 - DNA, 25 bp, Saccharomyces pastorianus
aaatcttgctggtatcatgacacat

SEQ ID NO: 61238 - DNA, 25 bp, Saccharomyces pastorianus
gcaattatttccttgtttgacttcc

SEQ ID NO: 61239 - DNA, 25 bp, Saccharomyces pastorianus
tccttggctgagttcacgtttttga

SEQ ID NO: 61240 - DNA, 25 bp, Saccharomyces pastorianus
tgtttgacttcctttccgaattaat

SEQ ID NO: 61241 - DNA, 25 bp, Saccharomyces pastorianus
accaaactctttgtgatgctcttcc

SEQ ID NO: 61242 - DNA, 25 bp, Saccharomyces pastorianus
tatttgctttactagttatcgccac

SEQ ID NO: 61243 - DNA, 25 bp, Saccharomyces pastorianus
aaatccttcaaatgtccttaccaga

SEQ ID NO: 61244 - DNA, 25 bp, Saccharomyces pastorianus
cagaattacctacaacttactcaaa

SEQ ID NO: 61245 - DNA, 25 bp, Saccharomyces pastorianus
aagtctaatcactccaggttgcatt

SEQ ID NO: 61246 - DNA, 25 bp, Saccharomyces pastorianus
cttgctatttgatttcacaggctag

SEQ ID NO: 61247 - DNA, 25 bp, Saccharomyces pastorianus
cacgtgattttaaacatgcttgcta

SEQ ID NO: 61248 - DNA, 25 bp, Saccharomyces pastorianus
gaaaaggtcagcttacatgtcaact

SEQ ID NO: 61249 - DNA, 25 bp, Saccharomyces pastorianus
ttacatgtcaactacaactcccgtt

SEQ ID NO: 61250 - DNA, 25 bp, Saccharomyces pastorianus
ggaactgcaatcaaagcgcaagtct

SEQ ID NO: 61251 - DNA, 25 bp, Saccharomyces pastorianus
atgacatccttgaagctagccgcaa

SEQ ID NO: 61252 - DNA, 25 bp, Saccharomyces pastorianus
gcggactacaaattccaaggactag

SEQ ID NO: 61253 - DNA, 25 bp, Saccharomyces pastorianus
tgttggacacttctgataataggca

SEQ ID NO: 61254 - DNA, 25 bp, Saccharomyces pastorianus
tacaactcccgttgacaccaaggag

SEQ ID NO: 61255 - DNA, 25 bp, Saccharomyces pastorianus
tttgctgaaacttttactggccctg

SEQ ID NO: 61256 - DNA, 25 bp, Saccharomyces pastorianus
gaatgtgatatttttgctgccgaaa

SEQ ID NO: 61257 - DNA, 25 bp, Saccharomyces pastorianus
acgggcaatgcgtttgtttgacatt

SEQ ID NO: 61258 - DNA, 25 bp, Saccharomyces pastorianus
ttactggccctgacgtcatagaaga

SEQ ID NO: 61259 - DNA, 25 bp, Saccharomyces pastorianus
agttgtggtcacagctgtttcaata

SEQ ID NO: 61260 - DNA, 25 bp, Saccharomyces pastorianus
aaagatattccagggcgttacaagg

SEQ ID NO: 61261 - DNA, 25 bp, Saccharomyces pastorianus
gcaacgaacattctctttactacag

SEQ ID NO: 61262 - DNA, 25 bp, Saccharomyces pastorianus
gagaacatcagagactgtcccattg

SEQ ID NO: 61263 - DNA, 25 bp, Saccharomyces pastorianus
gtcccattggctggtgttctaatgc

SEQ ID NO: 61264 - DNA, 25 bp, Saccharomyces pastorianus
tttagtcgcctatcctggtagtgac

SEQ ID NO: 61265 - DNA, 25 bp, Saccharomyces pastorianus
gattcagtgctacttttcttcagaa

SEQ ID NO: 61266 - DNA, 25 bp, Saccharomyces pastorianus
gacaatccagatccagcgtaccaag

SEQ ID NO: 61267 - DNA, 25 bp, Saccharomyces pastorianus
tagcaagggagttcgacggcacact

SEQ ID NO: 61268 - DNA, 25 bp, Saccharomyces pastorianus
accgtgtctttgtgagcttgtccaa

SEQ ID NO: 61269 - DNA, 25 bp, Saccharomyces pastorianus
aaagagacgctcttgggccaatggc

SEQ ID NO: 61270 - DNA, 25 bp, Saccharomyces pastorianus
gagggccatgattcctcacaggcta

SEQ ID NO: 61271 - DNA, 25 bp, Saccharomyces pastorianus
caggcggttctgtcagttggccaga

SEQ ID NO: 61272 - DNA, 25 bp, Saccharomyces pastorianus
ctgctcgtccgtcaagatatgcttg

SEQ ID NO: 61273 - DNA, 25 bp, Saccharomyces pastorianus
aatggctcaagacgttctctccgga

SEQ ID NO: 61274 - DNA, 25 bp, Saccharomyces pastorianus
aaacgggttctacacgcaaggcgag

SEQ ID NO: 61275 - DNA, 25 bp, Saccharomyces pastorianus
atatgcttgcactcgtacacagggt

SEQ ID NO: 61276 - DNA, 25 bp, Saccharomyces pastorianus
gataagctttttagactacccgcaa

SEQ ID NO: 61277 - DNA, 25 bp, Saccharomyces pastorianus
acggcagcacagcagcagtacatca

SEQ ID NO: 61278 - DNA, 25 bp, Saccharomyces pastorianus
aatacacagggacagcacgacgcaa

SEQ ID NO: 61279 - DNA, 25 bp, Saccharomyces pastorianus
cctccagggcggtggttacgcaaat

SEQ ID NO: 61280 - DNA, 25 bp, Saccharomyces pastorianus
gactgcataccgcaattcatatata

SEQ ID NO: 61281 - DNA, 25 bp, Saccharomyces pastorianus
acaagaaggatctcgccaacgtggt

SEQ ID NO: 61282 - DNA, 25 bp, Saccharomyces pastorianus
tgcagggataccttctgggctctaa

SEQ ID NO: 61283 - DNA, 25 bp, Saccharomyces pastorianus
ttttcaattggacgtgcccgacaac

SEQ ID NO: 61284 - DNA, 25 bp, Saccharomyces pastorianus
gcatttcgacgagcattccatcaaa

SEQ ID NO: 61285 - DNA, 25 bp, Saccharomyces pastorianus
gggcgcaaagacctactcgtacaag

SEQ ID NO: 61286 - DNA, 25 bp, Saccharomyces pastorianus
gaataaccatgctgatctgcgccca

SEQ ID NO: 61287 - DNA, 25 bp, Saccharomyces pastorianus
tctgggctctaaactgggcgcaaag

SEQ ID NO: 61288 - DNA, 25 bp, Saccharomyces pastorianus
tatccgctggactcctttagataag

SEQ ID NO: 61289 - DNA, 25 bp, Saccharomyces pastorianus
atccctgtgctcgaaaccgttaaga

SEQ ID NO: 61290 - DNA, 25 bp, Saccharomyces pastorianus
gtggcatcgcatcggttgctatcga

SEQ ID NO: 61291 - DNA, 25 bp, Saccharomyces pastorianus
atgacatctccacttttgattccga

SEQ ID NO: 61292 - DNA, 25 bp, Saccharomyces pastorianus
atgcatggttcgtttccaagtcacc

SEQ ID NO: 61293 - DNA, 25 bp, Saccharomyces pastorianus
atatcccatgtatataccctgtgcg

SEQ ID NO: 61294 - DNA, 25 bp, Saccharomyces pastorianus
ggaattcacagtcacgggtcatttt

SEQ ID NO: 61295 - DNA, 25 bp, Saccharomyces pastorianus
acagactggtttcatccttaccgtg

SEQ ID NO: 61296 - DNA, 25 bp, Saccharomyces pastorianus
atagatacactttctcgttgttccc

SEQ ID NO: 61297 - DNA, 25 bp, Saccharomyces pastorianus
gaggtctatttcagggccataccgg

SEQ ID NO: 61298 - DNA, 25 bp, Saccharomyces pastorianus
ggaacctggcaatagcatccctgtg

SEQ ID NO: 61299 - DNA, 25 bp, Saccharomyces pastorianus
atgcttatgactatccagccgttag

SEQ ID NO: 61300 - DNA, 25 bp, Saccharomyces pastorianus
gagtatcaatttaacccaacctatg

SEQ ID NO: 61301 - DNA, 25 bp, Saccharomyces pastorianus
gaaacctcacgtctattattcttat

SEQ ID NO: 61302 - DNA, 25 bp, Saccharomyces pastorianus
attgattgccgatgttgccggcgtt

SEQ ID NO: 61303 - DNA, 25 bp, Saccharomyces pastorianus
tatggtttggtcgatcctactgaaa

SEQ ID NO: 61304 - DNA, 25 bp, Saccharomyces pastorianus
gccggcgttgtcgatatgtctgata

SEQ ID NO: 61305 - DNA, 25 bp, Saccharomyces pastorianus
agccgttagcgcagaatgtccacta

SEQ ID NO: 61306 - DNA, 25 bp, Saccharomyces pastorianus
gatccctcaagatccttatgggttt

SEQ ID NO: 61307 - DNA, 25 bp, Saccharomyces pastorianus
ggtgacacaatgaagatccctcctg

SEQ ID NO: 61308 - DNA, 25 bp, Saccharomyces pastorianus
gaagatgttccgttattagcagatg

SEQ ID NO: 61309 - DNA, 25 bp, Saccharomyces pastorianus
aagacatgccaccttcttacgaaga

SEQ ID NO: 61310 - DNA, 25 bp, Saccharomyces pastorianus
gtttgacgggcatttgaagaatttg

SEQ ID NO: 61311 - DNA, 25 bp, Saccharomyces pastorianus
cctctatacagatggttcgtcaaag

SEQ ID NO: 61312 - DNA, 25 bp, Saccharomyces pastorianus
gttgcatctgccgtatcgaaaagca

SEQ ID NO: 61313 - DNA, 25 bp, Saccharomyces pastorianus
atggtggtatcacatttactcaaaa

SEQ ID NO: 61314 - DNA, 25 bp, Saccharomyces pastorianus
aaatgaagtagttgcatctgccgta

SEQ ID NO: 61315 - DNA, 25 bp, Saccharomyces pastorianus
aagccagtattgtgatatcggatgc

SEQ ID NO: 61316 - DNA, 25 bp, Saccharomyces pastorianus
gagtatcttatatcgtatggttgga

SEQ ID NO: 61317 - DNA, 25 bp, Saccharomyces pastorianus
agcatggtgggaaagactgtttgac

SEQ ID NO: 61318 - DNA, 25 bp, Saccharomyces pastorianus
gaagaatttggacgtcagcaccgac

SEQ ID NO: 61319 - DNA, 25 bp, Saccharomyces pastorianus
gacgtcagcaccgactcaagtaatg

SEQ ID NO: 61320 - DNA, 25 bp, Saccharomyces pastorianus
taacgcacccggtgggaacgatggt

SEQ ID NO: 61321 - DNA, 25 bp, Saccharomyces pastorianus
gggcgttttgattagcttcacttac

SEQ ID NO: 61322 - DNA, 25 bp, Saccharomyces pastorianus
taattattcagcgtccctctgctta

SEQ ID NO: 61323 - DNA, 25 bp, Saccharomyces pastorianus
ggacctgcctttttgttatgttttg

SEQ ID NO: 61324 - DNA, 25 bp, Saccharomyces pastorianus
atatctaggcgttgggctagcttcc

SEQ ID NO: 61325 - DNA, 25 bp, Saccharomyces pastorianus
ttggtatggacttgtcattccctgc

SEQ ID NO: 61326 - DNA, 25 bp, Saccharomyces pastorianus
gatcgctgcatttatggttgcccta

SEQ ID NO: 61327 - DNA, 25 bp, Saccharomyces pastorianus
ggttgccctaaccatcaagagagta

SEQ ID NO: 61328 - DNA, 25 bp, Saccharomyces pastorianus
catgtctttccaactcaacttgagg

SEQ ID NO: 61329 - DNA, 25 bp, Saccharomyces pastorianus
cattccctgcttcatcgattatatt

SEQ ID NO: 61330 - DNA, 25 bp, Saccharomyces pastorianus
ataatgtttagtgtgctgccggtaa

SEQ ID NO: 61331 - DNA, 25 bp, Saccharomyces pastorianus
gtgatcttcggtacgatcgctgcat

SEQ ID NO: 61332 - DNA, 25 bp, Saccharomyces pastorianus
aggatgatgaaatcggacccggaaa

SEQ ID NO: 61333 - DNA, 25 bp, Saccharomyces pastorianus
attcaatctcgagcagacattctga

SEQ ID NO: 61334 - DNA, 25 bp, Saccharomyces pastorianus
aaagccgctatgtttcagccaagct

SEQ ID NO: 61335 - DNA, 25 bp, Saccharomyces pastorianus
acggcaagtcgtaactcatcaacat

SEQ ID NO: 61336 - DNA, 25 bp, Saccharomyces pastorianus
acttcgtcgatttccggatctgata

SEQ ID NO: 61337 - DNA, 25 bp, Saccharomyces pastorianus
caaccgtctaatctggccaattcaa

SEQ ID NO: 61338 - DNA, 25 bp, Saccharomyces pastorianus
gcatccaagcactaagcattatccc

SEQ ID NO: 61339 - DNA, 25 bp, Saccharomyces pastorianus
gccaagctcaaatcaaccgtctaat

SEQ ID NO: 61340 - DNA, 25 bp, Saccharomyces pastorianus
gatattggaccgtaacatccccact

SEQ ID NO: 61341 - DNA, 25 bp, Saccharomyces pastorianus
gtttttcctgacctatcgtttgcta

SEQ ID NO: 61342 - DNA, 25 bp, Saccharomyces pastorianus
gatctgcagatccatcgtcattgca

SEQ ID NO: 61343 - DNA, 25 bp, Saccharomyces pastorianus
aacaatgctgttatctttggtgagg

SEQ ID NO: 61344 - DNA, 25 bp, Saccharomyces pastorianus
gtcgaatttccctaaagctacgtat

SEQ ID NO: 61345 - DNA, 25 bp, Saccharomyces pastorianus
ggattcttagtatacctgacagcga

SEQ ID NO: 61346 - DNA, 25 bp, Saccharomyces pastorianus
gatcttggccaatacgttagcgggt

SEQ ID NO: 61347 - DNA, 25 bp, Saccharomyces pastorianus
aaacagctaccactggatgcgatag

SEQ ID NO: 61348 - DNA, 25 bp, Saccharomyces pastorianus
tgttgacgttaaaattctccctaag

SEQ ID NO: 61349 - DNA, 25 bp, Saccharomyces pastorianus
acatcatctaacgtcctagtgtcgg

SEQ ID NO: 61350 - DNA, 25 bp, Saccharomyces pastorianus
atgaaggcgaactgactgaggtatc

SEQ ID NO: 61351 - DNA, 25 bp, Saccharomyces pastorianus
atgctacccgagtctatatgtcgct

SEQ ID NO: 61352 - DNA, 25 bp, Saccharomyces pastorianus
atatgtcgcttatctgatttgggaa

SEQ ID NO: 61353 - DNA, 25 bp, Saccharomyces pastorianus
gaggtatcattttcagaccaagcgg

SEQ ID NO: 61354 - DNA, 25 bp, Saccharomyces pastorianus
catggtacctttttatcctgttacg

SEQ ID NO: 61355 - DNA, 25 bp, Saccharomyces pastorianus
ggatgcctttattcacctactaaat

SEQ ID NO: 61356 - DNA, 25 bp, Saccharomyces pastorianus
ggtgtccttaaagctatgtcgttta

SEQ ID NO: 61357 - DNA, 25 bp, Saccharomyces pastorianus
ggttatttcatccagcaaagaccgt

SEQ ID NO: 61358 - DNA, 25 bp, Saccharomyces pastorianus
catatacttcattacgccgttgttg

SEQ ID NO: 61359 - DNA, 25 bp, Saccharomyces pastorianus
ggtactggacacgaggatgccttta

SEQ ID NO: 61360 - DNA, 25 bp, Saccharomyces pastorianus
aagtcatttggctctgaactgtgca

SEQ ID NO: 61361 - DNA, 25 bp, Saccharomyces pastorianus
aagcggttggtcctggtatgttcat

SEQ ID NO: 61362 - DNA, 25 bp, Saccharomyces pastorianus
tttgagacttcaccgcatgctattt

SEQ ID NO: 61363 - DNA, 25 bp, Saccharomyces pastorianus
gatagagatttagtccaccgtcaga

SEQ ID NO: 61364 - DNA, 25 bp, Saccharomyces pastorianus
gttgttggaagacgcgctcactgat

SEQ ID NO: 61365 - DNA, 25 bp, Saccharomyces pastorianus
atgaaaccttttctggcacctatta

SEQ ID NO: 61366 - DNA, 25 bp, Saccharomyces pastorianus
aaattcgtcggacttattgccaagt

SEQ ID NO: 61367 - DNA, 25 bp, Saccharomyces pastorianus
tacctactttaaccccaatcttgag

SEQ ID NO: 61368 - DNA, 25 bp, Saccharomyces pastorianus
aatctacaacctccagttaaccaga

SEQ ID NO: 61369 - DNA, 25 bp, Saccharomyces pastorianus
aaaactcctttgatccgtcagcatg

SEQ ID NO: 61370 - DNA, 25 bp, Saccharomyces pastorianus
gggcagttactttatcgcttgacat

SEQ ID NO: 61371 - DNA, 25 bp, Saccharomyces pastorianus
tattgcagaggccatcggaccacaa

SEQ ID NO: 61372 - DNA, 25 bp, Saccharomyces pastorianus
agcatgcagctgatctgtgtgcgat

SEQ ID NO: 61373 - DNA, 25 bp, Saccharomyces pastorianus
caacgtaatgcgctgtattttgagt

SEQ ID NO: 61374 - DNA, 25 bp, Saccharomyces pastorianus
gaagttctaggttcaatcatcaacg

SEQ ID NO: 61375 - DNA, 25 bp, Saccharomyces pastorianus
tattgccaagttagcaccaacccat

SEQ ID NO: 61376 - DNA, 25 bp, Saccharomyces pastorianus
gatcattggtccatttctttctcac

SEQ ID NO: 61377 - DNA, 25 bp, Saccharomyces pastorianus
aaggtcgatgccgatcattggtcca

SEQ ID NO: 61378 - DNA, 25 bp, Saccharomyces pastorianus
ggctcctttatcactaactattcat

SEQ ID NO: 61379 - DNA, 25 bp, Saccharomyces pastorianus
gaatctttttggtgatttcttcggg

SEQ ID NO: 61380 - DNA, 25 bp, Saccharomyces pastorianus
aataagagacgtggctcgctcttct

SEQ ID NO: 61381 - DNA, 25 bp, Saccharomyces pastorianus
atgcacactgcttttcctaatcaac

SEQ ID NO: 61382 - DNA, 25 bp, Saccharomyces pastorianus
tgggctttataatcgaatcactggg

SEQ ID NO: 61383 - DNA, 25 bp, Saccharomyces pastorianus
tggccttcactttcggtggttttct

SEQ ID NO: 61384 - DNA, 25 bp, Saccharomyces pastorianus
accctgctgtttctccaatagtaga

SEQ ID NO: 61385 - DNA, 25 bp, Saccharomyces pastorianus
ttttatagaattcggcgtggccttc

SEQ ID NO: 61386 - DNA, 25 bp, Saccharomyces pastorianus
tttcctaatcaacctggctccttta

SEQ ID NO: 61387 - DNA, 25 bp, Saccharomyces pastorianus
gaagcagcttcaaacttgtcgaggt

SEQ ID NO: 61388 - DNA, 25 bp, Saccharomyces pastorianus
ttgctcccaccaggttcaaatttgg

SEQ ID NO: 61389 - DNA, 25 bp, Saccharomyces pastorianus
taccctgtatccattccgtcagtaa

SEQ ID NO: 61390 - DNA, 25 bp, Saccharomyces pastorianus
atttcaccaattatatccctctttt

SEQ ID NO: 61391 - DNA, 25 bp, Saccharomyces pastorianus
gtcatctaagcttcctgagaccata

SEQ ID NO: 61392 - DNA, 25 bp, Saccharomyces pastorianus
atacattatccccagcagaagcagc

SEQ ID NO: 61393 - DNA, 25 bp, Saccharomyces pastorianus
gacaggatcttcaaattcccgaatg

SEQ ID NO: 61394 - DNA, 25 bp, Saccharomyces pastorianus
ggaaagtaaatctccggccaattct

SEQ ID NO: 61395 - DNA, 25 bp, Saccharomyces pastorianus
ccggccaattcttacatcaacgatg

SEQ ID NO: 61396 - DNA, 25 bp, Saccharomyces pastorianus
gatacgggtacagggattccaaact

SEQ ID NO: 61397 - DNA, 25 bp, Saccharomyces pastorianus
aagtttgcccaatgaatttcaccaa

SEQ ID NO: 61398 - DNA, 25 bp, Saccharomyces pastorianus
gttgataaactgcttgttcaccgta

SEQ ID NO: 61399 - DNA, 25 bp, Saccharomyces pastorianus
ataggccacagcagatccgaacatg

SEQ ID NO: 61400 - DNA, 25 bp, Saccharomyces pastorianus
tgttgaggcataccgttcgcgtcat

SEQ ID NO: 61401 - DNA, 25 bp, Saccharomyces pastorianus
gaacccataggtgggagtctccaac

SEQ ID NO: 61402 - DNA, 25 bp, Saccharomyces pastorianus
gtcaggtcttacacggaacccatag

SEQ ID NO: 61403 - DNA, 25 bp, Saccharomyces pastorianus
gaagaagcacccatctgttgaggca

SEQ ID NO: 61404 - DNA, 25 bp, Saccharomyces pastorianus
aacgtgctgttgtggttgataaact

SEQ ID NO: 61405 - DNA, 25 bp, Saccharomyces pastorianus
gcttgttcaccgtacatttggttgg

SEQ ID NO: 61406 - DNA, 25 bp, Saccharomyces pastorianus
attctaccgaataaacctctcttct

SEQ ID NO: 61407 - DNA, 25 bp, Saccharomyces pastorianus
tttctccccagtttcaacgtgctgt

SEQ ID NO: 61408 - DNA, 25 bp, Saccharomyces pastorianus
gttcgcgtcataggccacagcagat

SEQ ID NO: 61409 - DNA, 25 bp, Saccharomyces pastorianus
gtactagacttgatggactcgaaca

SEQ ID NO: 61410 - DNA, 25 bp, Saccharomyces pastorianus
gtattggttccaacgcctactgttt

SEQ ID NO: 61411 - DNA, 25 bp, Saccharomyces pastorianus
ggaacaccatcgtgctgaagcatga

SEQ ID NO: 61412 - DNA, 25 bp, Saccharomyces pastorianus
cagattgtccgcacatttgcacgaa

SEQ ID NO: 61413 - DNA, 25 bp, Saccharomyces pastorianus
gcaacgtccgtctccaaagtactag

SEQ ID NO: 61414 - DNA, 25 bp, Saccharomyces pastorianus
atgtgccaccaccaacgtattggtt

SEQ ID NO: 61415 - DNA, 25 bp, Saccharomyces pastorianus
attcagatcccgcaagtttggctac

SEQ ID NO: 61416 - DNA, 25 bp, Saccharomyces pastorianus
gactcgaacaacgactctgtgcaga

SEQ ID NO: 61417 - DNA, 25 bp, Saccharomyces pastorianus
attactgcaagccatagtcgaccac

SEQ ID NO: 61418 - DNA, 25 bp, Saccharomyces pastorianus
cactcccagtggtttcaagcttgaa

SEQ ID NO: 61419 - DNA, 25 bp, Saccharomyces pastorianus
tccacttgcaactgacaccggaatt

SEQ ID NO: 61420 - DNA, 25 bp, Saccharomyces pastorianus
gtgctacccagcattgcaagacatc

SEQ ID NO: 61421 - DNA, 25 bp, Saccharomyces pastorianus
ggagactggatgaagccctaccaca

SEQ ID NO: 61422 - DNA, 25 bp, Saccharomyces pastorianus
gtaacaaggcatggaccgacgtctt

SEQ ID NO: 61423 - DNA, 25 bp, Saccharomyces pastorianus
gaagtcgaccgttatgaatcctgta

SEQ ID NO: 61424 - DNA, 25 bp, Saccharomyces pastorianus
gctggtgacaaggacttcatctgca

SEQ ID NO: 61425 - DNA, 25 bp, Saccharomyces pastorianus
gacatcgacgactacttgaaccaag

SEQ ID NO: 61426 - DNA, 25 bp, Saccharomyces pastorianus
gtgttccagccactatctactgtaa

SEQ ID NO: 61427 - DNA, 25 bp, Saccharomyces pastorianus
ttgtctaggtttgatcgagtcgtgc

SEQ ID NO: 61428 - DNA, 25 bp, Saccharomyces pastorianus
gaatcaagatttgcccatcctggtc

SEQ ID NO: 61429 - DNA, 25 bp, Saccharomyces pastorianus
agccgtcacggaccttttgaatcaa

SEQ ID NO: 61430 - DNA, 25 bp, Saccharomyces pastorianus
aagtcctacaagcatttcacctact

SEQ ID NO: 61431 - DNA, 25 bp, Saccharomyces pastorianus
gaactaccagctgcgtgtcaacaag

SEQ ID NO: 61432 - DNA, 25 bp, Saccharomyces pastorianus
tgcagacatcgaccaagcctaagtt

SEQ ID NO: 61433 - DNA, 25 bp, Saccharomyces pastorianus
agaacgatgctaccgagaactacca

SEQ ID NO: 61434 - DNA, 25 bp, Saccharomyces pastorianus
gttggactccaacgtgctggacgca

SEQ ID NO: 61435 - DNA, 25 bp, Saccharomyces pastorianus
acttggacctggaccatcttttgaa

SEQ ID NO: 61436 - DNA, 25 bp, Saccharomyces pastorianus
tattatgtggactgggcctgtctac

SEQ ID NO: 61437 - DNA, 25 bp, Saccharomyces pastorianus
ttccccgaggccattaagaccaaga

SEQ ID NO: 61438 - DNA, 25 bp, Saccharomyces pastorianus
ggataaggacatcttgcgccagacc

SEQ ID NO: 61439 - DNA, 25 bp, Saccharomyces pastorianus
agacggactgggacttcgtggtcaa

SEQ ID NO: 61440 - DNA, 25 bp, Saccharomyces pastorianus
aggtcatgagcctgcagacatcgac

SEQ ID NO: 61441 - DNA, 25 bp, Saccharomyces pastorianus
agagatgaacgacctgttccccaac

SEQ ID NO: 61442 - DNA, 25 bp, Saccharomyces pastorianus
aggttcactggctcatattgctaga

SEQ ID NO: 61443 - DNA, 25 bp, Saccharomyces pastorianus
gaaacactaccgcatggcaatcagc

SEQ ID NO: 61444 - DNA, 25 bp, Saccharomyces pastorianus
gacaagtatgcggacttcgttcctg

SEQ ID NO: 61445 - DNA, 25 bp, Saccharomyces pastorianus
taagcttcatccgttatcttctttc

SEQ ID NO: 61446 - DNA, 25 bp, Saccharomyces pastorianus
ggcaatcagcccatatagactttat

SEQ ID NO: 61447 - DNA, 25 bp, Saccharomyces pastorianus
gaaagctcattgatctacgtagatg

SEQ ID NO: 61448 - DNA, 25 bp, Saccharomyces pastorianus
atgacatttccctatggtgcttaaa

SEQ ID NO: 61449 - DNA, 25 bp, Saccharomyces pastorianus
aaatgagctattcggtactttcaac

SEQ ID NO: 61450 - DNA, 25 bp, Saccharomyces pastorianus
ataacgggaaaccatgccatgatct

SEQ ID NO: 61451 - DNA, 25 bp, Saccharomyces pastorianus
atcttctttccaggtcgacattcaa

SEQ ID NO: 61452 - DNA, 25 bp, Saccharomyces pastorianus
gacttcgttcctgcgatagatgcaa

SEQ ID NO: 61453 - DNA, 25 bp, Saccharomyces pastorianus
agtcctgaccagaaactgtgcaaaa

SEQ ID NO: 61454 - DNA, 25 bp, Saccharomyces pastorianus
agcttgtcgatcagaagtgggaaga

SEQ ID NO: 61455 - DNA, 25 bp, Saccharomyces pastorianus
gagttaagccttagggaaagtcctg

SEQ ID NO: 61456 - DNA, 25 bp, Saccharomyces pastorianus
ttgtcgatcagaagtgggaagagag

SEQ ID NO: 61457 - DNA, 25 bp, Saccharomyces pastorianus
gcaaaagtagactggactatttatc

SEQ ID NO: 61458 - DNA, 25 bp, Saccharomyces pastorianus
gaaagtcctgaccagaaactgtgca

SEQ ID NO: 61459 - DNA, 25 bp, Saccharomyces pastorianus
aactgtgcaaaagtagactggacta

SEQ ID NO: 61460 - DNA, 25 bp, Saccharomyces pastorianus
gccttagggaaagtcctgaccagaa

SEQ ID NO: 61461 - DNA, 25 bp, Saccharomyces pastorianus
cttgtcgatcagaagtgggaagaga

SEQ ID NO: 61462 - DNA, 25 bp, Saccharomyces pastorianus
taagccttagggaaagtcctgacca

SEQ ID NO: 61463 - DNA, 25 bp, Saccharomyces pastorianus
tcgatcagaagtgggaagagagtta

SEQ ID NO: 61464 - DNA, 25 bp, Saccharomyces pastorianus
gtaccgatgccgatggtgttttcgt

SEQ ID NO: 61465 - DNA, 25 bp, Saccharomyces pastorianus
tcgacgaaattgattctgtggcccc

SEQ ID NO: 61466 - DNA, 25 bp, Saccharomyces pastorianus
cacaggtgcggatttttatgctctc

SEQ ID NO: 61467 - DNA, 25 bp, Saccharomyces pastorianus
ggtgcgaacatttcgacacgtcgtt

SEQ ID NO: 61468 - DNA, 25 bp, Saccharomyces pastorianus
aatcaaggtgactcaggtggcgtta

SEQ ID NO: 61469 - DNA, 25 bp, Saccharomyces pastorianus
gacactgacgtgaacctcattgagt

SEQ ID NO: 61470 - DNA, 25 bp, Saccharomyces pastorianus
tcgctccgagtgtgtcccaggaaga

SEQ ID NO: 61471 - DNA, 25 bp, Saccharomyces pastorianus
cattgagttggcgacactgtgtcca

SEQ ID NO: 61472 - DNA, 25 bp, Saccharomyces pastorianus
gctctctgttctgatgcaatgctaa

SEQ ID NO: 61473 - DNA, 25 bp, Saccharomyces pastorianus
gtataccagacaccgatgcaaagca

SEQ ID NO: 61474 - DNA, 25 bp, Saccharomyces pastorianus
gtttctcaattactagccgagctag

SEQ ID NO: 61475 - DNA, 25 bp, Saccharomyces pastorianus
aaccacttggacgaaaagctcctga

SEQ ID NO: 61476 - DNA, 25 bp, Saccharomyces pastorianus
aggccatggtacagaaccatccgga

SEQ ID NO: 61477 - DNA, 25 bp, Saccharomyces pastorianus
gaaaacacagaaaggccatggtaca

SEQ ID NO: 61478 - DNA, 25 bp, Saccharomyces pastorianus
acaaaggcggaagtccctacatggc

SEQ ID NO: 61479 - DNA, 25 bp, Saccharomyces pastorianus
tgacagaacctgaagctttgctcat

SEQ ID NO: 61480 - DNA, 25 bp, Saccharomyces pastorianus
gaacctgaagctttgctcatcttgg

SEQ ID NO: 61481 - DNA, 25 bp, Saccharomyces pastorianus
ttggacgaaaagctcctgaaaagaa

SEQ ID NO: 61482 - DNA, 25 bp, Saccharomyces pastorianus
acctgaagctttgctcatcttggat

SEQ ID NO: 61483 - DNA, 25 bp, Saccharomyces pastorianus
gagattaaccacttggacgaaaagc

SEQ ID NO: 61484 - DNA, 25 bp, Saccharomyces pastorianus
ggcagccaagataaacgaggccaaa

SEQ ID NO: 61485 - DNA, 25 bp, Saccharomyces pastorianus
gtacagaaccatccggacaaaggcg

SEQ ID NO: 61486 - DNA, 25 bp, Saccharomyces pastorianus
tattcatctctgttttggcgttcac

SEQ ID NO: 61487 - DNA, 25 bp, Saccharomyces pastorianus
gacagctatggagcagatacacagt

SEQ ID NO: 61488 - DNA, 25 bp, Saccharomyces pastorianus
taggttcttcaatcgctaattggca

SEQ ID NO: 61489 - DNA, 25 bp, Saccharomyces pastorianus
gcgctgttagccattgcaatattca

SEQ ID NO: 61490 - DNA, 25 bp, Saccharomyces pastorianus
tacacaactttctacgcgttcttgg

SEQ ID NO: 61491 - DNA, 25 bp, Saccharomyces pastorianus
tatgaactcgggacttggtttcgtt

SEQ ID NO: 61492 - DNA, 25 bp, Saccharomyces pastorianus
gagtggttacttcctatcgagacat

SEQ ID NO: 61493 - DNA, 25 bp, Saccharomyces pastorianus
tcttggtcctaatctactcgtgtta

SEQ ID NO: 61494 - DNA, 25 bp, Saccharomyces pastorianus
ggtttcgttctggtagctttaatca

SEQ ID NO: 61495 - DNA, 25 bp, Saccharomyces pastorianus
tggcgttcactgctttcagcattta

SEQ ID NO: 61496 - DNA, 25 bp, Saccharomyces pastorianus
gaagctttttattcagttccttatg

SEQ ID NO: 61497 - DNA, 25 bp, Saccharomyces pastorianus
gggcaacactatcactgtgcagacc

SEQ ID NO: 61498 - DNA, 25 bp, Saccharomyces pastorianus
gaagaccgtttctcataacgaggct

SEQ ID NO: 61499 - DNA, 25 bp, Saccharomyces pastorianus
tgtgcagaccacattcgtccagcgt

SEQ ID NO: 61500 - DNA, 25 bp, Saccharomyces pastorianus
gaggctcagcacctaaatatgaaat

SEQ ID NO: 61501 - DNA, 25 bp, Saccharomyces pastorianus
aatctgcaatgaagaagaccgtttc

SEQ ID NO: 61502 - DNA, 25 bp, Saccharomyces pastorianus
ctcgttgtcgggtactgtaggtgtc

SEQ ID NO: 61503 - DNA, 25 bp, Saccharomyces pastorianus
actgttgtcagacagggcaacacta

SEQ ID NO: 61504 - DNA, 25 bp, Saccharomyces pastorianus
tgaaatcgtttacttcaactttggg

SEQ ID NO: 61505 - DNA, 25 bp, Saccharomyces pastorianus
ctgtaggtgtcatcaaatctgcaat

SEQ ID NO: 61506 - DNA, 25 bp, Saccharomyces pastorianus
gtttctcataacgaggctcagcacc

SEQ ID NO: 61507 - DNA, 25 bp, Saccharomyces pastorianus
ccctccgcagggtccatcgggttgg

SEQ ID NO: 61508 - DNA, 25 bp, Saccharomyces pastorianus
gcagaccgtcgacagagcaaccatg

SEQ ID NO: 61509 - DNA, 25 bp, Saccharomyces pastorianus
gagcaaccatgctggcaacttcgac

SEQ ID NO: 61510 - DNA, 25 bp, Saccharomyces pastorianus
gggtcaccgttgttctgacgcagac

SEQ ID NO: 61511 - DNA, 25 bp, Saccharomyces pastorianus
tatcactgtctctcgtttcgttgct

SEQ ID NO: 61512 - DNA, 25 bp, Saccharomyces pastorianus
tcagaccactatatgggaccctgcc

SEQ ID NO: 61513 - DNA, 25 bp, Saccharomyces pastorianus
gctaccactgcgacggcaaagacgg

SEQ ID NO: 61514 - DNA, 25 bp, Saccharomyces pastorianus
atgttgcgtcgcacgctatcactgt

SEQ ID NO: 61515 - DNA, 25 bp, Saccharomyces pastorianus
ttcaccacggtgtttacaactacca

SEQ ID NO: 61516 - DNA, 25 bp, Saccharomyces pastorianus
catgaccacccaggttaccgtggaa

SEQ ID NO: 61517 - DNA, 25 bp, Saccharomyces pastorianus
gggtttttggtcactcagaccacta

SEQ ID NO: 61518 - DNA, 25 bp, Saccharomyces pastorianus
gctgtggccggctgctattctggca

SEQ ID NO: 61519 - DNA, 25 bp, Saccharomyces pastorianus
ttggtagcgaaacagcggctcgttt

SEQ ID NO: 61520 - DNA, 25 bp, Saccharomyces pastorianus
gatctgattgttcttcaacgtctga

SEQ ID NO: 61521 - DNA, 25 bp, Saccharomyces pastorianus
gatcctggttctttagtggacgttt

SEQ ID NO: 61522 - DNA, 25 bp, Saccharomyces pastorianus
actacactgataagaacgccccaaa

SEQ ID NO: 61523 - DNA, 25 bp, Saccharomyces pastorianus
aaatgtaaacattggtgcctctggg

SEQ ID NO: 61524 - DNA, 25 bp, Saccharomyces pastorianus
cattttgcatgtagccattggtagc

SEQ ID NO: 61525 - DNA, 25 bp, Saccharomyces pastorianus
aagcccaagtcatcgaacactcaat

SEQ ID NO: 61526 - DNA, 25 bp, Saccharomyces pastorianus
aaatatattcgcacccacaagtttg

SEQ ID NO: 61527 - DNA, 25 bp, Saccharomyces pastorianus
aatttccacaagtcacatttagcag

SEQ ID NO: 61528 - DNA, 25 bp, Saccharomyces pastorianus
ttaacttttactacccgtcaagatg

SEQ ID NO: 61529 - DNA, 25 bp, Saccharomyces pastorianus
gactcattcgcttaacatgtgctct

SEQ ID NO: 61530 - DNA, 25 bp, Saccharomyces pastorianus
ggaggatgctgatacttctgccggt

SEQ ID NO: 61531 - DNA, 25 bp, Saccharomyces pastorianus
ttctgccggtggtagtccattacaa

SEQ ID NO: 61532 - DNA, 25 bp, Saccharomyces pastorianus
aagtacttccaatgaaaacggtcag

SEQ ID NO: 61533 - DNA, 25 bp, Saccharomyces pastorianus
aaagcaatgtgatggcaaggacgca

SEQ ID NO: 61534 - DNA, 25 bp, Saccharomyces pastorianus
attgttgtacgactttgactgacca

SEQ ID NO: 61535 - DNA, 25 bp, Saccharomyces pastorianus
aaggacgcaaactcattcgctgttc

SEQ ID NO: 61536 - DNA, 25 bp, Saccharomyces pastorianus
actgaccaaggtttcatttatccaa

SEQ ID NO: 61537 - DNA, 25 bp, Saccharomyces pastorianus
aaacggtcagtccttgtttgtcaag

SEQ ID NO: 61538 - DNA, 25 bp, Saccharomyces pastorianus
gaaacgaccgtcagaaattgttgta

SEQ ID NO: 61539 - DNA, 25 bp, Saccharomyces pastorianus
attcgctgttccgattccgttgatt

SEQ ID NO: 61540 - DNA, 25 bp, Saccharomyces pastorianus
gattccgttgatttctcaatctcta

SEQ ID NO: 61541 - DNA, 25 bp, Saccharomyces pastorianus
caaaacgttgttgcgcagcggcatg

SEQ ID NO: 61542 - DNA, 25 bp, Saccharomyces pastorianus
tgaagatctttcacgacgaccacgt

SEQ ID NO: 61543 - DNA, 25 bp, Saccharomyces pastorianus
cacgtcaccgtggaacagctgatga

SEQ ID NO: 61544 - DNA, 25 bp, Saccharomyces pastorianus
acaagaaccctgttgcctcgtgtaa

SEQ ID NO: 61545 - DNA, 25 bp, Saccharomyces pastorianus
aatttgtgtcgcactttccctagag

SEQ ID NO: 61546 - DNA, 25 bp, Saccharomyces pastorianus
gcggcatgctgtactctagatgcat

SEQ ID NO: 61547 - DNA, 25 bp, Saccharomyces pastorianus
aggcacttgatagcagaccatttga

SEQ ID NO: 61548 - DNA, 25 bp, Saccharomyces pastorianus
agaaatgtaatacgcggtcctcgca

SEQ ID NO: 61549 - DNA, 25 bp, Saccharomyces pastorianus
ggtcctcgcacacaatgtcaaagca

SEQ ID NO: 61550 - DNA, 25 bp, Saccharomyces pastorianus
catgatttcttgtccgcactgtaaa

SEQ ID NO: 61551 - DNA, 25 bp, Saccharomyces pastorianus
gtacaccagcgtcatcagatataat

SEQ ID NO: 61552 - DNA, 25 bp, Saccharomyces pastorianus
gtaaaaatgcctactacaccacgct

SEQ ID NO: 61553 - DNA, 25 bp, Saccharomyces pastorianus
atgcctttctggacatgagtgcaaa

SEQ ID NO: 61554 - DNA, 25 bp, Saccharomyces pastorianus
tcatcctccaatgcttctacaataa

SEQ ID NO: 61555 - DNA, 25 bp, Saccharomyces pastorianus
ggttttctcacattaagccttcagc

SEQ ID NO: 61556 - DNA, 25 bp, Saccharomyces pastorianus
ttacgcgtcgcaacttaatatgaac

SEQ ID NO: 61557 - DNA, 25 bp, Saccharomyces pastorianus
tcttcaacagaccacttcgagtatg

SEQ ID NO: 61558 - DNA, 25 bp, Saccharomyces pastorianus
ttctcgggtgattctctcatggatt

SEQ ID NO: 61559 - DNA, 25 bp, Saccharomyces pastorianus
tatgtcaactgggatttcctcggcg

SEQ ID NO: 61560 - DNA, 25 bp, Saccharomyces pastorianus
acaatagcggtaatgcccaggcggc

SEQ ID NO: 61561 - DNA, 25 bp, Saccharomyces pastorianus
aatcttttcagtccttctccaagag

SEQ ID NO: 61562 - DNA, 25 bp, Saccharomyces pastorianus
aatctcttatcgcatttctcgggtg

SEQ ID NO: 61563 - DNA, 25 bp, Saccharomyces pastorianus
tatctccgagaagaattcttgccca

SEQ ID NO: 61564 - DNA, 25 bp, Saccharomyces pastorianus
aggctacgccgaaccaatcaaacta

SEQ ID NO: 61565 - DNA, 25 bp, Saccharomyces pastorianus
ttgcccatccattcttcgatgaatt

SEQ ID NO: 61566 - DNA, 25 bp, Saccharomyces pastorianus
ggatgacgctttcttgccaagaggc

SEQ ID NO: 61567 - DNA, 25 bp, Saccharomyces pastorianus
ggaaggatgacgctttcttgccaag

SEQ ID NO: 61568 - DNA, 25 bp, Saccharomyces pastorianus
tactagtttacgaaccacagcaaag

SEQ ID NO: 61569 - DNA, 25 bp, Saccharomyces pastorianus
gaaccacagcaaagattatctccga

SEQ ID NO: 61570 - DNA, 25 bp, Saccharomyces pastorianus
gccgaaccaatcaaactaccaaact

SEQ ID NO: 61571 - DNA, 25 bp, Saccharomyces pastorianus
attacaaatcttgggtgaattcgct

SEQ ID NO: 61572 - DNA, 25 bp, Saccharomyces pastorianus
gagaagaattcttgcccatccattc

SEQ ID NO: 61573 - DNA, 25 bp, Saccharomyces pastorianus
tttcttgccaagaggctacgccgaa

SEQ ID NO: 61574 - DNA, 25 bp, Saccharomyces pastorianus
aaccctgcttatgacggtcctttat

SEQ ID NO: 61575 - DNA, 25 bp, Saccharomyces pastorianus
gagaattgctgaccatccgaatatc

SEQ ID NO: 61576 - DNA, 25 bp, Saccharomyces pastorianus
taaaccctccaatgttctagtagac

SEQ ID NO: 61577 - DNA, 25 bp, Saccharomyces pastorianus
tatctttcaaggtcaggaacccctc

SEQ ID NO: 61578 - DNA, 25 bp, Saccharomyces pastorianus
aatatgtgattttggctctgctaaa

SEQ ID NO: 61579 - DNA, 25 bp, Saccharomyces pastorianus
attgctaaattactgggtcctcctg

SEQ ID NO: 61580 - DNA, 25 bp, Saccharomyces pastorianus
tgatcattggctgtacccagtacac

SEQ ID NO: 61581 - DNA, 25 bp, Saccharomyces pastorianus
cagtacaccacccaaatcgatattt

SEQ ID NO: 61582 - DNA, 25 bp, Saccharomyces pastorianus
tttacacggtcttggtgtgtgccat

SEQ ID NO: 61583 - DNA, 25 bp, Saccharomyces pastorianus
cacacgcgggatgctgtatttacac

SEQ ID NO: 61584 - DNA, 25 bp, Saccharomyces pastorianus
gtgtgccatcgtgatattaaaccct

SEQ ID NO: 61585 - DNA, 25 bp, Saccharomyces pastorianus
gttgcttattttgccggtaaggcca

SEQ ID NO: 61586 - DNA, 25 bp, Saccharomyces pastorianus
ggttcttcaacgtcatactgtggga

SEQ ID NO: 61587 - DNA, 25 bp, Saccharomyces pastorianus
ggcaagtgactcattacgacgtaat

SEQ ID NO: 61588 - DNA, 25 bp, Saccharomyces pastorianus
gaaacggtacagctccaatgatttt

SEQ ID NO: 61589 - DNA, 25 bp, Saccharomyces pastorianus
gaacgcggtgatactgacgtacgac

SEQ ID NO: 61590 - DNA, 25 bp, Saccharomyces pastorianus
ggcaagattctttctggtgggcaat

SEQ ID NO: 61591 - DNA, 25 bp, Saccharomyces pastorianus
aacgaatgccaagtctttccagaat

SEQ ID NO: 61592 - DNA, 25 bp, Saccharomyces pastorianus
gctatcattccatcgctatacaaga

SEQ ID NO: 61593 - DNA, 25 bp, Saccharomyces pastorianus
tttacttcccacgatttgtccaggg

SEQ ID NO: 61594 - DNA, 25 bp, Saccharomyces pastorianus
taaggccagcgagttcgggagcttt

SEQ ID NO: 61595 - DNA, 25 bp, Saccharomyces pastorianus
ctggcggacccacatgagattataa

SEQ ID NO: 61596 - DNA, 25 bp, Saccharomyces pastorianus
cttccggttccatcaacagaagagt

SEQ ID NO: 61597 - DNA, 25 bp, Saccharomyces pastorianus
tccggttccatcaacagaagagttt

SEQ ID NO: 61598 - DNA, 25 bp, Saccharomyces pastorianus
ccatcaacagaagagttttgcaagc

SEQ ID NO: 61599 - DNA, 25 bp, Saccharomyces pastorianus
ggttccatcaacagaagagttttgc

SEQ ID NO: 61600 - DNA, 25 bp, Saccharomyces pastorianus
tccatcaacagaagagttttgcaag

SEQ ID NO: 61601 - DNA, 25 bp, Saccharomyces pastorianus
ttccggttccatcaacagaagagtt

SEQ ID NO: 61602 - DNA, 25 bp, Saccharomyces pastorianus
cggttccatcaacagaagagttttg

SEQ ID NO: 61603 - DNA, 25 bp, Saccharomyces pastorianus
ccggttccatcaacagaagagtttt

SEQ ID NO: 61604 - DNA, 25 bp, Saccharomyces pastorianus
ttccatcaacagaagagttttgcaa

SEQ ID NO: 61605 - DNA, 25 bp, Saccharomyces pastorianus
gcttccggttccatcaacagaagag

SEQ ID NO: 61606 - DNA, 25 bp, Saccharomyces pastorianus
gttccatcaacagaagagttttgca

SEQ ID NO: 61607 - DNA, 25 bp, Saccharomyces pastorianus
gctccaaagtccgataatgtttatc

SEQ ID NO: 61608 - DNA, 25 bp, Saccharomyces pastorianus
gaccgctccaaagtccgataatgtt

SEQ ID NO: 61609 - DNA, 25 bp, Saccharomyces pastorianus
aggaccgctccaaagtccgataatg

SEQ ID NO: 61610 - DNA, 25 bp, Saccharomyces pastorianus
aagtccgataatgtttatctaaagt

SEQ ID NO: 61611 - DNA, 25 bp, Saccharomyces pastorianus
gggtatcgatcacacttccaagcaa

SEQ ID NO: 61612 - DNA, 25 bp, Saccharomyces pastorianus
taggaccgctccaaagtccgataat

SEQ ID NO: 61613 - DNA, 25 bp, Saccharomyces pastorianus
aagcaacacaaaagatccggccata

SEQ ID NO: 61614 - DNA, 25 bp, Saccharomyces pastorianus
tccggccataggaccgctccaaagt

SEQ ID NO: 61615 - DNA, 25 bp, Saccharomyces pastorianus
ccgctccaaagtccgataatgttta

SEQ ID NO: 61616 - DNA, 25 bp, Saccharomyces pastorianus
gccataggaccgctccaaagtccga

SEQ ID NO: 61617 - DNA, 25 bp, Saccharomyces pastorianus
accgctccaaagtccgataatgttt

SEQ ID NO: 61618 - DNA, 25 bp, Saccharomyces pastorianus
gaatccaatccaccggtagaaagtt

SEQ ID NO: 61619 - DNA, 25 bp, Saccharomyces pastorianus
tccaccggtagaaagttcgaaagag

SEQ ID NO: 61620 - DNA, 25 bp, Saccharomyces pastorianus
gtaaggccccaagaatccaatccac

SEQ ID NO: 61621 - DNA, 25 bp, Saccharomyces pastorianus
ccccaagaatccaatccaccggtag

SEQ ID NO: 61622 - DNA, 25 bp, Saccharomyces pastorianus
gtccacacaagggtaaggccccaag

SEQ ID NO: 61623 - DNA, 25 bp, Saccharomyces pastorianus
aggccccaagaatccaatccaccgg

SEQ ID NO: 61624 - DNA, 25 bp, Saccharomyces pastorianus
gccccaagaatccaatccaccggta

SEQ ID NO: 61625 - DNA, 25 bp, Saccharomyces pastorianus
taaggccccaagaatccaatccacc

SEQ ID NO: 61626 - DNA, 25 bp, Saccharomyces pastorianus
ggccccaagaatccaatccaccggt

SEQ ID NO: 61627 - DNA, 25 bp, Saccharomyces pastorianus
aaggccccaagaatccaatccaccg

SEQ ID NO: 61628 - DNA, 25 bp, Saccharomyces pastorianus
aagaatccaatccaccggtagaaag

SEQ ID NO: 61629 - DNA, 25 bp, Saccharomyces pastorianus
gaagacagtgaaccccagtccaaat

SEQ ID NO: 61630 - DNA, 25 bp, Saccharomyces pastorianus
atgccttgatgggactttctgacaa

SEQ ID NO: 61631 - DNA, 25 bp, Saccharomyces pastorianus
acaatcccaccatagatgccttgat

SEQ ID NO: 61632 - DNA, 25 bp, Saccharomyces pastorianus
ggcgattctcgaaaacgaacgctac

SEQ ID NO: 61633 - DNA, 25 bp, Saccharomyces pastorianus
taacaacatcagtagagggtccttt

SEQ ID NO: 61634 - DNA, 25 bp, Saccharomyces pastorianus
tcccgcttccgaggtagcagtaaag

SEQ ID NO: 61635 - DNA, 25 bp, Saccharomyces pastorianus
tctacaaacttgatgagcctcttaa

SEQ ID NO: 61636 - DNA, 25 bp, Saccharomyces pastorianus
agattccgccacctttaaagatcgt

SEQ ID NO: 61637 - DNA, 25 bp, Saccharomyces pastorianus
ggcagattttcgcttgccattcaag

SEQ ID NO: 61638 - DNA, 25 bp, Saccharomyces pastorianus
aatgctgggagctagattccgccac

SEQ ID NO: 61639 - DNA, 25 bp, Saccharomyces pastorianus
gccattcaagatcccggtgatccaa

SEQ ID NO: 61640 - DNA, 25 bp, Saccharomyces pastorianus
ttacacgacaatactatcttccctg

SEQ ID NO: 61641 - DNA, 25 bp, Saccharomyces pastorianus
ttgtcagatgagatcccgtccacat

SEQ ID NO: 61642 - DNA, 25 bp, Saccharomyces pastorianus
actatcttccctgacacattcaaaa

SEQ ID NO: 61643 - DNA, 25 bp, Saccharomyces pastorianus
atatacgcggtatcctactaatttg

SEQ ID NO: 61644 - DNA, 25 bp, Saccharomyces pastorianus
gattgtaacgcgcttgtcagatgag

SEQ ID NO: 61645 - DNA, 25 bp, Saccharomyces pastorianus
ccgtccacatacttctttcaagatg

SEQ ID NO: 61646 - DNA, 25 bp, Saccharomyces pastorianus
gagtggattgtatcattcaacccag

SEQ ID NO: 61647 - DNA, 25 bp, Saccharomyces pastorianus
gatacaccaagagacacaacacatt

SEQ ID NO: 61648 - DNA, 25 bp, Saccharomyces pastorianus
ggaccatatgtatccagtttacacg

SEQ ID NO: 61649 - DNA, 25 bp, Saccharomyces pastorianus
cccagccccattcataatttcaaaa

SEQ ID NO: 61650 - DNA, 25 bp, Saccharomyces pastorianus
agacgttcaagtgagtttcaatgac

SEQ ID NO: 61651 - DNA, 25 bp, Saccharomyces pastorianus
gaagccattcaaactcgtacgtgtt

SEQ ID NO: 61652 - DNA, 25 bp, Saccharomyces pastorianus
gaggccgatgttcatgctaatccgt

SEQ ID NO: 61653 - DNA, 25 bp, Saccharomyces pastorianus
gaagttcttcccaatattcagttga

SEQ ID NO: 61654 - DNA, 25 bp, Saccharomyces pastorianus
ttactagataccctaagttccgcca

SEQ ID NO: 61655 - DNA, 25 bp, Saccharomyces pastorianus
ggaacagccctcattgtcacataaa

SEQ ID NO: 61656 - DNA, 25 bp, Saccharomyces pastorianus
aaagttgcctctactgaccatattc

SEQ ID NO: 61657 - DNA, 25 bp, Saccharomyces pastorianus
caagcttcccctccgatgtaagaaa

SEQ ID NO: 61658 - DNA, 25 bp, Saccharomyces pastorianus
tgttgtctcgaaactgaagccattc

SEQ ID NO: 61659 - DNA, 25 bp, Saccharomyces pastorianus
aatttgcatttgctggttcccaaag

SEQ ID NO: 61660 - DNA, 25 bp, Saccharomyces pastorianus
gcctgtgataccgtgggatgcatcc

SEQ ID NO: 61661 - DNA, 25 bp, Saccharomyces pastorianus
ggccgaagatgactaccggttctaa

SEQ ID NO: 61662 - DNA, 25 bp, Saccharomyces pastorianus
tagttctgagatatgcgatttgcaa

SEQ ID NO: 61663 - DNA, 25 bp, Saccharomyces pastorianus
ttagggctggacagacctggtgtat

SEQ ID NO: 61664 - DNA, 25 bp, Saccharomyces pastorianus
ggaggcccatttttgaagaggaaca

SEQ ID NO: 61665 - DNA, 25 bp, Saccharomyces pastorianus
gacctggtgtatacatttactcgac

SEQ ID NO: 61666 - DNA, 25 bp, Saccharomyces pastorianus
gttttcaattcagaccaagactacg

SEQ ID NO: 61667 - DNA, 25 bp, Saccharomyces pastorianus
tgccttgagggttcaaaacgcatta

SEQ ID NO: 61668 - DNA, 25 bp, Saccharomyces pastorianus
gtagtgctcgcgacaagattttata

SEQ ID NO: 61669 - DNA, 25 bp, Saccharomyces pastorianus
aaatgaggacaccaaacggcgaaag

SEQ ID NO: 61670 - DNA, 25 bp, Saccharomyces pastorianus
tatctcgctatgacccagaggatca

SEQ ID NO: 61671 - DNA, 25 bp, Saccharomyces pastorianus
atccgaaggtaggagtatcgaccaa

SEQ ID NO: 61672 - DNA, 25 bp, Saccharomyces pastorianus
gatttgcaaaccatatctcgctatg

SEQ ID NO: 61673 - DNA, 25 bp, Saccharomyces pastorianus
gtgccaatgtcaacacagatgccaa

SEQ ID NO: 61674 - DNA, 25 bp, Saccharomyces pastorianus
gtatggattcaaaaagagcctagct

SEQ ID NO: 61675 - DNA, 25 bp, Saccharomyces pastorianus
tcttggaagcgcaacatcagaagca

SEQ ID NO: 61676 - DNA, 25 bp, Saccharomyces pastorianus
gatgtcgaaaattcgttgcggcaca

SEQ ID NO: 61677 - DNA, 25 bp, Saccharomyces pastorianus
acatatggtgagcttcttggaagcg

SEQ ID NO: 61678 - DNA, 25 bp, Saccharomyces pastorianus
aagacactattgaaccctaacgaga

SEQ ID NO: 61679 - DNA, 25 bp, Saccharomyces pastorianus
gaaccctaacgagatatttgagaag

SEQ ID NO: 61680 - DNA, 25 bp, Saccharomyces pastorianus
gaagcagaattgaccagtgccaatg

SEQ ID NO: 61681 - DNA, 25 bp, Saccharomyces pastorianus
atgccaaaggtacccacatcacaag

SEQ ID NO: 61682 - DNA, 25 bp, Saccharomyces pastorianus
tgatacagacattccccaagacact

SEQ ID NO: 61683 - DNA, 25 bp, Saccharomyces pastorianus
ttgcggcacaacgtctcaagtttaa

SEQ ID NO: 61684 - DNA, 25 bp, Saccharomyces pastorianus
gaatcgcattttttgttcaagacct

SEQ ID NO: 61685 - DNA, 25 bp, Saccharomyces pastorianus
tttccaagacaaagcctcgtagcaa

SEQ ID NO: 61686 - DNA, 25 bp, Saccharomyces pastorianus
gaatttttgtacaggctaccgccaa

SEQ ID NO: 61687 - DNA, 25 bp, Saccharomyces pastorianus
agctgctttgttggaattgtgccga

SEQ ID NO: 61688 - DNA, 25 bp, Saccharomyces pastorianus
attgtgccgatagagacgacgctaa

SEQ ID NO: 61689 - DNA, 25 bp, Saccharomyces pastorianus
gtagcaattcgcttaaccattcttg

SEQ ID NO: 61690 - DNA, 25 bp, Saccharomyces pastorianus
taaaccttccattgatcatcaccag

SEQ ID NO: 61691 - DNA, 25 bp, Saccharomyces pastorianus
aaccattcttggacttctaacacga

SEQ ID NO: 61692 - DNA, 25 bp, Saccharomyces pastorianus
tcaagacctcgctggcagtgttaaa

SEQ ID NO: 61693 - DNA, 25 bp, Saccharomyces pastorianus
taccgccaattactctgtgtacagc

SEQ ID NO: 61694 - DNA, 25 bp, Saccharomyces pastorianus
gagtgagcacgaactttccaagaca

SEQ ID NO: 61695 - DNA, 25 bp, Saccharomyces pastorianus
gaaagcctggccaaagctgaccgaa

SEQ ID NO: 61696 - DNA, 25 bp, Saccharomyces pastorianus
aaggcaactgttgttttcaagagaa

SEQ ID NO: 61697 - DNA, 25 bp, Saccharomyces pastorianus
gaatggacgttattttgacggccaa

SEQ ID NO: 61698 - DNA, 25 bp, Saccharomyces pastorianus
gagagagcccaattcgatgacagag

SEQ ID NO: 61699 - DNA, 25 bp, Saccharomyces pastorianus
gacaacctttctgtatctaccgata

SEQ ID NO: 61700 - DNA, 25 bp, Saccharomyces pastorianus
atgcttcagaaatcaatcgcgagag

SEQ ID NO: 61701 - DNA, 25 bp, Saccharomyces pastorianus
gccgggcgaatcagaacgaccagta

SEQ ID NO: 61702 - DNA, 25 bp, Saccharomyces pastorianus
ttggccaagtggacaacctttctgt

SEQ ID NO: 61703 - DNA, 25 bp, Saccharomyces pastorianus
ggtacttgccaatgtgttcgatatt

SEQ ID NO: 61704 - DNA, 25 bp, Saccharomyces pastorianus
aatagtaccaaagcgccgggcgaat

SEQ ID NO: 61705 - DNA, 25 bp, Saccharomyces pastorianus
agatgccctagaatgttgtaaaacc

SEQ ID NO: 61706 - DNA, 25 bp, Saccharomyces pastorianus
tcagatcatgaatccgtgcctgtca

SEQ ID NO: 61707 - DNA, 25 bp, Saccharomyces pastorianus
attcacagcacgatactacacaccg

SEQ ID NO: 61708 - DNA, 25 bp, Saccharomyces pastorianus
ggaaaatttcattacagtctaccaa

SEQ ID NO: 61709 - DNA, 25 bp, Saccharomyces pastorianus
agaggcttcgagagcatccgcaaag

SEQ ID NO: 61710 - DNA, 25 bp, Saccharomyces pastorianus
acctggaacgtattcaatggtttca

SEQ ID NO: 61711 - DNA, 25 bp, Saccharomyces pastorianus
tttaccaatgcgaatgccaaaccgt

SEQ ID NO: 61712 - DNA, 25 bp, Saccharomyces pastorianus
atccgcaaaggctattgaggccatt

SEQ ID NO: 61713 - DNA, 25 bp, Saccharomyces pastorianus
aaattggcttggtcactgggcctat

SEQ ID NO: 61714 - DNA, 25 bp, Saccharomyces pastorianus
tccgtgcctgtcatatctagatcta

SEQ ID NO: 61715 - DNA, 25 bp, Saccharomyces pastorianus
aagggcacaccttaatccagaatgg

SEQ ID NO: 61716 - DNA, 25 bp, Saccharomyces pastorianus
gtctaccaatttctatagaggcttc

SEQ ID NO: 61717 - DNA, 25 bp, Saccharomyces pastorianus
ttctccagttgcgaattcggtatgt

SEQ ID NO: 61718 - DNA, 25 bp, Saccharomyces pastorianus
tgcagttggttttcaagaagttcac

SEQ ID NO: 61719 - DNA, 25 bp, Saccharomyces pastorianus
gttggttttcaagaagttcacaatt

SEQ ID NO: 61720 - DNA, 25 bp, Saccharomyces pastorianus
ggcatcgtggccttctggagactcg

SEQ ID NO: 61721 - DNA, 25 bp, Saccharomyces pastorianus
gtttatcagcttgaattccaacaaa

SEQ ID NO: 61722 - DNA, 25 bp, Saccharomyces pastorianus
gcgaattcggtatgtattcagccaa

SEQ ID NO: 61723 - DNA, 25 bp, Saccharomyces pastorianus
gattttctccagttgcgaattcggt

SEQ ID NO: 61724 - DNA, 25 bp, Saccharomyces pastorianus
gttcacaattagtttgtttatcagc

SEQ ID NO: 61725 - DNA, 25 bp, Saccharomyces pastorianus
gtggccttctggagactcgattttc

SEQ ID NO: 61726 - DNA, 25 bp, Saccharomyces pastorianus
gagactcgattttctccagttgcga

SEQ ID NO: 61727 - DNA, 25 bp, Saccharomyces pastorianus
gactcgattttctccagttgcgaat

SEQ ID NO: 61728 - DNA, 25 bp, Saccharomyces pastorianus
aaagggtgtccttgctgatttagaa

SEQ ID NO: 61729 - DNA, 25 bp, Saccharomyces pastorianus
atgagagctcttacggtagttacct

SEQ ID NO: 61730 - DNA, 25 bp, Saccharomyces pastorianus
ggtgcgcttcaggagtcagataatt

SEQ ID NO: 61731 - DNA, 25 bp, Saccharomyces pastorianus
gatcttgaagatgccaaacctccag

SEQ ID NO: 61732 - DNA, 25 bp, Saccharomyces pastorianus
atccgaatgatctacaaagggccga

SEQ ID NO: 61733 - DNA, 25 bp, Saccharomyces pastorianus
ttgacagagctgttggtgcgcttca

SEQ ID NO: 61734 - DNA, 25 bp, Saccharomyces pastorianus
tcaacgttattctagctgtcggtaa

SEQ ID NO: 61735 - DNA, 25 bp, Saccharomyces pastorianus
gaaactatgccccatattctaccga

SEQ ID NO: 61736 - DNA, 25 bp, Saccharomyces pastorianus
aagggccgatcagatttacctgcaa

SEQ ID NO: 61737 - DNA, 25 bp, Saccharomyces pastorianus
aaggcctttgctgctagggaaatca

SEQ ID NO: 61738 - DNA, 25 bp, Saccharomyces pastorianus
atgtactcttcactttcagttgtcg

SEQ ID NO: 61739 - DNA, 25 bp, Saccharomyces pastorianus
aactgatgaagtagcacgtcgtgca

SEQ ID NO: 61740 - DNA, 25 bp, Saccharomyces pastorianus
gcaacagctggaatctgaactggaa

SEQ ID NO: 61741 - DNA, 25 bp, Saccharomyces pastorianus
attcggtatgacacttcaacccaac

SEQ ID NO: 61742 - DNA, 25 bp, Saccharomyces pastorianus
aacgcctcgaacctcctatagagat

SEQ ID NO: 61743 - DNA, 25 bp, Saccharomyces pastorianus
gagggattcccttagtgaaaagcta

SEQ ID NO: 61744 - DNA, 25 bp, Saccharomyces pastorianus
agcacgggctcgttgggcaattaga

SEQ ID NO: 61745 - DNA, 25 bp, Saccharomyces pastorianus
agagatcgtatactggctaagaacc

SEQ ID NO: 61746 - DNA, 25 bp, Saccharomyces pastorianus
aaactccagacctgaggatggtttt

SEQ ID NO: 61747 - DNA, 25 bp, Saccharomyces pastorianus
gaaccaaagggttatgcaacagctg

SEQ ID NO: 61748 - DNA, 25 bp, Saccharomyces pastorianus
agcacgtcgtgcaatactagaaagt

SEQ ID NO: 61749 - DNA, 25 bp, Saccharomyces pastorianus
aattcaagcagagagggattccctt

SEQ ID NO: 61750 - DNA, 25 bp, Saccharomyces pastorianus
aaactagatgctgggtttgtcgctg

SEQ ID NO: 61751 - DNA, 25 bp, Saccharomyces pastorianus
agaaaagcccatactagccttagat

SEQ ID NO: 61752 - DNA, 25 bp, Saccharomyces pastorianus
aactggatgattctctatcctcgtc

SEQ ID NO: 61753 - DNA, 25 bp, Saccharomyces pastorianus
taacggatcatatcgatgttcctga

SEQ ID NO: 61754 - DNA, 25 bp, Saccharomyces pastorianus
tgacgagaatgacaccgcggatgct

SEQ ID NO: 61755 - DNA, 25 bp, Saccharomyces pastorianus
atttctttaggctctactggtgctc

SEQ ID NO: 61756 - DNA, 25 bp, Saccharomyces pastorianus
tttgtcgctgggattataacggatc

SEQ ID NO: 61757 - DNA, 25 bp, Saccharomyces pastorianus
aatgctctccttcggtgccaaaaga

SEQ ID NO: 61758 - DNA, 25 bp, Saccharomyces pastorianus
tcgtcctcttctagcatttctttag

SEQ ID NO: 61759 - DNA, 25 bp, Saccharomyces pastorianus
gaggaacttgtcgacttatatttaa

SEQ ID NO: 61760 - DNA, 25 bp, Saccharomyces pastorianus
gaacgtatgacgtgccttacagtaa

SEQ ID NO: 61761 - DNA, 25 bp, Saccharomyces pastorianus
gaagcaaaacttcttggagggcaaa

SEQ ID NO: 61762 - DNA, 25 bp, Saccharomyces pastorianus
ggattttgacgattcactgacttta

SEQ ID NO: 61763 - DNA, 25 bp, Saccharomyces pastorianus
ctcaagggccattgctggagatatt

SEQ ID NO: 61764 - DNA, 25 bp, Saccharomyces pastorianus
ggacaattcttatagctcttcaacg

SEQ ID NO: 61765 - DNA, 25 bp, Saccharomyces pastorianus
aaaatatccatactgttcgcacatt

SEQ ID NO: 61766 - DNA, 25 bp, Saccharomyces pastorianus
ctgttcgcacattaataaacggttt

SEQ ID NO: 61767 - DNA, 25 bp, Saccharomyces pastorianus
agtaggattccagagattcatcatc

SEQ ID NO: 61768 - DNA, 25 bp, Saccharomyces pastorianus
atgtttgaagacgtctcaagggcca

SEQ ID NO: 61769 - DNA, 25 bp, Saccharomyces pastorianus
ggagggcaaacaatttggcctacaa

SEQ ID NO: 61770 - DNA, 25 bp, Saccharomyces pastorianus
accaagacggttatcgtgaagggca

SEQ ID NO: 61771 - DNA, 25 bp, Saccharomyces pastorianus
agagattcatcatcctagggcaaat

SEQ ID NO: 61772 - DNA, 25 bp, Saccharomyces pastorianus
agaatccatcatgggatgccatcat

SEQ ID NO: 61773 - DNA, 25 bp, Saccharomyces pastorianus
gtttctaggttaattgagcgtcagt

SEQ ID NO: 61774 - DNA, 25 bp, Saccharomyces pastorianus
gagttgttgtttgctgacacacctc

SEQ ID NO: 61775 - DNA, 25 bp, Saccharomyces pastorianus
gaaatcatttatccgctagagaaaa

SEQ ID NO: 61776 - DNA, 25 bp, Saccharomyces pastorianus
gttaccgttatttattgtcattcct

SEQ ID NO: 61777 - DNA, 25 bp, Saccharomyces pastorianus
ttgctgacacacctctacgaagaaa

SEQ ID NO: 61778 - DNA, 25 bp, Saccharomyces pastorianus
gagcgtcagttaacagaattccgtg

SEQ ID NO: 61779 - DNA, 25 bp, Saccharomyces pastorianus
atgccatcattgagagcctactacc

SEQ ID NO: 61780 - DNA, 25 bp, Saccharomyces pastorianus
ggtgagcttgtatctttactagtta

SEQ ID NO: 61781 - DNA, 25 bp, Saccharomyces pastorianus
gaagaacccggttataaagcgatga

SEQ ID NO: 61782 - DNA, 25 bp, Saccharomyces pastorianus
gacttttatcttttcacaactgatg

SEQ ID NO: 61783 - DNA, 25 bp, Saccharomyces pastorianus
gttacaccggatagtcccatttttg

SEQ ID NO: 61784 - DNA, 25 bp, Saccharomyces pastorianus
attgccagtacagggaaacgcggaa

SEQ ID NO: 61785 - DNA, 25 bp, Saccharomyces pastorianus
aaaagttcagtgacggcagtttcac

SEQ ID NO: 61786 - DNA, 25 bp, Saccharomyces pastorianus
aaaatattccaggatcgcctcggat

SEQ ID NO: 61787 - DNA, 25 bp, Saccharomyces pastorianus
aatggctgatctttggtcgaatgac

SEQ ID NO: 61788 - DNA, 25 bp, Saccharomyces pastorianus
gaccaatcaattatcagttacaccg

SEQ ID NO: 61789 - DNA, 25 bp, Saccharomyces pastorianus
ggtatcttattgttgtttgctgaaa

SEQ ID NO: 61790 - DNA, 25 bp, Saccharomyces pastorianus
gcagtttcactaaagattgccagta

SEQ ID NO: 61791 - DNA, 25 bp, Saccharomyces pastorianus
ctactggtccgtaaagagggctgaa

SEQ ID NO: 61792 - DNA, 25 bp, Saccharomyces pastorianus
atactgcctcaattgtgacgaagag

SEQ ID NO: 61793 - DNA, 25 bp, Saccharomyces pastorianus
aagagcatcagtttcctactggtcc

SEQ ID NO: 61794 - DNA, 25 bp, Saccharomyces pastorianus
tctgctaggcccatcgcgcaaaaaa

SEQ ID NO: 61795 - DNA, 25 bp, Saccharomyces pastorianus
agaagtctgctatatcctttcacac

SEQ ID NO: 61796 - DNA, 25 bp, Saccharomyces pastorianus
tagatcctgggcttgggtttgccaa

SEQ ID NO: 61797 - DNA, 25 bp, Saccharomyces pastorianus
atatcctttcacacattcgtggcga

SEQ ID NO: 61798 - DNA, 25 bp, Saccharomyces pastorianus
aaccgtagtcgcatcgtgtgttgga

SEQ ID NO: 61799 - DNA, 25 bp, Saccharomyces pastorianus
aacatgttggacgtgattgccgaaa

SEQ ID NO: 61800 - DNA, 25 bp, Saccharomyces pastorianus
tctgccttaggcgattgtgttcaac

SEQ ID NO: 61801 - DNA, 25 bp, Saccharomyces pastorianus
ggacacacaagattctcatacctat

SEQ ID NO: 61802 - DNA, 25 bp, Saccharomyces pastorianus
aaagggcgtcaagcgttggcaaata

SEQ ID NO: 61803 - DNA, 25 bp, Saccharomyces pastorianus
agaaacatccctgttctgctaggcc

SEQ ID NO: 61804 - DNA, 25 bp, Saccharomyces pastorianus
gacacattacgaggactctgcctta

SEQ ID NO: 61805 - DNA, 25 bp, Saccharomyces pastorianus
cggctttcttagcatttggttcaaa

SEQ ID NO: 61806 - DNA, 25 bp, Saccharomyces pastorianus
ggctcaggaagcaatatgtcacgtt

SEQ ID NO: 61807 - DNA, 25 bp, Saccharomyces pastorianus
atgagacttctaataccgcctttga

SEQ ID NO: 61808 - DNA, 25 bp, Saccharomyces pastorianus
tgacaatgaacagccttgtggcgat

SEQ ID NO: 61809 - DNA, 25 bp, Saccharomyces pastorianus
aaaccttgagtaccactgacaatga

SEQ ID NO: 61810 - DNA, 25 bp, Saccharomyces pastorianus
taccgcctttgatttaccttcattg

SEQ ID NO: 61811 - DNA, 25 bp, Saccharomyces pastorianus
aagaccgttgaagccttagtggaat

SEQ ID NO: 61812 - DNA, 25 bp, Saccharomyces pastorianus
agtgatcatatttcttgcgccattc

SEQ ID NO: 61813 - DNA, 25 bp, Saccharomyces pastorianus
aatctgtgacaggtattattgccaa

SEQ ID NO: 61814 - DNA, 25 bp, Saccharomyces pastorianus
tcgaagaaggctgagttggcacccc

SEQ ID NO: 61815 - DNA, 25 bp, Saccharomyces pastorianus
acgcaattacggctactgagggtgt

SEQ ID NO: 61816 - DNA, 25 bp, Saccharomyces pastorianus
ggaactgacacataaccaacctgca

SEQ ID NO: 61817 - DNA, 25 bp, Saccharomyces pastorianus
gcaattacgttttggcgccggaaat

SEQ ID NO: 61818 - DNA, 25 bp, Saccharomyces pastorianus
gagctgctgaatgaggtggaaccct

SEQ ID NO: 61819 - DNA, 25 bp, Saccharomyces pastorianus
gaagatacgatcgagtacggcctta

SEQ ID NO: 61820 - DNA, 25 bp, Saccharomyces pastorianus
ggaacccttcatgcctattgtgatg

SEQ ID NO: 61821 - DNA, 25 bp, Saccharomyces pastorianus
ccgtctgcaagaactgaagctcgat

SEQ ID NO: 61822 - DNA, 25 bp, Saccharomyces pastorianus
aagctcgatgtgcactactattcta

SEQ ID NO: 61823 - DNA, 25 bp, Saccharomyces pastorianus
aatttctccagcagatctcattcac

SEQ ID NO: 61824 - DNA, 25 bp, Saccharomyces pastorianus
gaattcccaaaaggcctatctgtca

SEQ ID NO: 61825 - DNA, 25 bp, Saccharomyces pastorianus
gaaattcttgcgtccttttgtattc

SEQ ID NO: 61826 - DNA, 25 bp, Saccharomyces pastorianus
tacggccttatagtcgcagattctg

SEQ ID NO: 61827 - DNA, 25 bp, Saccharomyces pastorianus
cgtttggtgcaaattgtggtgtcat

SEQ ID NO: 61828 - DNA, 25 bp, Saccharomyces pastorianus
gtccattatcatccggttggcatta

SEQ ID NO: 61829 - DNA, 25 bp, Saccharomyces pastorianus
tcattgcattagacgagcctaccac

SEQ ID NO: 61830 - DNA, 25 bp, Saccharomyces pastorianus
gggcaaatcatacaattaccgtgtt

SEQ ID NO: 61831 - DNA, 25 bp, Saccharomyces pastorianus
gcaggccaaaaggttattgcgtcca

SEQ ID NO: 61832 - DNA, 25 bp, Saccharomyces pastorianus
ttccaactcattgtcattacccatg

SEQ ID NO: 61833 - DNA, 25 bp, Saccharomyces pastorianus
agaggaagatgttcggcaggccaaa

SEQ ID NO: 61834 - DNA, 25 bp, Saccharomyces pastorianus
aaaccaggtcttttgtcactgatga

SEQ ID NO: 61835 - DNA, 25 bp, Saccharomyces pastorianus
ggttattgcgtccattatcatccgg

SEQ ID NO: 61836 - DNA, 25 bp, Saccharomyces pastorianus
gcatttaccgaccatttcttcaaag

SEQ ID NO: 61837 - DNA, 25 bp, Saccharomyces pastorianus
cggttggcattatcggaaacgtttg

SEQ ID NO: 61838 - DNA, 25 bp, Saccharomyces pastorianus
gacagttgctgttacttgtgttcaa

SEQ ID NO: 61839 - DNA, 25 bp, Saccharomyces pastorianus
aaacgctcaggaagctcttgataaa

SEQ ID NO: 61840 - DNA, 25 bp, Saccharomyces pastorianus
gaaagccctagaaatcgctgaacgt

SEQ ID NO: 61841 - DNA, 25 bp, Saccharomyces pastorianus
aagactgcgttggagaacctgaaaa

SEQ ID NO: 61842 - DNA, 25 bp, Saccharomyces pastorianus
gcagaatctgaaattcgtccattga

SEQ ID NO: 61843 - DNA, 25 bp, Saccharomyces pastorianus
gaattgtcctacaagactgcgttgg

SEQ ID NO: 61844 - DNA, 25 bp, Saccharomyces pastorianus
gagctatccatttataacaccagtg

SEQ ID NO: 61845 - DNA, 25 bp, Saccharomyces pastorianus
gacaatatctgacgagctatccatt

SEQ ID NO: 61846 - DNA, 25 bp, Saccharomyces pastorianus
aactgtcgacgaactgagagaccaa

SEQ ID NO: 61847 - DNA, 25 bp, Saccharomyces pastorianus
atcatttcactaaactccctgtgtc

SEQ ID NO: 61848 - DNA, 25 bp, Saccharomyces pastorianus
gaacttgaacacagctctaagacaa

SEQ ID NO: 61849 - DNA, 25 bp, Saccharomyces pastorianus
gggactcgctagcatcgttgttcag

SEQ ID NO: 61850 - DNA, 25 bp, Saccharomyces pastorianus
aaagacaagcgcagcccggagggca

SEQ ID NO: 61851 - DNA, 25 bp, Saccharomyces pastorianus
gacaccagggacttcagcataacat

SEQ ID NO: 61852 - DNA, 25 bp, Saccharomyces pastorianus
ggatgctgaccagtgagcccgtgac

SEQ ID NO: 61853 - DNA, 25 bp, Saccharomyces pastorianus
agatctacccattctgcgtgaagta

SEQ ID NO: 61854 - DNA, 25 bp, Saccharomyces pastorianus
tactacacggaagcgcagcgggacc

SEQ ID NO: 61855 - DNA, 25 bp, Saccharomyces pastorianus
attaccaaggtgttccagatccgga

SEQ ID NO: 61856 - DNA, 25 bp, Saccharomyces pastorianus
taagcgctgctgatgacgacgacga

SEQ ID NO: 61857 - DNA, 25 bp, Saccharomyces pastorianus
gaaatggctagcgttggcatccaaa

SEQ ID NO: 61858 - DNA, 25 bp, Saccharomyces pastorianus
agcacgccagttttgcgaactacat

SEQ ID NO: 61859 - DNA, 25 bp, Saccharomyces pastorianus
atttccacggcattgacggcgactt

SEQ ID NO: 61860 - DNA, 25 bp, Saccharomyces pastorianus
gaatcgaccactatctgggcaagga

SEQ ID NO: 61861 - DNA, 25 bp, Saccharomyces pastorianus
ttcttgaacgctccctggaacagag

SEQ ID NO: 61862 - DNA, 25 bp, Saccharomyces pastorianus
tccagagcgtccagatctcgtttaa

SEQ ID NO: 61863 - DNA, 25 bp, Saccharomyces pastorianus
gtgtcatcgtggagaagcccttcgg

SEQ ID NO: 61864 - DNA, 25 bp, Saccharomyces pastorianus
acctgggcccgctgttcaaggagga

SEQ ID NO: 61865 - DNA, 25 bp, Saccharomyces pastorianus
aagaacctcttggtgctgcgtttcg

SEQ ID NO: 61866 - DNA, 25 bp, Saccharomyces pastorianus
gtttcgacgagctcagaacgcagat

SEQ ID NO: 61867 - DNA, 25 bp, Saccharomyces pastorianus
aagcgtcttcttgaccgtggccaaa

SEQ ID NO: 61868 - DNA, 25 bp, Saccharomyces pastorianus
agacgtcatgcagaaccatctcttg

SEQ ID NO: 61869 - DNA, 25 bp, Saccharomyces pastorianus
ctgcgtttcggtaaccagttcttga

SEQ ID NO: 61870 - DNA, 25 bp, Saccharomyces pastorianus
atgatcgactacatcgcgggcaatt

SEQ ID NO: 61871 - DNA, 25 bp, Saccharomyces pastorianus
ggcctgtacgtcatgactcagcaat

SEQ ID NO: 61872 - DNA, 25 bp, Saccharomyces pastorianus
ttttcggttctcacactccaaaatt

SEQ ID NO: 61873 - DNA, 25 bp, Saccharomyces pastorianus
aaaggcctcacgtatcaagtaccac

SEQ ID NO: 61874 - DNA, 25 bp, Saccharomyces pastorianus
tgccagtccgctaccgtgtagaaaa

SEQ ID NO: 61875 - DNA, 25 bp, Saccharomyces pastorianus
tactgtttccagatcgtagtcgaca

SEQ ID NO: 61876 - DNA, 25 bp, Saccharomyces pastorianus
gtcgatgagacgtccaagttgccag

SEQ ID NO: 61877 - DNA, 25 bp, Saccharomyces pastorianus
gcgacgccgtgctttatctaaatgt

SEQ ID NO: 61878 - DNA, 25 bp, Saccharomyces pastorianus
agtcgacatcgatgagttgcccgaa

SEQ ID NO: 61879 - DNA, 25 bp, Saccharomyces pastorianus
aagacacccatacggcaagctgatc

SEQ ID NO: 61880 - DNA, 25 bp, Saccharomyces pastorianus
aagtcgaccccattggagtttgcca

SEQ ID NO: 61881 - DNA, 25 bp, Saccharomyces pastorianus
tggccacaaaattcacctcgggtaa

SEQ ID NO: 61882 - DNA, 25 bp, Saccharomyces pastorianus
tgcagcaggacaacagaatcttcaa

SEQ ID NO: 61883 - DNA, 25 bp, Saccharomyces pastorianus
gacgtgctcttgaaccagactaggc

SEQ ID NO: 61884 - DNA, 25 bp, Saccharomyces pastorianus
tgaaccagactaggctgctgcagca

SEQ ID NO: 61885 - DNA, 25 bp, Saccharomyces pastorianus
ggacaacagaatcttcaacaccctc

SEQ ID NO: 61886 - DNA, 25 bp, Saccharomyces pastorianus
aacagaatcttcaacaccctcgtct

SEQ ID NO: 61887 - DNA, 25 bp, Saccharomyces pastorianus
gactaggctgctgcagcaggacaac

SEQ ID NO: 61888 - DNA, 25 bp, Saccharomyces pastorianus
gctcttgaaccagactaggctgctg

SEQ ID NO: 61889 - DNA, 25 bp, Saccharomyces pastorianus
ttctccagaactacaacgcccatga

SEQ ID NO: 61890 - DNA, 25 bp, Saccharomyces pastorianus
aattggccaccaccgttctccagaa

SEQ ID NO: 61891 - DNA, 25 bp, Saccharomyces pastorianus
catgacgtgctcttgaaccagacta

SEQ ID NO: 61892 - DNA, 25 bp, Saccharomyces pastorianus
acaacgcccatgacgtgctcttgaa

SEQ ID NO: 61893 - DNA, 25 bp, Saccharomyces pastorianus
gccacgttctctgtatcgcaagcat

SEQ ID NO: 61894 - DNA, 25 bp, Saccharomyces pastorianus
tcaggtcgcaagacgtgaggtccac

SEQ ID NO: 61895 - DNA, 25 bp, Saccharomyces pastorianus
tgaggtccactgacagagatcgtgt

SEQ ID NO: 61896 - DNA, 25 bp, Saccharomyces pastorianus
atcagtggatgcgtcttccagtgaa

SEQ ID NO: 61897 - DNA, 25 bp, Saccharomyces pastorianus
gaggtcgctgaccaatctacagagg

SEQ ID NO: 61898 - DNA, 25 bp, Saccharomyces pastorianus
tcgcaagcatcatctgacctaggtg

SEQ ID NO: 61899 - DNA, 25 bp, Saccharomyces pastorianus
aagttttgtcgctaggtgatggtac

SEQ ID NO: 61900 - DNA, 25 bp, Saccharomyces pastorianus
taactattatttaactaccgcgaga

SEQ ID NO: 61901 - DNA, 25 bp, Saccharomyces pastorianus
aataattgccgctggtggcggttcc

SEQ ID NO: 61902 - DNA, 25 bp, Saccharomyces pastorianus
atttatccgagtttcagttttgccg

SEQ ID NO: 61903 - DNA, 25 bp, Saccharomyces pastorianus
gctatcactgccaccttaattggta

SEQ ID NO: 61904 - DNA, 25 bp, Saccharomyces pastorianus
tttcaagaggtccaaagcctcggcg

SEQ ID NO: 61905 - DNA, 25 bp, Saccharomyces pastorianus
taagcgaagtcgatttaagaggtac

SEQ ID NO: 61906 - DNA, 25 bp, Saccharomyces pastorianus
taggtttaagcgaagtcgatttaag

SEQ ID NO: 61907 - DNA, 25 bp, Saccharomyces pastorianus
tcaagaggtccaaagcctcggcggt

SEQ ID NO: 61908 - DNA, 25 bp, Saccharomyces pastorianus
ggtccaaagcctcggcggtattgta

SEQ ID NO: 61909 - DNA, 25 bp, Saccharomyces pastorianus
aggtccaaagcctcggcggtattgt

SEQ ID NO: 61910 - DNA, 25 bp, Saccharomyces pastorianus
attgtaggtttaagcgaagtcgatt

SEQ ID NO: 61911 - DNA, 25 bp, Saccharomyces pastorianus
caagaggtccaaagcctcggcggta

SEQ ID NO: 61912 - DNA, 25 bp, Saccharomyces pastorianus
tattgtaggtttaagcgaagtcgat

SEQ ID NO: 61913 - DNA, 25 bp, Saccharomyces pastorianus
aagaggtccaaagcctcggcggtat

SEQ ID NO: 61914 - DNA, 25 bp, Saccharomyces pastorianus
aagcgaagtcgatttaagaggtact

SEQ ID NO: 61915 - DNA, 25 bp, Saccharomyces pastorianus
cgatgctcattggtgttctaatcaa

SEQ ID NO: 61916 - DNA, 25 bp, Saccharomyces pastorianus
gcatatgcagcattctaaattccgc

SEQ ID NO: 61917 - DNA, 25 bp, Saccharomyces pastorianus
gatatcggtgcaatacttccacaca

SEQ ID NO: 61918 - DNA, 25 bp, Saccharomyces pastorianus
aagctagaagtcatgggatccacca

SEQ ID NO: 61919 - DNA, 25 bp, Saccharomyces pastorianus
cctcatcgctttactttttcggata

SEQ ID NO: 61920 - DNA, 25 bp, Saccharomyces pastorianus
tcagccagctgtagaagacaccttt

SEQ ID NO: 61921 - DNA, 25 bp, Saccharomyces pastorianus
tttgatcctcatatttctcagccag

SEQ ID NO: 61922 - DNA, 25 bp, Saccharomyces pastorianus
cagagatggatccttcgatgctcat

SEQ ID NO: 61923 - DNA, 25 bp, Saccharomyces pastorianus
gatggcttccaagacattcattgca

SEQ ID NO: 61924 - DNA, 25 bp, Saccharomyces pastorianus
aaattccgcatgctcagtaggtatt

SEQ ID NO: 61925 - DNA, 25 bp, Saccharomyces pastorianus
gggatccaccattatcaatatactt

SEQ ID NO: 61926 - DNA, 25 bp, Saccharomyces pastorianus
tacttatccttatgtgacttcctcg

SEQ ID NO: 61927 - DNA, 25 bp, Saccharomyces pastorianus
gtcgtcttgaaatactctactctga

SEQ ID NO: 61928 - DNA, 25 bp, Saccharomyces pastorianus
ttagacgttctagataccttcaaag

SEQ ID NO: 61929 - DNA, 25 bp, Saccharomyces pastorianus
ggtggaggtccatttccaacagaac

SEQ ID NO: 61930 - DNA, 25 bp, Saccharomyces pastorianus
gacttcctcgagtactggtattggt

SEQ ID NO: 61931 - DNA, 25 bp, Saccharomyces pastorianus
aggtatttcgtattctatccaaggt

SEQ ID NO: 61932 - DNA, 25 bp, Saccharomyces pastorianus
tcttacagggttaggtattcctcca

SEQ ID NO: 61933 - DNA, 25 bp, Saccharomyces pastorianus
tactggtcgaaggtgctaatgcttt

SEQ ID NO: 61934 - DNA, 25 bp, Saccharomyces pastorianus
ctctactctgatcaacggttacaca

SEQ ID NO: 61935 - DNA, 25 bp, Saccharomyces pastorianus
taagcgtcgttgtggttggttagat

SEQ ID NO: 61936 - DNA, 25 bp, Saccharomyces pastorianus
acgatcggcgctgaattcggtgtca

SEQ ID NO: 61937 - DNA, 25 bp, Saccharomyces pastorianus
tatgacattgtagctcgttgtgcag

SEQ ID NO: 61938 - DNA, 25 bp, Saccharomyces pastorianus
taaatatgacattgtagctcgttgt

SEQ ID NO: 61939 - DNA, 25 bp, Saccharomyces pastorianus
aaatatgacattgtagctcgttgtg

SEQ ID NO: 61940 - DNA, 25 bp, Saccharomyces pastorianus
ggaaaattggtcgatttactggttg

SEQ ID NO: 61941 - DNA, 25 bp, Saccharomyces pastorianus
tggttaccgttgtattaggctccca

SEQ ID NO: 61942 - DNA, 25 bp, Saccharomyces pastorianus
atgacattgtagctcgttgtgcagg

SEQ ID NO: 61943 - DNA, 25 bp, Saccharomyces pastorianus
gaaaattggtcgatttactggttgg

SEQ ID NO: 61944 - DNA, 25 bp, Saccharomyces pastorianus
atatgacattgtagctcgttgtgca

SEQ ID NO: 61945 - DNA, 25 bp, Saccharomyces pastorianus
agctcgttgtgcagggggtaacaat

SEQ ID NO: 61946 - DNA, 25 bp, Saccharomyces pastorianus
tgacattgtagctcgttgtgcaggg

SEQ ID NO: 61947 - DNA, 25 bp, Saccharomyces pastorianus
aatatgacattgtagctcgttgtgc

SEQ ID NO: 61948 - DNA, 25 bp, Saccharomyces pastorianus
actaatttcgggtgatctgtactca

SEQ ID NO: 61949 - DNA, 25 bp, Saccharomyces pastorianus
gagagatttcatactcaccaaagag

SEQ ID NO: 61950 - DNA, 25 bp, Saccharomyces pastorianus
atatgcctgccgagatttatcttaa

SEQ ID NO: 61951 - DNA, 25 bp, Saccharomyces pastorianus
acgcaagtcaccttcctgattggaa

SEQ ID NO: 61952 - DNA, 25 bp, Saccharomyces pastorianus
ctccaagaggagttttctcagctat

SEQ ID NO: 61953 - DNA, 25 bp, Saccharomyces pastorianus
gaaagctgcttttacactcatcatg

SEQ ID NO: 61954 - DNA, 25 bp, Saccharomyces pastorianus
ctgtactcagttgcactagccatta

SEQ ID NO: 61955 - DNA, 25 bp, Saccharomyces pastorianus
ggaagcactacctcaaagctcgaga

SEQ ID NO: 61956 - DNA, 25 bp, Saccharomyces pastorianus
tcatcatgacaaccgcttgcgtatt

SEQ ID NO: 61957 - DNA, 25 bp, Saccharomyces pastorianus
tttcatcctgaaaccgtccaacaaa

SEQ ID NO: 61958 - DNA, 25 bp, Saccharomyces pastorianus
tggaatagtcgatatatgcctgccg

SEQ ID NO: 61959 - DNA, 25 bp, Saccharomyces pastorianus
gcaaatcgaagacgcttctactgat

SEQ ID NO: 61960 - DNA, 25 bp, Saccharomyces pastorianus
aagacgcttctactgatgaattgag

SEQ ID NO: 61961 - DNA, 25 bp, Saccharomyces pastorianus
gaagacgcttctactgatgaattga

SEQ ID NO: 61962 - DNA, 25 bp, Saccharomyces pastorianus
aatcgaagacgcttctactgatgaa

SEQ ID NO: 61963 - DNA, 25 bp, Saccharomyces pastorianus
tgcaaatcgaagacgcttctactga

SEQ ID NO: 61964 - DNA, 25 bp, Saccharomyces pastorianus
ttgcaaatcgaagacgcttctactg

SEQ ID NO: 61965 - DNA, 25 bp, Saccharomyces pastorianus
aaatcgaagacgcttctactgatga

SEQ ID NO: 61966 - DNA, 25 bp, Saccharomyces pastorianus
agacgcttctactgatgaattgaga

SEQ ID NO: 61967 - DNA, 25 bp, Saccharomyces pastorianus
cgaagacgcttctactgatgaattg

SEQ ID NO: 61968 - DNA, 25 bp, Saccharomyces pastorianus
gacgcttctactgatgaattgagaa

SEQ ID NO: 61969 - DNA, 25 bp, Saccharomyces pastorianus
tcgaagacgcttctactgatgaatt

SEQ ID NO: 61970 - DNA, 25 bp, Saccharomyces pastorianus
cacttccgatgaaaccaaggacttg

SEQ ID NO: 61971 - DNA, 25 bp, Saccharomyces pastorianus
gaattcgacctaagaggtatcccaa

SEQ ID NO: 61972 - DNA, 25 bp, Saccharomyces pastorianus
tgaccggtcaatccacttccgatga

SEQ ID NO: 61973 - DNA, 25 bp, Saccharomyces pastorianus
aatccacttccgatgaaaccaagga

SEQ ID NO: 61974 - DNA, 25 bp, Saccharomyces pastorianus
tatcttgaccggtcaatccacttcc

SEQ ID NO: 61975 - DNA, 25 bp, Saccharomyces pastorianus
cctaagaggtatcccaatgatgcca

SEQ ID NO: 61976 - DNA, 25 bp, Saccharomyces pastorianus
accggtcaatccacttccgatgaaa

SEQ ID NO: 61977 - DNA, 25 bp, Saccharomyces pastorianus
ggtcaatccacttccgatgaaacca

SEQ ID NO: 61978 - DNA, 25 bp, Saccharomyces pastorianus
ttgggtgaattcgacctaagaggta

SEQ ID NO: 61979 - DNA, 25 bp, Saccharomyces pastorianus
gacctaagaggtatcccaatgatgc

SEQ ID NO: 61980 - DNA, 25 bp, Saccharomyces pastorianus
gtcaatccacttccgatgaaaccaa

SEQ ID NO: 61981 - DNA, 25 bp, Saccharomyces pastorianus
actttcaccacttgcggtgacaacc

SEQ ID NO: 61982 - DNA, 25 bp, Saccharomyces pastorianus
agaactttcaccacttgcggtgaca

SEQ ID NO: 61983 - DNA, 25 bp, Saccharomyces pastorianus
ttctaacattaccatttccaacgct

SEQ ID NO: 61984 - DNA, 25 bp, Saccharomyces pastorianus
aagaactttcaccacttgcggtgac

SEQ ID NO: 61985 - DNA, 25 bp, Saccharomyces pastorianus
gaagaactttcaccacttgcggtga

SEQ ID NO: 61986 - DNA, 25 bp, Saccharomyces pastorianus
gagaagaactttcaccacttgcggt

SEQ ID NO: 61987 - DNA, 25 bp, Saccharomyces pastorianus
gttactgccatcgaaaagtccactg

SEQ ID NO: 61988 - DNA, 25 bp, Saccharomyces pastorianus
aactttcaccacttgcggtgacaac

SEQ ID NO: 61989 - DNA, 25 bp, Saccharomyces pastorianus
ttcaccacttgcggtgacaaccaaa

SEQ ID NO: 61990 - DNA, 25 bp, Saccharomyces pastorianus
gtcaatccacttccgatgaaaccaa

SEQ ID NO: 61991 - DNA, 25 bp, Saccharomyces pastorianus
gaactttcaccacttgcggtgacaa

SEQ ID NO: 61992 - DNA, 25 bp, Saccharomyces pastorianus
gcgtatgctgggtcgaaggtctcaa

SEQ ID NO: 61993 - DNA, 25 bp, Saccharomyces pastorianus
atctggaggctcttacgacaacaac

SEQ ID NO: 61994 - DNA, 25 bp, Saccharomyces pastorianus
ggtccacaaagtttcggcgggccag

SEQ ID NO: 61995 - DNA, 25 bp, Saccharomyces pastorianus
ggtcctcaaggtttcggtggcccag

SEQ ID NO: 61996 - DNA, 25 bp, Saccharomyces pastorianus
taggtggtgcgttcctagcgaacaa

SEQ ID NO: 61997 - DNA, 25 bp, Saccharomyces pastorianus
ttatggcggatccaatcatcaccag

SEQ ID NO: 61998 - DNA, 25 bp, Saccharomyces pastorianus
tacacaagatttcggtggcccaggt

SEQ ID NO: 61999 - DNA, 25 bp, Saccharomyces pastorianus
ggccagcaaggcaactctaattatg

SEQ ID NO: 62000 - DNA, 25 bp, Saccharomyces pastorianus
gagaacgtggtctgttttctaccct

SEQ ID NO: 62001 - DNA, 25 bp, Saccharomyces pastorianus
gcggccaaggctttggtggtccaaa

SEQ ID NO: 62002 - DNA, 25 bp, Saccharomyces pastorianus
gattcggaggcccaggtacacaaga

SEQ ID NO: 62003 - DNA, 25 bp, Saccharomyces pastorianus
atttacccttgccagtattctcttg

SEQ ID NO: 62004 - DNA, 25 bp, Saccharomyces pastorianus
ttacaagtgcctcaagtacgctgac

SEQ ID NO: 62005 - DNA, 25 bp, Saccharomyces pastorianus
agacgcgctgcacaaatcatatgaa

SEQ ID NO: 62006 - DNA, 25 bp, Saccharomyces pastorianus
aagctggctgttactttcagacgcg

SEQ ID NO: 62007 - DNA, 25 bp, Saccharomyces pastorianus
aaagcgcttggaactcgcaatttcc

SEQ ID NO: 62008 - DNA, 25 bp, Saccharomyces pastorianus
gtacgctgaccatcgaaaaattcca

SEQ ID NO: 62009 - DNA, 25 bp, Saccharomyces pastorianus
aacattatcaattcagagggcgctg

SEQ ID NO: 62010 - DNA, 25 bp, Saccharomyces pastorianus
ttccgaaccgtttgagatcccgaga

SEQ ID NO: 62011 - DNA, 25 bp, Saccharomyces pastorianus
gggcgctgaatttgtactaccggat

SEQ ID NO: 62012 - DNA, 25 bp, Saccharomyces pastorianus
ttcatgagatgtcccatttaccctt

SEQ ID NO: 62013 - DNA, 25 bp, Saccharomyces pastorianus
gacttcaaaggcacgatcgtccagc

SEQ ID NO: 62014 - DNA, 25 bp, Saccharomyces pastorianus
gtttcttcgagctttggtatattca

SEQ ID NO: 62015 - DNA, 25 bp, Saccharomyces pastorianus
gattgctatgtgctaagaaagtcgc

SEQ ID NO: 62016 - DNA, 25 bp, Saccharomyces pastorianus
gcaaacttgttctatgtaaaatcta

SEQ ID NO: 62017 - DNA, 25 bp, Saccharomyces pastorianus
agtcgcaggcaataacaagtgcttt

SEQ ID NO: 62018 - DNA, 25 bp, Saccharomyces pastorianus
gtaaaatctatcacaatggacagct

SEQ ID NO: 62019 - DNA, 25 bp, Saccharomyces pastorianus
cacaatttgtttcttcgagctttgg

SEQ ID NO: 62020 - DNA, 25 bp, Saccharomyces pastorianus
atcacaatggacagctttgaagaaa

SEQ ID NO: 62021 - DNA, 25 bp, Saccharomyces pastorianus
tcgagctttggtatattcatttgtg

SEQ ID NO: 62022 - DNA, 25 bp, Saccharomyces pastorianus
gaggtttagatgcaaacttgttcta

SEQ ID NO: 62023 - DNA, 25 bp, Saccharomyces pastorianus
catttgtgtcaattgcgcaaacctt

SEQ ID NO: 62024 - DNA, 25 bp, Saccharomyces pastorianus
atcgaaagagattgctatgtgctaa

SEQ ID NO: 62025 - DNA, 25 bp, Saccharomyces pastorianus
gagaggtttgcgaaatcgcagacaa

SEQ ID NO: 62026 - DNA, 25 bp, Saccharomyces pastorianus
aaattgccagcagcgccggcaataa

SEQ ID NO: 62027 - DNA, 25 bp, Saccharomyces pastorianus
agacaaaattgccagcagcgccggc

SEQ ID NO: 62028 - DNA, 25 bp, Saccharomyces pastorianus
gcatttggagagaggtttgcgaaat

SEQ ID NO: 62029 - DNA, 25 bp, Saccharomyces pastorianus
atcgcagacaaaattgccagcagcg

SEQ ID NO: 62030 - DNA, 25 bp, Saccharomyces pastorianus
aaaattgccagcagcgccggcaata

SEQ ID NO: 62031 - DNA, 25 bp, Saccharomyces pastorianus
gaggtttgcgaaatcgcagacaaaa

SEQ ID NO: 62032 - DNA, 25 bp, Saccharomyces pastorianus
cagcagcgccggcaataacaaaatc

SEQ ID NO: 62033 - DNA, 25 bp, Saccharomyces pastorianus
agcagcgccggcaataacaaaatct

SEQ ID NO: 62034 - DNA, 25 bp, Saccharomyces pastorianus
gacaaaattgccagcagcgccggca

SEQ ID NO: 62035 - DNA, 25 bp, Saccharomyces pastorianus
gcagacaaaattgccagcagcgccg

SEQ ID NO: 62036 - DNA, 25 bp, Saccharomyces pastorianus
gattacattcagagattgagcattt

SEQ ID NO: 62037 - DNA, 25 bp, Saccharomyces pastorianus
gtttcagtaaatataccatcagacg

SEQ ID NO: 62038 - DNA, 25 bp, Saccharomyces pastorianus
agcattcaagtttagaaaacggcct

SEQ ID NO: 62039 - DNA, 25 bp, Saccharomyces pastorianus
atcctcattattccggtgaccagtt

SEQ ID NO: 62040 - DNA, 25 bp, Saccharomyces pastorianus
ggccttgaaggcgaaaatgatgttt

SEQ ID NO: 62041 - DNA, 25 bp, Saccharomyces pastorianus
ttccggtgaccagttagcatttaag

SEQ ID NO: 62042 - DNA, 25 bp, Saccharomyces pastorianus
taccatcagacggattggcttctaa

SEQ ID NO: 62043 - DNA, 25 bp, Saccharomyces pastorianus
gagcattttgacaatgatcctcatt

SEQ ID NO: 62044 - DNA, 25 bp, Saccharomyces pastorianus
gacggattggcttctaatcatttag

SEQ ID NO: 62045 - DNA, 25 bp, Saccharomyces pastorianus
aagtcaatcagagcattcaagttta

SEQ ID NO: 62046 - DNA, 25 bp, Saccharomyces pastorianus
aatgatcctcattattccggtgacc

SEQ ID NO: 62047 - DNA, 25 bp, Saccharomyces pastorianus
tggtgccttgataaatgacggtaca

SEQ ID NO: 62048 - DNA, 25 bp, Saccharomyces pastorianus
caacgtcaagagactcagtggctaa

SEQ ID NO: 62049 - DNA, 25 bp, Saccharomyces pastorianus
aagcctacgactctattgtttctga

SEQ ID NO: 62050 - DNA, 25 bp, Saccharomyces pastorianus
gggaattagaattacaacgtcaaga

SEQ ID NO: 62051 - DNA, 25 bp, Saccharomyces pastorianus
gacggtacagataccaatctaaaca

SEQ ID NO: 62052 - DNA, 25 bp, Saccharomyces pastorianus
tacgccctttgaaagaagcctacga

SEQ ID NO: 62053 - DNA, 25 bp, Saccharomyces pastorianus
gaagaactcttacaactaacaaaca

SEQ ID NO: 62054 - DNA, 25 bp, Saccharomyces pastorianus
atattgcaccaattgacacagaagc

SEQ ID NO: 62055 - DNA, 25 bp, Saccharomyces pastorianus
caataacaacaagcgatggtgcctt

SEQ ID NO: 62056 - DNA, 25 bp, Saccharomyces pastorianus
gaaagttgacctaaatcctccaaat

SEQ ID NO: 62057 - DNA, 25 bp, Saccharomyces pastorianus
acagaagcggtaatacgccctttga

SEQ ID NO: 62058 - DNA, 25 bp, Saccharomyces pastorianus
gatagatctacctctccaaaatcgg

SEQ ID NO: 62059 - DNA, 25 bp, Saccharomyces pastorianus
atggaatttacacgcaggcccaata

SEQ ID NO: 62060 - DNA, 25 bp, Saccharomyces pastorianus
gaatgcatcaaccagccgaaccaaa

SEQ ID NO: 62061 - DNA, 25 bp, Saccharomyces pastorianus
aatgctacgctatcatcaggttcaa

SEQ ID NO: 62062 - DNA, 25 bp, Saccharomyces pastorianus
gaggccagtccttacgcaaagtatt

SEQ ID NO: 62063 - DNA, 25 bp, Saccharomyces pastorianus
gcgagcactagtacggcgtccaatg

SEQ ID NO: 62064 - DNA, 25 bp, Saccharomyces pastorianus
ttcgatccgcaaactggccaaattt

SEQ ID NO: 62065 - DNA, 25 bp, Saccharomyces pastorianus
aagggttccccatcagagttacaag

SEQ ID NO: 62066 - DNA, 25 bp, Saccharomyces pastorianus
gaactaagctttgaggccagtcctt

SEQ ID NO: 62067 - DNA, 25 bp, Saccharomyces pastorianus
aatacatctactaagggttccccat

SEQ ID NO: 62068 - DNA, 25 bp, Saccharomyces pastorianus
agtatattcaccgtgttcgatccgc

SEQ ID NO: 62069 - DNA, 25 bp, Saccharomyces pastorianus
tgaccaataatggatcacattcatg

SEQ ID NO: 62070 - DNA, 25 bp, Saccharomyces pastorianus
ctacaatacaatgaccaataatgga

SEQ ID NO: 62071 - DNA, 25 bp, Saccharomyces pastorianus
gaccaataatggatcacattcatgg

SEQ ID NO: 62072 - DNA, 25 bp, Saccharomyces pastorianus
tgggctacaatacaatgaccaataa

SEQ ID NO: 62073 - DNA, 25 bp, Saccharomyces pastorianus
tacaatacaatgaccaataatggat

SEQ ID NO: 62074 - DNA, 25 bp, Saccharomyces pastorianus
gctacaatacaatgaccaataatgg

SEQ ID NO: 62075 - DNA, 25 bp, Saccharomyces pastorianus
ggctacaatacaatgaccaataatg

SEQ ID NO: 62076 - DNA, 25 bp, Saccharomyces pastorianus
aatgaccaataatggatcacattca

SEQ ID NO: 62077 - DNA, 25 bp, Saccharomyces pastorianus
atgggctacaatacaatgaccaata

SEQ ID NO: 62078 - DNA, 25 bp, Saccharomyces pastorianus
gggctacaatacaatgaccaataat

SEQ ID NO: 62079 - DNA, 25 bp, Saccharomyces pastorianus
atgaccaataatggatcacattcat

SEQ ID NO: 62080 - DNA, 25 bp, Saccharomyces pastorianus
gacaattacctcgttctacagtaag

SEQ ID NO: 62081 - DNA, 25 bp, Saccharomyces pastorianus
actattggcgagaattccaccacct

SEQ ID NO: 62082 - DNA, 25 bp, Saccharomyces pastorianus
caccctgtaataccctttatgtcgg

SEQ ID NO: 62083 - DNA, 25 bp, Saccharomyces pastorianus
tattacagggtctgcttcgatctct

SEQ ID NO: 62084 - DNA, 25 bp, Saccharomyces pastorianus
gggaatttaccatcagacgctactg

SEQ ID NO: 62085 - DNA, 25 bp, Saccharomyces pastorianus
cgatgatgttagctttgcgacgaga

SEQ ID NO: 62086 - DNA, 25 bp, Saccharomyces pastorianus
agccatggcccaatgtgttttgttg

SEQ ID NO: 62087 - DNA, 25 bp, Saccharomyces pastorianus
gatctctcgggctgatttatcacta

SEQ ID NO: 62088 - DNA, 25 bp, Saccharomyces pastorianus
gcgacgagagcattagccgaattgt

SEQ ID NO: 62089 - DNA, 25 bp, Saccharomyces pastorianus
caggaaggtttcagacggttgtcat

SEQ ID NO: 62090 - DNA, 25 bp, Saccharomyces pastorianus
gttcctccagcaagactaagttcaa

SEQ ID NO: 62091 - DNA, 25 bp, Saccharomyces pastorianus
tgtcgagtaccacgaatacccacaa

SEQ ID NO: 62092 - DNA, 25 bp, Saccharomyces pastorianus
gaagcggcagtggagatttgtattt

SEQ ID NO: 62093 - DNA, 25 bp, Saccharomyces pastorianus
ggacatggcacgtaacaacagtaac

SEQ ID NO: 62094 - DNA, 25 bp, Saccharomyces pastorianus
atacccacaatatttctcctagtca

SEQ ID NO: 62095 - DNA, 25 bp, Saccharomyces pastorianus
gcaatacatcatgccacaggacatg

SEQ ID NO: 62096 - DNA, 25 bp, Saccharomyces pastorianus
cttgcccacgatgcgtccggtaggg

SEQ ID NO: 62097 - DNA, 25 bp, Saccharomyces pastorianus
gaatctgaacaattctgcccttgcc

SEQ ID NO: 62098 - DNA, 25 bp, Saccharomyces pastorianus
gctaaatacacttgcccttggcaat

SEQ ID NO: 62099 - DNA, 25 bp, Saccharomyces pastorianus
ttcacctttagcgatatcctctatg

SEQ ID NO: 62100 - DNA, 25 bp, Saccharomyces pastorianus
aatgacactattcagggcagttact

SEQ ID NO: 62101 - DNA, 25 bp, Saccharomyces pastorianus
tatttctcctagtcatcgttctagt

SEQ ID NO: 62102 - DNA, 25 bp, Saccharomyces pastorianus
aaacttctccagctagagacagaat

SEQ ID NO: 62103 - DNA, 25 bp, Saccharomyces pastorianus
aggactacaactactgtgcacgaag

SEQ ID NO: 62104 - DNA, 25 bp, Saccharomyces pastorianus
gcacgaagggtcaactgcattccgt

SEQ ID NO: 62105 - DNA, 25 bp, Saccharomyces pastorianus
accggtcaacaagtggcccgctggt

SEQ ID NO: 62106 - DNA, 25 bp, Saccharomyces pastorianus
gagtgtgatcacaggactacaacta

SEQ ID NO: 62107 - DNA, 25 bp, Saccharomyces pastorianus
atccctagtagaccagaatcaaaga

SEQ ID NO: 62108 - DNA, 25 bp, Saccharomyces pastorianus
gtaaccggtcaacaagtggcccgct

SEQ ID NO: 62109 - DNA, 25 bp, Saccharomyces pastorianus
gaggtaaaaaacttctccagctaga

SEQ ID NO: 62110 - DNA, 25 bp, Saccharomyces pastorianus
gggtcaactgcattccgtaaacggg

SEQ ID NO: 62111 - DNA, 25 bp, Saccharomyces pastorianus
cgccacatccctagtagaccagaat

SEQ ID NO: 62112 - DNA, 25 bp, Saccharomyces pastorianus
aactactgtgcacgaagggtcaact

SEQ ID NO: 62113 - DNA, 25 bp, Saccharomyces pastorianus
gtccagctgtcggaactttttaacg

SEQ ID NO: 62114 - DNA, 25 bp, Saccharomyces pastorianus
taatgcgactacaatctcctcagtt

SEQ ID NO: 62115 - DNA, 25 bp, Saccharomyces pastorianus
gacctttgaatgtccagctgtcgga

SEQ ID NO: 62116 - DNA, 25 bp, Saccharomyces pastorianus
gttaccagcaacaagggagtttcgt

SEQ ID NO: 62117 - DNA, 25 bp, Saccharomyces pastorianus
gaatacctcttttttacaggacaca

SEQ ID NO: 62118 - DNA, 25 bp, Saccharomyces pastorianus
gagttcacctcatgggaacgtcggt

SEQ ID NO: 62119 - DNA, 25 bp, Saccharomyces pastorianus
gtttcaaagaaccacattcgccaag

SEQ ID NO: 62120 - DNA, 25 bp, Saccharomyces pastorianus
attcgccaagtggttctcacaactt

SEQ ID NO: 62121 - DNA, 25 bp, Saccharomyces pastorianus
gaacgtcggtggtcaaattgtagta

SEQ ID NO: 62122 - DNA, 25 bp, Saccharomyces pastorianus
tggttctcacaactttccggacgaa

SEQ ID NO: 62123 - DNA, 25 bp, Saccharomyces pastorianus
aagctattcaaacatatggaccttt

SEQ ID NO: 62124 - DNA, 25 bp, Saccharomyces pastorianus
aattccgcttctttgtatactgttc

SEQ ID NO: 62125 - DNA, 25 bp, Saccharomyces pastorianus
gaccaacgtattccaggtgcaggtt

SEQ ID NO: 62126 - DNA, 25 bp, Saccharomyces pastorianus
gttaaatactggtgctggcgccgtt

SEQ ID NO: 62127 - DNA, 25 bp, Saccharomyces pastorianus
aagaatctgcccgttggttgccaaa

SEQ ID NO: 62128 - DNA, 25 bp, Saccharomyces pastorianus
taaagcggatccttcatcggttgaa

SEQ ID NO: 62129 - DNA, 25 bp, Saccharomyces pastorianus
tgccgcacttcgatggttctatgga

SEQ ID NO: 62130 - DNA, 25 bp, Saccharomyces pastorianus
ggttgccaaaacacatctatgccgc

SEQ ID NO: 62131 - DNA, 25 bp, Saccharomyces pastorianus
taaggtagtttctgaccgcgacaat

SEQ ID NO: 62132 - DNA, 25 bp, Saccharomyces pastorianus
aagtgagcctcaccatattgacgcg

SEQ ID NO: 62133 - DNA, 25 bp, Saccharomyces pastorianus
agacattccatctgctactcaaaga

SEQ ID NO: 62134 - DNA, 25 bp, Saccharomyces pastorianus
aagtgaatgttctggtcccacgtta

SEQ ID NO: 62135 - DNA, 25 bp, Saccharomyces pastorianus
gtaaagcgtcgatttactttaatgt

SEQ ID NO: 62136 - DNA, 25 bp, Saccharomyces pastorianus
gttggtggcattatctgcattgata

SEQ ID NO: 62137 - DNA, 25 bp, Saccharomyces pastorianus
actatggttggtggcattatctgca

SEQ ID NO: 62138 - DNA, 25 bp, Saccharomyces pastorianus
taatgtaatactatggttggtggca

SEQ ID NO: 62139 - DNA, 25 bp, Saccharomyces pastorianus
ggtggcattatctgcattgataaga

SEQ ID NO: 62140 - DNA, 25 bp, Saccharomyces pastorianus
tatggttggtggcattatctgcatt

SEQ ID NO: 62141 - DNA, 25 bp, Saccharomyces pastorianus
aagcgtcgatttactttaatgtaat

SEQ ID NO: 62142 - DNA, 25 bp, Saccharomyces pastorianus
tggttggtggcattatctgcattga

SEQ ID NO: 62143 - DNA, 25 bp, Saccharomyces pastorianus
gatttattggttgttcattctatat

SEQ ID NO: 62144 - DNA, 25 bp, Saccharomyces pastorianus
gataagatttattggttgttcattc

SEQ ID NO: 62145 - DNA, 25 bp, Saccharomyces pastorianus
tggttgttcattctatatgattgtc

SEQ ID NO: 62146 - DNA, 25 bp, Saccharomyces pastorianus
ggttccacttactgtctgtacttga

SEQ ID NO: 62147 - DNA, 25 bp, Saccharomyces pastorianus
gagtgtcaaatctttccaaaatatt

SEQ ID NO: 62148 - DNA, 25 bp, Saccharomyces pastorianus
gattactacagaagcctttagagat

SEQ ID NO: 62149 - DNA, 25 bp, Saccharomyces pastorianus
aagcccttcgtatatcaatgttttg

SEQ ID NO: 62150 - DNA, 25 bp, Saccharomyces pastorianus
gtctgtacttgatcagctcaatcat

SEQ ID NO: 62151 - DNA, 25 bp, Saccharomyces pastorianus
atcatttatttacagccatggcata

SEQ ID NO: 62152 - DNA, 25 bp, Saccharomyces pastorianus
gaaaaattttatgtcttaacttgcg

SEQ ID NO: 62153 - DNA, 25 bp, Saccharomyces pastorianus
attgttatttcattgggttccactt

SEQ ID NO: 62154 - DNA, 25 bp, Saccharomyces pastorianus
gcaatacattttgttaagcccttcg

SEQ ID NO: 62155 - DNA, 25 bp, Saccharomyces pastorianus
tatcgacattcatactttcattggg

SEQ ID NO: 62156 - DNA, 25 bp, Saccharomyces pastorianus
gcattttgcaatgttcatgacttgt

SEQ ID NO: 62157 - DNA, 25 bp, Saccharomyces pastorianus
agtgttattccttctgtcattttta

SEQ ID NO: 62158 - DNA, 25 bp, Saccharomyces pastorianus
ttggttgaatggttcgtttttcgcg

SEQ ID NO: 62159 - DNA, 25 bp, Saccharomyces pastorianus
ttcgtttttcgcgagtgttattcct

SEQ ID NO: 62160 - DNA, 25 bp, Saccharomyces pastorianus
gcgagtgttattccttctgtcattt

SEQ ID NO: 62161 - DNA, 25 bp, Saccharomyces pastorianus
atggttcgtttttcgcgagtgttat

SEQ ID NO: 62162 - DNA, 25 bp, Saccharomyces pastorianus
gatgttccagatagggttccagagt

SEQ ID NO: 62163 - DNA, 25 bp, Saccharomyces pastorianus
tatacagatgttccagatagggttc

SEQ ID NO: 62164 - DNA, 25 bp, Saccharomyces pastorianus
ttttcgcgagtgttattccttctgt

SEQ ID NO: 62165 - DNA, 25 bp, Saccharomyces pastorianus
tccagatagggttccagagtttatt

SEQ ID NO: 62166 - DNA, 25 bp, Saccharomyces pastorianus
gaatggttcgtttttcgcgagtgtt

SEQ ID NO: 62167 - DNA, 25 bp, Saccharomyces pastorianus
tcgcgagtgttattccttctgtcat

SEQ ID NO: 62168 - DNA, 25 bp, Saccharomyces pastorianus
gaagcgcatatctataccggctcgc

SEQ ID NO: 62169 - DNA, 25 bp, Saccharomyces pastorianus
caagaactttcctttgcagctgtac

SEQ ID NO: 62170 - DNA, 25 bp, Saccharomyces pastorianus
aacgggcggtacgtgtatgtcacta

SEQ ID NO: 62171 - DNA, 25 bp, Saccharomyces pastorianus
gaagccgtgtggatgcaccgcagca

SEQ ID NO: 62172 - DNA, 25 bp, Saccharomyces pastorianus
aagaggacccttactgtgcggtagc

SEQ ID NO: 62173 - DNA, 25 bp, Saccharomyces pastorianus
tggatgcgacacacgggctgagtat

SEQ ID NO: 62174 - DNA, 25 bp, Saccharomyces pastorianus
gaaggcacagcatcatctcgtgttt

SEQ ID NO: 62175 - DNA, 25 bp, Saccharomyces pastorianus
taagatcagtgtctacgaccgccgg

SEQ ID NO: 62176 - DNA, 25 bp, Saccharomyces pastorianus
gtagctacgctaatgaactgttcct

SEQ ID NO: 62177 - DNA, 25 bp, Saccharomyces pastorianus
tttgcagctgtactccgtgatggac

SEQ ID NO: 62178 - DNA, 25 bp, Saccharomyces pastorianus
ggacagtgcgttgcgaccttcgaca

SEQ ID NO: 62179 - DNA, 25 bp, Saccharomyces pastorianus
aatccttgccccatccgtcaaggac

SEQ ID NO: 62180 - DNA, 25 bp, Saccharomyces pastorianus
tcgaaccaaaggaagaagacccaat

SEQ ID NO: 62181 - DNA, 25 bp, Saccharomyces pastorianus
ccgtcaaggactacagaccagctga

SEQ ID NO: 62182 - DNA, 25 bp, Saccharomyces pastorianus
atgctgtaacgatcatcgaaccaaa

SEQ ID NO: 62183 - DNA, 25 bp, Saccharomyces pastorianus
taacgatcatcgaaccaaaggaaga

SEQ ID NO: 62184 - DNA, 25 bp, Saccharomyces pastorianus
gatgctgtaacgatcatcgaaccaa

SEQ ID NO: 62185 - DNA, 25 bp, Saccharomyces pastorianus
gaagaagacccaatccttgccccat

SEQ ID NO: 62186 - DNA, 25 bp, Saccharomyces pastorianus
ggaagaagacccaatccttgcccca

SEQ ID NO: 62187 - DNA, 25 bp, Saccharomyces pastorianus
acgatcatcgaaccaaaggaagaag

SEQ ID NO: 62188 - DNA, 25 bp, Saccharomyces pastorianus
ccagatgctgtaacgatcatcgaac

SEQ ID NO: 62189 - DNA, 25 bp, Saccharomyces pastorianus
gctgtaacgatcatcgaaccaaagg

SEQ ID NO: 62190 - DNA, 25 bp, Saccharomyces pastorianus
tgtcgaagtccgtgttactccaact

SEQ ID NO: 62191 - DNA, 25 bp, Saccharomyces pastorianus
cgttgtttctggtaaactaagagct

SEQ ID NO: 62192 - DNA, 25 bp, Saccharomyces pastorianus
gttactccaactaagactgaagtca

SEQ ID NO: 62193 - DNA, 25 bp, Saccharomyces pastorianus
accagtcaacgactttattgatgtt

SEQ ID NO: 62194 - DNA, 25 bp, Saccharomyces pastorianus
taagactgaagtcatcatcagagct

SEQ ID NO: 62195 - DNA, 25 bp, Saccharomyces pastorianus
taagggttgtgaagtcgttgtttct

SEQ ID NO: 62196 - DNA, 25 bp, Saccharomyces pastorianus
aagctatgaagttcgctgacggttt

SEQ ID NO: 62197 - DNA, 25 bp, Saccharomyces pastorianus
acgactttattgatgttgctaccag

SEQ ID NO: 62198 - DNA, 25 bp, Saccharomyces pastorianus
tgttgctaccagacacgtcttgatg

SEQ ID NO: 62199 - DNA, 25 bp, Saccharomyces pastorianus
ttgatgttgctaccagacacgtctt

SEQ ID NO: 62200 - DNA, 25 bp, Saccharomyces pastorianus
tgtgaagtcgttgtttctggtaaac

SEQ ID NO: 62201 - DNA, 25 bp, Saccharomyces pastorianus
gcagcaaccggagcaattagcatct

SEQ ID NO: 62202 - DNA, 25 bp, Saccharomyces pastorianus
ataagtcacccttacattcacgtaa

SEQ ID NO: 62203 - DNA, 25 bp, Saccharomyces pastorianus
agcctcctttcacctttgaaaagag

SEQ ID NO: 62204 - DNA, 25 bp, Saccharomyces pastorianus
gactcgcttatgaagcatccttgaa

SEQ ID NO: 62205 - DNA, 25 bp, Saccharomyces pastorianus
gaaggctatttcacagtgtcatttt

SEQ ID NO: 62206 - DNA, 25 bp, Saccharomyces pastorianus
gcgtcacgaagcaaagactcgctta

SEQ ID NO: 62207 - DNA, 25 bp, Saccharomyces pastorianus
caattagcatctgaaagcctccttt

SEQ ID NO: 62208 - DNA, 25 bp, Saccharomyces pastorianus
cagtgatgggttttggcgaaagctc

SEQ ID NO: 62209 - DNA, 25 bp, Saccharomyces pastorianus
atacatctctcagctttggacaggc

SEQ ID NO: 62210 - DNA, 25 bp, Saccharomyces pastorianus
ggttcagttgggtgacaagcctatc

SEQ ID NO: 62211 - DNA, 25 bp, Saccharomyces pastorianus
cgaagtgctggaaccttccgtatat

SEQ ID NO: 62212 - DNA, 25 bp, Saccharomyces pastorianus
actctgcttttttcgtcttcattgt

SEQ ID NO: 62213 - DNA, 25 bp, Saccharomyces pastorianus
gggcatctttcttaacatcaccaga

SEQ ID NO: 62214 - DNA, 25 bp, Saccharomyces pastorianus
tcttcattgtctctcgtcttggaaa

SEQ ID NO: 62215 - DNA, 25 bp, Saccharomyces pastorianus
tcatcggatgcggtttctactgtaa

SEQ ID NO: 62216 - DNA, 25 bp, Saccharomyces pastorianus
ttttcttcgttgcagcatcatcgga

SEQ ID NO: 62217 - DNA, 25 bp, Saccharomyces pastorianus
gcggtttctactgtaacatctgttt

SEQ ID NO: 62218 - DNA, 25 bp, Saccharomyces pastorianus
aacaccatatttgctttcttctttt

SEQ ID NO: 62219 - DNA, 25 bp, Saccharomyces pastorianus
tggattcaccatcttgggcatcttt

SEQ ID NO: 62220 - DNA, 25 bp, Saccharomyces pastorianus
gtaacatctgttttggattcaccat

SEQ ID NO: 62221 - DNA, 25 bp, Saccharomyces pastorianus
taaatcatcttttgtagtgtcgaaa

SEQ ID NO: 62222 - DNA, 25 bp, Saccharomyces pastorianus
ttgtctctcgtcttggaaatgaaaa

SEQ ID NO: 62223 - DNA, 25 bp, Saccharomyces pastorianus
atagagctctccaagtcgatttcga

SEQ ID NO: 62224 - DNA, 25 bp, Saccharomyces pastorianus
gtcgatttcgatttcatcttcagct

SEQ ID NO: 62225 - DNA, 25 bp, Saccharomyces pastorianus
aatctgttcctcgtttttgttattg

SEQ ID NO: 62226 - DNA, 25 bp, Saccharomyces pastorianus
tttctctttttggttgggtcgagca

SEQ ID NO: 62227 - DNA, 25 bp, Saccharomyces pastorianus
gcaaagcttttttaatctgttcctc

SEQ ID NO: 62228 - DNA, 25 bp, Saccharomyces pastorianus
ttcgcttgggacttcgatttctgac

SEQ ID NO: 62229 - DNA, 25 bp, Saccharomyces pastorianus
ggatacaatttgttcgcttgggact

SEQ ID NO: 62230 - DNA, 25 bp, Saccharomyces pastorianus
taatctttccccttcttaagagacg

SEQ ID NO: 62231 - DNA, 25 bp, Saccharomyces pastorianus
ttcgcgttcaactcttccaaggtaa

SEQ ID NO: 62232 - DNA, 25 bp, Saccharomyces pastorianus
tggttgggtcgagcaaagctttttt

SEQ ID NO: 62233 - DNA, 25 bp, Saccharomyces pastorianus
tcaactcttccaaggtaatctttcc

SEQ ID NO: 62234 - DNA, 25 bp, Saccharomyces pastorianus
ggaagcacggagatatagtatatac

SEQ ID NO: 62235 - DNA, 25 bp, Saccharomyces pastorianus
tttcaataatgcctaactcctgtcc

SEQ ID NO: 62236 - DNA, 25 bp, Saccharomyces pastorianus
aatcctattcatttccaaaacaaag

SEQ ID NO: 62237 - DNA, 25 bp, Saccharomyces pastorianus
aataatgcctaactcctgtcccatt

SEQ ID NO: 62238 - DNA, 25 bp, Saccharomyces pastorianus
tatcaccaacattaaccttgaattt

SEQ ID NO: 62239 - DNA, 25 bp, Saccharomyces pastorianus
tgttaatcttaagtgtaaatccttt

SEQ ID NO: 62240 - DNA, 25 bp, Saccharomyces pastorianus
aaccttatcaccaacattaaccttg

SEQ ID NO: 62241 - DNA, 25 bp, Saccharomyces pastorianus
atgcctaactcctgtcccattttaa

SEQ ID NO: 62242 - DNA, 25 bp, Saccharomyces pastorianus
cagccaaaaaatgttaatcttaagt

SEQ ID NO: 62243 - DNA, 25 bp, Saccharomyces pastorianus
aacaaagtcttggaagcacggagat

SEQ ID NO: 62244 - DNA, 25 bp, Saccharomyces pastorianus
atctataatcctattcatttccaaa

SEQ ID NO: 62245 - DNA, 25 bp, Saccharomyces pastorianus
cgcgatattgcggatacagctggtt

SEQ ID NO: 62246 - DNA, 25 bp, Saccharomyces pastorianus
gaaccgccgcgtaatatgataaagt

SEQ ID NO: 62247 - DNA, 25 bp, Saccharomyces pastorianus
ataagagttgttgccctcaccatca

SEQ ID NO: 62248 - DNA, 25 bp, Saccharomyces pastorianus
aagaactagatacaccagatggcat

SEQ ID NO: 62249 - DNA, 25 bp, Saccharomyces pastorianus
gaaactattactaccacgactttga

SEQ ID NO: 62250 - DNA, 25 bp, Saccharomyces pastorianus
gtggtataatcgtacatttggctat

SEQ ID NO: 62251 - DNA, 25 bp, Saccharomyces pastorianus
gatagaatccgtactgccaggagga

SEQ ID NO: 62252 - DNA, 25 bp, Saccharomyces pastorianus
tggctataaccggatgccgaacccg

SEQ ID NO: 62253 - DNA, 25 bp, Saccharomyces pastorianus
tcaacatcctgcctcttcaaagaaa

SEQ ID NO: 62254 - DNA, 25 bp, Saccharomyces pastorianus
gatacagctggtttgcatggagaca

SEQ ID NO: 62255 - DNA, 25 bp, Saccharomyces pastorianus
atggagacagtcaacatcctgcctc

SEQ ID NO: 62256 - DNA, 25 bp, Saccharomyces pastorianus
gtgggccatctactcatgtgatatc

SEQ ID NO: 62257 - DNA, 25 bp, Saccharomyces pastorianus
gatccgttttgggttccaacgacag

SEQ ID NO: 62258 - DNA, 25 bp, Saccharomyces pastorianus
aagagaatattgctcgtaggcatat

SEQ ID NO: 62259 - DNA, 25 bp, Saccharomyces pastorianus
gcacaacctcaattagtgttttctg

SEQ ID NO: 62260 - DNA, 25 bp, Saccharomyces pastorianus
agacttctgttgatgtccttgggaa

SEQ ID NO: 62261 - DNA, 25 bp, Saccharomyces pastorianus
gaagctttcttagattggtcgccaa

SEQ ID NO: 62262 - DNA, 25 bp, Saccharomyces pastorianus
actcatgtgatatccagacttctgt

SEQ ID NO: 62263 - DNA, 25 bp, Saccharomyces pastorianus
cgaggcccatgtgcctgtcgtagag

SEQ ID NO: 62264 - DNA, 25 bp, Saccharomyces pastorianus
tgtcgtagaggcattcggcttaagt

SEQ ID NO: 62265 - DNA, 25 bp, Saccharomyces pastorianus
gaggacacacattaccaagaacata

SEQ ID NO: 62266 - DNA, 25 bp, Saccharomyces pastorianus
attttttcaaatcgaggcccatgtg

SEQ ID NO: 62267 - DNA, 25 bp, Saccharomyces pastorianus
gaaatcacacattctgaacctgcga

SEQ ID NO: 62268 - DNA, 25 bp, Saccharomyces pastorianus
atcaaggttggcaggcctagggccc

SEQ ID NO: 62269 - DNA, 25 bp, Saccharomyces pastorianus
aaacattcttgtccgtttccgatat

SEQ ID NO: 62270 - DNA, 25 bp, Saccharomyces pastorianus
gtccgtttccgatatgatttcacca

SEQ ID NO: 62271 - DNA, 25 bp, Saccharomyces pastorianus
aacaactggaggtgctcttttagat

SEQ ID NO: 62272 - DNA, 25 bp, Saccharomyces pastorianus
gatttcaccaaagaatgcgcaattg

SEQ ID NO: 62273 - DNA, 25 bp, Saccharomyces pastorianus
aatattctgaaaacctccacctcaa

SEQ ID NO: 62274 - DNA, 25 bp, Saccharomyces pastorianus
gcggagatcttctaaaagggttcaa

SEQ ID NO: 62275 - DNA, 25 bp, Saccharomyces pastorianus
tgaacctgcgatcccatatagagaa

SEQ ID NO: 62276 - DNA, 25 bp, Saccharomyces pastorianus
aactcattcttagctgcgtttgaag

SEQ ID NO: 62277 - DNA, 25 bp, Saccharomyces pastorianus
acctcaaatatcgaccctatcattg

SEQ ID NO: 62278 - DNA, 25 bp, Saccharomyces pastorianus
gaatctcttcccgaatgaactgtac

SEQ ID NO: 62279 - DNA, 25 bp, Saccharomyces pastorianus
gaagacgatagcaacgacggcattg

SEQ ID NO: 62280 - DNA, 25 bp, Saccharomyces pastorianus
gaagatgcagacgacgtgacctccg

SEQ ID NO: 62281 - DNA, 25 bp, Saccharomyces pastorianus
gatgatttggcagacgacgattttg

SEQ ID NO: 62282 - DNA, 25 bp, Saccharomyces pastorianus
ggtgtttccattgatgaccatccat

SEQ ID NO: 62283 - DNA, 25 bp, Saccharomyces pastorianus
acattggactttccatgttggccaa

SEQ ID NO: 62284 - DNA, 25 bp, Saccharomyces pastorianus
gaagacatcagggaagcgcaaaaac

SEQ ID NO: 62285 - DNA, 25 bp, Saccharomyces pastorianus
gataacgttttcactggtacaggat

SEQ ID NO: 62286 - DNA, 25 bp, Saccharomyces pastorianus
gaagtttagcagttccgataacgtt

SEQ ID NO: 62287 - DNA, 25 bp, Saccharomyces pastorianus
cgacggcattgaaagatactctgac

SEQ ID NO: 62288 - DNA, 25 bp, Saccharomyces pastorianus
ccgctacgggcggtgctgcgacaaa

SEQ ID NO: 62289 - DNA, 25 bp, Saccharomyces pastorianus
gtggtggtggtagaggcagtggtaa

SEQ ID NO: 62290 - DNA, 25 bp, Saccharomyces pastorianus
tggtggtggtagaggcagtggtaat

SEQ ID NO: 62291 - DNA, 25 bp, Saccharomyces pastorianus
tgagttcctatagaggcggtggtgg

SEQ ID NO: 62292 - DNA, 25 bp, Saccharomyces pastorianus
agttcctatagaggcggtggtggtg

SEQ ID NO: 62293 - DNA, 25 bp, Saccharomyces pastorianus
gttcctatagaggcggtggtggtgg

SEQ ID NO: 62294 - DNA, 25 bp, Saccharomyces pastorianus
gagttcctatagaggcggtggtggt

SEQ ID NO: 62295 - DNA, 25 bp, Saccharomyces pastorianus
tcctatagaggcggtggtggtggta

SEQ ID NO: 62296 - DNA, 25 bp, Saccharomyces pastorianus
cggtggtggtggtagaggcagtggt

SEQ ID NO: 62297 - DNA, 25 bp, Saccharomyces pastorianus
ggtggtggtggtagaggcagtggta

SEQ ID NO: 62298 - DNA, 25 bp, Saccharomyces pastorianus
ttcctatagaggcggtggtggtggt

SEQ ID NO: 62299 - DNA, 25 bp, Saccharomyces pastorianus
atgagttcctatagaggcggtggtg

SEQ ID NO: 62300 - DNA, 25 bp, Saccharomyces pastorianus
aaatagaccgcaacagcaaaggaaa

SEQ ID NO: 62301 - DNA, 25 bp, Saccharomyces pastorianus
gccatcctagatctatccaagtaca

SEQ ID NO: 62302 - DNA, 25 bp, Saccharomyces pastorianus
tgaatttggtcctagacgaaaccgt

SEQ ID NO: 62303 - DNA, 25 bp, Saccharomyces pastorianus
aagactccaagatacgtgttaaact

SEQ ID NO: 62304 - DNA, 25 bp, Saccharomyces pastorianus
ggtcccaagagagaagccatcctag

SEQ ID NO: 62305 - DNA, 25 bp, Saccharomyces pastorianus
gatcagaaaatagaccgcaacagca

SEQ ID NO: 62306 - DNA, 25 bp, Saccharomyces pastorianus
gatctatccaagtacaaagactcca

SEQ ID NO: 62307 - DNA, 25 bp, Saccharomyces pastorianus
tgaaggtcccaagagagaagccatc

SEQ ID NO: 62308 - DNA, 25 bp, Saccharomyces pastorianus
gatacgtgttaaactaatgggtggt

SEQ ID NO: 62309 - DNA, 25 bp, Saccharomyces pastorianus
gaagccatcctagatctatccaagt

SEQ ID NO: 62310 - DNA, 25 bp, Saccharomyces pastorianus
gatcaattgatgaatttggtcctag

SEQ ID NO: 62311 - DNA, 25 bp, Saccharomyces pastorianus
gattcgctgcgatgcattaagccat

SEQ ID NO: 62312 - DNA, 25 bp, Saccharomyces pastorianus
ttggcggaccgcacgattcaggaag

SEQ ID NO: 62313 - DNA, 25 bp, Saccharomyces pastorianus
aggaccacccatggacaggcaaggt

SEQ ID NO: 62314 - DNA, 25 bp, Saccharomyces pastorianus
aaccggtgctaaggtcttccactct

SEQ ID NO: 62315 - DNA, 25 bp, Saccharomyces pastorianus
aaggtcattttcaaaccagcgccac

SEQ ID NO: 62316 - DNA, 25 bp, Saccharomyces pastorianus
gagagccgtcactcttaaatttggc

SEQ ID NO: 62317 - DNA, 25 bp, Saccharomyces pastorianus
tgccacggagcctatttcaagaaag

SEQ ID NO: 62318 - DNA, 25 bp, Saccharomyces pastorianus
taacgctttgaaatgggctcctgcc

SEQ ID NO: 62319 - DNA, 25 bp, Saccharomyces pastorianus
atgcgggctcttgaaaaccggtgct

SEQ ID NO: 62320 - DNA, 25 bp, Saccharomyces pastorianus
aagccattaacagaggaccacccat

SEQ ID NO: 62321 - DNA, 25 bp, Saccharomyces pastorianus
gaatacgggactgcattccatacca

SEQ ID NO: 62322 - DNA, 25 bp, Saccharomyces pastorianus
gttgcccacttatagaagcgttccc

SEQ ID NO: 62323 - DNA, 25 bp, Saccharomyces pastorianus
gctgcagttctcctatgtggacgaa

SEQ ID NO: 62324 - DNA, 25 bp, Saccharomyces pastorianus
ggatatcgctctccttggatttgga

SEQ ID NO: 62325 - DNA, 25 bp, Saccharomyces pastorianus
aaacgagtacctctgcagcagctac

SEQ ID NO: 62326 - DNA, 25 bp, Saccharomyces pastorianus
ggcctacccatagattactcatcaa

SEQ ID NO: 62327 - DNA, 25 bp, Saccharomyces pastorianus
atgcaacccggtctttattgactgc

SEQ ID NO: 62328 - DNA, 25 bp, Saccharomyces pastorianus
gcggtgatatgtttggccaccacca

SEQ ID NO: 62329 - DNA, 25 bp, Saccharomyces pastorianus
gactgcgttcacaggaaaacccact

SEQ ID NO: 62330 - DNA, 25 bp, Saccharomyces pastorianus
aagaggagtaattcccactctcacg

SEQ ID NO: 62331 - DNA, 25 bp, Saccharomyces pastorianus
aataaacttctactccatcgacgac

SEQ ID NO: 62332 - DNA, 25 bp, Saccharomyces pastorianus
tgcaatgcgcaaaagtcggcctacc

SEQ ID NO: 62333 - DNA, 25 bp, Saccharomyces pastorianus
caattggctggtatgtgcgctgcgc

SEQ ID NO: 62334 - DNA, 25 bp, Saccharomyces pastorianus
aggttgtaatctcgctgttgactta

SEQ ID NO: 62335 - DNA, 25 bp, Saccharomyces pastorianus
tgcgctgcgctagcatggacagtta

SEQ ID NO: 62336 - DNA, 25 bp, Saccharomyces pastorianus
gaacgccatcccatttttgaaacta

SEQ ID NO: 62337 - DNA, 25 bp, Saccharomyces pastorianus
ttcaggtatcattgccggtctagtc

SEQ ID NO: 62338 - DNA, 25 bp, Saccharomyces pastorianus
gattacgtcaatgccactgcgggtt

SEQ ID NO: 62339 - DNA, 25 bp, Saccharomyces pastorianus
gaaaagaattccacgccttctgatg

SEQ ID NO: 62340 - DNA, 25 bp, Saccharomyces pastorianus
agccgctgggtttgtaccaatctgg

SEQ ID NO: 62341 - DNA, 25 bp, Saccharomyces pastorianus
accaatctggtctgccgttgttatt

SEQ ID NO: 62342 - DNA, 25 bp, Saccharomyces pastorianus
ggtatctttgctgctgattacgtca

SEQ ID NO: 62343 - DNA, 25 bp, Saccharomyces pastorianus
ttggctgtgtgctaactggtatctt

SEQ ID NO: 62344 - DNA, 25 bp, Saccharomyces pastorianus
agcagtgatcgttctggcttgaaaa

SEQ ID NO: 62345 - DNA, 25 bp, Saccharomyces pastorianus
aggtttccggaaaagccatcacaag

SEQ ID NO: 62346 - DNA, 25 bp, Saccharomyces pastorianus
gcgggagtaccggagccaaagatac

SEQ ID NO: 62347 - DNA, 25 bp, Saccharomyces pastorianus
aaaagatcggaattgcccaccagac

SEQ ID NO: 62348 - DNA, 25 bp, Saccharomyces pastorianus
gcaagccaagtaccagttatccaca

SEQ ID NO: 62349 - DNA, 25 bp, Saccharomyces pastorianus
gagatactcgttcacgtgaagacta

SEQ ID NO: 62350 - DNA, 25 bp, Saccharomyces pastorianus
aattgcccaccagacctagcaaagg

SEQ ID NO: 62351 - DNA, 25 bp, Saccharomyces pastorianus
agaggcgagagctttgatcagcaaa

SEQ ID NO: 62352 - DNA, 25 bp, Saccharomyces pastorianus
gctagacaagctggtccggacagag

SEQ ID NO: 62353 - DNA, 25 bp, Saccharomyces pastorianus
ttataatgacagaagcagaccagct

SEQ ID NO: 62354 - DNA, 25 bp, Saccharomyces pastorianus
gaaaactaactcacaacgtcctcaa

SEQ ID NO: 62355 - DNA, 25 bp, Saccharomyces pastorianus
acacgtcaaagacatctcgcgatga

SEQ ID NO: 62356 - DNA, 25 bp, Saccharomyces pastorianus
catttttgtctatcattgggcccta

SEQ ID NO: 62357 - DNA, 25 bp, Saccharomyces pastorianus
gataatggcatcctagctcataagc

SEQ ID NO: 62358 - DNA, 25 bp, Saccharomyces pastorianus
ttgtcccttttgcatccattgatga

SEQ ID NO: 62359 - DNA, 25 bp, Saccharomyces pastorianus
ggctatggcagcagctttatcgact

SEQ ID NO: 62360 - DNA, 25 bp, Saccharomyces pastorianus
gagtcaaacaacatggcgtctgctt

SEQ ID NO: 62361 - DNA, 25 bp, Saccharomyces pastorianus
agttgtattactcctgttgtccaca

SEQ ID NO: 62362 - DNA, 25 bp, Saccharomyces pastorianus
gaatggaatagtgcccttgtccctt

SEQ ID NO: 62363 - DNA, 25 bp, Saccharomyces pastorianus
aatgaggatactgcgcttgtgaagg

SEQ ID NO: 62364 - DNA, 25 bp, Saccharomyces pastorianus
cttttagatcctttatacacgtcaa

SEQ ID NO: 62365 - DNA, 25 bp, Saccharomyces pastorianus
gcgtctgctttaatggtaactcgga

SEQ ID NO: 62366 - DNA, 25 bp, Saccharomyces pastorianus
tgagcgatacctcgaatggatctat

SEQ ID NO: 62367 - DNA, 25 bp, Saccharomyces pastorianus
ggccaatctgaagtcatttcgccat

SEQ ID NO: 62368 - DNA, 25 bp, Saccharomyces pastorianus
gccatttgatgtccctgttcacgaa

SEQ ID NO: 62369 - DNA, 25 bp, Saccharomyces pastorianus
ttgccattttaccacatcacttaga

SEQ ID NO: 62370 - DNA, 25 bp, Saccharomyces pastorianus
gcaaagtgtccatagcgcttatcaa

SEQ ID NO: 62371 - DNA, 25 bp, Saccharomyces pastorianus
gaccgtttttatcaccttttgccat

SEQ ID NO: 62372 - DNA, 25 bp, Saccharomyces pastorianus
gtatcatgatccacttaagacttct

SEQ ID NO: 62373 - DNA, 25 bp, Saccharomyces pastorianus
atcaagactttttcaactcaggcga

SEQ ID NO: 62374 - DNA, 25 bp, Saccharomyces pastorianus
atcttcatgggcagcagactttcta

SEQ ID NO: 62375 - DNA, 25 bp, Saccharomyces pastorianus
tttgagagaccctgttgcgagacca

SEQ ID NO: 62376 - DNA, 25 bp, Saccharomyces pastorianus
gaatggatctatcgcgttcgacccc

SEQ ID NO: 62377 - DNA, 25 bp, Saccharomyces pastorianus
gaaaggccaatttgctgaaatctct

SEQ ID NO: 62378 - DNA, 25 bp, Saccharomyces pastorianus
aaagggcagtgtggacttaaagtct

SEQ ID NO: 62379 - DNA, 25 bp, Saccharomyces pastorianus
gccaagaaaggccaatttgctgaaa

SEQ ID NO: 62380 - DNA, 25 bp, Saccharomyces pastorianus
tcaacttatacaaaaagggcagtgt

SEQ ID NO: 62381 - DNA, 25 bp, Saccharomyces pastorianus
ttctttcaataagtacaatctattc

SEQ ID NO: 62382 - DNA, 25 bp, Saccharomyces pastorianus
agtacaatctattcaacttatacaa

SEQ ID NO: 62383 - DNA, 25 bp, Saccharomyces pastorianus
gatggcaaaatgctttcaaacctaa

SEQ ID NO: 62384 - DNA, 25 bp, Saccharomyces pastorianus
caatttgctgaaatctctggcaaga

SEQ ID NO: 62385 - DNA, 25 bp, Saccharomyces pastorianus
atatcaacagaaatggacagcaaag

SEQ ID NO: 62386 - DNA, 25 bp, Saccharomyces pastorianus
gtggacttaaagtctaaatctttat

SEQ ID NO: 62387 - DNA, 25 bp, Saccharomyces pastorianus
aaggccaatttgctgaaatctctgg

SEQ ID NO: 62388 - DNA, 25 bp, Saccharomyces pastorianus
aaagggcagtgtggacttaaagtct

SEQ ID NO: 62389 - DNA, 25 bp, Saccharomyces pastorianus
gccaagaaaggccaatttgctgaaa

SEQ ID NO: 62390 - DNA, 25 bp, Saccharomyces pastorianus
tcaacttatacaaaaagggcagtgt

SEQ ID NO: 62391 - DNA, 25 bp, Saccharomyces pastorianus
agtacaatctattcaacttatacaa

SEQ ID NO: 62392 - DNA, 25 bp, Saccharomyces pastorianus
gaggacgagtacgtacttctttcaa

SEQ ID NO: 62393 - DNA, 25 bp, Saccharomyces pastorianus
atatcaacagaaatggacagcaaag

SEQ ID NO: 62394 - DNA, 25 bp, Saccharomyces pastorianus
gatggcaaaatgctttcaaacctaa

SEQ ID NO: 62395 - DNA, 25 bp, Saccharomyces pastorianus
ggaaacccgagcctatcatggtgaa

SEQ ID NO: 62396 - DNA, 25 bp, Saccharomyces pastorianus
caatttgctgaaatctctggcaaga

SEQ ID NO: 62397 - DNA, 25 bp, Saccharomyces pastorianus
gtggacttaaagtctaaatctttat

SEQ ID NO: 62398 - DNA, 25 bp, Saccharomyces pastorianus
aaggccaatttgctgaaatctctgg

SEQ ID NO: 62399 - DNA, 25 bp, Saccharomyces pastorianus
gacataaccacatatttggatattt

SEQ ID NO: 62400 - DNA, 25 bp, Saccharomyces pastorianus
atttacgacataaccacatatttgg

SEQ ID NO: 62401 - DNA, 25 bp, Saccharomyces pastorianus
acgacataaccacatatttggatat

SEQ ID NO: 62402 - DNA, 25 bp, Saccharomyces pastorianus
atgatatcatttacgacataaccac

SEQ ID NO: 62403 - DNA, 25 bp, Saccharomyces pastorianus
gttcatcaatgatatcatttacgac

SEQ ID NO: 62404 - DNA, 25 bp, Saccharomyces pastorianus
caatgatatcatttacgacataacc

SEQ ID NO: 62405 - DNA, 25 bp, Saccharomyces pastorianus
atcatttacgacataaccacatatt

SEQ ID NO: 62406 - DNA, 25 bp, Saccharomyces pastorianus
gatatcatttacgacataaccacat

SEQ ID NO: 62407 - DNA, 25 bp, Saccharomyces pastorianus
ttacgacataaccacatatttggat

SEQ ID NO: 62408 - DNA, 25 bp, Saccharomyces pastorianus
atatcatttacgacataaccacata

SEQ ID NO: 62409 - DNA, 25 bp, Saccharomyces pastorianus
cataaccacatatttggatatttac

SEQ ID NO: 62410 - DNA, 25 bp, Saccharomyces pastorianus
accattcaattgttcgcgtacgcat

SEQ ID NO: 62411 - DNA, 25 bp, Saccharomyces pastorianus
gtacttagccgaattctgtgggcca

SEQ ID NO: 62412 - DNA, 25 bp, Saccharomyces pastorianus
atttctctgcccttagttttatcga

SEQ ID NO: 62413 - DNA, 25 bp, Saccharomyces pastorianus
gaccccaggttgtgtggcacactaa

SEQ ID NO: 62414 - DNA, 25 bp, Saccharomyces pastorianus
tgtacgcattttgcacaggtgcttt

SEQ ID NO: 62415 - DNA, 25 bp, Saccharomyces pastorianus
actggcctttcgattgcgttcgtag

SEQ ID NO: 62416 - DNA, 25 bp, Saccharomyces pastorianus
agttggccgcatgattgttgctcat

SEQ ID NO: 62417 - DNA, 25 bp, Saccharomyces pastorianus
taagcaacccttcccaatggtgaac

SEQ ID NO: 62418 - DNA, 25 bp, Saccharomyces pastorianus
agaagcgctcaagggtcttttacca

SEQ ID NO: 62419 - DNA, 25 bp, Saccharomyces pastorianus
tttgtgcatatctttcatctcggtt

SEQ ID NO: 62420 - DNA, 25 bp, Saccharomyces pastorianus
actttccaatgtttatcccaaccat

SEQ ID NO: 62421 - DNA, 25 bp, Saccharomyces pastorianus
gaacttcaaagacagactatatatc

SEQ ID NO: 62422 - DNA, 25 bp, Saccharomyces pastorianus
gatcagtacaagaacttcaaagaca

SEQ ID NO: 62423 - DNA, 25 bp, Saccharomyces pastorianus
gtacaagaacttcaaagacagacta

SEQ ID NO: 62424 - DNA, 25 bp, Saccharomyces pastorianus
gacagactatatatctttagagcag

SEQ ID NO: 62425 - DNA, 25 bp, Saccharomyces pastorianus
ggaagtcgtcgatcagtacaagaac

SEQ ID NO: 62426 - DNA, 25 bp, Saccharomyces pastorianus
gtcgatcagtacaagaacttcaaag

SEQ ID NO: 62427 - DNA, 25 bp, Saccharomyces pastorianus
gaagtcgtcgatcagtacaagaact

SEQ ID NO: 62428 - DNA, 25 bp, Saccharomyces pastorianus
gactatatatctttagagcagactt

SEQ ID NO: 62429 - DNA, 25 bp, Saccharomyces pastorianus
taaaggaagtcgtcgatcagtacaa

SEQ ID NO: 62430 - DNA, 25 bp, Saccharomyces pastorianus
atatatctttagagcagacttaaaa

SEQ ID NO: 62431 - DNA, 25 bp, Saccharomyces pastorianus
gtcgtcgatcagtacaagaacttca

SEQ ID NO: 62432 - DNA, 25 bp, Saccharomyces pastorianus
atgcgagagtgcttgatctaggaca

SEQ ID NO: 62433 - DNA, 25 bp, Saccharomyces pastorianus
ataactcttctaatggttcggtcat

SEQ ID NO: 62434 - DNA, 25 bp, Saccharomyces pastorianus
gatattctctttatgggtaaatccg

SEQ ID NO: 62435 - DNA, 25 bp, Saccharomyces pastorianus
ggaatcgtattacttgaactgtatt

SEQ ID NO: 62436 - DNA, 25 bp, Saccharomyces pastorianus
gatattctaataacaccgtcggatt

SEQ ID NO: 62437 - DNA, 25 bp, Saccharomyces pastorianus
agaggttataatcccctcatccgtg

SEQ ID NO: 62438 - DNA, 25 bp, Saccharomyces pastorianus
ggatgtttttactttggactacata

SEQ ID NO: 62439 - DNA, 25 bp, Saccharomyces pastorianus
actacatactacatcctccattaag

SEQ ID NO: 62440 - DNA, 25 bp, Saccharomyces pastorianus
ccctcatccgtgacattatcaacaa

SEQ ID NO: 62441 - DNA, 25 bp, Saccharomyces pastorianus
gactcttacaagaagctgtccagct

SEQ ID NO: 62442 - DNA, 25 bp, Saccharomyces pastorianus
agctttcttccctaaggcacttgat

SEQ ID NO: 62443 - DNA, 25 bp, Saccharomyces pastorianus
tatggtgcgccttccatgggtcaaa

SEQ ID NO: 62444 - DNA, 25 bp, Saccharomyces pastorianus
agaacccgatgtatatgcagccacc

SEQ ID NO: 62445 - DNA, 25 bp, Saccharomyces pastorianus
acttccaattcaagctccgtttatg

SEQ ID NO: 62446 - DNA, 25 bp, Saccharomyces pastorianus
aaggtgctgcgctgcaacatgggta

SEQ ID NO: 62447 - DNA, 25 bp, Saccharomyces pastorianus
aaatctgcctaaattggtgccacca

SEQ ID NO: 62448 - DNA, 25 bp, Saccharomyces pastorianus
aaataactacccatatctaccacag

SEQ ID NO: 62449 - DNA, 25 bp, Saccharomyces pastorianus
acagccaaacggtatgccatatcct

SEQ ID NO: 62450 - DNA, 25 bp, Saccharomyces pastorianus
atataacaacgtgccacctgcgtac

SEQ ID NO: 62451 - DNA, 25 bp, Saccharomyces pastorianus
aattccccaacgcagggccatataa

SEQ ID NO: 62452 - DNA, 25 bp, Saccharomyces pastorianus
atggcaatgcggcacctagccaaaa

SEQ ID NO: 62453 - DNA, 25 bp, Saccharomyces pastorianus
aagctccgtttatgcaaatgcctca

SEQ ID NO: 62454 - DNA, 25 bp, Saccharomyces pastorianus
gtttccgcaatcacaataagaactc

SEQ ID NO: 62455 - DNA, 25 bp, Saccharomyces pastorianus
gaactctaatgaaaacccacaaagg

SEQ ID NO: 62456 - DNA, 25 bp, Saccharomyces pastorianus
gttcaacgtattacatccgctattg

SEQ ID NO: 62457 - DNA, 25 bp, Saccharomyces pastorianus
gtctttgttcaacgtattacatccg

SEQ ID NO: 62458 - DNA, 25 bp, Saccharomyces pastorianus
agatccttgaaagccttgagcggaa

SEQ ID NO: 62459 - DNA, 25 bp, Saccharomyces pastorianus
gcttcaaaccaagattgaaccagtt

SEQ ID NO: 62460 - DNA, 25 bp, Saccharomyces pastorianus
ggaaggaaaacagccaattcatctt

SEQ ID NO: 62461 - DNA, 25 bp, Saccharomyces pastorianus
tcccatagatccttgaaagccttga

SEQ ID NO: 62462 - DNA, 25 bp, Saccharomyces pastorianus
aacgtattacatccgctattgaagg

SEQ ID NO: 62463 - DNA, 25 bp, Saccharomyces pastorianus
atttaacaatgtttccgcaatcaca

SEQ ID NO: 62464 - DNA, 25 bp, Saccharomyces pastorianus
ttgaaccagtttttatttaacaatg

SEQ ID NO: 62465 - DNA, 25 bp, Saccharomyces pastorianus
agtgaatccaactagtgaagataag

SEQ ID NO: 62466 - DNA, 25 bp, Saccharomyces pastorianus
agtctggcccagagtcaatactatg

SEQ ID NO: 62467 - DNA, 25 bp, Saccharomyces pastorianus
aaaatttagtctggcccagagtcaa

SEQ ID NO: 62468 - DNA, 25 bp, Saccharomyces pastorianus
ataaaaatttagtctggcccagagt

SEQ ID NO: 62469 - DNA, 25 bp, Saccharomyces pastorianus
agtttagtgaatccaactagtgaag

SEQ ID NO: 62470 - DNA, 25 bp, Saccharomyces pastorianus
ctatgagtagtttagtgaatccaac

SEQ ID NO: 62471 - DNA, 25 bp, Saccharomyces pastorianus
gaacacaagcattaaggataaaaat

SEQ ID NO: 62472 - DNA, 25 bp, Saccharomyces pastorianus
gcccagagtcaatactatgagtagt

SEQ ID NO: 62473 - DNA, 25 bp, Saccharomyces pastorianus
ggataaaaatttagtctggcccaga

SEQ ID NO: 62474 - DNA, 25 bp, Saccharomyces pastorianus
gtctggcccagagtcaatactatga

SEQ ID NO: 62475 - DNA, 25 bp, Saccharomyces pastorianus
ctggcccagagtcaatactatgagt

SEQ ID NO: 62476 - DNA, 25 bp, Saccharomyces pastorianus
agcagagcctaaacctagtacaaca

SEQ ID NO: 62477 - DNA, 25 bp, Saccharomyces pastorianus
gaacatttattcaagcagtggcaag

SEQ ID NO: 62478 - DNA, 25 bp, Saccharomyces pastorianus
aaccgcagataaactagcagagcct

SEQ ID NO: 62479 - DNA, 25 bp, Saccharomyces pastorianus
gaattacggtcactacaccttatcc

SEQ ID NO: 62480 - DNA, 25 bp, Saccharomyces pastorianus
accttatcctagagagaccaccgag

SEQ ID NO: 62481 - DNA, 25 bp, Saccharomyces pastorianus
gaccaaattcctcatcaacgttgaa

SEQ ID NO: 62482 - DNA, 25 bp, Saccharomyces pastorianus
gactctgaatcttttgacacattgg

SEQ ID NO: 62483 - DNA, 25 bp, Saccharomyces pastorianus
tatactaacccatcgaattggctgg

SEQ ID NO: 62484 - DNA, 25 bp, Saccharomyces pastorianus
gaagaaaccaacatcggcgatcaat

SEQ ID NO: 62485 - DNA, 25 bp, Saccharomyces pastorianus
attaggaacatctcacactcattat

SEQ ID NO: 62486 - DNA, 25 bp, Saccharomyces pastorianus
atagccactttcttagactctgaat

SEQ ID NO: 62487 - DNA, 25 bp, Saccharomyces pastorianus
cgcttctcacactattactcaatta

SEQ ID NO: 62488 - DNA, 25 bp, Saccharomyces pastorianus
ctaatgtggtctgcaacttggccaa

SEQ ID NO: 62489 - DNA, 25 bp, Saccharomyces pastorianus
gagatctatcccgtggttctgaaat

SEQ ID NO: 62490 - DNA, 25 bp, Saccharomyces pastorianus
agactctaatctttgcttccacaaa

SEQ ID NO: 62491 - DNA, 25 bp, Saccharomyces pastorianus
attggctgctgactacttaaacgac

SEQ ID NO: 62492 - DNA, 25 bp, Saccharomyces pastorianus
ggatcacctatcatggttgccacag

SEQ ID NO: 62493 - DNA, 25 bp, Saccharomyces pastorianus
ttctgaaattgtcattgccactcca

SEQ ID NO: 62494 - DNA, 25 bp, Saccharomyces pastorianus
ggaagccgcttctcaagacgacgaa

SEQ ID NO: 62495 - DNA, 25 bp, Saccharomyces pastorianus
ccagctttggctatacacggtgaca

SEQ ID NO: 62496 - DNA, 25 bp, Saccharomyces pastorianus
gttacctacctggttcttgacgaag

SEQ ID NO: 62497 - DNA, 25 bp, Saccharomyces pastorianus
gttctctagaattagccgcttctca

SEQ ID NO: 62498 - DNA, 25 bp, Saccharomyces pastorianus
gccgttcaaactattgaggctaaac

SEQ ID NO: 62499 - DNA, 25 bp, Saccharomyces pastorianus
gaagatcttacggtggtcacccaag

SEQ ID NO: 62500 - DNA, 25 bp, Saccharomyces pastorianus
acagaggccgttcaaactattgagg

SEQ ID NO: 62501 - DNA, 25 bp, Saccharomyces pastorianus
ttacggtggtaacagaggccgttca

SEQ ID NO: 62502 - DNA, 25 bp, Saccharomyces pastorianus
tggtggccgtagaggcggttatggt

SEQ ID NO: 62503 - DNA, 25 bp, Saccharomyces pastorianus
ggttatggtggtgccgtggtggtta

SEQ ID NO: 62504 - DNA, 25 bp, Saccharomyces pastorianus
gaggccgttcaaactattgaggcta

SEQ ID NO: 62505 - DNA, 25 bp, Saccharomyces pastorianus
atcttacggtggtcacccaagatac

SEQ ID NO: 62506 - DNA, 25 bp, Saccharomyces pastorianus
acagaagatcttacggtggtcaccc

SEQ ID NO: 62507 - DNA, 25 bp, Saccharomyces pastorianus
ggtggtaacagaggccgttcaaact

SEQ ID NO: 62508 - DNA, 25 bp, Saccharomyces pastorianus
gaagtacgacagaagatcttacggt

SEQ ID NO: 62509 - DNA, 25 bp, Saccharomyces pastorianus
ggtacctttatcatcaatgggctct

SEQ ID NO: 62510 - DNA, 25 bp, Saccharomyces pastorianus
agattttcaccttctgctttcaaca

SEQ ID NO: 62511 - DNA, 25 bp, Saccharomyces pastorianus
cttctgctttcaacacctcaaattt

SEQ ID NO: 62512 - DNA, 25 bp, Saccharomyces pastorianus
atcataatcgtcttgatttctggaa

SEQ ID NO: 62513 - DNA, 25 bp, Saccharomyces pastorianus
gatttagtggctgcatgtgtaacaa

SEQ ID NO: 62514 - DNA, 25 bp, Saccharomyces pastorianus
ttgtcaatagcgcaacttccgtttc

SEQ ID NO: 62515 - DNA, 25 bp, Saccharomyces pastorianus
accattcatcgtaattctccatacc

SEQ ID NO: 62516 - DNA, 25 bp, Saccharomyces pastorianus
gtcagatccggcttcaaaggcattc

SEQ ID NO: 62517 - DNA, 25 bp, Saccharomyces pastorianus
aattcatttcttctccgttagttag

SEQ ID NO: 62518 - DNA, 25 bp, Saccharomyces pastorianus
ttctccataccctcttttcaaatgg

SEQ ID NO: 62519 - DNA, 25 bp, Saccharomyces pastorianus
ttcaaatggcagattttcaccttct

SEQ ID NO: 62520 - DNA, 25 bp, Saccharomyces pastorianus
gacaatctttgtaagaggtccacag

SEQ ID NO: 62521 - DNA, 25 bp, Saccharomyces pastorianus
gacttcatccatatgctaatcccgc

SEQ ID NO: 62522 - DNA, 25 bp, Saccharomyces pastorianus
tgacacctatccaaaccctttaaga

SEQ ID NO: 62523 - DNA, 25 bp, Saccharomyces pastorianus
ttgttgaacttttaccatcgattac

SEQ ID NO: 62524 - DNA, 25 bp, Saccharomyces pastorianus
aggccgtaacgctaaagacgcagaa

SEQ ID NO: 62525 - DNA, 25 bp, Saccharomyces pastorianus
cccgctgaacacactcatttgtgga

SEQ ID NO: 62526 - DNA, 25 bp, Saccharomyces pastorianus
atgctaatcccgctccaagtaccga

SEQ ID NO: 62527 - DNA, 25 bp, Saccharomyces pastorianus
gagaataacccaccaggccgtaacg

SEQ ID NO: 62528 - DNA, 25 bp, Saccharomyces pastorianus
aagaccgatgattgtgtgtactcca

SEQ ID NO: 62529 - DNA, 25 bp, Saccharomyces pastorianus
ttaagatctatagaggcgcctccgt

SEQ ID NO: 62530 - DNA, 25 bp, Saccharomyces pastorianus
aggaaatgtcttaccttcaaacaag

SEQ ID NO: 62531 - DNA, 25 bp, Saccharomyces pastorianus
atccacttatcctacagacgcaatg

SEQ ID NO: 62532 - DNA, 25 bp, Saccharomyces pastorianus
gtaaggttcgctgtggcaaactaca

SEQ ID NO: 62533 - DNA, 25 bp, Saccharomyces pastorianus
agatgtcggcgactcttcagtaaga

SEQ ID NO: 62534 - DNA, 25 bp, Saccharomyces pastorianus
gtaagagctatctttgctaccatca

SEQ ID NO: 62535 - DNA, 25 bp, Saccharomyces pastorianus
tacacggaacattccctagggtctg

SEQ ID NO: 62536 - DNA, 25 bp, Saccharomyces pastorianus
agacagtgccgattccttgggcaga

SEQ ID NO: 62537 - DNA, 25 bp, Saccharomyces pastorianus
aatctcttctctagtcgatgctcta

SEQ ID NO: 62538 - DNA, 25 bp, Saccharomyces pastorianus
gtgccgcttgggtcatcttaagatc

SEQ ID NO: 62539 - DNA, 25 bp, Saccharomyces pastorianus
ttattcactccggtgacgtgtctat

SEQ ID NO: 62540 - DNA, 25 bp, Saccharomyces pastorianus
tccctaggcttagatctcccaagaa

SEQ ID NO: 62541 - DNA, 25 bp, Saccharomyces pastorianus
tattccctctgtggctgacgctaag

SEQ ID NO: 62542 - DNA, 25 bp, Saccharomyces pastorianus
gaattagagtcatcaatacacgagt

SEQ ID NO: 62543 - DNA, 25 bp, Saccharomyces pastorianus
caaatattctgatgacgaggacgac

SEQ ID NO: 62544 - DNA, 25 bp, Saccharomyces pastorianus
ttctgagctctattttggaactagg

SEQ ID NO: 62545 - DNA, 25 bp, Saccharomyces pastorianus
aattcaagtcttaaccacagcaatg

SEQ ID NO: 62546 - DNA, 25 bp, Saccharomyces pastorianus
gatcccattcaggtgatttgaacga

SEQ ID NO: 62547 - DNA, 25 bp, Saccharomyces pastorianus
acgttaaatgcaagcgctcctactc

SEQ ID NO: 62548 - DNA, 25 bp, Saccharomyces pastorianus
gacaacgccttgaaaagatcccatt

SEQ ID NO: 62549 - DNA, 25 bp, Saccharomyces pastorianus
gacagacagtctacgcgaaatgaac

SEQ ID NO: 62550 - DNA, 25 bp, Saccharomyces pastorianus
aggacgacgaatacggtgacgccga

SEQ ID NO: 62551 - DNA, 25 bp, Saccharomyces pastorianus
tggaactaggtcttaaccatccgaa

SEQ ID NO: 62552 - DNA, 25 bp, Saccharomyces pastorianus
tgacgccgacctccgtaaacataaa

SEQ ID NO: 62553 - DNA, 25 bp, Saccharomyces pastorianus
gaaggcgactcgtacaacgccgagt

SEQ ID NO: 62554 - DNA, 25 bp, Saccharomyces pastorianus
ggtcacgccggaaatactgctggaa

SEQ ID NO: 62555 - DNA, 25 bp, Saccharomyces pastorianus
agcaatggcacgagcactttcaaca

SEQ ID NO: 62556 - DNA, 25 bp, Saccharomyces pastorianus
gaacagctggcttacgtcgacaatt

SEQ ID NO: 62557 - DNA, 25 bp, Saccharomyces pastorianus
acaacaccgctgatgaagtgccgca

SEQ ID NO: 62558 - DNA, 25 bp, Saccharomyces pastorianus
gaagtgccgcatgcgaaccttttaa

SEQ ID NO: 62559 - DNA, 25 bp, Saccharomyces pastorianus
gctcgccatcgagttgagtgcattt

SEQ ID NO: 62560 - DNA, 25 bp, Saccharomyces pastorianus
tttgtagcaacagcctcgtcgtcgt

SEQ ID NO: 62561 - DNA, 25 bp, Saccharomyces pastorianus
tgatgattcgtttatcttcccggat

SEQ ID NO: 62562 - DNA, 25 bp, Saccharomyces pastorianus
tgtcgactggaacgtcaacaccact

SEQ ID NO: 62563 - DNA, 25 bp, Saccharomyces pastorianus
aatacacagcccttgcttggcgatg

SEQ ID NO: 62564 - DNA, 25 bp, Saccharomyces pastorianus
agtgaagcacttggtctagacagca

SEQ ID NO: 62565 - DNA, 25 bp, Saccharomyces pastorianus
actgtgaacagtcctttacccttct

SEQ ID NO: 62566 - DNA, 25 bp, Saccharomyces pastorianus
tggtggcattgtatcctcgaatcat

SEQ ID NO: 62567 - DNA, 25 bp, Saccharomyces pastorianus
taccggacccacaatattatcttga

SEQ ID NO: 62568 - DNA, 25 bp, Saccharomyces pastorianus
gcgatattcagtttccatttggtgg

SEQ ID NO: 62569 - DNA, 25 bp, Saccharomyces pastorianus
gtgtgatgacactacatgcggtatt

SEQ ID NO: 62570 - DNA, 25 bp, Saccharomyces pastorianus
gaattaacctgtccatcatgcgata

SEQ ID NO: 62571 - DNA, 25 bp, Saccharomyces pastorianus
atggtatccaatgtaagcactgtga

SEQ ID NO: 62572 - DNA, 25 bp, Saccharomyces pastorianus
tacccttcttcaattaactagtcag

SEQ ID NO: 62573 - DNA, 25 bp, Saccharomyces pastorianus
gataagcagctgtacaatcaacttt

SEQ ID NO: 62574 - DNA, 25 bp, Saccharomyces pastorianus
tgatattaataacctgcaacctttg

SEQ ID NO: 62575 - DNA, 25 bp, Saccharomyces pastorianus
gctgactgctaactctatgtacggt

SEQ ID NO: 62576 - DNA, 25 bp, Saccharomyces pastorianus
aagccgcttgccatgttggtcacaa

SEQ ID NO: 62577 - DNA, 25 bp, Saccharomyces pastorianus
cagcaagctcttaagctgactgcta

SEQ ID NO: 62578 - DNA, 25 bp, Saccharomyces pastorianus
caacttagttgatcgccgtcgtgaa

SEQ ID NO: 62579 - DNA, 25 bp, Saccharomyces pastorianus
gaaactgaccctcataaacgagttc

SEQ ID NO: 62580 - DNA, 25 bp, Saccharomyces pastorianus
tgaaaactcggacgctccaactaat

SEQ ID NO: 62581 - DNA, 25 bp, Saccharomyces pastorianus
agttacccaatgtacctccttcaga

SEQ ID NO: 62582 - DNA, 25 bp, Saccharomyces pastorianus
aattacgtcttggttatggatttca

SEQ ID NO: 62583 - DNA, 25 bp, Saccharomyces pastorianus
ttgtatccatctatcattcaagagt

SEQ ID NO: 62584 - DNA, 25 bp, Saccharomyces pastorianus
caacatttgttttaccaccgtggat

SEQ ID NO: 62585 - DNA, 25 bp, Saccharomyces pastorianus
gaggtgagccaaggtgtcctaccaa

SEQ ID NO: 62586 - DNA, 25 bp, Saccharomyces pastorianus
tttagcccatagaatgcacgacctt

SEQ ID NO: 62587 - DNA, 25 bp, Saccharomyces pastorianus
tcgttagattcacccattccagaga

SEQ ID NO: 62588 - DNA, 25 bp, Saccharomyces pastorianus
aaaggcaatgctgtcttgtttctgt

SEQ ID NO: 62589 - DNA, 25 bp, Saccharomyces pastorianus
gtcgcgataactttgtcatcttaca

SEQ ID NO: 62590 - DNA, 25 bp, Saccharomyces pastorianus
atcagcgacatctgctctggtagat

SEQ ID NO: 62591 - DNA, 25 bp, Saccharomyces pastorianus
tgcacgaccttaacattccaacgtt

SEQ ID NO: 62592 - DNA, 25 bp, Saccharomyces pastorianus
gaaactgcctggtcaagttaggtta

SEQ ID NO: 62593 - DNA, 25 bp, Saccharomyces pastorianus
ttcagttctattggtcgtcgtctaa

SEQ ID NO: 62594 - DNA, 25 bp, Saccharomyces pastorianus
aaggccgcctcaatcaacaagtttt

SEQ ID NO: 62595 - DNA, 25 bp, Saccharomyces pastorianus
gaggtgtctttctttatcggttcaa

SEQ ID NO: 62596 - DNA, 25 bp, Saccharomyces pastorianus
gtcttgtttctgtgccatgctaaaa

SEQ ID NO: 62597 - DNA, 25 bp, Saccharomyces pastorianus
attggactccaaggacgttcaacaa

SEQ ID NO: 62598 - DNA, 25 bp, Saccharomyces pastorianus
gtcttattggactccaaggacgttc

SEQ ID NO: 62599 - DNA, 25 bp, Saccharomyces pastorianus
tattggactccaaggacgttcaaca

SEQ ID NO: 62600 - DNA, 25 bp, Saccharomyces pastorianus
gacgttcaacaaattgactacaaat

SEQ ID NO: 62601 - DNA, 25 bp, Saccharomyces pastorianus
ggacgttcaacaaattgactacaaa

SEQ ID NO: 62602 - DNA, 25 bp, Saccharomyces pastorianus
caaaaggtcttattggactccaagg

SEQ ID NO: 62603 - DNA, 25 bp, Saccharomyces pastorianus
gatccaaaaggtcttattggactcc

SEQ ID NO: 62604 - DNA, 25 bp, Saccharomyces pastorianus
aaggtcttattggactccaaggacg

SEQ ID NO: 62605 - DNA, 25 bp, Saccharomyces pastorianus
ggtcttattggactccaaggacgtt

SEQ ID NO: 62606 - DNA, 25 bp, Saccharomyces pastorianus
ggactccaaggacgttcaacaaatt

SEQ ID NO: 62607 - DNA, 25 bp, Saccharomyces pastorianus
ttattggactccaaggacgttcaac

SEQ ID NO: 62608 - DNA, 25 bp, Saccharomyces pastorianus
ttcattgatctagaaggctcttccc

SEQ ID NO: 62609 - DNA, 25 bp, Saccharomyces pastorianus
gctcttccccagaattaaaggctga

SEQ ID NO: 62610 - DNA, 25 bp, Saccharomyces pastorianus
atccaaaattttgtcccaagctcca

SEQ ID NO: 62611 - DNA, 25 bp, Saccharomyces pastorianus
attgatctagaaggctcttccccag

SEQ ID NO: 62612 - DNA, 25 bp, Saccharomyces pastorianus
ttccccagaattaaaggctgaattg

SEQ ID NO: 62613 - DNA, 25 bp, Saccharomyces pastorianus
ccaaaattttgtcccaagctccaag

SEQ ID NO: 62614 - DNA, 25 bp, Saccharomyces pastorianus
tagaaggctcttccccagaattaaa

SEQ ID NO: 62615 - DNA, 25 bp, Saccharomyces pastorianus
atgtcttctgtccaatccaaaattt

SEQ ID NO: 62616 - DNA, 25 bp, Saccharomyces pastorianus
gccaaggccttcattgatctagaag

SEQ ID NO: 62617 - DNA, 25 bp, Saccharomyces pastorianus
gatctagaaggctcttccccagaat

SEQ ID NO: 62618 - DNA, 25 bp, Saccharomyces pastorianus
aggctcttccccagaattaaaggct

SEQ ID NO: 62619 - DNA, 25 bp, Saccharomyces pastorianus
agcccattttgtccttgcgttgatt

SEQ ID NO: 62620 - DNA, 25 bp, Saccharomyces pastorianus
attttttggcaccaatggctctcgc

SEQ ID NO: 62621 - DNA, 25 bp, Saccharomyces pastorianus
acttgttttgcatcttcggcgggaa

SEQ ID NO: 62622 - DNA, 25 bp, Saccharomyces pastorianus
gggcaatatcgtaacgcctcgtcag

SEQ ID NO: 62623 - DNA, 25 bp, Saccharomyces pastorianus
gactagttctcgtagctacttcgaa

SEQ ID NO: 62624 - DNA, 25 bp, Saccharomyces pastorianus
agggactcagagttatccacggcaa

SEQ ID NO: 62625 - DNA, 25 bp, Saccharomyces pastorianus
aagacgttcatattcttcttgcccc

SEQ ID NO: 62626 - DNA, 25 bp, Saccharomyces pastorianus
ttgatatgggcctcctgcctcaaat

SEQ ID NO: 62627 - DNA, 25 bp, Saccharomyces pastorianus
ggaaccatttcgtctacagcatttt

SEQ ID NO: 62628 - DNA, 25 bp, Saccharomyces pastorianus
aaacccacaagaacgatcggcgcgt

SEQ ID NO: 62629 - DNA, 25 bp, Saccharomyces pastorianus
gccccgctgtatcccaaagagttaa

SEQ ID NO: 62630 - DNA, 25 bp, Saccharomyces pastorianus
gcgcaaggaacatacgctcatccgt

SEQ ID NO: 62631 - DNA, 25 bp, Saccharomyces pastorianus
ggcgaaggcattaaacttaccgcaa

SEQ ID NO: 62632 - DNA, 25 bp, Saccharomyces pastorianus
actctagcgaaagtctgcccggcgg

SEQ ID NO: 62633 - DNA, 25 bp, Saccharomyces pastorianus
agaatgcaatgtgctcccttggaca

SEQ ID NO: 62634 - DNA, 25 bp, Saccharomyces pastorianus
gggtatattcccatatgctgcatta

SEQ ID NO: 62635 - DNA, 25 bp, Saccharomyces pastorianus
ttggttgtactaccgatgggtgcat

SEQ ID NO: 62636 - DNA, 25 bp, Saccharomyces pastorianus
gggcttccgttgtgtatccaattaa

SEQ ID NO: 62637 - DNA, 25 bp, Saccharomyces pastorianus
ttcaaagggttggttcccactctag

SEQ ID NO: 62638 - DNA, 25 bp, Saccharomyces pastorianus
agaccaggtcacattgagcaatttg

SEQ ID NO: 62639 - DNA, 25 bp, Saccharomyces pastorianus
gcacaattttccgtatatcctgtag

SEQ ID NO: 62640 - DNA, 25 bp, Saccharomyces pastorianus
agacgtactagcgaagacacttgaa

SEQ ID NO: 62641 - DNA, 25 bp, Saccharomyces pastorianus
gacggcgaaggatatgttccgggaa

SEQ ID NO: 62642 - DNA, 25 bp, Saccharomyces pastorianus
tttcagacggcgaaggatatgttcc

SEQ ID NO: 62643 - DNA, 25 bp, Saccharomyces pastorianus
agacggcgaaggatatgttccggga

SEQ ID NO: 62644 - DNA, 25 bp, Saccharomyces pastorianus
ctgttatttcagacggcgaaggata

SEQ ID NO: 62645 - DNA, 25 bp, Saccharomyces pastorianus
tgttatttcagacggcgaaggatat

SEQ ID NO: 62646 - DNA, 25 bp, Saccharomyces pastorianus
ttcagacggcgaaggatatgttccg

SEQ ID NO: 62647 - DNA, 25 bp, Saccharomyces pastorianus
tcagacggcgaaggatatgttccgg

SEQ ID NO: 62648 - DNA, 25 bp, Saccharomyces pastorianus
acggcgaaggatatgttccgggaag

SEQ ID NO: 62649 - DNA, 25 bp, Saccharomyces pastorianus
cggcgaaggatatgttccgggaagg

SEQ ID NO: 62650 - DNA, 25 bp, Saccharomyces pastorianus
actgttatttcagacggcgaaggat

SEQ ID NO: 62651 - DNA, 25 bp, Saccharomyces pastorianus
atttcagacggcgaaggatatgttc

SEQ ID NO: 62652 - DNA, 25 bp, Saccharomyces pastorianus
attgaggcacaggattctgcttccc

SEQ ID NO: 62653 - DNA, 25 bp, Saccharomyces pastorianus
gttctagacttcataccgcgtattc

SEQ ID NO: 62654 - DNA, 25 bp, Saccharomyces pastorianus
gatcgtccgaagcaaccaactagtt

SEQ ID NO: 62655 - DNA, 25 bp, Saccharomyces pastorianus
atttcaaggacatgtaccgcaccat

SEQ ID NO: 62656 - DNA, 25 bp, Saccharomyces pastorianus
aataagatatcatcgcccttggcga

SEQ ID NO: 62657 - DNA, 25 bp, Saccharomyces pastorianus
ctgcttcccgcaacgatggtaacga

SEQ ID NO: 62658 - DNA, 25 bp, Saccharomyces pastorianus
gaacgtcatcaaggtgttccccgaa

SEQ ID NO: 62659 - DNA, 25 bp, Saccharomyces pastorianus
gagatttcttattgctgataccgag

SEQ ID NO: 62660 - DNA, 25 bp, Saccharomyces pastorianus
gtgttccccgaaagctcaattaagt

SEQ ID NO: 62661 - DNA, 25 bp, Saccharomyces pastorianus
actagttcagatccatacgttacat

SEQ ID NO: 62662 - DNA, 25 bp, Saccharomyces pastorianus
tgaaggctgccacgacacgaaagat

SEQ ID NO: 62663 - DNA, 25 bp, Saccharomyces pastorianus
aatctcagtgggttagacaagccat

SEQ ID NO: 62664 - DNA, 25 bp, Saccharomyces pastorianus
agtatgacctgtttattgttgacca

SEQ ID NO: 62665 - DNA, 25 bp, Saccharomyces pastorianus
acaagccatggaattgtccccacgg

SEQ ID NO: 62666 - DNA, 25 bp, Saccharomyces pastorianus
ttcgatcgatgtttgctatgcgggc

SEQ ID NO: 62667 - DNA, 25 bp, Saccharomyces pastorianus
aactgtaacagttttcaggtcacaa

SEQ ID NO: 62668 - DNA, 25 bp, Saccharomyces pastorianus
aaacttattataccacagccagtag

SEQ ID NO: 62669 - DNA, 25 bp, Saccharomyces pastorianus
agacatttgatggagttgcgtgatt

SEQ ID NO: 62670 - DNA, 25 bp, Saccharomyces pastorianus
tcaggtgctccaagattcgatcgat

SEQ ID NO: 62671 - DNA, 25 bp, Saccharomyces pastorianus
gttctagacaatcttcctgtttttg

SEQ ID NO: 62672 - DNA, 25 bp, Saccharomyces pastorianus
gtctaaagttgtccataatctcagt

SEQ ID NO: 62673 - DNA, 25 bp, Saccharomyces pastorianus
cacgggcgtcctacaatgagacatt

SEQ ID NO: 62674 - DNA, 25 bp, Saccharomyces pastorianus
ataaaatcaccgtgctctgtgtcgt

SEQ ID NO: 62675 - DNA, 25 bp, Saccharomyces pastorianus
gatcgttaaatactccaccgtggcc

SEQ ID NO: 62676 - DNA, 25 bp, Saccharomyces pastorianus
cgaaacctattcatccaacgactgg

SEQ ID NO: 62677 - DNA, 25 bp, Saccharomyces pastorianus
aagcattcaagttcaccaccaagag

SEQ ID NO: 62678 - DNA, 25 bp, Saccharomyces pastorianus
aagactcacatgtcgtggcagcgga

SEQ ID NO: 62679 - DNA, 25 bp, Saccharomyces pastorianus
gctagttttatcacaatgctcggtt

SEQ ID NO: 62680 - DNA, 25 bp, Saccharomyces pastorianus
gagctcgactattttctgcatacct

SEQ ID NO: 62681 - DNA, 25 bp, Saccharomyces pastorianus
gtgacggtcggcttttgccagtcaa

SEQ ID NO: 62682 - DNA, 25 bp, Saccharomyces pastorianus
tagttgtgtgctaacggccgtgtac

SEQ ID NO: 62683 - DNA, 25 bp, Saccharomyces pastorianus
tattgctctcgtctttatctccaga

SEQ ID NO: 62684 - DNA, 25 bp, Saccharomyces pastorianus
aagaggataccagcgcccgagaaga

SEQ ID NO: 62685 - DNA, 25 bp, Saccharomyces pastorianus
ggaactaacattgggcggttgccga

SEQ ID NO: 62686 - DNA, 25 bp, Saccharomyces pastorianus
aatgtgacggcccttgcatcgttat

SEQ ID NO: 62687 - DNA, 25 bp, Saccharomyces pastorianus
atcgcttcccgagacgtgagtcgat

SEQ ID NO: 62688 - DNA, 25 bp, Saccharomyces pastorianus
tgaatctaatgctcccctaacggcg

SEQ ID NO: 62689 - DNA, 25 bp, Saccharomyces pastorianus
gtacgtaccatatcaaggttcggca

SEQ ID NO: 62690 - DNA, 25 bp, Saccharomyces pastorianus
aacggtagcggcagcaacaaccaca

SEQ ID NO: 62691 - DNA, 25 bp, Saccharomyces pastorianus
gtggatccaatcacccgtatgaatc

SEQ ID NO: 62692 - DNA, 25 bp, Saccharomyces pastorianus
gcatcgttatctccgcaacagggaa

SEQ ID NO: 62693 - DNA, 25 bp, Saccharomyces pastorianus
aggttcggcaacacaaatgctgcag

SEQ ID NO: 62694 - DNA, 25 bp, Saccharomyces pastorianus
actggaatgaatcagcggcatcgct

SEQ ID NO: 62695 - DNA, 25 bp, Saccharomyces pastorianus
cagctctctcatagtaataccggca

SEQ ID NO: 62696 - DNA, 25 bp, Saccharomyces pastorianus
ataaaacctaaatctgttgctgtaa

SEQ ID NO: 62697 - DNA, 25 bp, Saccharomyces pastorianus
gtgtacctcccacaacagtaaagca

SEQ ID NO: 62698 - DNA, 25 bp, Saccharomyces pastorianus
catgacatcaccagccattgcacag

SEQ ID NO: 62699 - DNA, 25 bp, Saccharomyces pastorianus
gatttcatttcaagcagacaatact

SEQ ID NO: 62700 - DNA, 25 bp, Saccharomyces pastorianus
aaaggcatccaagtgtgttgaacaa

SEQ ID NO: 62701 - DNA, 25 bp, Saccharomyces pastorianus
gttgctgtaaaacagtcaccattaa

SEQ ID NO: 62702 - DNA, 25 bp, Saccharomyces pastorianus
aagcagaacgttttggctcgaccca

SEQ ID NO: 62703 - DNA, 25 bp, Saccharomyces pastorianus
ggaacataatatcaatcgacccaaa

SEQ ID NO: 62704 - DNA, 25 bp, Saccharomyces pastorianus
cacagggtgcccacgatagatacgt

SEQ ID NO: 62705 - DNA, 25 bp, Saccharomyces pastorianus
gttttggctcgacccatgacatcac

SEQ ID NO: 62706 - DNA, 25 bp, Saccharomyces pastorianus
gtcctaaacccaaacaacaagcagc

SEQ ID NO: 62707 - DNA, 25 bp, Saccharomyces pastorianus
aggtagaaagttcacgactttggct

SEQ ID NO: 62708 - DNA, 25 bp, Saccharomyces pastorianus
gccaagaaggtctccgctgcctctg

SEQ ID NO: 62709 - DNA, 25 bp, Saccharomyces pastorianus
cacgactttggctaaattatcctct

SEQ ID NO: 62710 - DNA, 25 bp, Saccharomyces pastorianus
gagagttgttgttcctcaagctttg

SEQ ID NO: 62711 - DNA, 25 bp, Saccharomyces pastorianus
agccaggtagaaagttcacgacttt

SEQ ID NO: 62712 - DNA, 25 bp, Saccharomyces pastorianus
ggctaaattatcctcttctgttggt

SEQ ID NO: 62713 - DNA, 25 bp, Saccharomyces pastorianus
ctacgctaagaagagagctttcgcc

SEQ ID NO: 62714 - DNA, 25 bp, Saccharomyces pastorianus
gttgttcctcaagctttgagagttt

SEQ ID NO: 62715 - DNA, 25 bp, Saccharomyces pastorianus
gtagaaagttcacgactttggctaa

SEQ ID NO: 62716 - DNA, 25 bp, Saccharomyces pastorianus
ctctgctgctgcttctgaatccgac

SEQ ID NO: 62717 - DNA, 25 bp, Saccharomyces pastorianus
gacgttgttgccaaattagaagaca

SEQ ID NO: 62718 - DNA, 25 bp, Saccharomyces pastorianus
aaggctaacggctcaattccacaag

SEQ ID NO: 62719 - DNA, 25 bp, Saccharomyces pastorianus
gaaatcaacatgttcagggtccgtt

SEQ ID NO: 62720 - DNA, 25 bp, Saccharomyces pastorianus
gggccatataactatcgtttggtga

SEQ ID NO: 62721 - DNA, 25 bp, Saccharomyces pastorianus
ggtgttttgctttaacttcttgatg

SEQ ID NO: 62722 - DNA, 25 bp, Saccharomyces pastorianus
tgggtggtaccttcacattcttatg

SEQ ID NO: 62723 - DNA, 25 bp, Saccharomyces pastorianus
atatccaaccaaatcatctacagcc

SEQ ID NO: 62724 - DNA, 25 bp, Saccharomyces pastorianus
gcataccttttgttcggctggagta

SEQ ID NO: 62725 - DNA, 25 bp, Saccharomyces pastorianus
tattgggttcctttttcacagggag

SEQ ID NO: 62726 - DNA, 25 bp, Saccharomyces pastorianus
aagcctcaatgactgtgggtggtac

SEQ ID NO: 62727 - DNA, 25 bp, Saccharomyces pastorianus
gactttgatgctgtcgtctatttca

SEQ ID NO: 62728 - DNA, 25 bp, Saccharomyces pastorianus
tcagggtccgtttagtatgtcttct

SEQ ID NO: 62729 - DNA, 25 bp, Saccharomyces pastorianus
tacgatggtcttgtagtggcaacta

SEQ ID NO: 62730 - DNA, 25 bp, Saccharomyces pastorianus
gaactggctcatactttatactctg

SEQ ID NO: 62731 - DNA, 25 bp, Saccharomyces pastorianus
gagaccttgttggaactggctcata

SEQ ID NO: 62732 - DNA, 25 bp, Saccharomyces pastorianus
gatttgaggtttttagcgccatcca

SEQ ID NO: 62733 - DNA, 25 bp, Saccharomyces pastorianus
aagttacatcccttaatgaccatga

SEQ ID NO: 62734 - DNA, 25 bp, Saccharomyces pastorianus
agcgccatccattttggaggtcaga

SEQ ID NO: 62735 - DNA, 25 bp, Saccharomyces pastorianus
cgatctcagaagctacggtggaagt

SEQ ID NO: 62736 - DNA, 25 bp, Saccharomyces pastorianus
gaagtcgagtctaccagtgctgcta

SEQ ID NO: 62737 - DNA, 25 bp, Saccharomyces pastorianus
ggtgtcacaaggttatacctgcccc

SEQ ID NO: 62738 - DNA, 25 bp, Saccharomyces pastorianus
gaaggttcatggttcaaggcctatt

SEQ ID NO: 62739 - DNA, 25 bp, Saccharomyces pastorianus
gtggataccttatgtggtgtcacaa

SEQ ID NO: 62740 - DNA, 25 bp, Saccharomyces pastorianus
ggtggcaactccaaagttcctggat

SEQ ID NO: 62741 - DNA, 25 bp, Saccharomyces pastorianus
cctgaagtcgttttccaaccaacat

SEQ ID NO: 62742 - DNA, 25 bp, Saccharomyces pastorianus
aaaatttggctctcaaccaggcaaa

SEQ ID NO: 62743 - DNA, 25 bp, Saccharomyces pastorianus
gaacatgtcttctgatccttcatta

SEQ ID NO: 62744 - DNA, 25 bp, Saccharomyces pastorianus
aagttccacttctctagacatggtg

SEQ ID NO: 62745 - DNA, 25 bp, Saccharomyces pastorianus
gaggtcctaggcctcacgatagtga

SEQ ID NO: 62746 - DNA, 25 bp, Saccharomyces pastorianus
cttcatctgtttttgagaggtccta

SEQ ID NO: 62747 - DNA, 25 bp, Saccharomyces pastorianus
gagcatgacccaaacttcactgaag

SEQ ID NO: 62748 - DNA, 25 bp, Saccharomyces pastorianus
ccgttggtaccaatttctcagtgaa

SEQ ID NO: 62749 - DNA, 25 bp, Saccharomyces pastorianus
agagttcactgaatttcttcccgtt

SEQ ID NO: 62750 - DNA, 25 bp, Saccharomyces pastorianus
gaatggcagctttggcacaggacaa

SEQ ID NO: 62751 - DNA, 25 bp, Saccharomyces pastorianus
gaactacttgatatcgcagacgaaa

SEQ ID NO: 62752 - DNA, 25 bp, Saccharomyces pastorianus
gcagcaatggcgtcaaacggatcta

SEQ ID NO: 62753 - DNA, 25 bp, Saccharomyces pastorianus
aaaacgctggttttgatgacgaacg

SEQ ID NO: 62754 - DNA, 25 bp, Saccharomyces pastorianus
gacgaaaacctgactgaagaccaaa

SEQ ID NO: 62755 - DNA, 25 bp, Saccharomyces pastorianus
acgtttacaagaacaggcacgattg

SEQ ID NO: 62756 - DNA, 25 bp, Saccharomyces pastorianus
gaaggccagtcaggatgctagacat

SEQ ID NO: 62757 - DNA, 25 bp, Saccharomyces pastorianus
gtggaagcgcctttcacggagattc

SEQ ID NO: 62758 - DNA, 25 bp, Saccharomyces pastorianus
gggatcagctaattgacgaacctaa

SEQ ID NO: 62759 - DNA, 25 bp, Saccharomyces pastorianus
gaattgcgaattcaagccgaaaaga

SEQ ID NO: 62760 - DNA, 25 bp, Saccharomyces pastorianus
tactgtcggtcctacaaaacgctgg

SEQ ID NO: 62761 - DNA, 25 bp, Saccharomyces pastorianus
cacggagattcttcagcctcaaaag

SEQ ID NO: 62762 - DNA, 25 bp, Saccharomyces pastorianus
aatttggctacgacatcagcgccgg

SEQ ID NO: 62763 - DNA, 25 bp, Saccharomyces pastorianus
tctaagttacttcgccaaggactac

SEQ ID NO: 62764 - DNA, 25 bp, Saccharomyces pastorianus
aagtcaaggccaaggtctccgactc

SEQ ID NO: 62765 - DNA, 25 bp, Saccharomyces pastorianus
ttacgccatggctctaagttacttc

SEQ ID NO: 62766 - DNA, 25 bp, Saccharomyces pastorianus
agcaattgttgagaccaggtgttac

SEQ ID NO: 62767 - DNA, 25 bp, Saccharomyces pastorianus
gtcaacgccttcctacaagtcggtg

SEQ ID NO: 62768 - DNA, 25 bp, Saccharomyces pastorianus
aagtcggtgccaaagccaccatgaa

SEQ ID NO: 62769 - DNA, 25 bp, Saccharomyces pastorianus
gactccggtatcgttactttggctt

SEQ ID NO: 62770 - DNA, 25 bp, Saccharomyces pastorianus
gcaagctgcctaacgccaatgtcaa

SEQ ID NO: 62771 - DNA, 25 bp, Saccharomyces pastorianus
ataaccactgttgatttcttccaaa

SEQ ID NO: 62772 - DNA, 25 bp, Saccharomyces pastorianus
tgttactttgggtgttggttcctct

SEQ ID NO: 62773 - DNA, 25 bp, Saccharomyces pastorianus
cactgatgtggaggccaagctgaac

SEQ ID NO: 62774 - DNA, 25 bp, Saccharomyces pastorianus
attgaaggccaaacagccggtcaag

SEQ ID NO: 62775 - DNA, 25 bp, Saccharomyces pastorianus
gacggtccattgtccactgatgtgg

SEQ ID NO: 62776 - DNA, 25 bp, Saccharomyces pastorianus
aaccacaacttccaacggcatcaag

SEQ ID NO: 62777 - DNA, 25 bp, Saccharomyces pastorianus
ggcatcaagtttgcattgaaggcca

SEQ ID NO: 62778 - DNA, 25 bp, Saccharomyces pastorianus
gcatttgacgtacaaaccacaactt

SEQ ID NO: 62779 - DNA, 25 bp, Saccharomyces pastorianus
accccagcagcatttgacgtacaaa

SEQ ID NO: 62780 - DNA, 25 bp, Saccharomyces pastorianus
taaacaaggacttctaccatgccac

SEQ ID NO: 62781 - DNA, 25 bp, Saccharomyces pastorianus
agctgaacgataagcaaactggttt

SEQ ID NO: 62782 - DNA, 25 bp, Saccharomyces pastorianus
caaacagccggtcaaggacggtcca

SEQ ID NO: 62783 - DNA, 25 bp, Saccharomyces pastorianus
tgggtttgacccaaggctggtctaa

SEQ ID NO: 62784 - DNA, 25 bp, Saccharomyces pastorianus
agtcctactcttctgtttcatacag

SEQ ID NO: 62785 - DNA, 25 bp, Saccharomyces pastorianus
aaatgacagctccatcaactcttcg

SEQ ID NO: 62786 - DNA, 25 bp, Saccharomyces pastorianus
gaagtttccccatgctaatgaaccc

SEQ ID NO: 62787 - DNA, 25 bp, Saccharomyces pastorianus
taatgaacccatcgtcgtcgccaaa

SEQ ID NO: 62788 - DNA, 25 bp, Saccharomyces pastorianus
tagacccctccgttgatagcgagtc

SEQ ID NO: 62789 - DNA, 25 bp, Saccharomyces pastorianus
gtggcgtatcaagatcagcatcatt

SEQ ID NO: 62790 - DNA, 25 bp, Saccharomyces pastorianus
ctgaccctgaatgatgcctacaaca

SEQ ID NO: 62791 - DNA, 25 bp, Saccharomyces pastorianus
gagaggctattcgtatgcaacccga

SEQ ID NO: 62792 - DNA, 25 bp, Saccharomyces pastorianus
atgcgatattatggcctgaccctga

SEQ ID NO: 62793 - DNA, 25 bp, Saccharomyces pastorianus
aactcttcggaggtcacgccaagaa

SEQ ID NO: 62794 - DNA, 25 bp, Saccharomyces pastorianus
atgggactcatctttcaactcatgg

SEQ ID NO: 62795 - DNA, 25 bp, Saccharomyces pastorianus
agcatatacgaaactgccctaggta

SEQ ID NO: 62796 - DNA, 25 bp, Saccharomyces pastorianus
gacatagcaacacttcatccgttaa

SEQ ID NO: 62797 - DNA, 25 bp, Saccharomyces pastorianus
aagccggacagtttctccaaacttg

SEQ ID NO: 62798 - DNA, 25 bp, Saccharomyces pastorianus
gacgcctttgaatctgtccatgaag

SEQ ID NO: 62799 - DNA, 25 bp, Saccharomyces pastorianus
gccggcatcatcattctcagaaaaa

SEQ ID NO: 62800 - DNA, 25 bp, Saccharomyces pastorianus
ggagcgaggcttccatatacacact

SEQ ID NO: 62801 - DNA, 25 bp, Saccharomyces pastorianus
gacatctatggcgacatccatcggg

SEQ ID NO: 62802 - DNA, 25 bp, Saccharomyces pastorianus
gagttcattcgctatccgtgaagac

SEQ ID NO: 62803 - DNA, 25 bp, Saccharomyces pastorianus
accatttccggattagaagcctcta

SEQ ID NO: 62804 - DNA, 25 bp, Saccharomyces pastorianus
aaatcaccgcgttctttgcaaaata

SEQ ID NO: 62805 - DNA, 25 bp, Saccharomyces pastorianus
gatccaggttcagtaaagttcccat

SEQ ID NO: 62806 - DNA, 25 bp, Saccharomyces pastorianus
cagcatatgggtaaatcctgcgata

SEQ ID NO: 62807 - DNA, 25 bp, Saccharomyces pastorianus
ctctatcagagggttttccgaaaca

SEQ ID NO: 62808 - DNA, 25 bp, Saccharomyces pastorianus
aaatcaggctctggcacaccaagag

SEQ ID NO: 62809 - DNA, 25 bp, Saccharomyces pastorianus
acattcctgtccttacaagtgtcaa

SEQ ID NO: 62810 - DNA, 25 bp, Saccharomyces pastorianus
gcacctaggccatcttttatcagaa

SEQ ID NO: 62811 - DNA, 25 bp, Saccharomyces pastorianus
atctcagctagtccgttcattattt

SEQ ID NO: 62812 - DNA, 25 bp, Saccharomyces pastorianus
gagagctggtaacattcctgtcctt

SEQ ID NO: 62813 - DNA, 25 bp, Saccharomyces pastorianus
ttctttccaacgtcacaacaagctc

SEQ ID NO: 62814 - DNA, 25 bp, Saccharomyces pastorianus
aattgataataccaccacagccgca

SEQ ID NO: 62815 - DNA, 25 bp, Saccharomyces pastorianus
aatctcggtcaacagaggtggccct

SEQ ID NO: 62816 - DNA, 25 bp, Saccharomyces pastorianus
ggccctgtaggtaagtcactgctca

SEQ ID NO: 62817 - DNA, 25 bp, Saccharomyces pastorianus
gaaagtttcattgaaggagcctgag

SEQ ID NO: 62818 - DNA, 25 bp, Saccharomyces pastorianus
gaacacaatttggagatcgcatcac

SEQ ID NO: 62819 - DNA, 25 bp, Saccharomyces pastorianus
gaggatgatctacgagtacttcata

SEQ ID NO: 62820 - DNA, 25 bp, Saccharomyces pastorianus
gaaggccaggccagaaacaacgtgt

SEQ ID NO: 62821 - DNA, 25 bp, Saccharomyces pastorianus
aactattctgaggttcaaaggcaac

SEQ ID NO: 62822 - DNA, 25 bp, Saccharomyces pastorianus
taaatggtcgtactgccaaggtaaa

SEQ ID NO: 62823 - DNA, 25 bp, Saccharomyces pastorianus
ggcaacaatttctacagagcgctat

SEQ ID NO: 62824 - DNA, 25 bp, Saccharomyces pastorianus
agagcgctatagattacgatacgat

SEQ ID NO: 62825 - DNA, 25 bp, Saccharomyces pastorianus
gatcgcatcacagcagcaaagggat

SEQ ID NO: 62826 - DNA, 25 bp, Saccharomyces pastorianus
gaaatgattgaccaagaaaggccta

SEQ ID NO: 62827 - DNA, 25 bp, Saccharomyces pastorianus
attactttgcaaactattctgaggt

SEQ ID NO: 62828 - DNA, 25 bp, Saccharomyces pastorianus
aggcgaaatcagactccgaccaagg

SEQ ID NO: 62829 - DNA, 25 bp, Saccharomyces pastorianus
gtgcaccgtaactgaacattccaaa

SEQ ID NO: 62830 - DNA, 25 bp, Saccharomyces pastorianus
gtcccgctaatgtctataccactag

SEQ ID NO: 62831 - DNA, 25 bp, Saccharomyces pastorianus
gacgtgagtagtagtttccccatga

SEQ ID NO: 62832 - DNA, 25 bp, Saccharomyces pastorianus
agataggcacaagttttccgtcccg

SEQ ID NO: 62833 - DNA, 25 bp, Saccharomyces pastorianus
attcatactccggacgaattccaac

SEQ ID NO: 62834 - DNA, 25 bp, Saccharomyces pastorianus
catgaactccatccctagattagac

SEQ ID NO: 62835 - DNA, 25 bp, Saccharomyces pastorianus
ggatgaccaacacacgagacctgat

SEQ ID NO: 62836 - DNA, 25 bp, Saccharomyces pastorianus
agcctacccaactacgatgacaaat

SEQ ID NO: 62837 - DNA, 25 bp, Saccharomyces pastorianus
caacgggttgatacacagaggccat

SEQ ID NO: 62838 - DNA, 25 bp, Saccharomyces pastorianus
tactcgcgtgggttttacgttctca

SEQ ID NO: 62839 - DNA, 25 bp, Saccharomyces pastorianus
tatggactcagggactgccaaccgg

SEQ ID NO: 62840 - DNA, 25 bp, Saccharomyces pastorianus
agtagtccaatctgcggtccaatgc

SEQ ID NO: 62841 - DNA, 25 bp, Saccharomyces pastorianus
atgccgaataccaggccattacgtg

SEQ ID NO: 62842 - DNA, 25 bp, Saccharomyces pastorianus
agagctttggccagttgctcgcaaa

SEQ ID NO: 62843 - DNA, 25 bp, Saccharomyces pastorianus
aagcccttggtagtcgtgttggcca

SEQ ID NO: 62844 - DNA, 25 bp, Saccharomyces pastorianus
gaaggaaaccccagtctccagtagt

SEQ ID NO: 62845 - DNA, 25 bp, Saccharomyces pastorianus
tgggtggacattccctgtgtagcac

SEQ ID NO: 62846 - DNA, 25 bp, Saccharomyces pastorianus
gaagctggttgccatctggtttatt

SEQ ID NO: 62847 - DNA, 25 bp, Saccharomyces pastorianus
aatagcgtagcatcgccagcggtat

SEQ ID NO: 62848 - DNA, 25 bp, Saccharomyces pastorianus
cggctgcggaagctgctacacagaa

SEQ ID NO: 62849 - DNA, 25 bp, Saccharomyces pastorianus
tacgatatcaacaccaagcccttgg

SEQ ID NO: 62850 - DNA, 25 bp, Saccharomyces pastorianus
gctgacaatgtctaccaattggctg

SEQ ID NO: 62851 - DNA, 25 bp, Saccharomyces pastorianus
aaagcctcacttcattaccgcatta

SEQ ID NO: 62852 - DNA, 25 bp, Saccharomyces pastorianus
attccaaatctttgccaggctacaa

SEQ ID NO: 62853 - DNA, 25 bp, Saccharomyces pastorianus
gctcttgccactttcgacaaattta

SEQ ID NO: 62854 - DNA, 25 bp, Saccharomyces pastorianus
gaattcagcgccatcgacattaaag

SEQ ID NO: 62855 - DNA, 25 bp, Saccharomyces pastorianus
gatttcaactcgaaccaattggtct

SEQ ID NO: 62856 - DNA, 25 bp, Saccharomyces pastorianus
caaaggatttcgattgggccaaggc

SEQ ID NO: 62857 - DNA, 25 bp, Saccharomyces pastorianus
tggcatccaaggttctgttagacat

SEQ ID NO: 62858 - DNA, 25 bp, Saccharomyces pastorianus
aatggtcactccacggaaaagccaa

SEQ ID NO: 62859 - DNA, 25 bp, Saccharomyces pastorianus
aatttggctgactggttgggcaccg

SEQ ID NO: 62860 - DNA, 25 bp, Saccharomyces pastorianus
ttggatgctgtcgactgggaaactt

SEQ ID NO: 62861 - DNA, 25 bp, Saccharomyces pastorianus
gtgctcacttcggttgcaaggaaat

SEQ ID NO: 62862 - DNA, 25 bp, Saccharomyces pastorianus
tgctcacttcggttgcaaggaaatc

SEQ ID NO: 62863 - DNA, 25 bp, Saccharomyces pastorianus
atcactatacaccagtgctcacttc

SEQ ID NO: 62864 - DNA, 25 bp, Saccharomyces pastorianus
acaccagtgctcacttcggttgcaa

SEQ ID NO: 62865 - DNA, 25 bp, Saccharomyces pastorianus
tatacaccagtgctcacttcggttg

SEQ ID NO: 62866 - DNA, 25 bp, Saccharomyces pastorianus
ctcacttcggttgcaaggaaatctt

SEQ ID NO: 62867 - DNA, 25 bp, Saccharomyces pastorianus
actatacaccagtgctcacttcggt

SEQ ID NO: 62868 - DNA, 25 bp, Saccharomyces pastorianus
acttcggttgcaaggaaatcttact

SEQ ID NO: 62869 - DNA, 25 bp, Saccharomyces pastorianus
accagtgctcacttcggttgcaagg

SEQ ID NO: 62870 - DNA, 25 bp, Saccharomyces pastorianus
cagtgctcacttcggttgcaaggaa

SEQ ID NO: 62871 - DNA, 25 bp, Saccharomyces pastorianus
gtatcactatacaccagtgctcact

SEQ ID NO: 62872 - DNA, 25 bp, Saccharomyces pastorianus
atttattactactcttcgtcatcgc

SEQ ID NO: 62873 - DNA, 25 bp, Saccharomyces pastorianus
aatggcgaagacctggtgactccct

SEQ ID NO: 62874 - DNA, 25 bp, Saccharomyces pastorianus
tgactccctttggttctttcaaaag

SEQ ID NO: 62875 - DNA, 25 bp, Saccharomyces pastorianus
acaccggtttgatttgtgtggccgt

SEQ ID NO: 62876 - DNA, 25 bp, Saccharomyces pastorianus
aagcgagttccattcgtttcagtct

SEQ ID NO: 62877 - DNA, 25 bp, Saccharomyces pastorianus
agtgttttcggacatgcttccctga

SEQ ID NO: 62878 - DNA, 25 bp, Saccharomyces pastorianus
gtcatcgctctggtcatatttggta

SEQ ID NO: 62879 - DNA, 25 bp, Saccharomyces pastorianus
gtttcagtctaaactagcctctctt

SEQ ID NO: 62880 - DNA, 25 bp, Saccharomyces pastorianus
atccagagtggcttacaacctaaaa

SEQ ID NO: 62881 - DNA, 25 bp, Saccharomyces pastorianus
gtgtggccgtaccaataggtttctt

SEQ ID NO: 62882 - DNA, 25 bp, Saccharomyces pastorianus
aagcaatcaactatacaccggtttg

SEQ ID NO: 62883 - DNA, 25 bp, Saccharomyces pastorianus
caatctctcgcttccaataggcaaa

SEQ ID NO: 62884 - DNA, 25 bp, Saccharomyces pastorianus
gaaggaacgaccaactctaccgcaa

SEQ ID NO: 62885 - DNA, 25 bp, Saccharomyces pastorianus
aggaggaagacgtcgccacacgtat

SEQ ID NO: 62886 - DNA, 25 bp, Saccharomyces pastorianus
gtacaaggccacaagaatctccgtt

SEQ ID NO: 62887 - DNA, 25 bp, Saccharomyces pastorianus
aagaccctcagacaagcagttctca

SEQ ID NO: 62888 - DNA, 25 bp, Saccharomyces pastorianus
gcgaactgcgcgatgacttggatga

SEQ ID NO: 62889 - DNA, 25 bp, Saccharomyces pastorianus
agccaaccgaagctcgtgcgaagga

SEQ ID NO: 62890 - DNA, 25 bp, Saccharomyces pastorianus
acgtatccctctaggtacaaggcca

SEQ ID NO: 62891 - DNA, 25 bp, Saccharomyces pastorianus
cagttctcaccctctactaaggaaa

SEQ ID NO: 62892 - DNA, 25 bp, Saccharomyces pastorianus
atacgcttcaacacatcggtgacat

SEQ ID NO: 62893 - DNA, 25 bp, Saccharomyces pastorianus
agatccacgtcctcgttcggagtaa

SEQ ID NO: 62894 - DNA, 25 bp, Saccharomyces pastorianus
tctgctggagattatattcgggacc

SEQ ID NO: 62895 - DNA, 25 bp, Saccharomyces pastorianus
gaacaagtctctgctggagattata

SEQ ID NO: 62896 - DNA, 25 bp, Saccharomyces pastorianus
cagccagccagaaaagagtagcgat

SEQ ID NO: 62897 - DNA, 25 bp, Saccharomyces pastorianus
tgtaagaacaagtctctgctggaga

SEQ ID NO: 62898 - DNA, 25 bp, Saccharomyces pastorianus
gaaaagagtagcgatagcaatcata

SEQ ID NO: 62899 - DNA, 25 bp, Saccharomyces pastorianus
tggagattatattcgggaccaatgt

SEQ ID NO: 62900 - DNA, 25 bp, Saccharomyces pastorianus
aagtctctgctggagattatattcg

SEQ ID NO: 62901 - DNA, 25 bp, Saccharomyces pastorianus
gtcacagccagccagaaaagagtag

SEQ ID NO: 62902 - DNA, 25 bp, Saccharomyces pastorianus
gcctgtaagaacaagtctctgctgg

SEQ ID NO: 62903 - DNA, 25 bp, Saccharomyces pastorianus
aatgcctgtaagaacaagtctctgc

SEQ ID NO: 62904 - DNA, 25 bp, Saccharomyces pastorianus
gatagcaatcataataatgcctgta

SEQ ID NO: 62905 - DNA, 25 bp, Saccharomyces pastorianus
gaattcggtacattagaactcttgt

SEQ ID NO: 62906 - DNA, 25 bp, Saccharomyces pastorianus
caaatgctgaattggctgccctaac

SEQ ID NO: 62907 - DNA, 25 bp, Saccharomyces pastorianus
aagcctacgagatcattttatgtgg

SEQ ID NO: 62908 - DNA, 25 bp, Saccharomyces pastorianus
aaatttcttctttggctagcaagct

SEQ ID NO: 62909 - DNA, 25 bp, Saccharomyces pastorianus
ttatgaaaggcaaaccaatacgggt

SEQ ID NO: 62910 - DNA, 25 bp, Saccharomyces pastorianus
gctgggttcaatgctacaaaacctg

SEQ ID NO: 62911 - DNA, 25 bp, Saccharomyces pastorianus
ctgaatctggtgagaaaatttcttc

SEQ ID NO: 62912 - DNA, 25 bp, Saccharomyces pastorianus
gaactcttgttgcaaatttttaagg

SEQ ID NO: 62913 - DNA, 25 bp, Saccharomyces pastorianus
tctttggctagcaagctgggttcaa

SEQ ID NO: 62914 - DNA, 25 bp, Saccharomyces pastorianus
ggaatttgaagcctacgagatcatt

SEQ ID NO: 62915 - DNA, 25 bp, Saccharomyces pastorianus
ggtaaaatcacgtccatttcaaatg

SEQ ID NO: 62916 - DNA, 25 bp, Saccharomyces pastorianus
agcgattgtgcgtaatgcatccaaa

SEQ ID NO: 62917 - DNA, 25 bp, Saccharomyces pastorianus
gacagaatcattgacgttgtgatta

SEQ ID NO: 62918 - DNA, 25 bp, Saccharomyces pastorianus
cgaaggctttttgaacgagtggagt

SEQ ID NO: 62919 - DNA, 25 bp, Saccharomyces pastorianus
tcgtggattccaagtaatattttac

SEQ ID NO: 62920 - DNA, 25 bp, Saccharomyces pastorianus
gaagggttttatcgtggattccaag

SEQ ID NO: 62921 - DNA, 25 bp, Saccharomyces pastorianus
cgattttcaaaggaactgggctaca

SEQ ID NO: 62922 - DNA, 25 bp, Saccharomyces pastorianus
ggaactgggctacaattgtccaaag

SEQ ID NO: 62923 - DNA, 25 bp, Saccharomyces pastorianus
ttgtccaaagtgaacgggatagttg

SEQ ID NO: 62924 - DNA, 25 bp, Saccharomyces pastorianus
tgtttgtgagagaaccaagtgtgga

SEQ ID NO: 62925 - DNA, 25 bp, Saccharomyces pastorianus
gtgtggagacggtaacgattttcaa

SEQ ID NO: 62926 - DNA, 25 bp, Saccharomyces pastorianus
aatattttaccttgcagcgattgtg

SEQ ID NO: 62927 - DNA, 25 bp, Saccharomyces pastorianus
attacttgtcccattgcaacgtcaa

SEQ ID NO: 62928 - DNA, 25 bp, Saccharomyces pastorianus
gccaccgtgcaaactgcggtacaga

SEQ ID NO: 62929 - DNA, 25 bp, Saccharomyces pastorianus
caacgtcaagagacagtttggcaga

SEQ ID NO: 62930 - DNA, 25 bp, Saccharomyces pastorianus
gtaccatgaacagtcgcaaaaccta

SEQ ID NO: 62931 - DNA, 25 bp, Saccharomyces pastorianus
gaacagtcgcaaaacctagtacatt

SEQ ID NO: 62932 - DNA, 25 bp, Saccharomyces pastorianus
actgcggtacagaatggccaattgc

SEQ ID NO: 62933 - DNA, 25 bp, Saccharomyces pastorianus
agtgtacggtctgctgtacaacgta

SEQ ID NO: 62934 - DNA, 25 bp, Saccharomyces pastorianus
atggccaattgcaagtgtacggtct

SEQ ID NO: 62935 - DNA, 25 bp, Saccharomyces pastorianus
gagaagtctcattacttgtcccatt

SEQ ID NO: 62936 - DNA, 25 bp, Saccharomyces pastorianus
gtacatttggaaacagagcgcgaga

SEQ ID NO: 62937 - DNA, 25 bp, Saccharomyces pastorianus
agaattatcgaaaacgccaccgtgc

SEQ ID NO: 62938 - DNA, 25 bp, Saccharomyces pastorianus
atcataatggtaagggcagtcccct

SEQ ID NO: 62939 - DNA, 25 bp, Saccharomyces pastorianus
atgaacattgttcaaccaaccttgt

SEQ ID NO: 62940 - DNA, 25 bp, Saccharomyces pastorianus
gacgctaacgtcaagtgggcttccc

SEQ ID NO: 62941 - DNA, 25 bp, Saccharomyces pastorianus
tgttcaaccaaccttgttcccggat

SEQ ID NO: 62942 - DNA, 25 bp, Saccharomyces pastorianus
tatcgactcctcttcaatcttcaca

SEQ ID NO: 62943 - DNA, 25 bp, Saccharomyces pastorianus
ttcaatcttcacactgagccacgac

SEQ ID NO: 62944 - DNA, 25 bp, Saccharomyces pastorianus
tcaagtgggcttcccagatgaacat

SEQ ID NO: 62945 - DNA, 25 bp, Saccharomyces pastorianus
tacaagacattttggacgctaacgt

SEQ ID NO: 62946 - DNA, 25 bp, Saccharomyces pastorianus
accttgttcccggatcataatggta

SEQ ID NO: 62947 - DNA, 25 bp, Saccharomyces pastorianus
atgagcgctatcgactcctcttcaa

SEQ ID NO: 62948 - DNA, 25 bp, Saccharomyces pastorianus
tgagccacgactcaaatctacaaga

SEQ ID NO: 62949 - DNA, 25 bp, Saccharomyces pastorianus
tagtagacgtctatcctggctttat

SEQ ID NO: 62950 - DNA, 25 bp, Saccharomyces pastorianus
gccacagcctttatactttggtgat

SEQ ID NO: 62951 - DNA, 25 bp, Saccharomyces pastorianus
aagaagccccaacaagcctagagga

SEQ ID NO: 62952 - DNA, 25 bp, Saccharomyces pastorianus
tggagttgtaatcccacatgcacat

SEQ ID NO: 62953 - DNA, 25 bp, Saccharomyces pastorianus
tcctgcggatggctatctccaaaga

SEQ ID NO: 62954 - DNA, 25 bp, Saccharomyces pastorianus
tgacgagttgaaagagccacagcct

SEQ ID NO: 62955 - DNA, 25 bp, Saccharomyces pastorianus
tcaagtcatcaactacgcgtcgatc

SEQ ID NO: 62956 - DNA, 25 bp, Saccharomyces pastorianus
gagggatgtccttgtatcagcacaa

SEQ ID NO: 62957 - DNA, 25 bp, Saccharomyces pastorianus
tacaccggaaagcttctgggattat

SEQ ID NO: 62958 - DNA, 25 bp, Saccharomyces pastorianus
tggctttatcgctaccggcaaaact

SEQ ID NO: 62959 - DNA, 25 bp, Saccharomyces pastorianus
gctacgcctgttaccattcaaagat

SEQ ID NO: 62960 - DNA, 25 bp, Saccharomyces pastorianus
atacggactccgtgagcagtttggg

SEQ ID NO: 62961 - DNA, 25 bp, Saccharomyces pastorianus
ttgttggcgaacatcccgtcaggaa

SEQ ID NO: 62962 - DNA, 25 bp, Saccharomyces pastorianus
cgcccattttggagactatacggta

SEQ ID NO: 62963 - DNA, 25 bp, Saccharomyces pastorianus
tgtttgctttggatacggactccgt

SEQ ID NO: 62964 - DNA, 25 bp, Saccharomyces pastorianus
atcccgtcaggaatgtccatggtaa

SEQ ID NO: 62965 - DNA, 25 bp, Saccharomyces pastorianus
gaactatacgcccattttggagact

SEQ ID NO: 62966 - DNA, 25 bp, Saccharomyces pastorianus
gaagctggcgtcagccatcaacaga

SEQ ID NO: 62967 - DNA, 25 bp, Saccharomyces pastorianus
gaaaagcacggtttcgtggtcccat

SEQ ID NO: 62968 - DNA, 25 bp, Saccharomyces pastorianus
ctatacggtagaggttctcggcggt

SEQ ID NO: 62969 - DNA, 25 bp, Saccharomyces pastorianus
gagggaccgacccaacgaaacactg

SEQ ID NO: 62970 - DNA, 25 bp, Saccharomyces pastorianus
ttctcggcggtgtcatgaagctggc

SEQ ID NO: 62971 - DNA, 25 bp, Saccharomyces pastorianus
gtctggattgctggtgaactgttat

SEQ ID NO: 62972 - DNA, 25 bp, Saccharomyces pastorianus
ggctgccgattgtgtgtacctagaa

SEQ ID NO: 62973 - DNA, 25 bp, Saccharomyces pastorianus
atatccccacccgtaatcttaatgg

SEQ ID NO: 62974 - DNA, 25 bp, Saccharomyces pastorianus
ataacgttgatctggttctggctgc

SEQ ID NO: 62975 - DNA, 25 bp, Saccharomyces pastorianus
gcttgacctcactaactgtatatcc

SEQ ID NO: 62976 - DNA, 25 bp, Saccharomyces pastorianus
aactgggtagcggtactggtctagt

SEQ ID NO: 62977 - DNA, 25 bp, Saccharomyces pastorianus
taaagtccagtatgaggttctcgca

SEQ ID NO: 62978 - DNA, 25 bp, Saccharomyces pastorianus
atcagcggatttttcacctcaggaa

SEQ ID NO: 62979 - DNA, 25 bp, Saccharomyces pastorianus
agcagaaaacccacttgttccaact

SEQ ID NO: 62980 - DNA, 25 bp, Saccharomyces pastorianus
actggtctagttggattatgcgtgg

SEQ ID NO: 62981 - DNA, 25 bp, Saccharomyces pastorianus
tagagagaacgctgcttgacctcac

SEQ ID NO: 62982 - DNA, 25 bp, Saccharomyces pastorianus
gaatttcaagcacgtaccacagcga

SEQ ID NO: 62983 - DNA, 25 bp, Saccharomyces pastorianus
atttccctgcgctcgattgatgaag

SEQ ID NO: 62984 - DNA, 25 bp, Saccharomyces pastorianus
ctcctcagcgtcattttattcgtga

SEQ ID NO: 62985 - DNA, 25 bp, Saccharomyces pastorianus
ggcagaagctttcccactatttgaa

SEQ ID NO: 62986 - DNA, 25 bp, Saccharomyces pastorianus
ggagcttttggttggtcatttcgac

SEQ ID NO: 62987 - DNA, 25 bp, Saccharomyces pastorianus
aagaggttttcttggccgattctat

SEQ ID NO: 62988 - DNA, 25 bp, Saccharomyces pastorianus
aagactgcgctggtgtaccctgaaa

SEQ ID NO: 62989 - DNA, 25 bp, Saccharomyces pastorianus
gagaagactagattccccagtagct

SEQ ID NO: 62990 - DNA, 25 bp, Saccharomyces pastorianus
acggatttttagttcacagcctggt

SEQ ID NO: 62991 - DNA, 25 bp, Saccharomyces pastorianus
acactgaacgcgacatggagctttt

SEQ ID NO: 62992 - DNA, 25 bp, Saccharomyces pastorianus
gtaggccgattttatcactggcaga

SEQ ID NO: 62993 - DNA, 25 bp, Saccharomyces pastorianus
tagcttgtccaccatgtacggagac

SEQ ID NO: 62994 - DNA, 25 bp, Saccharomyces pastorianus
acgatttagtttgtccgtgtggcaa

SEQ ID NO: 62995 - DNA, 25 bp, Saccharomyces pastorianus
gtgggaaaccattgtccggctgtca

SEQ ID NO: 62996 - DNA, 25 bp, Saccharomyces pastorianus
gtaatctaactctatcctgtggaag

SEQ ID NO: 62997 - DNA, 25 bp, Saccharomyces pastorianus
tccggctgtcatcatacttgtcaaa

SEQ ID NO: 62998 - DNA, 25 bp, Saccharomyces pastorianus
atcccggaaaatgctcaccttgttt

SEQ ID NO: 62999 - DNA, 25 bp, Saccharomyces pastorianus
atacctgtcatcctttagacctagc

SEQ ID NO: 63000 - DNA, 25 bp, Saccharomyces pastorianus
accttgcgccgcactagtgaaaatt

SEQ ID NO: 63001 - DNA, 25 bp, Saccharomyces pastorianus
aagctaccactatgtaaccacgcat

SEQ ID NO: 63002 - DNA, 25 bp, Saccharomyces pastorianus
taagagtgaatgtcccgatttacct

SEQ ID NO: 63003 - DNA, 25 bp, Saccharomyces pastorianus
atgccccaaaccttgtcatggtaag

SEQ ID NO: 63004 - DNA, 25 bp, Saccharomyces pastorianus
cactcgtcctgttgtgatagggtgt

SEQ ID NO: 63005 - DNA, 25 bp, Saccharomyces pastorianus
tgtatctaatacttcgacgttcaaa

SEQ ID NO: 63006 - DNA, 25 bp, Saccharomyces pastorianus
ggaccatttgtacctcgtagacggc

SEQ ID NO: 63007 - DNA, 25 bp, Saccharomyces pastorianus
aagaccaggccgtgattcgtttttg

SEQ ID NO: 63008 - DNA, 25 bp, Saccharomyces pastorianus
gaaaacatccctctcaggacattga

SEQ ID NO: 63009 - DNA, 25 bp, Saccharomyces pastorianus
gacgttatctttgtcctggattcta

SEQ ID NO: 63010 - DNA, 25 bp, Saccharomyces pastorianus
cattcattaccagttccccaaaaat

SEQ ID NO: 63011 - DNA, 25 bp, Saccharomyces pastorianus
gtgtttagcagtgactacgaccttc

SEQ ID NO: 63012 - DNA, 25 bp, Saccharomyces pastorianus
agctcagatatcgataactacccaa

SEQ ID NO: 63013 - DNA, 25 bp, Saccharomyces pastorianus
atataaaaagcctcactcgtcctgt

SEQ ID NO: 63014 - DNA, 25 bp, Saccharomyces pastorianus
cagactatgccgtgtaccagcctaa

SEQ ID NO: 63015 - DNA, 25 bp, Saccharomyces pastorianus
catcgtgattttagtactgttgaca

SEQ ID NO: 63016 - DNA, 25 bp, Saccharomyces pastorianus
cttcatcgtgattttagtactgttg

SEQ ID NO: 63017 - DNA, 25 bp, Saccharomyces pastorianus
gtgattttagtactgttgacaccag

SEQ ID NO: 63018 - DNA, 25 bp, Saccharomyces pastorianus
aggcctagcaacagctccatttcag

SEQ ID NO: 63019 - DNA, 25 bp, Saccharomyces pastorianus
ttgacaccaggcctagcaacagctc

SEQ ID NO: 63020 - DNA, 25 bp, Saccharomyces pastorianus
attttagtactgttgacaccaggcc

SEQ ID NO: 63021 - DNA, 25 bp, Saccharomyces pastorianus
tagtactgttgacaccaggcctagc

SEQ ID NO: 63022 - DNA, 25 bp, Saccharomyces pastorianus
gcctagcaacagctccatttcaggt

SEQ ID NO: 63023 - DNA, 25 bp, Saccharomyces pastorianus
gtactgttgacaccaggcctagcaa

SEQ ID NO: 63024 - DNA, 25 bp, Saccharomyces pastorianus
actgttgacaccaggcctagcaaca

SEQ ID NO: 63025 - DNA, 25 bp, Saccharomyces pastorianus
tttagtactgttgacaccaggccta

SEQ ID NO: 63026 - DNA, 25 bp, Saccharomyces pastorianus
gcaacagctccatttcaggtacaat

SEQ ID NO: 63027 - DNA, 25 bp, Saccharomyces pastorianus
catcgtgattttagtactgttgaca

SEQ ID NO: 63028 - DNA, 25 bp, Saccharomyces pastorianus
cttcatcgtgattttagtactgttg

SEQ ID NO: 63029 - DNA, 25 bp, Saccharomyces pastorianus
aggcctagcaacagctccatttcag

SEQ ID NO: 63030 - DNA, 25 bp, Saccharomyces pastorianus
atgcaaaggttcttcatcgtgattt

SEQ ID NO: 63031 - DNA, 25 bp, Saccharomyces pastorianus
ttgacaccaggcctagcaacagctc

SEQ ID NO: 63032 - DNA, 25 bp, Saccharomyces pastorianus
gcctagcaacagctccatttcaggt

SEQ ID NO: 63033 - DNA, 25 bp, Saccharomyces pastorianus
attttagtactgttgacaccaggcc

SEQ ID NO: 63034 - DNA, 25 bp, Saccharomyces pastorianus
gtactgttgacaccaggcctagcaa

SEQ ID NO: 63035 - DNA, 25 bp, Saccharomyces pastorianus
ttagtactgttgacaccaggcctag

SEQ ID NO: 63036 - DNA, 25 bp, Saccharomyces pastorianus
actgttgacaccaggcctagcaaca

SEQ ID NO: 63037 - DNA, 25 bp, Saccharomyces pastorianus
aacgccttttacaccagaattctag

SEQ ID NO: 63038 - DNA, 25 bp, Saccharomyces pastorianus
tcttcctctcggtgattgcgatgaa

SEQ ID NO: 63039 - DNA, 25 bp, Saccharomyces pastorianus
tcagaattccagttcgatcttcctc

SEQ ID NO: 63040 - DNA, 25 bp, Saccharomyces pastorianus
aagcgatcctcgatgccgggagcta

SEQ ID NO: 63041 - DNA, 25 bp, Saccharomyces pastorianus
gctattgctccctgaagatgactca

SEQ ID NO: 63042 - DNA, 25 bp, Saccharomyces pastorianus
aagggaccattaacgagatctcagt

SEQ ID NO: 63043 - DNA, 25 bp, Saccharomyces pastorianus
ataacattgatctcgcttgcctgat

SEQ ID NO: 63044 - DNA, 25 bp, Saccharomyces pastorianus
gatgccttgctctatgtgatgaatg

SEQ ID NO: 63045 - DNA, 25 bp, Saccharomyces pastorianus
taagggacctggcttggaatctctc

SEQ ID NO: 63046 - DNA, 25 bp, Saccharomyces pastorianus
gaggcgttaacacgtctatcgacca

SEQ ID NO: 63047 - DNA, 25 bp, Saccharomyces pastorianus
ggaatctctcaatgtggtccatttt

SEQ ID NO: 63048 - DNA, 25 bp, Saccharomyces pastorianus
gaatcatctgtgtagaagacatcat

SEQ ID NO: 63049 - DNA, 25 bp, Saccharomyces pastorianus
gttgggagaccatggaatcatctgt

SEQ ID NO: 63050 - DNA, 25 bp, Saccharomyces pastorianus
gaacccgtcagttctcaaatgcggc

SEQ ID NO: 63051 - DNA, 25 bp, Saccharomyces pastorianus
gaggcagaatcaagaacccgtcagt

SEQ ID NO: 63052 - DNA, 25 bp, Saccharomyces pastorianus
ttgctactatgggtgaatcgttttc

SEQ ID NO: 63053 - DNA, 25 bp, Saccharomyces pastorianus
gacatcattcatgagattgctacta

SEQ ID NO: 63054 - DNA, 25 bp, Saccharomyces pastorianus
gaatcgttttctgcctgcaactttt

SEQ ID NO: 63055 - DNA, 25 bp, Saccharomyces pastorianus
gatgccgaatctcatgaaatagttc

SEQ ID NO: 63056 - DNA, 25 bp, Saccharomyces pastorianus
tgcaactttttcctacaaccattca

SEQ ID NO: 63057 - DNA, 25 bp, Saccharomyces pastorianus
acaagggtgagaatgatgccgaatc

SEQ ID NO: 63058 - DNA, 25 bp, Saccharomyces pastorianus
ctcaaatgcggctactgcaccagtt

SEQ ID NO: 63059 - DNA, 25 bp, Saccharomyces pastorianus
aaatcaccgaaaaacctaagcatgt

SEQ ID NO: 63060 - DNA, 25 bp, Saccharomyces pastorianus
tgaactccaacccagaggtcctttt

SEQ ID NO: 63061 - DNA, 25 bp, Saccharomyces pastorianus
aaacctaagcatgttgagcaggaat

SEQ ID NO: 63062 - DNA, 25 bp, Saccharomyces pastorianus
gaatctgccgatttgaaggaaagcg

SEQ ID NO: 63063 - DNA, 25 bp, Saccharomyces pastorianus
aacagatttgtcagagcagagagca

SEQ ID NO: 63064 - DNA, 25 bp, Saccharomyces pastorianus
aactacatacgatggcgaacctgct

SEQ ID NO: 63065 - DNA, 25 bp, Saccharomyces pastorianus
atgtcatctgcccaagaaagtaaaa

SEQ ID NO: 63066 - DNA, 25 bp, Saccharomyces pastorianus
aagccttgaactccaacccagaggt

SEQ ID NO: 63067 - DNA, 25 bp, Saccharomyces pastorianus
agcagagagcatagtcgcgaagact

SEQ ID NO: 63068 - DNA, 25 bp, Saccharomyces pastorianus
gaatcgagagacaagaactagcaaa

SEQ ID NO: 63069 - DNA, 25 bp, Saccharomyces pastorianus
gtcgcgaagactttggctacatcca

SEQ ID NO: 63070 - DNA, 25 bp, Saccharomyces pastorianus
tttgtttcacacaccgtcgcggcaa

SEQ ID NO: 63071 - DNA, 25 bp, Saccharomyces pastorianus
aaacttgccctcaggtgatcattct

SEQ ID NO: 63072 - DNA, 25 bp, Saccharomyces pastorianus
agaggtgtcccagctagtttattaa

SEQ ID NO: 63073 - DNA, 25 bp, Saccharomyces pastorianus
gataggtatctgaccgtgggcacat

SEQ ID NO: 63074 - DNA, 25 bp, Saccharomyces pastorianus
tagctgctttactatgttccagtgc

SEQ ID NO: 63075 - DNA, 25 bp, Saccharomyces pastorianus
gaaatcggtgcaaacttgccctcag

SEQ ID NO: 63076 - DNA, 25 bp, Saccharomyces pastorianus
cgcggcaatgatcattgtcccacta

SEQ ID NO: 63077 - DNA, 25 bp, Saccharomyces pastorianus
tgtcccactaatgagcgaaatcggt

SEQ ID NO: 63078 - DNA, 25 bp, Saccharomyces pastorianus
gaccgtgggcacattcattacaaga

SEQ ID NO: 63079 - DNA, 25 bp, Saccharomyces pastorianus
caacgtgaccgcaatttcgatgatt

SEQ ID NO: 63080 - DNA, 25 bp, Saccharomyces pastorianus
gttccagtgctatgggtctaccaac

SEQ ID NO: 63081 - DNA, 25 bp, Saccharomyces pastorianus
agaatccagcaccatatctccgaga

SEQ ID NO: 63082 - DNA, 25 bp, Saccharomyces pastorianus
acccagcacaggttgtccttgaaaa

SEQ ID NO: 63083 - DNA, 25 bp, Saccharomyces pastorianus
gacagatatgtccatcgattccgcg

SEQ ID NO: 63084 - DNA, 25 bp, Saccharomyces pastorianus
gcagcagcgtcagagaaggttcagt

SEQ ID NO: 63085 - DNA, 25 bp, Saccharomyces pastorianus
caggaagtccaagtcgcagcagcgt

SEQ ID NO: 63086 - DNA, 25 bp, Saccharomyces pastorianus
gagaccattcttacgtatgccaact

SEQ ID NO: 63087 - DNA, 25 bp, Saccharomyces pastorianus
accaacaacgcgaactctttgcaaa

SEQ ID NO: 63088 - DNA, 25 bp, Saccharomyces pastorianus
ttgaataaggatacccgccaaccct

SEQ ID NO: 63089 - DNA, 25 bp, Saccharomyces pastorianus
agagattgatatccgtctacaccca

SEQ ID NO: 63090 - DNA, 25 bp, Saccharomyces pastorianus
tctacacccaactttccgagttgaa

SEQ ID NO: 63091 - DNA, 25 bp, Saccharomyces pastorianus
actacatcaagtttcactcgcacgt

SEQ ID NO: 63092 - DNA, 25 bp, Saccharomyces pastorianus
aaaatatcagtccgccaagaccgat

SEQ ID NO: 63093 - DNA, 25 bp, Saccharomyces pastorianus
aatatcagtccgccaagaccgataa

SEQ ID NO: 63094 - DNA, 25 bp, Saccharomyces pastorianus
atatcagtccgccaagaccgataac

SEQ ID NO: 63095 - DNA, 25 bp, Saccharomyces pastorianus
aagaaaatatcagtccgccaagacc

SEQ ID NO: 63096 - DNA, 25 bp, Saccharomyces pastorianus
gaaagaaaatatcagtccgccaaga

SEQ ID NO: 63097 - DNA, 25 bp, Saccharomyces pastorianus
aaatatcagtccgccaagaccgata

SEQ ID NO: 63098 - DNA, 25 bp, Saccharomyces pastorianus
gaaaatatcagtccgccaagaccga

SEQ ID NO: 63099 - DNA, 25 bp, Saccharomyces pastorianus
agaaaatatcagtccgccaagaccg

SEQ ID NO: 63100 - DNA, 25 bp, Saccharomyces pastorianus
aaagaaaatatcagtccgccaagac

SEQ ID NO: 63101 - DNA, 25 bp, Saccharomyces pastorianus
acaattatcctttggtgcctttcca

SEQ ID NO: 63102 - DNA, 25 bp, Saccharomyces pastorianus
aaatcctacaattgcatccatctcg

SEQ ID NO: 63103 - DNA, 25 bp, Saccharomyces pastorianus
gttctcttgatcataactttcccac

SEQ ID NO: 63104 - DNA, 25 bp, Saccharomyces pastorianus
gaactgcacctatgctaaggcctta

SEQ ID NO: 63105 - DNA, 25 bp, Saccharomyces pastorianus
tgatccgttcactttgacacaatgg

SEQ ID NO: 63106 - DNA, 25 bp, Saccharomyces pastorianus
tgtccacaatggcacacctaatcaa

SEQ ID NO: 63107 - DNA, 25 bp, Saccharomyces pastorianus
tgcgttaccggtgtgtttcatttgt

SEQ ID NO: 63108 - DNA, 25 bp, Saccharomyces pastorianus
tcgcctctaacatcggtggtatgtc

SEQ ID NO: 63109 - DNA, 25 bp, Saccharomyces pastorianus
ttgtatcatggcgacttgggttctc

SEQ ID NO: 63110 - DNA, 25 bp, Saccharomyces pastorianus
acgatcgtcgtcttggccatgggag

SEQ ID NO: 63111 - DNA, 25 bp, Saccharomyces pastorianus
catcgcttctcctcagaatattttc

SEQ ID NO: 63112 - DNA, 25 bp, Saccharomyces pastorianus
ttgcaatggaccgaagcacgtcgtt

SEQ ID NO: 63113 - DNA, 25 bp, Saccharomyces pastorianus
ccaagggtgttatctccaaggagtt

SEQ ID NO: 63114 - DNA, 25 bp, Saccharomyces pastorianus
tagaattagatcctggtacccagcc

SEQ ID NO: 63115 - DNA, 25 bp, Saccharomyces pastorianus
cgacagatcatcacgtatggtggcc

SEQ ID NO: 63116 - DNA, 25 bp, Saccharomyces pastorianus
tttgccgatttgcacgacagatcat

SEQ ID NO: 63117 - DNA, 25 bp, Saccharomyces pastorianus
tacccagcctcagtggaccatgata

SEQ ID NO: 63118 - DNA, 25 bp, Saccharomyces pastorianus
tctaagcaattagcagaccgtgaaa

SEQ ID NO: 63119 - DNA, 25 bp, Saccharomyces pastorianus
ttgaccgacaagagcttaacaccag

SEQ ID NO: 63120 - DNA, 25 bp, Saccharomyces pastorianus
gaaacctttgcccaagatttagcta

SEQ ID NO: 63121 - DNA, 25 bp, Saccharomyces pastorianus
gaaacgatcacgacaatgccattga

SEQ ID NO: 63122 - DNA, 25 bp, Saccharomyces pastorianus
gaccgtgaaagagaactactgccaa

SEQ ID NO: 63123 - DNA, 25 bp, Saccharomyces pastorianus
tcagttcggtcatatctttgccttt

SEQ ID NO: 63124 - DNA, 25 bp, Saccharomyces pastorianus
tgtctctgccggtactgtggaatac

SEQ ID NO: 63125 - DNA, 25 bp, Saccharomyces pastorianus
gattgttccgtgcaaagacgtcacc

SEQ ID NO: 63126 - DNA, 25 bp, Saccharomyces pastorianus
taaactggtcgggtatgtctctgcc

SEQ ID NO: 63127 - DNA, 25 bp, Saccharomyces pastorianus
gtgacatcagaaccttgtacggcat

SEQ ID NO: 63128 - DNA, 25 bp, Saccharomyces pastorianus
attcattccttttccgattctcagt

SEQ ID NO: 63129 - DNA, 25 bp, Saccharomyces pastorianus
ggaatacctgtactctcacgatgac

SEQ ID NO: 63130 - DNA, 25 bp, Saccharomyces pastorianus
aaaaagccgctgtcagactcggtaa

SEQ ID NO: 63131 - DNA, 25 bp, Saccharomyces pastorianus
aattatcgaagaagccccagtgacc

SEQ ID NO: 63132 - DNA, 25 bp, Saccharomyces pastorianus
atcgatttcgagttcaagacccaag

SEQ ID NO: 63133 - DNA, 25 bp, Saccharomyces pastorianus
cccagtgaccattgccaaggcggaa

SEQ ID NO: 63134 - DNA, 25 bp, Saccharomyces pastorianus
agggttccaccctgagctaggtatc

SEQ ID NO: 63135 - DNA, 25 bp, Saccharomyces pastorianus
gaagcaccatgcatgttcggagatc

SEQ ID NO: 63136 - DNA, 25 bp, Saccharomyces pastorianus
gaagagggttcagcaccgggttcca

SEQ ID NO: 63137 - DNA, 25 bp, Saccharomyces pastorianus
acaatcagtgtctcaggtaacccca

SEQ ID NO: 63138 - DNA, 25 bp, Saccharomyces pastorianus
cacggtccgctttatggtgcaagca

SEQ ID NO: 63139 - DNA, 25 bp, Saccharomyces pastorianus
gagatcagggcctcttcgttgagtg

SEQ ID NO: 63140 - DNA, 25 bp, Saccharomyces pastorianus
tatcctgttgtgtcagaaccggctg

SEQ ID NO: 63141 - DNA, 25 bp, Saccharomyces pastorianus
gaaccggctgcgtgacaagtggcac

SEQ ID NO: 63142 - DNA, 25 bp, Saccharomyces pastorianus
tcgcacgagctggtccattattttg

SEQ ID NO: 63143 - DNA, 25 bp, Saccharomyces pastorianus
ggaatgtcttcgatgctacgagcat

SEQ ID NO: 63144 - DNA, 25 bp, Saccharomyces pastorianus
aagactctaaagctcgggccctgaa

SEQ ID NO: 63145 - DNA, 25 bp, Saccharomyces pastorianus
gaatgggaagcttccttggaaccaa

SEQ ID NO: 63146 - DNA, 25 bp, Saccharomyces pastorianus
gaaaactatttcctatccatcgcac

SEQ ID NO: 63147 - DNA, 25 bp, Saccharomyces pastorianus
aaatttgtcacttccattgtcaaca

SEQ ID NO: 63148 - DNA, 25 bp, Saccharomyces pastorianus
gctgccaaacaactacgtctacatg

SEQ ID NO: 63149 - DNA, 25 bp, Saccharomyces pastorianus
gaggacaaccaatttgcgtcaacag

SEQ ID NO: 63150 - DNA, 25 bp, Saccharomyces pastorianus
gaaccaaatcattgctctagccgtg

SEQ ID NO: 63151 - DNA, 25 bp, Saccharomyces pastorianus
tttgtctcaagctggtaaccttcta

SEQ ID NO: 63152 - DNA, 25 bp, Saccharomyces pastorianus
atgttacattactccaaaccctttg

SEQ ID NO: 63153 - DNA, 25 bp, Saccharomyces pastorianus
attattcgttgtgctgttcctcaaa

SEQ ID NO: 63154 - DNA, 25 bp, Saccharomyces pastorianus
gatgcactcaagatttggtccaaaa

SEQ ID NO: 63155 - DNA, 25 bp, Saccharomyces pastorianus
tcgatgctccacgtgatgacaaaga

SEQ ID NO: 63156 - DNA, 25 bp, Saccharomyces pastorianus
atggcgccggaatcgattactggtt

SEQ ID NO: 63157 - DNA, 25 bp, Saccharomyces pastorianus
attatgtatcatgttgcggccggac

SEQ ID NO: 63158 - DNA, 25 bp, Saccharomyces pastorianus
cggccatggtctaacctcgataatg

SEQ ID NO: 63159 - DNA, 25 bp, Saccharomyces pastorianus
atgattactggtaggcggccatggt

SEQ ID NO: 63160 - DNA, 25 bp, Saccharomyces pastorianus
ggacacctatgtatatggcgccgga

SEQ ID NO: 63161 - DNA, 25 bp, Saccharomyces pastorianus
cactccgcagttccccaataaagat

SEQ ID NO: 63162 - DNA, 25 bp, Saccharomyces pastorianus
gtatgttgattttggcgctgccaag

SEQ ID NO: 63163 - DNA, 25 bp, Saccharomyces pastorianus
agacgctcacgcttcggattcaaag

SEQ ID NO: 63164 - DNA, 25 bp, Saccharomyces pastorianus
atgaggtatcctctgctggtaggaa

SEQ ID NO: 63165 - DNA, 25 bp, Saccharomyces pastorianus
tactggaaggtcttgcgtatctgca

SEQ ID NO: 63166 - DNA, 25 bp, Saccharomyces pastorianus
tgcgtatctgcatgaatctgggatt

SEQ ID NO: 63167 - DNA, 25 bp, Saccharomyces pastorianus
aaggcaaattgaactggctcaggaa

SEQ ID NO: 63168 - DNA, 25 bp, Saccharomyces pastorianus
gaacgcgaaataccggacgacgagt

SEQ ID NO: 63169 - DNA, 25 bp, Saccharomyces pastorianus
ggtcccggcttcaatacgcagtatt

SEQ ID NO: 63170 - DNA, 25 bp, Saccharomyces pastorianus
atcggttcgaatggcaaactatgtt

SEQ ID NO: 63171 - DNA, 25 bp, Saccharomyces pastorianus
gagaccatcaagtcacttgtggaca

SEQ ID NO: 63172 - DNA, 25 bp, Saccharomyces pastorianus
ggaaccgaggatttattgtcaagat

SEQ ID NO: 63173 - DNA, 25 bp, Saccharomyces pastorianus
agattattgcaaaaccctatggtga

SEQ ID NO: 63174 - DNA, 25 bp, Saccharomyces pastorianus
tcaaggaaagggtcccggcttcaat

SEQ ID NO: 63175 - DNA, 25 bp, Saccharomyces pastorianus
gaaattccactgattctgtattcca

SEQ ID NO: 63176 - DNA, 25 bp, Saccharomyces pastorianus
ggtcctgaatctttggcctaatgtg

SEQ ID NO: 63177 - DNA, 25 bp, Saccharomyces pastorianus
aatggacttcagattggacgataac

SEQ ID NO: 63178 - DNA, 25 bp, Saccharomyces pastorianus
gatggtacaccattctactatgtta

SEQ ID NO: 63179 - DNA, 25 bp, Saccharomyces pastorianus
agttaaccagccaacctagatctta

SEQ ID NO: 63180 - DNA, 25 bp, Saccharomyces pastorianus
gaaatcttcttctgagactgtgaaa

SEQ ID NO: 63181 - DNA, 25 bp, Saccharomyces pastorianus
acttatttgattggtagccccgaat

SEQ ID NO: 63182 - DNA, 25 bp, Saccharomyces pastorianus
ttatgccctggagtatcaatgtgat

SEQ ID NO: 63183 - DNA, 25 bp, Saccharomyces pastorianus
tcttcactgggttcggatatttcaa

SEQ ID NO: 63184 - DNA, 25 bp, Saccharomyces pastorianus
ttatgtactggtgctgactccacag

SEQ ID NO: 63185 - DNA, 25 bp, Saccharomyces pastorianus
aatggtactcaaactcttcactggg

SEQ ID NO: 63186 - DNA, 25 bp, Saccharomyces pastorianus
aattctcttggttatgtactggtgc

SEQ ID NO: 63187 - DNA, 25 bp, Saccharomyces pastorianus
tagcaactcagtttcctttttggaa

SEQ ID NO: 63188 - DNA, 25 bp, Saccharomyces pastorianus
gactccacaggaaccattgctatgg

SEQ ID NO: 63189 - DNA, 25 bp, Saccharomyces pastorianus
ttgtgctgcgtgtgatggtactgaa

SEQ ID NO: 63190 - DNA, 25 bp, Saccharomyces pastorianus
ccaaatcaagagagggtccggccct

SEQ ID NO: 63191 - DNA, 25 bp, Saccharomyces pastorianus
gccatgttgtcgaggttgctgtcca

SEQ ID NO: 63192 - DNA, 25 bp, Saccharomyces pastorianus
gcagagaatgttttccaccaccgtt

SEQ ID NO: 63193 - DNA, 25 bp, Saccharomyces pastorianus
gttttgcggagcgaaaaatcccata

SEQ ID NO: 63194 - DNA, 25 bp, Saccharomyces pastorianus
ggtactgaagcccaagaagcctaat

SEQ ID NO: 63195 - DNA, 25 bp, Saccharomyces pastorianus
acaagccacgctgaaccaaatcaag

SEQ ID NO: 63196 - DNA, 25 bp, Saccharomyces pastorianus
aaaggcatgcagagtccggctgtct

SEQ ID NO: 63197 - DNA, 25 bp, Saccharomyces pastorianus
tatctttagtttggctcttacccga

SEQ ID NO: 63198 - DNA, 25 bp, Saccharomyces pastorianus
ttgctgtccagctcatggtgtgcgc

SEQ ID NO: 63199 - DNA, 25 bp, Saccharomyces pastorianus
acgcaagaaggtgactacggcccca

SEQ ID NO: 63200 - DNA, 25 bp, Saccharomyces pastorianus
tcgaccgccctagcaataaactatt

SEQ ID NO: 63201 - DNA, 25 bp, Saccharomyces pastorianus
catttcttgggcaaccgggacacaa

SEQ ID NO: 63202 - DNA, 25 bp, Saccharomyces pastorianus
ataaactatttctctgccaaacaaa

SEQ ID NO: 63203 - DNA, 25 bp, Saccharomyces pastorianus
atataacagccacgagcccacaggc

SEQ ID NO: 63204 - DNA, 25 bp, Saccharomyces pastorianus
acgacatgaacctctttctaccgat

SEQ ID NO: 63205 - DNA, 25 bp, Saccharomyces pastorianus
gaacactggtgttaactccttcgac

SEQ ID NO: 63206 - DNA, 25 bp, Saccharomyces pastorianus
agctccttcggagtgaacactggtg

SEQ ID NO: 63207 - DNA, 25 bp, Saccharomyces pastorianus
gttaactccttcgacgacgacgacg

SEQ ID NO: 63208 - DNA, 25 bp, Saccharomyces pastorianus
gttgattccagcaacaacgactccg

SEQ ID NO: 63209 - DNA, 25 bp, Saccharomyces pastorianus
tctgcatacggaatccatttcttgg

SEQ ID NO: 63210 - DNA, 25 bp, Saccharomyces pastorianus
aaacaaacattgctcgaccctactt

SEQ ID NO: 63211 - DNA, 25 bp, Saccharomyces pastorianus
ttatcctgtggccattgcaactaag

SEQ ID NO: 63212 - DNA, 25 bp, Saccharomyces pastorianus
aaccgtgggttatcctgtggccatt

SEQ ID NO: 63213 - DNA, 25 bp, Saccharomyces pastorianus
agttccatggctgcaaccgtgggtt

SEQ ID NO: 63214 - DNA, 25 bp, Saccharomyces pastorianus
gagacatggtcgtactacagcataa

SEQ ID NO: 63215 - DNA, 25 bp, Saccharomyces pastorianus
ggaactaccgaaaccagaacagcta

SEQ ID NO: 63216 - DNA, 25 bp, Saccharomyces pastorianus
acagctactttagtcgattacggga

SEQ ID NO: 63217 - DNA, 25 bp, Saccharomyces pastorianus
gcaactaagtttgtcctagatggta

SEQ ID NO: 63218 - DNA, 25 bp, Saccharomyces pastorianus
ggtacaatcaaaggtccaggtctaa

SEQ ID NO: 63219 - DNA, 25 bp, Saccharomyces pastorianus
taatagcaccatactcgccagagat

SEQ ID NO: 63220 - DNA, 25 bp, Saccharomyces pastorianus
aaggtcggtggctacagttccatgg

SEQ ID NO: 63221 - DNA, 25 bp, Saccharomyces pastorianus
gccagagatcaacgacccaatcatg

SEQ ID NO: 63222 - DNA, 25 bp, Saccharomyces pastorianus
atctaccctggttatgcgtttgtct

SEQ ID NO: 63223 - DNA, 25 bp, Saccharomyces pastorianus
tgatggctactgctaaaccttactt

SEQ ID NO: 63224 - DNA, 25 bp, Saccharomyces pastorianus
gggtgccaagtctgcttctagagaa

SEQ ID NO: 63225 - DNA, 25 bp, Saccharomyces pastorianus
agggagtaaccctctagacactctt

SEQ ID NO: 63226 - DNA, 25 bp, Saccharomyces pastorianus
tgagattccaaggtttcccggagtt

SEQ ID NO: 63227 - DNA, 25 bp, Saccharomyces pastorianus
gatgcaaagaccactccagggagta

SEQ ID NO: 63228 - DNA, 25 bp, Saccharomyces pastorianus
gattgagaccatctcttcggaagat

SEQ ID NO: 63229 - DNA, 25 bp, Saccharomyces pastorianus
ggatacaagttctcatggtcttcta

SEQ ID NO: 63230 - DNA, 25 bp, Saccharomyces pastorianus
taggcttgttctccgatgcaaagac

SEQ ID NO: 63231 - DNA, 25 bp, Saccharomyces pastorianus
ggttgccagctcctgaagattctga

SEQ ID NO: 63232 - DNA, 25 bp, Saccharomyces pastorianus
ttggttgcctccattgactcaaaga

SEQ ID NO: 63233 - DNA, 25 bp, Saccharomyces pastorianus
tgtggtgatacacgtcctggacgca

SEQ ID NO: 63234 - DNA, 25 bp, Saccharomyces pastorianus
agaaaaaggcctcgtcttgctgcgt

SEQ ID NO: 63235 - DNA, 25 bp, Saccharomyces pastorianus
gacaccgagagttatgctgatgcat

SEQ ID NO: 63236 - DNA, 25 bp, Saccharomyces pastorianus
gacagccactgctaaggaagccatt

SEQ ID NO: 63237 - DNA, 25 bp, Saccharomyces pastorianus
ggacacagacgaatcaccaaaggct

SEQ ID NO: 63238 - DNA, 25 bp, Saccharomyces pastorianus
agcaagtcttagacgccacactggg

SEQ ID NO: 63239 - DNA, 25 bp, Saccharomyces pastorianus
atgcattcgggccaaaatctcaaag

SEQ ID NO: 63240 - DNA, 25 bp, Saccharomyces pastorianus
ggaaacgccgcataaacatttgatt

SEQ ID NO: 63241 - DNA, 25 bp, Saccharomyces pastorianus
tcgattcttctgatgtggtgataca

SEQ ID NO: 63242 - DNA, 25 bp, Saccharomyces pastorianus
aaggctagaatcttggacaccgaga

SEQ ID NO: 63243 - DNA, 25 bp, Saccharomyces pastorianus
gagctgtacaaagtcatcgattctt

SEQ ID NO: 63244 - DNA, 25 bp, Saccharomyces pastorianus
aggtgtcttgaagcgttgtcaggta

SEQ ID NO: 63245 - DNA, 25 bp, Saccharomyces pastorianus
gaacagtacattccaggtgtcttga

SEQ ID NO: 63246 - DNA, 25 bp, Saccharomyces pastorianus
aatcctgaacgatttcaacagaggt

SEQ ID NO: 63247 - DNA, 25 bp, Saccharomyces pastorianus
gagcacgttactcatccagaacagt

SEQ ID NO: 63248 - DNA, 25 bp, Saccharomyces pastorianus
ggttcgttgttccacctgagaaagc

SEQ ID NO: 63249 - DNA, 25 bp, Saccharomyces pastorianus
gagcctgacgagtgtagtgtttcca

SEQ ID NO: 63250 - DNA, 25 bp, Saccharomyces pastorianus
agtgtttccaaactaatcctgaacg

SEQ ID NO: 63251 - DNA, 25 bp, Saccharomyces pastorianus
atgccacggacttcattgaaatttt

SEQ ID NO: 63252 - DNA, 25 bp, Saccharomyces pastorianus
actactgaaaggtggtgagcctgac

SEQ ID NO: 63253 - DNA, 25 bp, Saccharomyces pastorianus
tagaaagaacctacgagatctcggg

SEQ ID NO: 63254 - DNA, 25 bp, Saccharomyces pastorianus
gaggtaagatcccttggttcgttgt

SEQ ID NO: 63255 - DNA, 25 bp, Saccharomyces pastorianus
gtatcgctagcggtacctggcaaag

SEQ ID NO: 63256 - DNA, 25 bp, Saccharomyces pastorianus
atgtcatatgcagttccttccttta

SEQ ID NO: 63257 - DNA, 25 bp, Saccharomyces pastorianus
acacgttgccagtcacagcagggaa

SEQ ID NO: 63258 - DNA, 25 bp, Saccharomyces pastorianus
tatacgctcactttttgtcgcagat

SEQ ID NO: 63259 - DNA, 25 bp, Saccharomyces pastorianus
ttgcctaatattcttgtcgtttcca

SEQ ID NO: 63260 - DNA, 25 bp, Saccharomyces pastorianus
atcctatggaccttattttgcctaa

SEQ ID NO: 63261 - DNA, 25 bp, Saccharomyces pastorianus
gtattaccttgctactcatgtcata

SEQ ID NO: 63262 - DNA, 25 bp, Saccharomyces pastorianus
taagactcgccgtatgtcaacgatc

SEQ ID NO: 63263 - DNA, 25 bp, Saccharomyces pastorianus
gttcaaatctccattatacgctcac

SEQ ID NO: 63264 - DNA, 25 bp, Saccharomyces pastorianus
acaggttacgttgcaggtatcgcta

SEQ ID NO: 63265 - DNA, 25 bp, Saccharomyces pastorianus
aagctggcaactttgacacctgggt

SEQ ID NO: 63266 - DNA, 25 bp, Saccharomyces pastorianus
agatcaaaccgccagagccgtaatt

SEQ ID NO: 63267 - DNA, 25 bp, Saccharomyces pastorianus
gacactccctctgttgtcgataatt

SEQ ID NO: 63268 - DNA, 25 bp, Saccharomyces pastorianus
aaagaatccgtcactcactctggtt

SEQ ID NO: 63269 - DNA, 25 bp, Saccharomyces pastorianus
aattgcccatgctatcgagctagga

SEQ ID NO: 63270 - DNA, 25 bp, Saccharomyces pastorianus
caggtgtaccaatcagcccaaaagt

SEQ ID NO: 63271 - DNA, 25 bp, Saccharomyces pastorianus
cttttggcaggtggatcaggtcttc

SEQ ID NO: 63272 - DNA, 25 bp, Saccharomyces pastorianus
tagtgtgttgtggaccacctgtctt

SEQ ID NO: 63273 - DNA, 25 bp, Saccharomyces pastorianus
atatggatccaattcggctgcccat

SEQ ID NO: 63274 - DNA, 25 bp, Saccharomyces pastorianus
gtctttgttgacaccgctagagatc

SEQ ID NO: 63275 - DNA, 25 bp, Saccharomyces pastorianus
taagtggcacctccaatgtcgattt

SEQ ID NO: 63276 - DNA, 25 bp, Saccharomyces pastorianus
ggcccaacgttgaagagctgctgaa

SEQ ID NO: 63277 - DNA, 25 bp, Saccharomyces pastorianus
aattgggcatacaatgggtccgcta

SEQ ID NO: 63278 - DNA, 25 bp, Saccharomyces pastorianus
gacacgttcgagaaagggtactcaa

SEQ ID NO: 63279 - DNA, 25 bp, Saccharomyces pastorianus
attcatgttatgtcggtttgcgtaa

SEQ ID NO: 63280 - DNA, 25 bp, Saccharomyces pastorianus
tgttcttccggttttccgctgcaaa

SEQ ID NO: 63281 - DNA, 25 bp, Saccharomyces pastorianus
gctatgagcctgcaattcaatcgat

SEQ ID NO: 63282 - DNA, 25 bp, Saccharomyces pastorianus
agacttctctggtaaatacccatga

SEQ ID NO: 63283 - DNA, 25 bp, Saccharomyces pastorianus
aagcacctcctagtaagacttctct

SEQ ID NO: 63284 - DNA, 25 bp, Saccharomyces pastorianus
atgactgatgccgaattttatactt

SEQ ID NO: 63285 - DNA, 25 bp, Saccharomyces pastorianus
ttataactatccttctgttcttccg

SEQ ID NO: 63286 - DNA, 25 bp, Saccharomyces pastorianus
cgatgctatattgtctctacgaaga

SEQ ID NO: 63287 - DNA, 25 bp, Saccharomyces pastorianus
tgggtccgctatatatcgctatgag

SEQ ID NO: 63288 - DNA, 25 bp, Saccharomyces pastorianus
aaccaagtcgtctatgctgaacctg

SEQ ID NO: 63289 - DNA, 25 bp, Saccharomyces pastorianus
ggtacgctcgatgaaatcctgcaga

SEQ ID NO: 63290 - DNA, 25 bp, Saccharomyces pastorianus
agtcaggtatttggcgttgcgccta

SEQ ID NO: 63291 - DNA, 25 bp, Saccharomyces pastorianus
ttacacacatcatcggtcagcaaca

SEQ ID NO: 63292 - DNA, 25 bp, Saccharomyces pastorianus
ggaggcccgcgaattaggtgcaaat

SEQ ID NO: 63293 - DNA, 25 bp, Saccharomyces pastorianus
atgtcacttgaaaactctgccctta

SEQ ID NO: 63294 - DNA, 25 bp, Saccharomyces pastorianus
aacgacttgttgttcgacttcctag

SEQ ID NO: 63295 - DNA, 25 bp, Saccharomyces pastorianus
aacaactttcactgaggcggcgagt

SEQ ID NO: 63296 - DNA, 25 bp, Saccharomyces pastorianus
acttcctagctgtacgtcttgatgg

SEQ ID NO: 63297 - DNA, 25 bp, Saccharomyces pastorianus
atggcgtgccggacattccaagcat

SEQ ID NO: 63298 - DNA, 25 bp, Saccharomyces pastorianus
tgaccgcgcacgagaggacttcaag

SEQ ID NO: 63299 - DNA, 25 bp, Saccharomyces pastorianus
tagcttgctttatgttcgtggcttt

SEQ ID NO: 63300 - DNA, 25 bp, Saccharomyces pastorianus
gtggctttgcaagtcgaccgaggaa

SEQ ID NO: 63301 - DNA, 25 bp, Saccharomyces pastorianus
atggtctctcgtcgctattgtgcag

SEQ ID NO: 63302 - DNA, 25 bp, Saccharomyces pastorianus
gaagataccctttctctaggtcatt

SEQ ID NO: 63303 - DNA, 25 bp, Saccharomyces pastorianus
gcagaactaccttcgcagttgatct

SEQ ID NO: 63304 - DNA, 25 bp, Saccharomyces pastorianus
gatccagatgactctatggtctctc

SEQ ID NO: 63305 - DNA, 25 bp, Saccharomyces pastorianus
ggtcattctgactcatcgatagatc

SEQ ID NO: 63306 - DNA, 25 bp, Saccharomyces pastorianus
tttatgcatgcagggcgctactagg

SEQ ID NO: 63307 - DNA, 25 bp, Saccharomyces pastorianus
aatcctttcttaaatcctgcagtcg

SEQ ID NO: 63308 - DNA, 25 bp, Saccharomyces pastorianus
gctactaggccttcttgagggaggt

SEQ ID NO: 63309 - DNA, 25 bp, Saccharomyces pastorianus
ggcgcgtaacgctattagcttgctt

SEQ ID NO: 63310 - DNA, 25 bp, Saccharomyces pastorianus
agagattcagcacccattactacaa

SEQ ID NO: 63311 - DNA, 25 bp, Saccharomyces pastorianus
atagtgggcggaacgagtccttcaa

SEQ ID NO: 63312 - DNA, 25 bp, Saccharomyces pastorianus
gatttaacttagtctccgcagcaga

SEQ ID NO: 63313 - DNA, 25 bp, Saccharomyces pastorianus
gtggtgctacagacggaccggctat

SEQ ID NO: 63314 - DNA, 25 bp, Saccharomyces pastorianus
atgctacgctacgatgtcactgaac

SEQ ID NO: 63315 - DNA, 25 bp, Saccharomyces pastorianus
agactatttgaccacactaactcca

SEQ ID NO: 63316 - DNA, 25 bp, Saccharomyces pastorianus
cacctgctacgggtttggttcagta

SEQ ID NO: 63317 - DNA, 25 bp, Saccharomyces pastorianus
cggtaaagtctattcctatcccaat

SEQ ID NO: 63318 - DNA, 25 bp, Saccharomyces pastorianus
attactacaacgctatggctccaaa

SEQ ID NO: 63319 - DNA, 25 bp, Saccharomyces pastorianus
gggttggcgtttaatcctgtatcca

SEQ ID NO: 63320 - DNA, 25 bp, Saccharomyces pastorianus
atagtgtcctgatctttggtggtgc

SEQ ID NO: 63321 - DNA, 25 bp, Saccharomyces pastorianus
gaaatactgccccttcgaggatatc

SEQ ID NO: 63322 - DNA, 25 bp, Saccharomyces pastorianus
ttctgctgctgctccatagatatga

SEQ ID NO: 63323 - DNA, 25 bp, Saccharomyces pastorianus
gatactggtattgcgactcctgcaa

SEQ ID NO: 63324 - DNA, 25 bp, Saccharomyces pastorianus
gacacgagggacatttccagtgcat

SEQ ID NO: 63325 - DNA, 25 bp, Saccharomyces pastorianus
aattcgctctgtgtcctgtgtgaaa

SEQ ID NO: 63326 - DNA, 25 bp, Saccharomyces pastorianus
caatttcacattttctgctgctgct

SEQ ID NO: 63327 - DNA, 25 bp, Saccharomyces pastorianus
taaccatggttctacttccctgtgg

SEQ ID NO: 63328 - DNA, 25 bp, Saccharomyces pastorianus
gactctactgcgaacaatgcggcga

SEQ ID NO: 63329 - DNA, 25 bp, Saccharomyces pastorianus
caaccgtcttcctcattaacagaaa

SEQ ID NO: 63330 - DNA, 25 bp, Saccharomyces pastorianus
ggtgatcagtcttccattagactct

SEQ ID NO: 63331 - DNA, 25 bp, Saccharomyces pastorianus
agctgtttggaatcgctgcagacgt

SEQ ID NO: 63332 - DNA, 25 bp, Saccharomyces pastorianus
tttgcatccatacatgactcagggt

SEQ ID NO: 63333 - DNA, 25 bp, Saccharomyces pastorianus
aatcctttgataacatctctatgtg

SEQ ID NO: 63334 - DNA, 25 bp, Saccharomyces pastorianus
gagctcttcattagataatcctttg

SEQ ID NO: 63335 - DNA, 25 bp, Saccharomyces pastorianus
tacggcaattctaaaagcggttaca

SEQ ID NO: 63336 - DNA, 25 bp, Saccharomyces pastorianus
taaacacagcgtctgattcaatcag

SEQ ID NO: 63337 - DNA, 25 bp, Saccharomyces pastorianus
gaaatggatgcctggttacaacttt

SEQ ID NO: 63338 - DNA, 25 bp, Saccharomyces pastorianus
ttcgccaaccgataggtctattaag

SEQ ID NO: 63339 - DNA, 25 bp, Saccharomyces pastorianus
aacagggttcatcgacgtacggcaa

SEQ ID NO: 63340 - DNA, 25 bp, Saccharomyces pastorianus
ggattctatcaattttcgccaaccg

SEQ ID NO: 63341 - DNA, 25 bp, Saccharomyces pastorianus
gtccctactacccaaattaagcaag

SEQ ID NO: 63342 - DNA, 25 bp, Saccharomyces pastorianus
ggcgatatctatatacgatctcaac

SEQ ID NO: 63343 - DNA, 25 bp, Saccharomyces pastorianus
tccacctgtggaagacaaattcgag

SEQ ID NO: 63344 - DNA, 25 bp, Saccharomyces pastorianus
gataaccatgaagaaactctagctg

SEQ ID NO: 63345 - DNA, 25 bp, Saccharomyces pastorianus
tagctgcattggattctgtagtcaa

SEQ ID NO: 63346 - DNA, 25 bp, Saccharomyces pastorianus
acactattatggtcgttgaaaactt

SEQ ID NO: 63347 - DNA, 25 bp, Saccharomyces pastorianus
ttaaaccatagtcactacccttcca

SEQ ID NO: 63348 - DNA, 25 bp, Saccharomyces pastorianus
gaaactctagctgcattggattctg

SEQ ID NO: 63349 - DNA, 25 bp, Saccharomyces pastorianus
gaatacatcgagtccgttaagctgt

SEQ ID NO: 63350 - DNA, 25 bp, Saccharomyces pastorianus
gacaaattcgagacactattatggt

SEQ ID NO: 63351 - DNA, 25 bp, Saccharomyces pastorianus
atcaaccactattcgcaaatgtttg

SEQ ID NO: 63352 - DNA, 25 bp, Saccharomyces pastorianus
gagtccgttaagctgtttttcgaga

SEQ ID NO: 63353 - DNA, 25 bp, Saccharomyces pastorianus
aaactttatcaaccactattcgcaa

SEQ ID NO: 63354 - DNA, 25 bp, Saccharomyces pastorianus
aacgaggactacttggacaaccata

SEQ ID NO: 63355 - DNA, 25 bp, Saccharomyces pastorianus
ggaagcgtatgccagaatcacttta

SEQ ID NO: 63356 - DNA, 25 bp, Saccharomyces pastorianus
catttcgaaacctctgcttttagca

SEQ ID NO: 63357 - DNA, 25 bp, Saccharomyces pastorianus
cccattgactaattctctacgttgc

SEQ ID NO: 63358 - DNA, 25 bp, Saccharomyces pastorianus
gaactctctacttttaacctcgtgc

SEQ ID NO: 63359 - DNA, 25 bp, Saccharomyces pastorianus
gatttcttcccatctgattcagtgt

SEQ ID NO: 63360 - DNA, 25 bp, Saccharomyces pastorianus
gtgcccatagtcttgcagatatcat

SEQ ID NO: 63361 - DNA, 25 bp, Saccharomyces pastorianus
gacgtcgggattttcgatgccacaa

SEQ ID NO: 63362 - DNA, 25 bp, Saccharomyces pastorianus
agaagtttgctcgttcaatacagac

SEQ ID NO: 63363 - DNA, 25 bp, Saccharomyces pastorianus
aatttacacctttctccatggacga

SEQ ID NO: 63364 - DNA, 25 bp, Saccharomyces pastorianus
atacgtcttcagaggacctgttcaa

SEQ ID NO: 63365 - DNA, 25 bp, Saccharomyces pastorianus
gatggtaacattttggttttccaag

SEQ ID NO: 63366 - DNA, 25 bp, Saccharomyces pastorianus
tagaccaaacggtaccaagaaggct

SEQ ID NO: 63367 - DNA, 25 bp, Saccharomyces pastorianus
ttggttttccaagtttccatgaaag

SEQ ID NO: 63368 - DNA, 25 bp, Saccharomyces pastorianus
gaaggcttacgttagattgactgct

SEQ ID NO: 63369 - DNA, 25 bp, Saccharomyces pastorianus
gcttacgttagattgactgctgact

SEQ ID NO: 63370 - DNA, 25 bp, Saccharomyces pastorianus
gttttccaagtttccatgaaagcta

SEQ ID NO: 63371 - DNA, 25 bp, Saccharomyces pastorianus
gccgtcaaggaattatacgaagttg

SEQ ID NO: 63372 - DNA, 25 bp, Saccharomyces pastorianus
aggcttacgttagattgactgctga

SEQ ID NO: 63373 - DNA, 25 bp, Saccharomyces pastorianus
gtttccatgaaagctaacaaatacc

SEQ ID NO: 63374 - DNA, 25 bp, Saccharomyces pastorianus
cattttggttttccaagtttccatg

SEQ ID NO: 63375 - DNA, 25 bp, Saccharomyces pastorianus
gaaggccgtcaaggaattatacgaa

SEQ ID NO: 63376 - DNA, 25 bp, Saccharomyces pastorianus
cttccggttccatcaacagaagagt

SEQ ID NO: 63377 - DNA, 25 bp, Saccharomyces pastorianus
tccggttccatcaacagaagagttt

SEQ ID NO: 63378 - DNA, 25 bp, Saccharomyces pastorianus
ccatcaacagaagagttttgcaagc

SEQ ID NO: 63379 - DNA, 25 bp, Saccharomyces pastorianus
ggttccatcaacagaagagttttgc

SEQ ID NO: 63380 - DNA, 25 bp, Saccharomyces pastorianus
tccatcaacagaagagttttgcaag

SEQ ID NO: 63381 - DNA, 25 bp, Saccharomyces pastorianus
ttccggttccatcaacagaagagtt

SEQ ID NO: 63382 - DNA, 25 bp, Saccharomyces pastorianus
cggttccatcaacagaagagttttg

SEQ ID NO: 63383 - DNA, 25 bp, Saccharomyces pastorianus
ccggttccatcaacagaagagtttt

SEQ ID NO: 63384 - DNA, 25 bp, Saccharomyces pastorianus
ttccatcaacagaagagttttgcaa

SEQ ID NO: 63385 - DNA, 25 bp, Saccharomyces pastorianus
gcttccggttccatcaacagaagag

SEQ ID NO: 63386 - DNA, 25 bp, Saccharomyces pastorianus
gttccatcaacagaagagttttgca

SEQ ID NO: 63387 - DNA, 25 bp, Saccharomyces pastorianus
gaatccaatctaccggtagaaagtt

SEQ ID NO: 63388 - DNA, 25 bp, Saccharomyces pastorianus
gtaaggccccaagaatccaatctac

SEQ ID NO: 63389 - DNA, 25 bp, Saccharomyces pastorianus
ccccaagaatccaatctaccggtag

SEQ ID NO: 63390 - DNA, 25 bp, Saccharomyces pastorianus
cccaagaatccaatctaccggtaga

SEQ ID NO: 63391 - DNA, 25 bp, Saccharomyces pastorianus
aggccccaagaatccaatctaccgg

SEQ ID NO: 63392 - DNA, 25 bp, Saccharomyces pastorianus
gccccaagaatccaatctaccggta

SEQ ID NO: 63393 - DNA, 25 bp, Saccharomyces pastorianus
caagaatccaatctaccggtagaaa

SEQ ID NO: 63394 - DNA, 25 bp, Saccharomyces pastorianus
taaggccccaagaatccaatctacc

SEQ ID NO: 63395 - DNA, 25 bp, Saccharomyces pastorianus
ccaagaatccaatctaccggtagaa

SEQ ID NO: 63396 - DNA, 25 bp, Saccharomyces pastorianus
ggccccaagaatccaatctaccggt

SEQ ID NO: 63397 - DNA, 25 bp, Saccharomyces pastorianus
aaggccccaagaatccaatctaccg

SEQ ID NO: 63398 - DNA, 25 bp, Saccharomyces pastorianus
gaatattatgaatggccccagccaa

SEQ ID NO: 63399 - DNA, 25 bp, Saccharomyces pastorianus
agaatattatgaatggccccagcca

SEQ ID NO: 63400 - DNA, 25 bp, Saccharomyces pastorianus
aatattatgaatggccccagccaac

SEQ ID NO: 63401 - DNA, 25 bp, Saccharomyces pastorianus
atgaatggccccagccaacatccat

SEQ ID NO: 63402 - DNA, 25 bp, Saccharomyces pastorianus
agtcaaattatacactttcttagct

SEQ ID NO: 63403 - DNA, 25 bp, Saccharomyces pastorianus
agctcgtatgttaaagaatattatg

SEQ ID NO: 63404 - DNA, 25 bp, Saccharomyces pastorianus
ccccagccaacatccatttctggtt

SEQ ID NO: 63405 - DNA, 25 bp, Saccharomyces pastorianus
tatgaatggccccagccaacatcca

SEQ ID NO: 63406 - DNA, 25 bp, Saccharomyces pastorianus
gaatggccccagccaacatccattt

SEQ ID NO: 63407 - DNA, 25 bp, Saccharomyces pastorianus
aagaatattatgaatggccccagcc

SEQ ID NO: 63408 - DNA, 25 bp, Saccharomyces pastorianus
cactttcttagctcgtatgttaaag

SEQ ID NO: 63409 - DNA, 25 bp, Saccharomyces pastorianus
cagcgatttggtttatttcggtaat

SEQ ID NO: 63410 - DNA, 25 bp, Saccharomyces pastorianus
gaatatgtcaacgacgtcggaattt

SEQ ID NO: 63411 - DNA, 25 bp, Saccharomyces pastorianus
acagctttactcttgcatctcaata

SEQ ID NO: 63412 - DNA, 25 bp, Saccharomyces pastorianus
gcaaatatatctcgtattccagaat

SEQ ID NO: 63413 - DNA, 25 bp, Saccharomyces pastorianus
cagttttgtatttcaagctggactt

SEQ ID NO: 63414 - DNA, 25 bp, Saccharomyces pastorianus
catcgtatatgagatttgccaccaa

SEQ ID NO: 63415 - DNA, 25 bp, Saccharomyces pastorianus
tgttaccgagatgttccaaagagga

SEQ ID NO: 63416 - DNA, 25 bp, Saccharomyces pastorianus
gaaaaattgcacagctttactcttg

SEQ ID NO: 63417 - DNA, 25 bp, Saccharomyces pastorianus
tcggaatttacaacaacccaacaag

SEQ ID NO: 63418 - DNA, 25 bp, Saccharomyces pastorianus
agcccagacactaaaactatcgaga

SEQ ID NO: 63419 - DNA, 25 bp, Saccharomyces pastorianus
aatgccaaactcatagatttcgaat

SEQ ID NO: 63420 - DNA, 25 bp, Saccharomyces pastorianus
cataaacggcaacggcagtacgcgc

SEQ ID NO: 63421 - DNA, 25 bp, Saccharomyces pastorianus
gattgcctacgctgactttatgtac

SEQ ID NO: 63422 - DNA, 25 bp, Saccharomyces pastorianus
gttattcagaactttcccaagcgtc

SEQ ID NO: 63423 - DNA, 25 bp, Saccharomyces pastorianus
aagagacaatcgatcgcggcaggga

SEQ ID NO: 63424 - DNA, 25 bp, Saccharomyces pastorianus
agtgcccattgagacgacgctgaga

SEQ ID NO: 63425 - DNA, 25 bp, Saccharomyces pastorianus
ggtcgcacatagaatcatcgtacat

SEQ ID NO: 63426 - DNA, 25 bp, Saccharomyces pastorianus
ggccgaatccggaggagcagtatct

SEQ ID NO: 63427 - DNA, 25 bp, Saccharomyces pastorianus
aaactgttcaggcaatactcttcgt

SEQ ID NO: 63428 - DNA, 25 bp, Saccharomyces pastorianus
aagcgtctgctgaacccgaacgaaa

SEQ ID NO: 63429 - DNA, 25 bp, Saccharomyces pastorianus
tacgcgccagataccaaggccgaat

SEQ ID NO: 63430 - DNA, 25 bp, Saccharomyces pastorianus
atactcttcgtacacgtttggaggt

SEQ ID NO: 63431 - DNA, 25 bp, Saccharomyces pastorianus
aaagctattttatactacaggaaga

SEQ ID NO: 63432 - DNA, 25 bp, Saccharomyces pastorianus
tggcatatcccgagacttgtgatag

SEQ ID NO: 63433 - DNA, 25 bp, Saccharomyces pastorianus
atggcatatcccgagacttgtgata

SEQ ID NO: 63434 - DNA, 25 bp, Saccharomyces pastorianus
ccgagacttgtgatagatatggatt

SEQ ID NO: 63435 - DNA, 25 bp, Saccharomyces pastorianus
ggcatatcccgagacttgtgataga

SEQ ID NO: 63436 - DNA, 25 bp, Saccharomyces pastorianus
atcccgagacttgtgatagatatgg

SEQ ID NO: 63437 - DNA, 25 bp, Saccharomyces pastorianus
catatcccgagacttgtgatagata

SEQ ID NO: 63438 - DNA, 25 bp, Saccharomyces pastorianus
gcatatcccgagacttgtgatagat

SEQ ID NO: 63439 - DNA, 25 bp, Saccharomyces pastorianus
agaatatgataaatggttggttgaa

SEQ ID NO: 63440 - DNA, 25 bp, Saccharomyces pastorianus
agctattttatactacaggaagaat

SEQ ID NO: 63441 - DNA, 25 bp, Saccharomyces pastorianus
gaaaagctattttatactacaggaa

SEQ ID NO: 63442 - DNA, 25 bp, Saccharomyces pastorianus
gatatttgttacgactacctctgta

SEQ ID NO: 63443 - DNA, 25 bp, Saccharomyces pastorianus
gtagctacggcagactcttcaatta

SEQ ID NO: 63444 - DNA, 25 bp, Saccharomyces pastorianus
gaggcaaaatcttccgtcaacagtt

SEQ ID NO: 63445 - DNA, 25 bp, Saccharomyces pastorianus
atacttcaggttctatcggcacgag

SEQ ID NO: 63446 - DNA, 25 bp, Saccharomyces pastorianus
gtaagacttcttccgtcatctggta

SEQ ID NO: 63447 - DNA, 25 bp, Saccharomyces pastorianus
aatcgctggtgttgtcatcggtgta

SEQ ID NO: 63448 - DNA, 25 bp, Saccharomyces pastorianus
gcgattctgcttttcttagtatgga

SEQ ID NO: 63449 - DNA, 25 bp, Saccharomyces pastorianus
gtttagtgccaactcattacctgat

SEQ ID NO: 63450 - DNA, 25 bp, Saccharomyces pastorianus
cagccttattcatttggcgacgaag

SEQ ID NO: 63451 - DNA, 25 bp, Saccharomyces pastorianus
tcgaaaggacgtctgcagtagctac

SEQ ID NO: 63452 - DNA, 25 bp, Saccharomyces pastorianus
gagcgggcctttacaagtggtgaat

SEQ ID NO: 63453 - DNA, 25 bp, Saccharomyces pastorianus
ttcatctactacagaagcgtccacc

SEQ ID NO: 63454 - DNA, 25 bp, Saccharomyces pastorianus
aaatgttctggatggccataccaaa

SEQ ID NO: 63455 - DNA, 25 bp, Saccharomyces pastorianus
agtgtcctactgtcaaaatcaatgt

SEQ ID NO: 63456 - DNA, 25 bp, Saccharomyces pastorianus
atgctaaagtttctgtttcctccgt

SEQ ID NO: 63457 - DNA, 25 bp, Saccharomyces pastorianus
actcgctcgagcacgttaaagtcac

SEQ ID NO: 63458 - DNA, 25 bp, Saccharomyces pastorianus
taccaaatgtgtggcggttcatcct

SEQ ID NO: 63459 - DNA, 25 bp, Saccharomyces pastorianus
tatataacctcaacgactcgctcga

SEQ ID NO: 63460 - DNA, 25 bp, Saccharomyces pastorianus
gcggagattctgtaactgtcttaag

SEQ ID NO: 63461 - DNA, 25 bp, Saccharomyces pastorianus
gtttcctccgttgaatcttcatcta

SEQ ID NO: 63462 - DNA, 25 bp, Saccharomyces pastorianus
aatgtcctgattctgctgtagtggc

SEQ ID NO: 63463 - DNA, 25 bp, Saccharomyces pastorianus
tcagtctgctggactatctctcaaa

SEQ ID NO: 63464 - DNA, 25 bp, Saccharomyces pastorianus
ttgccgctattaaccgctatcatca

SEQ ID NO: 63465 - DNA, 25 bp, Saccharomyces pastorianus
ggaaccattccgaatatctcttcca

SEQ ID NO: 63466 - DNA, 25 bp, Saccharomyces pastorianus
cagttttctttatttcagtgtcggt

SEQ ID NO: 63467 - DNA, 25 bp, Saccharomyces pastorianus
tgtcggtagtttgttgttccttgcc

SEQ ID NO: 63468 - DNA, 25 bp, Saccharomyces pastorianus
aggactagcagcatattttgttata

SEQ ID NO: 63469 - DNA, 25 bp, Saccharomyces pastorianus
gacaagatttcctgaatcgttgttc

SEQ ID NO: 63470 - DNA, 25 bp, Saccharomyces pastorianus
tcacttgggaacttgtaacgctggt

SEQ ID NO: 63471 - DNA, 25 bp, Saccharomyces pastorianus
acctccttatatccggtactgcttt

SEQ ID NO: 63472 - DNA, 25 bp, Saccharomyces pastorianus
gctggtggtggcgtcaatgatctat

SEQ ID NO: 63473 - DNA, 25 bp, Saccharomyces pastorianus
ggtactgctttttatcacttcttta

SEQ ID NO: 63474 - DNA, 25 bp, Saccharomyces pastorianus
gaccgataaactcaactcctacaaa

SEQ ID NO: 63475 - DNA, 25 bp, Saccharomyces pastorianus
ggcctctttgacgacagtagaacga

SEQ ID NO: 63476 - DNA, 25 bp, Saccharomyces pastorianus
aggttacttccaatacggatgcgga

SEQ ID NO: 63477 - DNA, 25 bp, Saccharomyces pastorianus
gcgatgcgtctggagaggttacttc

SEQ ID NO: 63478 - DNA, 25 bp, Saccharomyces pastorianus
ataaatccagcaggagtgagtcgct

SEQ ID NO: 63479 - DNA, 25 bp, Saccharomyces pastorianus
agcatggcctctttgacgacagtag

SEQ ID NO: 63480 - DNA, 25 bp, Saccharomyces pastorianus
gaacgaagcccagtcaagacggcaa

SEQ ID NO: 63481 - DNA, 25 bp, Saccharomyces pastorianus
aacggaaaagtatagcgatgcgtct

SEQ ID NO: 63482 - DNA, 25 bp, Saccharomyces pastorianus
tgcgttccaggatttggccaaatgg

SEQ ID NO: 63483 - DNA, 25 bp, Saccharomyces pastorianus
tcgctggtagcgttgatatatcttc

SEQ ID NO: 63484 - DNA, 25 bp, Saccharomyces pastorianus
gactaagaagggatttgcgttccag

SEQ ID NO: 63485 - DNA, 25 bp, Saccharomyces pastorianus
gatatatcttctgggctcgatgtca

SEQ ID NO: 63486 - DNA, 25 bp, Saccharomyces pastorianus
tagatctgttcgtcttcgcactatt

SEQ ID NO: 63487 - DNA, 25 bp, Saccharomyces pastorianus
gaattttgttccttagcactaacga

SEQ ID NO: 63488 - DNA, 25 bp, Saccharomyces pastorianus
gacccaatcccaaggcaacatgcgt

SEQ ID NO: 63489 - DNA, 25 bp, Saccharomyces pastorianus
gcaacatgcgttttgggcaacccgt

SEQ ID NO: 63490 - DNA, 25 bp, Saccharomyces pastorianus
gtctataggtaacactctcccagat

SEQ ID NO: 63491 - DNA, 25 bp, Saccharomyces pastorianus
cgggatagtggcgtgtttctttgaa

SEQ ID NO: 63492 - DNA, 25 bp, Saccharomyces pastorianus
atagatgatgattggctgtgcggcc

SEQ ID NO: 63493 - DNA, 25 bp, Saccharomyces pastorianus
gagttgtttgagtttgcacctgtgt

SEQ ID NO: 63494 - DNA, 25 bp, Saccharomyces pastorianus
gattctactagatctgttcgtcttc

SEQ ID NO: 63495 - DNA, 25 bp, Saccharomyces pastorianus
ttgcacctgtgttaagacccaatcc

SEQ ID NO: 63496 - DNA, 25 bp, Saccharomyces pastorianus
tcgcactattcaccgattccgaaaa

SEQ ID NO: 63497 - DNA, 25 bp, Saccharomyces pastorianus
ggtcacaagggcatattccgccaac

SEQ ID NO: 63498 - DNA, 25 bp, Saccharomyces pastorianus
cgttttaccggccagaaagctagag

SEQ ID NO: 63499 - DNA, 25 bp, Saccharomyces pastorianus
aagagcggatcatttcgcggaaatt

SEQ ID NO: 63500 - DNA, 25 bp, Saccharomyces pastorianus
gaaaccgctctgcacgatacgaatt

SEQ ID NO: 63501 - DNA, 25 bp, Saccharomyces pastorianus
gcggagactgcctatcgacgagtat

SEQ ID NO: 63502 - DNA, 25 bp, Saccharomyces pastorianus
gtgtacttaactgccgacacagacg

SEQ ID NO: 63503 - DNA, 25 bp, Saccharomyces pastorianus
gtagaagggtgctgaccacgacgca

SEQ ID NO: 63504 - DNA, 25 bp, Saccharomyces pastorianus
tagtcagtttgtcgaatcaggtcac

SEQ ID NO: 63505 - DNA, 25 bp, Saccharomyces pastorianus
aaaagctaggcatcccaacgcggag

SEQ ID NO: 63506 - DNA, 25 bp, Saccharomyces pastorianus
gatcatactcgactgttcctttgac

SEQ ID NO: 63507 - DNA, 25 bp, Saccharomyces pastorianus
gagagcctcgggtcaatgtaaacca

SEQ ID NO: 63508 - DNA, 25 bp, Saccharomyces pastorianus
aagaaatggctactccttcgtccaa

SEQ ID NO: 63509 - DNA, 25 bp, Saccharomyces pastorianus
atcatggtacgtgacctactgctta

SEQ ID NO: 63510 - DNA, 25 bp, Saccharomyces pastorianus
gttgttgtcatctctctagactgga

SEQ ID NO: 63511 - DNA, 25 bp, Saccharomyces pastorianus
tgattttgaacgcttcctggttggt

SEQ ID NO: 63512 - DNA, 25 bp, Saccharomyces pastorianus
tttctgtttgcctgcttgggtaaca

SEQ ID NO: 63513 - DNA, 25 bp, Saccharomyces pastorianus
ggcagtggaccctattcatctttct

SEQ ID NO: 63514 - DNA, 25 bp, Saccharomyces pastorianus
agcagccgctgttgaacacgcaagg

SEQ ID NO: 63515 - DNA, 25 bp, Saccharomyces pastorianus
cgtttattttctccgttgttgtcat

SEQ ID NO: 63516 - DNA, 25 bp, Saccharomyces pastorianus
atgttttgcacgacgtcttcaacga

SEQ ID NO: 63517 - DNA, 25 bp, Saccharomyces pastorianus
gatttcgtcatcttttcccagtttt

SEQ ID NO: 63518 - DNA, 25 bp, Saccharomyces pastorianus
aggcactctgttcatggatttcgtc

SEQ ID NO: 63519 - DNA, 25 bp, Saccharomyces pastorianus
cattccaaagggtactgacttggct

SEQ ID NO: 63520 - DNA, 25 bp, Saccharomyces pastorianus
agccgctcacattccaaagggtact

SEQ ID NO: 63521 - DNA, 25 bp, Saccharomyces pastorianus
gtctgccggccaatgggttgccatt

SEQ ID NO: 63522 - DNA, 25 bp, Saccharomyces pastorianus
aaggccatgggttacagagtcgtcg

SEQ ID NO: 63523 - DNA, 25 bp, Saccharomyces pastorianus
ctggcctttgccagtcaagctacca

SEQ ID NO: 63524 - DNA, 25 bp, Saccharomyces pastorianus
catgggttacagagtcgtcggtatt

SEQ ID NO: 63525 - DNA, 25 bp, Saccharomyces pastorianus
ctgacttggctgaatgtgctccagt

SEQ ID NO: 63526 - DNA, 25 bp, Saccharomyces pastorianus
gaatgtgctccagtcttgtgtgctg

SEQ ID NO: 63527 - DNA, 25 bp, Saccharomyces pastorianus
gctaacttgtctgccggccaatggg

SEQ ID NO: 63528 - DNA, 25 bp, Saccharomyces pastorianus
tttgaagtccgctaacttgtctgcc

SEQ ID NO: 63529 - DNA, 25 bp, Saccharomyces pastorianus
gaagttttcatcgatttcactactg

SEQ ID NO: 63530 - DNA, 25 bp, Saccharomyces pastorianus
aacacactcagtgggcagtttccat

SEQ ID NO: 63531 - DNA, 25 bp, Saccharomyces pastorianus
ggtaactctatctgagacggcggaa

SEQ ID NO: 63532 - DNA, 25 bp, Saccharomyces pastorianus
tatgagcacttccttttcagacgaa

SEQ ID NO: 63533 - DNA, 25 bp, Saccharomyces pastorianus
aaacgatcgcacgttgcacgttgaa

SEQ ID NO: 63534 - DNA, 25 bp, Saccharomyces pastorianus
gcctctgaggttttcagcgtccaaa

SEQ ID NO: 63535 - DNA, 25 bp, Saccharomyces pastorianus
taaaagacagtaccccattgcccga

SEQ ID NO: 63536 - DNA, 25 bp, Saccharomyces pastorianus
agacgcgctttcttcatttgatgaa

SEQ ID NO: 63537 - DNA, 25 bp, Saccharomyces pastorianus
tttccatactttacaagaccccgat

SEQ ID NO: 63538 - DNA, 25 bp, Saccharomyces pastorianus
gagttttctaactcagcctctgagg

SEQ ID NO: 63539 - DNA, 25 bp, Saccharomyces pastorianus
cgcttatcggttactctgtcaacat

SEQ ID NO: 63540 - DNA, 25 bp, Saccharomyces pastorianus
aaggaattgtggcatttccctgctc

SEQ ID NO: 63541 - DNA, 25 bp, Saccharomyces pastorianus
gttatcgaccaatacaacaaatcaa

SEQ ID NO: 63542 - DNA, 25 bp, Saccharomyces pastorianus
gttcgctgttatcgaccaatacaac

SEQ ID NO: 63543 - DNA, 25 bp, Saccharomyces pastorianus
aacaaatcaacttactcggcagcaa

SEQ ID NO: 63544 - DNA, 25 bp, Saccharomyces pastorianus
gaaacgaaaacgttcgagttcgctg

SEQ ID NO: 63545 - DNA, 25 bp, Saccharomyces pastorianus
gagcagcatgtattttggcaaccag

SEQ ID NO: 63546 - DNA, 25 bp, Saccharomyces pastorianus
gttcgagttcgctgttatcgaccaa

SEQ ID NO: 63547 - DNA, 25 bp, Saccharomyces pastorianus
gaccagtttaatttatatgatgagc

SEQ ID NO: 63548 - DNA, 25 bp, Saccharomyces pastorianus
gataaatttatcgaccagtttaatt

SEQ ID NO: 63549 - DNA, 25 bp, Saccharomyces pastorianus
aggccaaaacaatcaagagctgtat

SEQ ID NO: 63550 - DNA, 25 bp, Saccharomyces pastorianus
cttactcggcagcaaatacaaaggc

SEQ ID NO: 63551 - DNA, 25 bp, Saccharomyces pastorianus
atgtattttggcaaccagcagaaaa

SEQ ID NO: 63552 - DNA, 25 bp, Saccharomyces pastorianus
gtacacacctgaactaatgaccgct

SEQ ID NO: 63553 - DNA, 25 bp, Saccharomyces pastorianus
ggcggagagtttacaggcctcccaa

SEQ ID NO: 63554 - DNA, 25 bp, Saccharomyces pastorianus
gcaccatcgatatgggcccacatga

SEQ ID NO: 63555 - DNA, 25 bp, Saccharomyces pastorianus
gggacagttctttatacttccaact

SEQ ID NO: 63556 - DNA, 25 bp, Saccharomyces pastorianus
agactgtgatctgccaggatcccga

SEQ ID NO: 63557 - DNA, 25 bp, Saccharomyces pastorianus
gaggcccgtcaccaagagtagatct

SEQ ID NO: 63558 - DNA, 25 bp, Saccharomyces pastorianus
aacttactagacactttcggcggca

SEQ ID NO: 63559 - DNA, 25 bp, Saccharomyces pastorianus
ataacacgacttccatactggcggg

SEQ ID NO: 63560 - DNA, 25 bp, Saccharomyces pastorianus
aatcggcagactaccggaactggat

SEQ ID NO: 63561 - DNA, 25 bp, Saccharomyces pastorianus
gaccgcttccaccatcgaaatagaa

SEQ ID NO: 63562 - DNA, 25 bp, Saccharomyces pastorianus
taagcacatccatatctctgtcttg

SEQ ID NO: 63563 - DNA, 25 bp, Saccharomyces pastorianus
ttgctagtggaaacggctcaactgc

SEQ ID NO: 63564 - DNA, 25 bp, Saccharomyces pastorianus
tacattgtaccaccagagggccgta

SEQ ID NO: 63565 - DNA, 25 bp, Saccharomyces pastorianus
gaggtactactttgaggcggtgtcc

SEQ ID NO: 63566 - DNA, 25 bp, Saccharomyces pastorianus
gaggatttccgcgaagtacaaactg

SEQ ID NO: 63567 - DNA, 25 bp, Saccharomyces pastorianus
gagcacgatggagcacacacctgat

SEQ ID NO: 63568 - DNA, 25 bp, Saccharomyces pastorianus
gggataacaactaccaagacctatt

SEQ ID NO: 63569 - DNA, 25 bp, Saccharomyces pastorianus
taccgagatcgtgactagactacaa

SEQ ID NO: 63570 - DNA, 25 bp, Saccharomyces pastorianus
gggacattacagtttcaccacttaa

SEQ ID NO: 63571 - DNA, 25 bp, Saccharomyces pastorianus
gggccgtatacactggcacgataat

SEQ ID NO: 63572 - DNA, 25 bp, Saccharomyces pastorianus
gtgtccggccaagagtgtaccgaga

SEQ ID NO: 63573 - DNA, 25 bp, Saccharomyces pastorianus
aacattcatcgtcaagcgttgctag

SEQ ID NO: 63574 - DNA, 25 bp, Saccharomyces pastorianus
tagcacgcccaatgaggatcacaaa

SEQ ID NO: 63575 - DNA, 25 bp, Saccharomyces pastorianus
agacaaacggcgtgccccaagagat

SEQ ID NO: 63576 - DNA, 25 bp, Saccharomyces pastorianus
ttcccagatttctaccgtcagtgaa

SEQ ID NO: 63577 - DNA, 25 bp, Saccharomyces pastorianus
gtttccagtgtgatacctgacttat

SEQ ID NO: 63578 - DNA, 25 bp, Saccharomyces pastorianus
atccacactgtctcaagtgaccaag

SEQ ID NO: 63579 - DNA, 25 bp, Saccharomyces pastorianus
aatcagactcatactactcggcagc

SEQ ID NO: 63580 - DNA, 25 bp, Saccharomyces pastorianus
agaaacttacttgaccaggccacta

SEQ ID NO: 63581 - DNA, 25 bp, Saccharomyces pastorianus
ggtccaccccaaaatgttggtcatt

SEQ ID NO: 63582 - DNA, 25 bp, Saccharomyces pastorianus
gacgacacgttaaaggctgctcata

SEQ ID NO: 63583 - DNA, 25 bp, Saccharomyces pastorianus
tgatatcgatacactgaaccagctg

SEQ ID NO: 63584 - DNA, 25 bp, Saccharomyces pastorianus
gatgagcccaatacgttctgagaca

SEQ ID NO: 63585 - DNA, 25 bp, Saccharomyces pastorianus
aagactgcgttcagcgttggtgccg

SEQ ID NO: 63586 - DNA, 25 bp, Saccharomyces pastorianus
cgagccatgctgtgataggatccta

SEQ ID NO: 63587 - DNA, 25 bp, Saccharomyces pastorianus
gaaacacagaaaccgctttggagct

SEQ ID NO: 63588 - DNA, 25 bp, Saccharomyces pastorianus
aatgtgccctgatcaaatactccca

SEQ ID NO: 63589 - DNA, 25 bp, Saccharomyces pastorianus
ggatccatccgcacagcaagggaga

SEQ ID NO: 63590 - DNA, 25 bp, Saccharomyces pastorianus
atgccttccggtatgagtccctgga

SEQ ID NO: 63591 - DNA, 25 bp, Saccharomyces pastorianus
ggagaatacctgctgggccgtcaat

SEQ ID NO: 63592 - DNA, 25 bp, Saccharomyces pastorianus
attggcactgtcttcgtgggcgtca

SEQ ID NO: 63593 - DNA, 25 bp, Saccharomyces pastorianus
gggacattgctctacacgacgatgg

SEQ ID NO: 63594 - DNA, 25 bp, Saccharomyces pastorianus
gagcctcatcgccaatacatggaga

SEQ ID NO: 63595 - DNA, 25 bp, Saccharomyces pastorianus
gtgcgggccaacaaagactgcgttc

SEQ ID NO: 63596 - DNA, 25 bp, Saccharomyces pastorianus
gcggcaccatcgacgatttgctgaa

SEQ ID NO: 63597 - DNA, 25 bp, Saccharomyces pastorianus
gtttggttccatggcgagctcgaat

SEQ ID NO: 63598 - DNA, 25 bp, Saccharomyces pastorianus
aagagcaagttcacacacctggtac

SEQ ID NO: 63599 - DNA, 25 bp, Saccharomyces pastorianus
tggagaataacgcaccggccgataa

SEQ ID NO: 63600 - DNA, 25 bp, Saccharomyces pastorianus
gttcccttcgtccaagatacgcaaa

SEQ ID NO: 63601 - DNA, 25 bp, Saccharomyces pastorianus
atcaagtgcaaagcctctccaaatt

SEQ ID NO: 63602 - DNA, 25 bp, Saccharomyces pastorianus
aaattgtccggccacgacatgatca

SEQ ID NO: 63603 - DNA, 25 bp, Saccharomyces pastorianus
cacctggtacagaattccctttgtt

SEQ ID NO: 63604 - DNA, 25 bp, Saccharomyces pastorianus
ggactcacacgcattgcacgtttgg

SEQ ID NO: 63605 - DNA, 25 bp, Saccharomyces pastorianus
tgcgaagaccaagacccatgcgtga

SEQ ID NO: 63606 - DNA, 25 bp, Saccharomyces pastorianus
gagaccacggacttattcgagataa

SEQ ID NO: 63607 - DNA, 25 bp, Saccharomyces pastorianus
gttctttgcaacttcttgttttcca

SEQ ID NO: 63608 - DNA, 25 bp, Saccharomyces pastorianus
gtggcgctggatttggtcataaatt

SEQ ID NO: 63609 - DNA, 25 bp, Saccharomyces pastorianus
aatggagcctcgttctttgcaactt

SEQ ID NO: 63610 - DNA, 25 bp, Saccharomyces pastorianus
agcctcgttctttgcaacttcttgt

SEQ ID NO: 63611 - DNA, 25 bp, Saccharomyces pastorianus
tgttttccattaactgtggcgctgg

SEQ ID NO: 63612 - DNA, 25 bp, Saccharomyces pastorianus
ggtcataaattggtcatcaggagaa

SEQ ID NO: 63613 - DNA, 25 bp, Saccharomyces pastorianus
actgtggcgctggatttggtcataa

SEQ ID NO: 63614 - DNA, 25 bp, Saccharomyces pastorianus
gcaacttcttgttttccattaactg

SEQ ID NO: 63615 - DNA, 25 bp, Saccharomyces pastorianus
ttaactgtggcgctggatttggtca

SEQ ID NO: 63616 - DNA, 25 bp, Saccharomyces pastorianus
gtcatcaggagaatcgattttgatt

SEQ ID NO: 63617 - DNA, 25 bp, Saccharomyces pastorianus
ggatttggtcataaattggtcatca

SEQ ID NO: 63618 - DNA, 25 bp, Saccharomyces pastorianus
gcaactgctaactgatgaaaacgta

SEQ ID NO: 63619 - DNA, 25 bp, Saccharomyces pastorianus
aagagattggccctgactgaccctc

SEQ ID NO: 63620 - DNA, 25 bp, Saccharomyces pastorianus
aacgccactgggatgcgtatatcct

SEQ ID NO: 63621 - DNA, 25 bp, Saccharomyces pastorianus
gtagctttgccattaaagccccaga

SEQ ID NO: 63622 - DNA, 25 bp, Saccharomyces pastorianus
gaaaacattcctggtttcttgaaag

SEQ ID NO: 63623 - DNA, 25 bp, Saccharomyces pastorianus
ggttataccaccactgattacacct

SEQ ID NO: 63624 - DNA, 25 bp, Saccharomyces pastorianus
catggagttgattgagcccgaatta

SEQ ID NO: 63625 - DNA, 25 bp, Saccharomyces pastorianus
ttatggttgtattttattcgacgac

SEQ ID NO: 63626 - DNA, 25 bp, Saccharomyces pastorianus
gacattcgtcaaaatatatccgttg

SEQ ID NO: 63627 - DNA, 25 bp, Saccharomyces pastorianus
gactgaccctctgaaatacgtgcta

SEQ ID NO: 63628 - DNA, 25 bp, Saccharomyces pastorianus
taaagccccagatttacttactcaa

SEQ ID NO: 63629 - DNA, 25 bp, Saccharomyces pastorianus
ccagtaataccgttggtgcagccaa

SEQ ID NO: 63630 - DNA, 25 bp, Saccharomyces pastorianus
tccagtatgaacattacgcaagttt

SEQ ID NO: 63631 - DNA, 25 bp, Saccharomyces pastorianus
atcaccatttccagtaataccgttg

SEQ ID NO: 63632 - DNA, 25 bp, Saccharomyces pastorianus
gaggctaagaatttccagtatgaac

SEQ ID NO: 63633 - DNA, 25 bp, Saccharomyces pastorianus
tcacaatcatcaccatttccagtaa

SEQ ID NO: 63634 - DNA, 25 bp, Saccharomyces pastorianus
tataccgttcttcacaatcatcacc

SEQ ID NO: 63635 - DNA, 25 bp, Saccharomyces pastorianus
tgtcggcaggcctgttggaaattat

SEQ ID NO: 63636 - DNA, 25 bp, Saccharomyces pastorianus
atatgtttcggaatgtcggcaggcc

SEQ ID NO: 63637 - DNA, 25 bp, Saccharomyces pastorianus
gccccaaggagaacatatacgtatt

SEQ ID NO: 63638 - DNA, 25 bp, Saccharomyces pastorianus
ggcctgttggaaattataccgttct

SEQ ID NO: 63639 - DNA, 25 bp, Saccharomyces pastorianus
tggtgcagccaagtggtgctcctct

SEQ ID NO: 63640 - DNA, 25 bp, Saccharomyces pastorianus
aaatggctcctgtactcgatgtcaa

SEQ ID NO: 63641 - DNA, 25 bp, Saccharomyces pastorianus
ttttatttcgtttctttgccgcagt

SEQ ID NO: 63642 - DNA, 25 bp, Saccharomyces pastorianus
gtttccactaccatttgcaattcaa

SEQ ID NO: 63643 - DNA, 25 bp, Saccharomyces pastorianus
actcgcgtcaactttcagatgtcta

SEQ ID NO: 63644 - DNA, 25 bp, Saccharomyces pastorianus
gccgcagtttttcatctttgtcatc

SEQ ID NO: 63645 - DNA, 25 bp, Saccharomyces pastorianus
gagcttcacgccatttgtttacaga

SEQ ID NO: 63646 - DNA, 25 bp, Saccharomyces pastorianus
tactttgtcgacgtgctacacttga

SEQ ID NO: 63647 - DNA, 25 bp, Saccharomyces pastorianus
ggtatgtctctatagcctttttctt

SEQ ID NO: 63648 - DNA, 25 bp, Saccharomyces pastorianus
gcagtcctggaatgggcttctacta

SEQ ID NO: 63649 - DNA, 25 bp, Saccharomyces pastorianus
gatggcttacctgcaaactgttctc

SEQ ID NO: 63650 - DNA, 25 bp, Saccharomyces pastorianus
gggtgcctcgctgtggattattaag

SEQ ID NO: 63651 - DNA, 25 bp, Saccharomyces pastorianus
gcacaacctgattggtactaccaca

SEQ ID NO: 63652 - DNA, 25 bp, Saccharomyces pastorianus
atagtttctggcacgaccttgagtc

SEQ ID NO: 63653 - DNA, 25 bp, Saccharomyces pastorianus
atccaagaccaatcgggccataagg

SEQ ID NO: 63654 - DNA, 25 bp, Saccharomyces pastorianus
atatgcgtcgactccactcgcggag

SEQ ID NO: 63655 - DNA, 25 bp, Saccharomyces pastorianus
atgtcaactagagcacaacctgatt

SEQ ID NO: 63656 - DNA, 25 bp, Saccharomyces pastorianus
caaggccccgatagtgcaatggtat

SEQ ID NO: 63657 - DNA, 25 bp, Saccharomyces pastorianus
ttgagtcgtgtcaccagatcatctg

SEQ ID NO: 63658 - DNA, 25 bp, Saccharomyces pastorianus
gtactaccacagacatccatatgcg

SEQ ID NO: 63659 - DNA, 25 bp, Saccharomyces pastorianus
gctcgtcaagcatagtttctggcac

SEQ ID NO: 63660 - DNA, 25 bp, Saccharomyces pastorianus
gggtcgaaaacttggatggcataca

SEQ ID NO: 63661 - DNA, 25 bp, Saccharomyces pastorianus
gagcacaagcagcaatgtcaactag

SEQ ID NO: 63662 - DNA, 25 bp, Saccharomyces pastorianus
tgcggcgattcgttgggtacagcaa

SEQ ID NO: 63663 - DNA, 25 bp, Saccharomyces pastorianus
cgggactcttgaccattatttccaa

SEQ ID NO: 63664 - DNA, 25 bp, Saccharomyces pastorianus
gcaacgaggtctgaacggtcatcat

SEQ ID NO: 63665 - DNA, 25 bp, Saccharomyces pastorianus
ggtctgaacggtcatcatcactaaa

SEQ ID NO: 63666 - DNA, 25 bp, Saccharomyces pastorianus
accttcttagtatggtcagcctcac

SEQ ID NO: 63667 - DNA, 25 bp, Saccharomyces pastorianus
tcatcatcactaaacgttgacgaga

SEQ ID NO: 63668 - DNA, 25 bp, Saccharomyces pastorianus
ttatttccaaggaccttcttagtat

SEQ ID NO: 63669 - DNA, 25 bp, Saccharomyces pastorianus
cagcctcactcccaatgagtttgga

SEQ ID NO: 63670 - DNA, 25 bp, Saccharomyces pastorianus
ttagtatggtcagcctcactcccaa

SEQ ID NO: 63671 - DNA, 25 bp, Saccharomyces pastorianus
ttgggtacagcaacgaggtctgaac

SEQ ID NO: 63672 - DNA, 25 bp, Saccharomyces pastorianus
atgcatgcggcgattcgttgggtac

SEQ ID NO: 63673 - DNA, 25 bp, Saccharomyces pastorianus
gattcagcttgttggtagcagcgtt

SEQ ID NO: 63674 - DNA, 25 bp, Saccharomyces pastorianus
aaacgagttattttccagtgctaga

SEQ ID NO: 63675 - DNA, 25 bp, Saccharomyces pastorianus
attttccagtgctagattcaacaaa

SEQ ID NO: 63676 - DNA, 25 bp, Saccharomyces pastorianus
gacttttctggattcagcttgttgg

SEQ ID NO: 63677 - DNA, 25 bp, Saccharomyces pastorianus
aaattctccaattctgacttttctg

SEQ ID NO: 63678 - DNA, 25 bp, Saccharomyces pastorianus
tgtaaatcggaagccctttcaaacg

SEQ ID NO: 63679 - DNA, 25 bp, Saccharomyces pastorianus
tcggaagccctttcaaacgagttat

SEQ ID NO: 63680 - DNA, 25 bp, Saccharomyces pastorianus
gagttattttccagtgctagattca

SEQ ID NO: 63681 - DNA, 25 bp, Saccharomyces pastorianus
tccagtgctagattcaacaaaaaca

SEQ ID NO: 63682 - DNA, 25 bp, Saccharomyces pastorianus
aattctgacttttctggattcagct

SEQ ID NO: 63683 - DNA, 25 bp, Saccharomyces pastorianus
cagcttgttggtagcagcgttatct

SEQ ID NO: 63684 - DNA, 25 bp, Saccharomyces pastorianus
ggagaacccatattacaacattgac

SEQ ID NO: 63685 - DNA, 25 bp, Saccharomyces pastorianus
tgggtcagccgcctatactaaaagc

SEQ ID NO: 63686 - DNA, 25 bp, Saccharomyces pastorianus
gactatggactatgctgcgcctgaa

SEQ ID NO: 63687 - DNA, 25 bp, Saccharomyces pastorianus
aagcgggccattcgatgtctttgtt

SEQ ID NO: 63688 - DNA, 25 bp, Saccharomyces pastorianus
gcgcctgaagtccttggcggttcat

SEQ ID NO: 63689 - DNA, 25 bp, Saccharomyces pastorianus
ttaattgactttgggtcagccgcct

SEQ ID NO: 63690 - DNA, 25 bp, Saccharomyces pastorianus
aaaccgcaagacatttgggcactcg

SEQ ID NO: 63691 - DNA, 25 bp, Saccharomyces pastorianus
tgaaaccccagttcatggagagact

SEQ ID NO: 63692 - DNA, 25 bp, Saccharomyces pastorianus
gggtactactctatactattatcta

SEQ ID NO: 63693 - DNA, 25 bp, Saccharomyces pastorianus
gattactactacattgaaaccccag

SEQ ID NO: 63694 - DNA, 25 bp, Saccharomyces pastorianus
gcacttgcacgatcaaggtattgtt

SEQ ID NO: 63695 - DNA, 25 bp, Saccharomyces pastorianus
taagagtcgacgctgttgcacatcc

SEQ ID NO: 63696 - DNA, 25 bp, Saccharomyces pastorianus
gtctttggaaacacttcgaatcatg

SEQ ID NO: 63697 - DNA, 25 bp, Saccharomyces pastorianus
gaaggctccacccacttaaagaaga

SEQ ID NO: 63698 - DNA, 25 bp, Saccharomyces pastorianus
gaggtaccactgttggagctggctt

SEQ ID NO: 63699 - DNA, 25 bp, Saccharomyces pastorianus
agtgacgcagagatcgatagcattc

SEQ ID NO: 63700 - DNA, 25 bp, Saccharomyces pastorianus
gatctcctacaggtagagtgacgca

SEQ ID NO: 63701 - DNA, 25 bp, Saccharomyces pastorianus
cgacagggcaactttgggccaggaa

SEQ ID NO: 63702 - DNA, 25 bp, Saccharomyces pastorianus
acggtacccttttacaagatcatca

SEQ ID NO: 63703 - DNA, 25 bp, Saccharomyces pastorianus
gggccaggaaattaccatcgaaggt

SEQ ID NO: 63704 - DNA, 25 bp, Saccharomyces pastorianus
atccagctcctcatgacaacaagcg

SEQ ID NO: 63705 - DNA, 25 bp, Saccharomyces pastorianus
acaagcgctctatctttgtaggtaa

SEQ ID NO: 63706 - DNA, 25 bp, Saccharomyces pastorianus
tggctccgggatgttttgcaagtaa

SEQ ID NO: 63707 - DNA, 25 bp, Saccharomyces pastorianus
gtagttcaagttgctgttctgccag

SEQ ID NO: 63708 - DNA, 25 bp, Saccharomyces pastorianus
agaacgttgcttctggattgcgcgt

SEQ ID NO: 63709 - DNA, 25 bp, Saccharomyces pastorianus
aatttctgccaatcgctttctaaca

SEQ ID NO: 63710 - DNA, 25 bp, Saccharomyces pastorianus
gtagttcagtgccagcgaatgccaa

SEQ ID NO: 63711 - DNA, 25 bp, Saccharomyces pastorianus
agaataccccatcggatgtggcttc

SEQ ID NO: 63712 - DNA, 25 bp, Saccharomyces pastorianus
tcaatacagatgatccggcctccgt

SEQ ID NO: 63713 - DNA, 25 bp, Saccharomyces pastorianus
ctccgtctcgttaatcctggagaac

SEQ ID NO: 63714 - DNA, 25 bp, Saccharomyces pastorianus
atgtggcttccaatgcaaatgacta

SEQ ID NO: 63715 - DNA, 25 bp, Saccharomyces pastorianus
gaccggtaccaacctgctgtaaaga

SEQ ID NO: 63716 - DNA, 25 bp, Saccharomyces pastorianus
gggcaggacaataccattgcaccca

SEQ ID NO: 63717 - DNA, 25 bp, Saccharomyces pastorianus
aattctgccactttcgacgaagttg

SEQ ID NO: 63718 - DNA, 25 bp, Saccharomyces pastorianus
ctattcctaccctgactttagacat

SEQ ID NO: 63719 - DNA, 25 bp, Saccharomyces pastorianus
acatccccaatcagacgttactgtg

SEQ ID NO: 63720 - DNA, 25 bp, Saccharomyces pastorianus
ccatacttcaacactttggtccgta

SEQ ID NO: 63721 - DNA, 25 bp, Saccharomyces pastorianus
gaaatgcacaatttgccggcagagc

SEQ ID NO: 63722 - DNA, 25 bp, Saccharomyces pastorianus
caacacgttgtatgatggctgccca

SEQ ID NO: 63723 - DNA, 25 bp, Saccharomyces pastorianus
tatctatacacatttcacatcccca

SEQ ID NO: 63724 - DNA, 25 bp, Saccharomyces pastorianus
tggctgcccaatatttctattctgg

SEQ ID NO: 63725 - DNA, 25 bp, Saccharomyces pastorianus
taaccaaggacccaaattctgccac

SEQ ID NO: 63726 - DNA, 25 bp, Saccharomyces pastorianus
gaaccattaagtttgactcaccgtg

SEQ ID NO: 63727 - DNA, 25 bp, Saccharomyces pastorianus
acttttgttcctacagactctgaca

SEQ ID NO: 63728 - DNA, 25 bp, Saccharomyces pastorianus
tgatgcattacacgcgaagagactt

SEQ ID NO: 63729 - DNA, 25 bp, Saccharomyces pastorianus
taactgggaggtcggtgtacatatc

SEQ ID NO: 63730 - DNA, 25 bp, Saccharomyces pastorianus
ggtactgatttgtgttctctgaaac

SEQ ID NO: 63731 - DNA, 25 bp, Saccharomyces pastorianus
ttgaatttggcatctcctgaggtta

SEQ ID NO: 63732 - DNA, 25 bp, Saccharomyces pastorianus
ggtacatctgtctacttggtggata

SEQ ID NO: 63733 - DNA, 25 bp, Saccharomyces pastorianus
ggtgccgcaagaggtacatctgtct

SEQ ID NO: 63734 - DNA, 25 bp, Saccharomyces pastorianus
atcgccgacgttactcattttgtta

SEQ ID NO: 63735 - DNA, 25 bp, Saccharomyces pastorianus
gagagctctgttggacttgtctata

SEQ ID NO: 63736 - DNA, 25 bp, Saccharomyces pastorianus
aaaagagactggaagccggcgcctt

SEQ ID NO: 63737 - DNA, 25 bp, Saccharomyces pastorianus
aaatactgccctagacgcggaaggt

SEQ ID NO: 63738 - DNA, 25 bp, Saccharomyces pastorianus
gatagtgaaacctcggatccaaacg

SEQ ID NO: 63739 - DNA, 25 bp, Saccharomyces pastorianus
ttccaagatcgggttttgctccaaa

SEQ ID NO: 63740 - DNA, 25 bp, Saccharomyces pastorianus
aacggcatcaatcacatgtctcaat

SEQ ID NO: 63741 - DNA, 25 bp, Saccharomyces pastorianus
tcccaaagagacgttattccccata

SEQ ID NO: 63742 - DNA, 25 bp, Saccharomyces pastorianus
atgaggccttatgctggtcaaccac

SEQ ID NO: 63743 - DNA, 25 bp, Saccharomyces pastorianus
gcaaggctaccaacctgcttataag

SEQ ID NO: 63744 - DNA, 25 bp, Saccharomyces pastorianus
gaagcgtacaaccaaatgcctcaaa

SEQ ID NO: 63745 - DNA, 25 bp, Saccharomyces pastorianus
tattccccatagaaacccttcaagg

SEQ ID NO: 63746 - DNA, 25 bp, Saccharomyces pastorianus
gagatttcaggcagtccatccttag

SEQ ID NO: 63747 - DNA, 25 bp, Saccharomyces pastorianus
aagaactatccctgttggtccagat

SEQ ID NO: 63748 - DNA, 25 bp, Saccharomyces pastorianus
cttatttcaacattggcccaagcca

SEQ ID NO: 63749 - DNA, 25 bp, Saccharomyces pastorianus
ttagcatcctcagattactcccaaa

SEQ ID NO: 63750 - DNA, 25 bp, Saccharomyces pastorianus
actagcatccaatgagtccttcact

SEQ ID NO: 63751 - DNA, 25 bp, Saccharomyces pastorianus
agaggctatgaatctgcatttgcaa

SEQ ID NO: 63752 - DNA, 25 bp, Saccharomyces pastorianus
gaaatcgcctgttgacttttggaat

SEQ ID NO: 63753 - DNA, 25 bp, Saccharomyces pastorianus
ttcttcctcggactcgaacttacta

SEQ ID NO: 63754 - DNA, 25 bp, Saccharomyces pastorianus
aacacgagagatcgtacttcccttg

SEQ ID NO: 63755 - DNA, 25 bp, Saccharomyces pastorianus
gaaaccaagccaactcaggcaagtg

SEQ ID NO: 63756 - DNA, 25 bp, Saccharomyces pastorianus
ggttccataatttcctcaacgggca

SEQ ID NO: 63757 - DNA, 25 bp, Saccharomyces pastorianus
ggctattcaacaaccattaacgcta

SEQ ID NO: 63758 - DNA, 25 bp, Saccharomyces pastorianus
attaacgctatggacgattcgaaat

SEQ ID NO: 63759 - DNA, 25 bp, Saccharomyces pastorianus
gaacttactagattgtggctattca

SEQ ID NO: 63760 - DNA, 25 bp, Saccharomyces pastorianus
gagtccttcactctttactgtggaa

SEQ ID NO: 63761 - DNA, 25 bp, Saccharomyces pastorianus
gaaatcaacttggagttcagtggaa

SEQ ID NO: 63762 - DNA, 25 bp, Saccharomyces pastorianus
aaagtgccagcggaaatttgttaga

SEQ ID NO: 63763 - DNA, 25 bp, Saccharomyces pastorianus
atatcgacccaagactttcggtggt

SEQ ID NO: 63764 - DNA, 25 bp, Saccharomyces pastorianus
tacagctggacaagggtctcttgaa

SEQ ID NO: 63765 - DNA, 25 bp, Saccharomyces pastorianus
gcgtattcagactagttccattcaa

SEQ ID NO: 63766 - DNA, 25 bp, Saccharomyces pastorianus
aaaagggccattttacagctggaca

SEQ ID NO: 63767 - DNA, 25 bp, Saccharomyces pastorianus
gaggatgaagctaccattcataaaa

SEQ ID NO: 63768 - DNA, 25 bp, Saccharomyces pastorianus
gagttattgcccgagactcaactaa

SEQ ID NO: 63769 - DNA, 25 bp, Saccharomyces pastorianus
aggccagcaataggatacaagaact

SEQ ID NO: 63770 - DNA, 25 bp, Saccharomyces pastorianus
tcaccaaagggcatgcacaaacggt

SEQ ID NO: 63771 - DNA, 25 bp, Saccharomyces pastorianus
aaaagttcgctgcaaaagggccatt

SEQ ID NO: 63772 - DNA, 25 bp, Saccharomyces pastorianus
agtagacctacctccacaagctgag

SEQ ID NO: 63773 - DNA, 25 bp, Saccharomyces pastorianus
atgggccacgcttaaacataacggt

SEQ ID NO: 63774 - DNA, 25 bp, Saccharomyces pastorianus
tgcgttattagaaagtgaccatgcc

SEQ ID NO: 63775 - DNA, 25 bp, Saccharomyces pastorianus
tgaccatgccaagaatcctgttttt

SEQ ID NO: 63776 - DNA, 25 bp, Saccharomyces pastorianus
ttctttaacgatttcttacaggtgt

SEQ ID NO: 63777 - DNA, 25 bp, Saccharomyces pastorianus
gttttctcgttgtgatttcaccaag

SEQ ID NO: 63778 - DNA, 25 bp, Saccharomyces pastorianus
gatttcaccaagatgttcgactatt

SEQ ID NO: 63779 - DNA, 25 bp, Saccharomyces pastorianus
aactatactacgacggcaacccagt

SEQ ID NO: 63780 - DNA, 25 bp, Saccharomyces pastorianus
acataacggtgtcatatttcctcca

SEQ ID NO: 63781 - DNA, 25 bp, Saccharomyces pastorianus
gatgttcgactatttccaagtgcaa

SEQ ID NO: 63782 - DNA, 25 bp, Saccharomyces pastorianus
cgggttcttcgctgcgttattagaa

SEQ ID NO: 63783 - DNA, 25 bp, Saccharomyces pastorianus
cccgtattctgtttatttgcgctta

SEQ ID NO: 63784 - DNA, 25 bp, Saccharomyces pastorianus
cggactatttgtttgcttcggatta

SEQ ID NO: 63785 - DNA, 25 bp, Saccharomyces pastorianus
attctcatcaactcttccatttttt

SEQ ID NO: 63786 - DNA, 25 bp, Saccharomyces pastorianus
gattgttccgatttttagtggcctt

SEQ ID NO: 63787 - DNA, 25 bp, Saccharomyces pastorianus
gagtagttcctttcactgtttcaag

SEQ ID NO: 63788 - DNA, 25 bp, Saccharomyces pastorianus
gagactaccacatggcttgatcata

SEQ ID NO: 63789 - DNA, 25 bp, Saccharomyces pastorianus
tatataatcggtgccgtcctttatg

SEQ ID NO: 63790 - DNA, 25 bp, Saccharomyces pastorianus
agctggactatctcggtatttgcat

SEQ ID NO: 63791 - DNA, 25 bp, Saccharomyces pastorianus
attactctcagctttggtgttgcat

SEQ ID NO: 63792 - DNA, 25 bp, Saccharomyces pastorianus
gttatcgcagccttatgtcacatga

SEQ ID NO: 63793 - DNA, 25 bp, Saccharomyces pastorianus
ttccccgagaaggtttatcctggca

SEQ ID NO: 63794 - DNA, 25 bp, Saccharomyces pastorianus
tgaaactacacctgagcctcaaact

SEQ ID NO: 63795 - DNA, 25 bp, Saccharomyces pastorianus
aaatgcctgatgtcttatccaataa

SEQ ID NO: 63796 - DNA, 25 bp, Saccharomyces pastorianus
agctatcacagttcctcaaattcgt

SEQ ID NO: 63797 - DNA, 25 bp, Saccharomyces pastorianus
ttcagtattttccagcaacagcgtt

SEQ ID NO: 63798 - DNA, 25 bp, Saccharomyces pastorianus
gaggccgggctcaaagattcaattc

SEQ ID NO: 63799 - DNA, 25 bp, Saccharomyces pastorianus
aagcgctgcaattgtgtcgtctgag

SEQ ID NO: 63800 - DNA, 25 bp, Saccharomyces pastorianus
gtgtcgtctgagcttaagtccaata

SEQ ID NO: 63801 - DNA, 25 bp, Saccharomyces pastorianus
agtactgcatcttccattcttttag

SEQ ID NO: 63802 - DNA, 25 bp, Saccharomyces pastorianus
gcattagcagcgttggaagacatca

SEQ ID NO: 63803 - DNA, 25 bp, Saccharomyces pastorianus
ggacactcataaggaaagcgctgca

SEQ ID NO: 63804 - DNA, 25 bp, Saccharomyces pastorianus
ttaagtccaatagcgcttcgttaga

SEQ ID NO: 63805 - DNA, 25 bp, Saccharomyces pastorianus
tttaaagacccaaaatcgccagcag

SEQ ID NO: 63806 - DNA, 25 bp, Saccharomyces pastorianus
ttctggttgataatcagctggtatc

SEQ ID NO: 63807 - DNA, 25 bp, Saccharomyces pastorianus
gaaagcaacttcttgtctacagtca

SEQ ID NO: 63808 - DNA, 25 bp, Saccharomyces pastorianus
ggttcaaatttcgacctaccgagcg

SEQ ID NO: 63809 - DNA, 25 bp, Saccharomyces pastorianus
gaggactttgcaagccgatgtaaaa

SEQ ID NO: 63810 - DNA, 25 bp, Saccharomyces pastorianus
atcgccagcagagtgtatccaaagt

SEQ ID NO: 63811 - DNA, 25 bp, Saccharomyces pastorianus
gtgagccatatcaagttctggttga

SEQ ID NO: 63812 - DNA, 25 bp, Saccharomyces pastorianus
cgtttaaatttcgtgagccatatca

SEQ ID NO: 63813 - DNA, 25 bp, Saccharomyces pastorianus
tcgacctaccgagcgggttaaagag

SEQ ID NO: 63814 - DNA, 25 bp, Saccharomyces pastorianus
aaaagtcatgattacacagtgttgc

SEQ ID NO: 63815 - DNA, 25 bp, Saccharomyces pastorianus
tcttgtctacagtcacacgtttaaa

SEQ ID NO: 63816 - DNA, 25 bp, Saccharomyces pastorianus
gtagtactagttcccaatcacaaga

SEQ ID NO: 63817 - DNA, 25 bp, Saccharomyces pastorianus
aagctatatgcttcttccttttcgt

SEQ ID NO: 63818 - DNA, 25 bp, Saccharomyces pastorianus
aagttccacgacgtcacaaagctca

SEQ ID NO: 63819 - DNA, 25 bp, Saccharomyces pastorianus
acttccgtaatatactcaaccgctc

SEQ ID NO: 63820 - DNA, 25 bp, Saccharomyces pastorianus
acactgagggtggttctacaatatt

SEQ ID NO: 63821 - DNA, 25 bp, Saccharomyces pastorianus
ttcttccttttcgtccaatcatggg

SEQ ID NO: 63822 - DNA, 25 bp, Saccharomyces pastorianus
aatcatgggccttcgtccggaagtg

SEQ ID NO: 63823 - DNA, 25 bp, Saccharomyces pastorianus
gatactaatccgttcgatgactcaa

SEQ ID NO: 63824 - DNA, 25 bp, Saccharomyces pastorianus
acatcacagagctcaagttccacga

SEQ ID NO: 63825 - DNA, 25 bp, Saccharomyces pastorianus
gttggagccgtagtaattgcacttg

SEQ ID NO: 63826 - DNA, 25 bp, Saccharomyces pastorianus
ggtacagcagcatcagactcgacga

SEQ ID NO: 63827 - DNA, 25 bp, Saccharomyces pastorianus
ttgtcgcaagcaagcacctacacgt

SEQ ID NO: 63828 - DNA, 25 bp, Saccharomyces pastorianus
cgacttttcacaagacgatacgtat

SEQ ID NO: 63829 - DNA, 25 bp, Saccharomyces pastorianus
ttttagctcactgccttccgacttt

SEQ ID NO: 63830 - DNA, 25 bp, Saccharomyces pastorianus
cacgttggtggactgttttagctca

SEQ ID NO: 63831 - DNA, 25 bp, Saccharomyces pastorianus
tggactgttttagctcactgccttc

SEQ ID NO: 63832 - DNA, 25 bp, Saccharomyces pastorianus
aaattcagtttgcttttggctttat

SEQ ID NO: 63833 - DNA, 25 bp, Saccharomyces pastorianus
gtttgcttttggctttattgcccgc

SEQ ID NO: 63834 - DNA, 25 bp, Saccharomyces pastorianus
tggtggactgttttagctcactgcc

SEQ ID NO: 63835 - DNA, 25 bp, Saccharomyces pastorianus
gcaagcacctacacgttggtggact

SEQ ID NO: 63836 - DNA, 25 bp, Saccharomyces pastorianus
ttattgcccgccttgtcgcaagcaa

SEQ ID NO: 63837 - DNA, 25 bp, Saccharomyces pastorianus
gccttccgacttttcacaagacgat

SEQ ID NO: 63838 - DNA, 25 bp, Saccharomyces pastorianus
ggcaaacgaagcactcttcaacaat

SEQ ID NO: 63839 - DNA, 25 bp, Saccharomyces pastorianus
gaagcactcttcaacaatagcgctc

SEQ ID NO: 63840 - DNA, 25 bp, Saccharomyces pastorianus
aatagcgctcattgaacctcgcgga

SEQ ID NO: 63841 - DNA, 25 bp, Saccharomyces pastorianus
aaaaaggcaaacgaagcactcttca

SEQ ID NO: 63842 - DNA, 25 bp, Saccharomyces pastorianus
tagcgctcattgaacctcgcggaga

SEQ ID NO: 63843 - DNA, 25 bp, Saccharomyces pastorianus
acaatagcgctcattgaacctcgcg

SEQ ID NO: 63844 - DNA, 25 bp, Saccharomyces pastorianus
agcgctcattgaacctcgcggagag

SEQ ID NO: 63845 - DNA, 25 bp, Saccharomyces pastorianus
gcactcttcaacaatagcgctcatt

SEQ ID NO: 63846 - DNA, 25 bp, Saccharomyces pastorianus
ctcattgaacctcgcggagaggcga

SEQ ID NO: 63847 - DNA, 25 bp, Saccharomyces pastorianus
atagcgctcattgaacctcgcggag

SEQ ID NO: 63848 - DNA, 25 bp, Saccharomyces pastorianus
actcttcaacaatagcgctcattga

SEQ ID NO: 63849 - DNA, 25 bp, Saccharomyces pastorianus
gaatatggtggttacttgcataaca

SEQ ID NO: 63850 - DNA, 25 bp, Saccharomyces pastorianus
aagttggcaaattcatctctaaggt

SEQ ID NO: 63851 - DNA, 25 bp, Saccharomyces pastorianus
ttactcattgttcccaactttctgg

SEQ ID NO: 63852 - DNA, 25 bp, Saccharomyces pastorianus
ggttcccggacaacctatgacaggg

SEQ ID NO: 63853 - DNA, 25 bp, Saccharomyces pastorianus
ataacaaaaacaccttcaccgtctg

SEQ ID NO: 63854 - DNA, 25 bp, Saccharomyces pastorianus
gagctatgaccatgtttggagaaac

SEQ ID NO: 63855 - DNA, 25 bp, Saccharomyces pastorianus
ggcaaattcatggaagccttcattg

SEQ ID NO: 63856 - DNA, 25 bp, Saccharomyces pastorianus
gttagtattctattacacgattggg

SEQ ID NO: 63857 - DNA, 25 bp, Saccharomyces pastorianus
gacagggcagacttgtggcaaattc

SEQ ID NO: 63858 - DNA, 25 bp, Saccharomyces pastorianus
atgagtgaaatggttcccggacaac

SEQ ID NO: 63859 - DNA, 25 bp, Saccharomyces pastorianus
gaaactttggtatcgagtgggcttt

SEQ ID NO: 63860 - DNA, 25 bp, Saccharomyces pastorianus
accgttcttcttttatcgcaatgca

SEQ ID NO: 63861 - DNA, 25 bp, Saccharomyces pastorianus
accctgggtttgtggttgatctata

SEQ ID NO: 63862 - DNA, 25 bp, Saccharomyces pastorianus
gcattcttttgctgtgggttcaaca

SEQ ID NO: 63863 - DNA, 25 bp, Saccharomyces pastorianus
gttcaacaatgctggctggagtgct

SEQ ID NO: 63864 - DNA, 25 bp, Saccharomyces pastorianus
gctagatcgaacacctaccattgga

SEQ ID NO: 63865 - DNA, 25 bp, Saccharomyces pastorianus
gagatttgacttacgttatggccaa

SEQ ID NO: 63866 - DNA, 25 bp, Saccharomyces pastorianus
ggcacttacaagttcagcgttgttt

SEQ ID NO: 63867 - DNA, 25 bp, Saccharomyces pastorianus
atatgcttttctctgcttactatgc

SEQ ID NO: 63868 - DNA, 25 bp, Saccharomyces pastorianus
gttgtttttcgtttgcgcattcttt

SEQ ID NO: 63869 - DNA, 25 bp, Saccharomyces pastorianus
tgcttactatgcaaccctgggtttg

SEQ ID NO: 63870 - DNA, 25 bp, Saccharomyces pastorianus
aacagccttcatatttacagcaact

SEQ ID NO: 63871 - DNA, 25 bp, Saccharomyces pastorianus
agcttcacttctacaccaactgggt

SEQ ID NO: 63872 - DNA, 25 bp, Saccharomyces pastorianus
ttctgtcgcaaatttgttcgctggt

SEQ ID NO: 63873 - DNA, 25 bp, Saccharomyces pastorianus
gtttgtgtggattgcctacttaaat

SEQ ID NO: 63874 - DNA, 25 bp, Saccharomyces pastorianus
gtatgcctcttacgttatctactta

SEQ ID NO: 63875 - DNA, 25 bp, Saccharomyces pastorianus
taatttctgcatggtgtcactgttc

SEQ ID NO: 63876 - DNA, 25 bp, Saccharomyces pastorianus
aacaacgattggttcttactcaaga

SEQ ID NO: 63877 - DNA, 25 bp, Saccharomyces pastorianus
tgacgacgttaattgcgccgaccat

SEQ ID NO: 63878 - DNA, 25 bp, Saccharomyces pastorianus
tttattttcttgctgttcctttcct

SEQ ID NO: 63879 - DNA, 25 bp, Saccharomyces pastorianus
aaattctgtttggttgtcgtattca

SEQ ID NO: 63880 - DNA, 25 bp, Saccharomyces pastorianus
gtcactgttctctttgacgacgtta

SEQ ID NO: 63881 - DNA, 25 bp, Saccharomyces pastorianus
aactctttcaaccacagtgttcgat

SEQ ID NO: 63882 - DNA, 25 bp, Saccharomyces pastorianus
aaaaccttagtcaccctgaaatcag

SEQ ID NO: 63883 - DNA, 25 bp, Saccharomyces pastorianus
gcccttgttctcgaggcaatttcag

SEQ ID NO: 63884 - DNA, 25 bp, Saccharomyces pastorianus
agacaaaaccaattgcgcccttgtt

SEQ ID NO: 63885 - DNA, 25 bp, Saccharomyces pastorianus
aagcatgaagtcgtgcccgagggaa

SEQ ID NO: 63886 - DNA, 25 bp, Saccharomyces pastorianus
tattactacctctatgccattggga

SEQ ID NO: 63887 - DNA, 25 bp, Saccharomyces pastorianus
aattcgtacgccaatgattacctaa

SEQ ID NO: 63888 - DNA, 25 bp, Saccharomyces pastorianus
ggccaacgatttcgatgccgtaggt

SEQ ID NO: 63889 - DNA, 25 bp, Saccharomyces pastorianus
gagagcttcgagaacgctgtttaag

SEQ ID NO: 63890 - DNA, 25 bp, Saccharomyces pastorianus
gtatatggagtcgtcctgggcacca

SEQ ID NO: 63891 - DNA, 25 bp, Saccharomyces pastorianus
ttgcctgccacattatctgacgatg

SEQ ID NO: 63892 - DNA, 25 bp, Saccharomyces pastorianus
tttttgacgacttgactgcgagaaa

SEQ ID NO: 63893 - DNA, 25 bp, Saccharomyces pastorianus
gcccctgatggcactgtcattgtta

SEQ ID NO: 63894 - DNA, 25 bp, Saccharomyces pastorianus
gcatttctttacctgctttcacgaa

SEQ ID NO: 63895 - DNA, 25 bp, Saccharomyces pastorianus
atcgcgactttgtttacttcatcct

SEQ ID NO: 63896 - DNA, 25 bp, Saccharomyces pastorianus
ttcatccttcttcgctcatgcattt

SEQ ID NO: 63897 - DNA, 25 bp, Saccharomyces pastorianus
gtgctcgtggtcaattatcaagtct

SEQ ID NO: 63898 - DNA, 25 bp, Saccharomyces pastorianus
tgagatagatttcgacattaccgcc

SEQ ID NO: 63899 - DNA, 25 bp, Saccharomyces pastorianus
gtctctactatgatttgttctctga

SEQ ID NO: 63900 - DNA, 25 bp, Saccharomyces pastorianus
atgcgtgtttttgctctgatcgcga

SEQ ID NO: 63901 - DNA, 25 bp, Saccharomyces pastorianus
ggaaactgtttcctctcaagaaagg

SEQ ID NO: 63902 - DNA, 25 bp, Saccharomyces pastorianus
gattcaaggttaacgtggctatcat

SEQ ID NO: 63903 - DNA, 25 bp, Saccharomyces pastorianus
attttcctccaactatgctcctata

SEQ ID NO: 63904 - DNA, 25 bp, Saccharomyces pastorianus
accccgatgcccgtgaatatatttc

SEQ ID NO: 63905 - DNA, 25 bp, Saccharomyces pastorianus
cgactacaaaccaagctgcgtgcat

SEQ ID NO: 63906 - DNA, 25 bp, Saccharomyces pastorianus
atacgccaagaagggtgctctacga

SEQ ID NO: 63907 - DNA, 25 bp, Saccharomyces pastorianus
gggaagtcaattctacctttacaga

SEQ ID NO: 63908 - DNA, 25 bp, Saccharomyces pastorianus
tccaaacttcttccatgcatcagat

SEQ ID NO: 63909 - DNA, 25 bp, Saccharomyces pastorianus
acttggatatgttggtcggctttaa

SEQ ID NO: 63910 - DNA, 25 bp, Saccharomyces pastorianus
gaatctgccaacatttgcttcgaga

SEQ ID NO: 63911 - DNA, 25 bp, Saccharomyces pastorianus
gaaagatattctggaccccgatgcc

SEQ ID NO: 63912 - DNA, 25 bp, Saccharomyces pastorianus
atcaaattttggtccctcacgacta

SEQ ID NO: 63913 - DNA, 25 bp, Saccharomyces pastorianus
gaagaaccaagtccttacacgtcag

SEQ ID NO: 63914 - DNA, 25 bp, Saccharomyces pastorianus
ggaaccagacacatcccgaaaggat

SEQ ID NO: 63915 - DNA, 25 bp, Saccharomyces pastorianus
taagccacctgaaatagcccatggg

SEQ ID NO: 63916 - DNA, 25 bp, Saccharomyces pastorianus
tgaggaaaccccacctgacaagtta

SEQ ID NO: 63917 - DNA, 25 bp, Saccharomyces pastorianus
atggctataatgtcctgtccaggcg

SEQ ID NO: 63918 - DNA, 25 bp, Saccharomyces pastorianus
acatagcgcccttcagatggttgat

SEQ ID NO: 63919 - DNA, 25 bp, Saccharomyces pastorianus
actgcggcagaggacgttaatgaca

SEQ ID NO: 63920 - DNA, 25 bp, Saccharomyces pastorianus
tgacaagttacgttccgacctacat

SEQ ID NO: 63921 - DNA, 25 bp, Saccharomyces pastorianus
actagcgggtcatataccttccaaa

SEQ ID NO: 63922 - DNA, 25 bp, Saccharomyces pastorianus
atggattggccatacaagcgctgct

SEQ ID NO: 63923 - DNA, 25 bp, Saccharomyces pastorianus
gaagcctacaagagcacgaacgcgc

SEQ ID NO: 63924 - DNA, 25 bp, Saccharomyces pastorianus
gcgctgctctcatagatgctgtcaa

SEQ ID NO: 63925 - DNA, 25 bp, Saccharomyces pastorianus
tacccgagagatggacaaggccttt

SEQ ID NO: 63926 - DNA, 25 bp, Saccharomyces pastorianus
aaaacccatttgtctcattctccat

SEQ ID NO: 63927 - DNA, 25 bp, Saccharomyces pastorianus
ggtgaagatttaccacccgcttatc

SEQ ID NO: 63928 - DNA, 25 bp, Saccharomyces pastorianus
ggcaaacttcatctacatccttaaa

SEQ ID NO: 63929 - DNA, 25 bp, Saccharomyces pastorianus
gcaacacggatagctccttcaattt

SEQ ID NO: 63930 - DNA, 25 bp, Saccharomyces pastorianus
acctcctcggtatcattacaacaac

SEQ ID NO: 63931 - DNA, 25 bp, Saccharomyces pastorianus
gcaacagcgcctccggaagtagata

SEQ ID NO: 63932 - DNA, 25 bp, Saccharomyces pastorianus
cgagcttcgctcacttatcgagaag

SEQ ID NO: 63933 - DNA, 25 bp, Saccharomyces pastorianus
ttcgcggccccaaaaagcaattcgg

SEQ ID NO: 63934 - DNA, 25 bp, Saccharomyces pastorianus
atgacttggagctttcgactttaag

SEQ ID NO: 63935 - DNA, 25 bp, Saccharomyces pastorianus
aatttgaatctatctttcgcggccc

SEQ ID NO: 63936 - DNA, 25 bp, Saccharomyces pastorianus
tgaatagtccttcgttgaccccgag

SEQ ID NO: 63937 - DNA, 25 bp, Saccharomyces pastorianus
gaagcctatgacttgacttccaagg

SEQ ID NO: 63938 - DNA, 25 bp, Saccharomyces pastorianus
gtactggcaacagcactaccaatga

SEQ ID NO: 63939 - DNA, 25 bp, Saccharomyces pastorianus
acccgatattgcagggtttatcatg

SEQ ID NO: 63940 - DNA, 25 bp, Saccharomyces pastorianus
tcggctattaaatcgcacgtttctt

SEQ ID NO: 63941 - DNA, 25 bp, Saccharomyces pastorianus
gaagtggactttatatcggctatta

SEQ ID NO: 63942 - DNA, 25 bp, Saccharomyces pastorianus
gtttacaacgtctatcacgtctgtg

SEQ ID NO: 63943 - DNA, 25 bp, Saccharomyces pastorianus
ggacgtttagattatgccatgctgc

SEQ ID NO: 63944 - DNA, 25 bp, Saccharomyces pastorianus
ggccgcaatgcaaggacgtttacaa

SEQ ID NO: 63945 - DNA, 25 bp, Saccharomyces pastorianus
aactaaccatacaaaggccgcaatg

SEQ ID NO: 63946 - DNA, 25 bp, Saccharomyces pastorianus
gaaggacttacctggtactggcaac

SEQ ID NO: 63947 - DNA, 25 bp, Saccharomyces pastorianus
atgccatgctgccaagtttacttga

SEQ ID NO: 63948 - DNA, 25 bp, Saccharomyces pastorianus
tcttcccattacatcgagagacatg

SEQ ID NO: 63949 - DNA, 25 bp, Saccharomyces pastorianus
aagctcaaaaattctccggtcagga

SEQ ID NO: 63950 - DNA, 25 bp, Saccharomyces pastorianus
agttccaacattgcgagtagcgtac

SEQ ID NO: 63951 - DNA, 25 bp, Saccharomyces pastorianus
cgagccatttgttcaactttccgaa

SEQ ID NO: 63952 - DNA, 25 bp, Saccharomyces pastorianus
acggtgacgacctagcttttaagct

SEQ ID NO: 63953 - DNA, 25 bp, Saccharomyces pastorianus
tgggctcgtgagtggcaataccaac

SEQ ID NO: 63954 - DNA, 25 bp, Saccharomyces pastorianus
ggagacatttccatgtaacacccaa

SEQ ID NO: 63955 - DNA, 25 bp, Saccharomyces pastorianus
gaactggtagggtttcgcacaatat

SEQ ID NO: 63956 - DNA, 25 bp, Saccharomyces pastorianus
aactggcaaaggcagcgaccacaac

SEQ ID NO: 63957 - DNA, 25 bp, Saccharomyces pastorianus
gacttggatggcctagaaccagcta

SEQ ID NO: 63958 - DNA, 25 bp, Saccharomyces pastorianus
atgacgcaagcgagccatttgttca

SEQ ID NO: 63959 - DNA, 25 bp, Saccharomyces pastorianus
tgttcaacattctatgcctccagca

SEQ ID NO: 63960 - DNA, 25 bp, Saccharomyces pastorianus
taacacaggcttactatgcgccgtt

SEQ ID NO: 63961 - DNA, 25 bp, Saccharomyces pastorianus
aagtggccagtatgactcgtcgttc

SEQ ID NO: 63962 - DNA, 25 bp, Saccharomyces pastorianus
gagtacatcgatatatggaagcctt

SEQ ID NO: 63963 - DNA, 25 bp, Saccharomyces pastorianus
gacgacagaaaacggcaatgctatt

SEQ ID NO: 63964 - DNA, 25 bp, Saccharomyces pastorianus
agtacctcgagccatggctcagtaa

SEQ ID NO: 63965 - DNA, 25 bp, Saccharomyces pastorianus
actgatactttgacttccataccca

SEQ ID NO: 63966 - DNA, 25 bp, Saccharomyces pastorianus
caagcgcctattcatgttcaacatt

SEQ ID NO: 63967 - DNA, 25 bp, Saccharomyces pastorianus
agtatgactcgtcgttccctagtac

SEQ ID NO: 63968 - DNA, 25 bp, Saccharomyces pastorianus
gaccgacagtaccacgatgacgaca

SEQ ID NO: 63969 - DNA, 25 bp, Saccharomyces pastorianus
aattcgtaccctataagtggccagt

SEQ ID NO: 63970 - DNA, 25 bp, Saccharomyces pastorianus
gattgtagaactgcccaggactgta

SEQ ID NO: 63971 - DNA, 25 bp, Saccharomyces pastorianus
ttttcgattgtagaactgcccagga

SEQ ID NO: 63972 - DNA, 25 bp, Saccharomyces pastorianus
tgcccaggactgtaacgaagagcag

SEQ ID NO: 63973 - DNA, 25 bp, Saccharomyces pastorianus
gaactgcccaggactgtaacgaaga

SEQ ID NO: 63974 - DNA, 25 bp, Saccharomyces pastorianus
ttcgattgtagaactgcccaggact

SEQ ID NO: 63975 - DNA, 25 bp, Saccharomyces pastorianus
tagaactgcccaggactgtaacgaa

SEQ ID NO: 63976 - DNA, 25 bp, Saccharomyces pastorianus
gagtgataaagtcgccgttaaggtt

SEQ ID NO: 63977 - DNA, 25 bp, Saccharomyces pastorianus
ccaggactgtaacgaagagcaggct

SEQ ID NO: 63978 - DNA, 25 bp, Saccharomyces pastorianus
acctgagtgataaagtcgccgttaa

SEQ ID NO: 63979 - DNA, 25 bp, Saccharomyces pastorianus
actgcccaggactgtaacgaagagc

SEQ ID NO: 63980 - DNA, 25 bp, Saccharomyces pastorianus
tgtagaactgcccaggactgtaacg

SEQ ID NO: 63981 - DNA, 25 bp, Saccharomyces pastorianus
taccacggtcgtctcaaagaagcat

SEQ ID NO: 63982 - DNA, 25 bp, Saccharomyces pastorianus
gtactagttcattaccacggtcgtc

SEQ ID NO: 63983 - DNA, 25 bp, Saccharomyces pastorianus
taaggccctaacaagcagtactagt

SEQ ID NO: 63984 - DNA, 25 bp, Saccharomyces pastorianus
gggagtcctagcagacagccattat

SEQ ID NO: 63985 - DNA, 25 bp, Saccharomyces pastorianus
ggccctcgctaaggaaaagcctcat

SEQ ID NO: 63986 - DNA, 25 bp, Saccharomyces pastorianus
tagggttaccaagccaagccaaagc

SEQ ID NO: 63987 - DNA, 25 bp, Saccharomyces pastorianus
aaagcctcatgggtgccaaatcgca

SEQ ID NO: 63988 - DNA, 25 bp, Saccharomyces pastorianus
attattcaattcgtcacccatcttg

SEQ ID NO: 63989 - DNA, 25 bp, Saccharomyces pastorianus
gtgagcatacaaaggccctcgctaa

SEQ ID NO: 63990 - DNA, 25 bp, Saccharomyces pastorianus
gaatcttttgatcgtaaggccctaa

SEQ ID NO: 63991 - DNA, 25 bp, Saccharomyces pastorianus
ttattcccgcgcaatgtcaatcaaa

SEQ ID NO: 63992 - DNA, 25 bp, Saccharomyces pastorianus
agtcatacagacacaagatttgccg

SEQ ID NO: 63993 - DNA, 25 bp, Saccharomyces pastorianus
gatggtttattgcattcgtcttagc

SEQ ID NO: 63994 - DNA, 25 bp, Saccharomyces pastorianus
taacgatgtgtctgtcagtcataca

SEQ ID NO: 63995 - DNA, 25 bp, Saccharomyces pastorianus
gtgcggtggtattagacaggttcaa

SEQ ID NO: 63996 - DNA, 25 bp, Saccharomyces pastorianus
gaccgcctagatgatgttttccaat

SEQ ID NO: 63997 - DNA, 25 bp, Saccharomyces pastorianus
tcgtcttagcgaactgggatatatg

SEQ ID NO: 63998 - DNA, 25 bp, Saccharomyces pastorianus
gaggagattgttactttgtcacatt

SEQ ID NO: 63999 - DNA, 25 bp, Saccharomyces pastorianus
aaatactactggcttgtcttctagt

SEQ ID NO: 64000 - DNA, 25 bp, Saccharomyces pastorianus
gaatacggacgcttttagtagtaat

SEQ ID NO: 64001 - DNA, 25 bp, Saccharomyces pastorianus
gatggtgggcttatggttcccaata

SEQ ID NO: 64002 - DNA, 25 bp, Saccharomyces pastorianus
gaaaatactaattgcgtgcggtggt

SEQ ID NO: 64003 - DNA, 25 bp, Saccharomyces pastorianus
gcttcccaatacatctttttcgagg

SEQ ID NO: 64004 - DNA, 25 bp, Saccharomyces pastorianus
gaagcatgtgggacgtacctacttt

SEQ ID NO: 64005 - DNA, 25 bp, Saccharomyces pastorianus
atttaacgcgccttcttatactgtg

SEQ ID NO: 64006 - DNA, 25 bp, Saccharomyces pastorianus
acggcaggtgatactttttggtcat

SEQ ID NO: 64007 - DNA, 25 bp, Saccharomyces pastorianus
gactactcagagtacctcaatggaa

SEQ ID NO: 64008 - DNA, 25 bp, Saccharomyces pastorianus
gtgttggcattagtttcctagaagc

SEQ ID NO: 64009 - DNA, 25 bp, Saccharomyces pastorianus
gaagcgactccgaatgacgctacaa

SEQ ID NO: 64010 - DNA, 25 bp, Saccharomyces pastorianus
gaattgcaacccattgactttttgg

SEQ ID NO: 64011 - DNA, 25 bp, Saccharomyces pastorianus
tggatacaggccttatgcttcccaa

SEQ ID NO: 64012 - DNA, 25 bp, Saccharomyces pastorianus
gaaagctaatggcacccttaatact

SEQ ID NO: 64013 - DNA, 25 bp, Saccharomyces pastorianus
ttatactgtgcccaaggacctaaaa

SEQ ID NO: 64014 - DNA, 25 bp, Saccharomyces pastorianus
gcagacatggacacagctttgaaca

SEQ ID NO: 64015 - DNA, 25 bp, Saccharomyces pastorianus
gagcaatgcatcttcactggtgaca

SEQ ID NO: 64016 - DNA, 25 bp, Saccharomyces pastorianus
gattggacgaccctgcagttagagc

SEQ ID NO: 64017 - DNA, 25 bp, Saccharomyces pastorianus
gaaatacctcagcacatggaacagt

SEQ ID NO: 64018 - DNA, 25 bp, Saccharomyces pastorianus
aacaattgctggatccaacgcttct

SEQ ID NO: 64019 - DNA, 25 bp, Saccharomyces pastorianus
taaacactttgatgcactggaacag

SEQ ID NO: 64020 - DNA, 25 bp, Saccharomyces pastorianus
gtgcaccactggtcattttacattg

SEQ ID NO: 64021 - DNA, 25 bp, Saccharomyces pastorianus
ggtgacagtctttttaatgcaggct

SEQ ID NO: 64022 - DNA, 25 bp, Saccharomyces pastorianus
taagagccgtaggtgagcccaactg

SEQ ID NO: 64023 - DNA, 25 bp, Saccharomyces pastorianus
acgccatgtcatactaaggattcca

SEQ ID NO: 64024 - DNA, 25 bp, Saccharomyces pastorianus
gagctggaatacaatccgttcatga

SEQ ID NO: 64025 - DNA, 25 bp, Saccharomyces pastorianus
gtttctccttctttaacattttgtg

SEQ ID NO: 64026 - DNA, 25 bp, Saccharomyces pastorianus
tggagcttctttcttctcaactgaa

SEQ ID NO: 64027 - DNA, 25 bp, Saccharomyces pastorianus
atcggcgctgagatcgacatctgta

SEQ ID NO: 64028 - DNA, 25 bp, Saccharomyces pastorianus
ttcagacctgtttctggccggtaag

SEQ ID NO: 64029 - DNA, 25 bp, Saccharomyces pastorianus
gaaactgcctttgtatcatcattag

SEQ ID NO: 64030 - DNA, 25 bp, Saccharomyces pastorianus
tatcttctttctcatcggcgctgag

SEQ ID NO: 64031 - DNA, 25 bp, Saccharomyces pastorianus
tgtctgcagcatcactatcttcttt

SEQ ID NO: 64032 - DNA, 25 bp, Saccharomyces pastorianus
gaaaagcatcctttaactcctgcaa

SEQ ID NO: 64033 - DNA, 25 bp, Saccharomyces pastorianus
ggtgctcttatccttgtctgcagca

SEQ ID NO: 64034 - DNA, 25 bp, Saccharomyces pastorianus
aatattgggttctcctttggcgcag

SEQ ID NO: 64035 - DNA, 25 bp, Saccharomyces pastorianus
gtagtctttgcgatatcctcatcaa

SEQ ID NO: 64036 - DNA, 25 bp, Saccharomyces pastorianus
cgacatatgatcttgattccgtaat

SEQ ID NO: 64037 - DNA, 25 bp, Saccharomyces pastorianus
tcgcgccttcttttattatgctgag

SEQ ID NO: 64038 - DNA, 25 bp, Saccharomyces pastorianus
ataggaacagtactcaacccgtcaa

SEQ ID NO: 64039 - DNA, 25 bp, Saccharomyces pastorianus
gttacaatgcccaagctggtttcaa

SEQ ID NO: 64040 - DNA, 25 bp, Saccharomyces pastorianus
aaaacaactctcgtcgctggaactt

SEQ ID NO: 64041 - DNA, 25 bp, Saccharomyces pastorianus
accgattaattccattgccgtcaaa

SEQ ID NO: 64042 - DNA, 25 bp, Saccharomyces pastorianus
gttgggcccaaaggtattactcaat

SEQ ID NO: 64043 - DNA, 25 bp, Saccharomyces pastorianus
gggaagatgatctgtccaattcaag

SEQ ID NO: 64044 - DNA, 25 bp, Saccharomyces pastorianus
gggtcattaccagatttgtctacta

SEQ ID NO: 64045 - DNA, 25 bp, Saccharomyces pastorianus
agcaaaatattgtcccagttgggcc

SEQ ID NO: 64046 - DNA, 25 bp, Saccharomyces pastorianus
aaggactggcggttatcgcgccttc

SEQ ID NO: 64047 - DNA, 25 bp, Saccharomyces pastorianus
gactttgacaattttccatccggga

SEQ ID NO: 64048 - DNA, 25 bp, Saccharomyces pastorianus
gccatttccttttccgcatatatat

SEQ ID NO: 64049 - DNA, 25 bp, Saccharomyces pastorianus
tactgaccatttttactcgttgctg

SEQ ID NO: 64050 - DNA, 25 bp, Saccharomyces pastorianus
gctaaactcatctcattcaaactct

SEQ ID NO: 64051 - DNA, 25 bp, Saccharomyces pastorianus
ttccatccgggatatgccttcaaag

SEQ ID NO: 64052 - DNA, 25 bp, Saccharomyces pastorianus
gcagttgtagatggcgactccctaa

SEQ ID NO: 64053 - DNA, 25 bp, Saccharomyces pastorianus
ataccgtgacttgaggcttgaacct

SEQ ID NO: 64054 - DNA, 25 bp, Saccharomyces pastorianus
cctggattccttgatgatggccatc

SEQ ID NO: 64055 - DNA, 25 bp, Saccharomyces pastorianus
gcgatgaccgtatcagtactgacca

SEQ ID NO: 64056 - DNA, 25 bp, Saccharomyces pastorianus
atggtacttcattatcctggattcc

SEQ ID NO: 64057 - DNA, 25 bp, Saccharomyces pastorianus
gggtcacgttgatcctgaaactctg

SEQ ID NO: 64058 - DNA, 25 bp, Saccharomyces pastorianus
agacatactggtcgttgcacccttg

SEQ ID NO: 64059 - DNA, 25 bp, Saccharomyces pastorianus
gtgacaatcttttgacaagcgtgat

SEQ ID NO: 64060 - DNA, 25 bp, Saccharomyces pastorianus
aattaggcggttatcctgacacttc

SEQ ID NO: 64061 - DNA, 25 bp, Saccharomyces pastorianus
agaccctgtcttacatatcgagcta

SEQ ID NO: 64062 - DNA, 25 bp, Saccharomyces pastorianus
acccttgaccgcaaatacgttagca

SEQ ID NO: 64063 - DNA, 25 bp, Saccharomyces pastorianus
atttctagcgccttcaatgggcagt

SEQ ID NO: 64064 - DNA, 25 bp, Saccharomyces pastorianus
ggcagtggcacgttcaactctataa

SEQ ID NO: 64065 - DNA, 25 bp, Saccharomyces pastorianus
gtgggtaactgtattcaagccttct

SEQ ID NO: 64066 - DNA, 25 bp, Saccharomyces pastorianus
atcctgacacttctgccgggaaaga

SEQ ID NO: 64067 - DNA, 25 bp, Saccharomyces pastorianus
gaatccgacgttccctatatttcta

SEQ ID NO: 64068 - DNA, 25 bp, Saccharomyces pastorianus
tatcgagctacgtcgttgggcagac

SEQ ID NO: 64069 - DNA, 25 bp, Saccharomyces pastorianus
attactgccgccgacgataatatcg

SEQ ID NO: 64070 - DNA, 25 bp, Saccharomyces pastorianus
accttctgttatctcctatgctaaa

SEQ ID NO: 64071 - DNA, 25 bp, Saccharomyces pastorianus
gaacaacacggttatctagtcctaa

SEQ ID NO: 64072 - DNA, 25 bp, Saccharomyces pastorianus
gcaaagggtagtcatattccacaac

SEQ ID NO: 64073 - DNA, 25 bp, Saccharomyces pastorianus
agcttgtcaaacgatctgctgtcca

SEQ ID NO: 64074 - DNA, 25 bp, Saccharomyces pastorianus
aaacgccttccagaaacacggtgag

SEQ ID NO: 64075 - DNA, 25 bp, Saccharomyces pastorianus
gaatgtccagtaaaaccgcgtcaat

SEQ ID NO: 64076 - DNA, 25 bp, Saccharomyces pastorianus
gaattcagttcctcgtcatatgcag

SEQ ID NO: 64077 - DNA, 25 bp, Saccharomyces pastorianus
ggaactcacagaggcctgctttgaa

SEQ ID NO: 64078 - DNA, 25 bp, Saccharomyces pastorianus
tctgctgtccacaccggtaaggaga

SEQ ID NO: 64079 - DNA, 25 bp, Saccharomyces pastorianus
gaggtaaatcgtctgaccttctgtt

SEQ ID NO: 64080 - DNA, 25 bp, Saccharomyces pastorianus
ccaggatcggattatagcggcatat

SEQ ID NO: 64081 - DNA, 25 bp, Saccharomyces pastorianus
aattctgctctagacacggacacaa

SEQ ID NO: 64082 - DNA, 25 bp, Saccharomyces pastorianus
ggtgcgtttcatacagcggtcagag

SEQ ID NO: 64083 - DNA, 25 bp, Saccharomyces pastorianus
gtggcccaccattattcttatagta

SEQ ID NO: 64084 - DNA, 25 bp, Saccharomyces pastorianus
tgtagctacgttttttgtcttccct

SEQ ID NO: 64085 - DNA, 25 bp, Saccharomyces pastorianus
gtcttccctgtagcactgattatga

SEQ ID NO: 64086 - DNA, 25 bp, Saccharomyces pastorianus
aatggcctgggaactgcgtatagtc

SEQ ID NO: 64087 - DNA, 25 bp, Saccharomyces pastorianus
tactcgactatgaatgacggtgctt

SEQ ID NO: 64088 - DNA, 25 bp, Saccharomyces pastorianus
aattaccttttgatgacagccggag

SEQ ID NO: 64089 - DNA, 25 bp, Saccharomyces pastorianus
atcagggttccgatctacataaagg

SEQ ID NO: 64090 - DNA, 25 bp, Saccharomyces pastorianus
aatgctcatggagtgatcgtggcta

SEQ ID NO: 64091 - DNA, 25 bp, Saccharomyces pastorianus
aacgggttcactgctaccaaaacag

SEQ ID NO: 64092 - DNA, 25 bp, Saccharomyces pastorianus
gagtgcactccgttaatccagcaga

SEQ ID NO: 64093 - DNA, 25 bp, Saccharomyces pastorianus
ttcacctcaacagtctatggctagc

SEQ ID NO: 64094 - DNA, 25 bp, Saccharomyces pastorianus
tcatggaccttcgacgcccagaaat

SEQ ID NO: 64095 - DNA, 25 bp, Saccharomyces pastorianus
aagaggtgccactatcatggtaaat

SEQ ID NO: 64096 - DNA, 25 bp, Saccharomyces pastorianus
aaacctggttaacgctgctcatgga

SEQ ID NO: 64097 - DNA, 25 bp, Saccharomyces pastorianus
aacaacagcgccagttccagatgct

SEQ ID NO: 64098 - DNA, 25 bp, Saccharomyces pastorianus
agatcaacatagctctttcacctca

SEQ ID NO: 64099 - DNA, 25 bp, Saccharomyces pastorianus
agcagatcatctgggtacctcaata

SEQ ID NO: 64100 - DNA, 25 bp, Saccharomyces pastorianus
aatcgcacactaacatgagctcttc

SEQ ID NO: 64101 - DNA, 25 bp, Saccharomyces pastorianus
agtgcaagcgcaatcccaaaccaat

SEQ ID NO: 64102 - DNA, 25 bp, Saccharomyces pastorianus
tgtgttttttgttatcttaccccag

SEQ ID NO: 64103 - DNA, 25 bp, Saccharomyces pastorianus
caaattttagcggtccttcccatat

SEQ ID NO: 64104 - DNA, 25 bp, Saccharomyces pastorianus
gtccttcccatattattcgatccat

SEQ ID NO: 64105 - DNA, 25 bp, Saccharomyces pastorianus
tcattaaccctttgtgggctggctt

SEQ ID NO: 64106 - DNA, 25 bp, Saccharomyces pastorianus
gttgcttcagctggttacgtttctt

SEQ ID NO: 64107 - DNA, 25 bp, Saccharomyces pastorianus
cataatcagctcatggtttgcccta

SEQ ID NO: 64108 - DNA, 25 bp, Saccharomyces pastorianus
agattccgcccaaactaacatttat

SEQ ID NO: 64109 - DNA, 25 bp, Saccharomyces pastorianus
tgtacccgcttcttttcaaagggca

SEQ ID NO: 64110 - DNA, 25 bp, Saccharomyces pastorianus
gggctggcttcatatttgtttggat

SEQ ID NO: 64111 - DNA, 25 bp, Saccharomyces pastorianus
ttttggttccgtttatgcttgttgc

SEQ ID NO: 64112 - DNA, 25 bp, Saccharomyces pastorianus
gttattatcccatttacattccttg

SEQ ID NO: 64113 - DNA, 25 bp, Saccharomyces pastorianus
tacaccctacggatgaatttgcgaa

SEQ ID NO: 64114 - DNA, 25 bp, Saccharomyces pastorianus
gttggtgtacactctgacattctag

SEQ ID NO: 64115 - DNA, 25 bp, Saccharomyces pastorianus
caggctgtgccttaaacgtgattaa

SEQ ID NO: 64116 - DNA, 25 bp, Saccharomyces pastorianus
taaaaaatcgatcacccgttggtgt

SEQ ID NO: 64117 - DNA, 25 bp, Saccharomyces pastorianus
ggtcgagattatcgcaccaggctgt

SEQ ID NO: 64118 - DNA, 25 bp, Saccharomyces pastorianus
gattctgaattgatcctttaccatg

SEQ ID NO: 64119 - DNA, 25 bp, Saccharomyces pastorianus
gctagttcgattaacccaaaccaat

SEQ ID NO: 64120 - DNA, 25 bp, Saccharomyces pastorianus
cgcgttcagtgaccctatagtttta

SEQ ID NO: 64121 - DNA, 25 bp, Saccharomyces pastorianus
aattgtcgatccaaacttgcgcgtt

SEQ ID NO: 64122 - DNA, 25 bp, Saccharomyces pastorianus
ctaaaatgacgttgaggcctgatat

SEQ ID NO: 64123 - DNA, 25 bp, Saccharomyces pastorianus
atgttgttatagcatcgtcagacta

SEQ ID NO: 64124 - DNA, 25 bp, Saccharomyces pastorianus
gtacttctaaaagtgcttccttact

SEQ ID NO: 64125 - DNA, 25 bp, Saccharomyces pastorianus
ctaaaagtatcaatggcgaatccag

SEQ ID NO: 64126 - DNA, 25 bp, Saccharomyces pastorianus
aaagacccctcaaatatagcccaat

SEQ ID NO: 64127 - DNA, 25 bp, Saccharomyces pastorianus
accagcaccttctaaaagcacggaa

SEQ ID NO: 64128 - DNA, 25 bp, Saccharomyces pastorianus
aagacttgaagtctcttcttgcaaa

SEQ ID NO: 64129 - DNA, 25 bp, Saccharomyces pastorianus
cttcaaatcaacacactttcacatt

SEQ ID NO: 64130 - DNA, 25 bp, Saccharomyces pastorianus
tatagcccaatcacaaagtacttct

SEQ ID NO: 64131 - DNA, 25 bp, Saccharomyces pastorianus
gacacagaggcaaaaccagcacctt

SEQ ID NO: 64132 - DNA, 25 bp, Saccharomyces pastorianus
aactctctgctttaaggaaaccata

SEQ ID NO: 64133 - DNA, 25 bp, Saccharomyces pastorianus
gaagtctcttcttgcaaaagatagg

SEQ ID NO: 64134 - DNA, 25 bp, Saccharomyces pastorianus
aagttcaaaactctctgctttaagg

SEQ ID NO: 64135 - DNA, 25 bp, Saccharomyces pastorianus
ggtggtagtttattgtatgcctctt

SEQ ID NO: 64136 - DNA, 25 bp, Saccharomyces pastorianus
gaagaggaagttgttttaccccatg

SEQ ID NO: 64137 - DNA, 25 bp, Saccharomyces pastorianus
attgtatgcctctttcacagcattt

SEQ ID NO: 64138 - DNA, 25 bp, Saccharomyces pastorianus
ggaggctcacacgatcatgacttga

SEQ ID NO: 64139 - DNA, 25 bp, Saccharomyces pastorianus
tgtgttgctaggtgtgagcattccg

SEQ ID NO: 64140 - DNA, 25 bp, Saccharomyces pastorianus
gatcatgacttgagcgtagaagagg

SEQ ID NO: 64141 - DNA, 25 bp, Saccharomyces pastorianus
agtttattgtatgcctctttcacag

SEQ ID NO: 64142 - DNA, 25 bp, Saccharomyces pastorianus
catttgttggtggaggctcacacga

SEQ ID NO: 64143 - DNA, 25 bp, Saccharomyces pastorianus
atccatttatgtgttgctaggtgtg

SEQ ID NO: 64144 - DNA, 25 bp, Saccharomyces pastorianus
tcacacgatcatgacttgagcgtag

SEQ ID NO: 64145 - DNA, 25 bp, Saccharomyces pastorianus
gaggaagttgttttaccccatgatg

SEQ ID NO: 64146 - DNA, 25 bp, Saccharomyces pastorianus
gaagacgacacaggtggccagccat

SEQ ID NO: 64147 - DNA, 25 bp, Saccharomyces pastorianus
attcattaccaacgtgccgttctta

SEQ ID NO: 64148 - DNA, 25 bp, Saccharomyces pastorianus
gcttacttgaatatcgacgggtgct

SEQ ID NO: 64149 - DNA, 25 bp, Saccharomyces pastorianus
gtggccagccattggcttacttgaa

SEQ ID NO: 64150 - DNA, 25 bp, Saccharomyces pastorianus
acgggtgctcgcaagtgtctcatat

SEQ ID NO: 64151 - DNA, 25 bp, Saccharomyces pastorianus
agcggatccgctttgacgaaattat

SEQ ID NO: 64152 - DNA, 25 bp, Saccharomyces pastorianus
tatcacggttaatatgctgcgagct

SEQ ID NO: 64153 - DNA, 25 bp, Saccharomyces pastorianus
ctgcgagctcagaatttagtcaaac

SEQ ID NO: 64154 - DNA, 25 bp, Saccharomyces pastorianus
cttatcccatgcgagttcactaaat

SEQ ID NO: 64155 - DNA, 25 bp, Saccharomyces pastorianus
gaaagtttgccgattgctaatgata

SEQ ID NO: 64156 - DNA, 25 bp, Saccharomyces pastorianus
ggcaattgccctaatatgcagtttt

SEQ ID NO: 64157 - DNA, 25 bp, Saccharomyces pastorianus
aattctgtcaggctcagctgggtga

SEQ ID NO: 64158 - DNA, 25 bp, Saccharomyces pastorianus
gttatccatcatcaagacgccgaag

SEQ ID NO: 64159 - DNA, 25 bp, Saccharomyces pastorianus
tcattcgataacacttaccttcacc

SEQ ID NO: 64160 - DNA, 25 bp, Saccharomyces pastorianus
ttctccatcctccattttcaataag

SEQ ID NO: 64161 - DNA, 25 bp, Saccharomyces pastorianus
aactagattcttcatcaacttcccc

SEQ ID NO: 64162 - DNA, 25 bp, Saccharomyces pastorianus
ggcgtcgacctagaagaatcctctt

SEQ ID NO: 64163 - DNA, 25 bp, Saccharomyces pastorianus
tttcctcccacgatgttcaaacaaa

SEQ ID NO: 64164 - DNA, 25 bp, Saccharomyces pastorianus
aatcctcttccaattcgttatccat

SEQ ID NO: 64165 - DNA, 25 bp, Saccharomyces pastorianus
agaaaccctttgcaattctgtcagg

SEQ ID NO: 64166 - DNA, 25 bp, Saccharomyces pastorianus
agggtatgtcgaccgcaacaaagga

SEQ ID NO: 64167 - DNA, 25 bp, Saccharomyces pastorianus
catttgctattgactcttccagttt

SEQ ID NO: 64168 - DNA, 25 bp, Saccharomyces pastorianus
gaatccgacctgatgcccaaagtga

SEQ ID NO: 64169 - DNA, 25 bp, Saccharomyces pastorianus
tatctcttaggtatcctgcagcaaa

SEQ ID NO: 64170 - DNA, 25 bp, Saccharomyces pastorianus
gaacaacgtcaatctctataggcac

SEQ ID NO: 64171 - DNA, 25 bp, Saccharomyces pastorianus
gacatgaacgaccactatctcttag

SEQ ID NO: 64172 - DNA, 25 bp, Saccharomyces pastorianus
gtcgccagtatattctgcgtccaca

SEQ ID NO: 64173 - DNA, 25 bp, Saccharomyces pastorianus
agatgcgccatttgcgaacgtcccg

SEQ ID NO: 64174 - DNA, 25 bp, Saccharomyces pastorianus
gtacctggttcgacaacaagccctt

SEQ ID NO: 64175 - DNA, 25 bp, Saccharomyces pastorianus
gtccctatacaactacaagctgctg

SEQ ID NO: 64176 - DNA, 25 bp, Saccharomyces pastorianus
tccctgttggcgaacgtgctcaata

SEQ ID NO: 64177 - DNA, 25 bp, Saccharomyces pastorianus
gcctgctgtacctgatcagaaccaa

SEQ ID NO: 64178 - DNA, 25 bp, Saccharomyces pastorianus
aatgggtccgcaaccttggtaacat

SEQ ID NO: 64179 - DNA, 25 bp, Saccharomyces pastorianus
agcaacgtcaagttcgtgcgcaaac

SEQ ID NO: 64180 - DNA, 25 bp, Saccharomyces pastorianus
atcctgcagaacatcatcgacttcg

SEQ ID NO: 64181 - DNA, 25 bp, Saccharomyces pastorianus
acattcgcgagttcgttctcacgta

SEQ ID NO: 64182 - DNA, 25 bp, Saccharomyces pastorianus
atggaccaggcgcagaacttgctat

SEQ ID NO: 64183 - DNA, 25 bp, Saccharomyces pastorianus
gtgtccgccagaaaaccagctgttt

SEQ ID NO: 64184 - DNA, 25 bp, Saccharomyces pastorianus
gaacaactccttttttgccaacgcg

SEQ ID NO: 64185 - DNA, 25 bp, Saccharomyces pastorianus
ggccaagttcaaccaggcgttcgaa

SEQ ID NO: 64186 - DNA, 25 bp, Saccharomyces pastorianus
gacttcgaacggacggcggccaaag

SEQ ID NO: 64187 - DNA, 25 bp, Saccharomyces pastorianus
aaaagaccttgcagaactaccacct

SEQ ID NO: 64188 - DNA, 25 bp, Saccharomyces pastorianus
tatatgaacatgcagtccttcgcgc

SEQ ID NO: 64189 - DNA, 25 bp, Saccharomyces pastorianus
gcgccctttttgatcagcaacgtca

SEQ ID NO: 64190 - DNA, 25 bp, Saccharomyces pastorianus
agcaaggtcgtgtgggagtactact

SEQ ID NO: 64191 - DNA, 25 bp, Saccharomyces pastorianus
gcccacgagttcagcggctacgaag

SEQ ID NO: 64192 - DNA, 25 bp, Saccharomyces pastorianus
caacattgtgtttctgcacggcagc

SEQ ID NO: 64193 - DNA, 25 bp, Saccharomyces pastorianus
aagctgggcactggcttcgactgga

SEQ ID NO: 64194 - DNA, 25 bp, Saccharomyces pastorianus
agctcgtctacgacgtgtacaccaa

SEQ ID NO: 64195 - DNA, 25 bp, Saccharomyces pastorianus
ggacggtcactacgcgctgcacaag

SEQ ID NO: 64196 - DNA, 25 bp, Saccharomyces pastorianus
tgaacgttgctgtcggccattccat

SEQ ID NO: 64197 - DNA, 25 bp, Saccharomyces pastorianus
attccatgggtggtttccaggcgct

SEQ ID NO: 64198 - DNA, 25 bp, Saccharomyces pastorianus
ctggcgccacaagcgtcaacattgt

SEQ ID NO: 64199 - DNA, 25 bp, Saccharomyces pastorianus
acaagctcgtgctgatcgaccaggc

SEQ ID NO: 64200 - DNA, 25 bp, Saccharomyces pastorianus
gggagtactacttgtcacggatcgt

SEQ ID NO: 64201 - DNA, 25 bp, Saccharomyces pastorianus
agtaatgtacttcttgcccaatgag

SEQ ID NO: 64202 - DNA, 25 bp, Saccharomyces pastorianus
tatgttggcctcattggtcgttacc

SEQ ID NO: 64203 - DNA, 25 bp, Saccharomyces pastorianus
gtgcccacatgttcaaccagatcag

SEQ ID NO: 64204 - DNA, 25 bp, Saccharomyces pastorianus
aactgatgatctccatcttctcttc

SEQ ID NO: 64205 - DNA, 25 bp, Saccharomyces pastorianus
gtcatggttctcatctacggtatgt

SEQ ID NO: 64206 - DNA, 25 bp, Saccharomyces pastorianus
gttaccttggtcacgggcattccat

SEQ ID NO: 64207 - DNA, 25 bp, Saccharomyces pastorianus
ctttgaccactgtcttctcgataaa

SEQ ID NO: 64208 - DNA, 25 bp, Saccharomyces pastorianus
agcatacttcattgacgctgccttg

SEQ ID NO: 64209 - DNA, 25 bp, Saccharomyces pastorianus
ctctcatctgtatccaaacgcgaag

SEQ ID NO: 64210 - DNA, 25 bp, Saccharomyces pastorianus
atcatctgcatgatcagtgcccaca

SEQ ID NO: 64211 - DNA, 25 bp, Saccharomyces pastorianus
aatacgcagctggtaggcgtcggcc

SEQ ID NO: 64212 - DNA, 25 bp, Saccharomyces pastorianus
gaaaacgcgtacatagtcgccctct

SEQ ID NO: 64213 - DNA, 25 bp, Saccharomyces pastorianus
aatgtccaccggcaaactgctaaag

SEQ ID NO: 64214 - DNA, 25 bp, Saccharomyces pastorianus
aggtcaacgacttctctttgcactt

SEQ ID NO: 64215 - DNA, 25 bp, Saccharomyces pastorianus
tttttggtctccttgattttcttct

SEQ ID NO: 64216 - DNA, 25 bp, Saccharomyces pastorianus
tttgcacttacccatggactggacc

SEQ ID NO: 64217 - DNA, 25 bp, Saccharomyces pastorianus
tgttccctgtgtctcgaattggagt

SEQ ID NO: 64218 - DNA, 25 bp, Saccharomyces pastorianus
aaaggctttccaattcttccaactg

SEQ ID NO: 64219 - DNA, 25 bp, Saccharomyces pastorianus
aatacgacaccatcgtggcatcgtg

SEQ ID NO: 64220 - DNA, 25 bp, Saccharomyces pastorianus
gattttcttctgtggcgtgtcctca

SEQ ID NO: 64221 - DNA, 25 bp, Saccharomyces pastorianus
atcgtggttcgatgaccatccagaa

SEQ ID NO: 64222 - DNA, 25 bp, Saccharomyces pastorianus
aggtatcaaacagctttcccaggtc

SEQ ID NO: 64223 - DNA, 25 bp, Saccharomyces pastorianus
ggaaattctcacagctataattact

SEQ ID NO: 64224 - DNA, 25 bp, Saccharomyces pastorianus
gaaaaagtggaaattctcacagcta

SEQ ID NO: 64225 - DNA, 25 bp, Saccharomyces pastorianus
cacagctataattactgacttactt

SEQ ID NO: 64226 - DNA, 25 bp, Saccharomyces pastorianus
aattctcacagctataattactgac

SEQ ID NO: 64227 - DNA, 25 bp, Saccharomyces pastorianus
gacgtcaaagaacttactgaaaaag

SEQ ID NO: 64228 - DNA, 25 bp, Saccharomyces pastorianus
aaagatgacgtcaaagaacttactg

SEQ ID NO: 64229 - DNA, 25 bp, Saccharomyces pastorianus
aaaagtggaaattctcacagctata

SEQ ID NO: 64230 - DNA, 25 bp, Saccharomyces pastorianus
ttctcacagctataattactgactt

SEQ ID NO: 64231 - DNA, 25 bp, Saccharomyces pastorianus
gatgacgtcaaagaacttactgaaa

SEQ ID NO: 64232 - DNA, 25 bp, Saccharomyces pastorianus
gtggaaattctcacagctataatta

SEQ ID NO: 64233 - DNA, 25 bp, Saccharomyces pastorianus
agtggaaattctcacagctataatt

SEQ ID NO: 64234 - DNA, 25 bp, Saccharomyces pastorianus
atgtccttccatcaaaacgcgctaa

SEQ ID NO: 64235 - DNA, 25 bp, Saccharomyces pastorianus
ttatcgtttcggtcattcttctaaa

SEQ ID NO: 64236 - DNA, 25 bp, Saccharomyces pastorianus
aaaagagatatcacgggcccgattt

SEQ ID NO: 64237 - DNA, 25 bp, Saccharomyces pastorianus
agacgtttatgtctctcctttaaat

SEQ ID NO: 64238 - DNA, 25 bp, Saccharomyces pastorianus
cagggcacctgatgaagacgtttat

SEQ ID NO: 64239 - DNA, 25 bp, Saccharomyces pastorianus
tatgatcggattcactcagggtttc

SEQ ID NO: 64240 - DNA, 25 bp, Saccharomyces pastorianus
ctatggttactactttatcgtttcg

SEQ ID NO: 64241 - DNA, 25 bp, Saccharomyces pastorianus
gtttggactccgctgatggtaaaag

SEQ ID NO: 64242 - DNA, 25 bp, Saccharomyces pastorianus
tcttcttccttctgttcttaattat

SEQ ID NO: 64243 - DNA, 25 bp, Saccharomyces pastorianus
atgatgcctatattccatgtccttc

SEQ ID NO: 64244 - DNA, 25 bp, Saccharomyces pastorianus
gattgaactgcttatgatgcctata

SEQ ID NO: 64245 - DNA, 25 bp, Saccharomyces pastorianus
ggaagccctcaggtagagagctcat

SEQ ID NO: 64246 - DNA, 25 bp, Saccharomyces pastorianus
cagtcgccaacttcgcggagtggaa

SEQ ID NO: 64247 - DNA, 25 bp, Saccharomyces pastorianus
ataacaccgtcgacgaagcggcaca

SEQ ID NO: 64248 - DNA, 25 bp, Saccharomyces pastorianus
atcctgaagatgaccgccgagaaca

SEQ ID NO: 64249 - DNA, 25 bp, Saccharomyces pastorianus
tatcatgtcgaagcacggcaaccta

SEQ ID NO: 64250 - DNA, 25 bp, Saccharomyces pastorianus
gaccaccaggacgacagcggtatca

SEQ ID NO: 64251 - DNA, 25 bp, Saccharomyces pastorianus
aagaagaatcacatcatcgccaaga

SEQ ID NO: 64252 - DNA, 25 bp, Saccharomyces pastorianus
cactctctaccagaaggctttgtac

SEQ ID NO: 64253 - DNA, 25 bp, Saccharomyces pastorianus
ggtcgttcgagtcagataacaccgt

SEQ ID NO: 64254 - DNA, 25 bp, Saccharomyces pastorianus
agggctccgcatgggatctgtccga

SEQ ID NO: 64255 - DNA, 25 bp, Saccharomyces pastorianus
tgtccgaattcacagacgccttaaa

SEQ ID NO: 64256 - DNA, 25 bp, Saccharomyces pastorianus
cccgctttagcgttcattatggact

SEQ ID NO: 64257 - DNA, 25 bp, Saccharomyces pastorianus
atggctgtcatcctggcgttaatca

SEQ ID NO: 64258 - DNA, 25 bp, Saccharomyces pastorianus
gaatgcacttctttcttcttgatgc

SEQ ID NO: 64259 - DNA, 25 bp, Saccharomyces pastorianus
taaagccttattcgtcacttcggag

SEQ ID NO: 64260 - DNA, 25 bp, Saccharomyces pastorianus
aaggctgctgtgatcttagtgttca

SEQ ID NO: 64261 - DNA, 25 bp, Saccharomyces pastorianus
tttacctcttatgtgggagctgcct

SEQ ID NO: 64262 - DNA, 25 bp, Saccharomyces pastorianus
actaccctaatctatttcactgcga

SEQ ID NO: 64263 - DNA, 25 bp, Saccharomyces pastorianus
gaacccgttcagatggaatgcactt

SEQ ID NO: 64264 - DNA, 25 bp, Saccharomyces pastorianus
agtgccattcggtttaatcctatta

SEQ ID NO: 64265 - DNA, 25 bp, Saccharomyces pastorianus
tcatcccctgggttaaagccttatt

SEQ ID NO: 64266 - DNA, 25 bp, Saccharomyces pastorianus
aatcctattaggtgccactctgggt

SEQ ID NO: 64267 - DNA, 25 bp, Saccharomyces pastorianus
agcatgaattcatccgcggtagtgt

SEQ ID NO: 64268 - DNA, 25 bp, Saccharomyces pastorianus
atggatacacagtcctctgaccaac

SEQ ID NO: 64269 - DNA, 25 bp, Saccharomyces pastorianus
ttactggctctttacgttccgtgga

SEQ ID NO: 64270 - DNA, 25 bp, Saccharomyces pastorianus
gctttttctcccaatctgtctagaa

SEQ ID NO: 64271 - DNA, 25 bp, Saccharomyces pastorianus
agttctcttagctctcaaagaccgt

SEQ ID NO: 64272 - DNA, 25 bp, Saccharomyces pastorianus
aagaatagccgcaggaactccatta

SEQ ID NO: 64273 - DNA, 25 bp, Saccharomyces pastorianus
atatgcgtgagctacccgctgaaga

SEQ ID NO: 64274 - DNA, 25 bp, Saccharomyces pastorianus
aaacctactcaagctgtgttcccaa

SEQ ID NO: 64275 - DNA, 25 bp, Saccharomyces pastorianus
gtcaaccaatcgcatataccactga

SEQ ID NO: 64276 - DNA, 25 bp, Saccharomyces pastorianus
gcggtagtgtccatcgatagcatta

SEQ ID NO: 64277 - DNA, 25 bp, Saccharomyces pastorianus
ggaaccaggcagacaacgctttttc

SEQ ID NO: 64278 - DNA, 25 bp, Saccharomyces pastorianus
gccacaaccctatcttaggtaactt

SEQ ID NO: 64279 - DNA, 25 bp, Saccharomyces pastorianus
gtgctgttcggaggcaaatgcgttc

SEQ ID NO: 64280 - DNA, 25 bp, Saccharomyces pastorianus
aaatgcgttcgattactttgtatgt

SEQ ID NO: 64281 - DNA, 25 bp, Saccharomyces pastorianus
aaccctgttaccatgtgttgacgga

SEQ ID NO: 64282 - DNA, 25 bp, Saccharomyces pastorianus
ggtcaatccagaaaccctgttacca

SEQ ID NO: 64283 - DNA, 25 bp, Saccharomyces pastorianus
atgtcagctgtactaattcacaagg

SEQ ID NO: 64284 - DNA, 25 bp, Saccharomyces pastorianus
aaagatccattcattaccgaacaat

SEQ ID NO: 64285 - DNA, 25 bp, Saccharomyces pastorianus
gaacaggtgacttgggtttcatcaa

SEQ ID NO: 64286 - DNA, 25 bp, Saccharomyces pastorianus
ttagatgtaaggaccgccacaaccc

SEQ ID NO: 64287 - DNA, 25 bp, Saccharomyces pastorianus
gaggtacacgctgatattggtagtt

SEQ ID NO: 64288 - DNA, 25 bp, Saccharomyces pastorianus
gattgccaaggcaggcggattgtta

SEQ ID NO: 64289 - DNA, 25 bp, Saccharomyces pastorianus
aatggcgaaacaacagatactactt

SEQ ID NO: 64290 - DNA, 25 bp, Saccharomyces pastorianus
gctcacacatcaaaccttctttatg

SEQ ID NO: 64291 - DNA, 25 bp, Saccharomyces pastorianus
gataccattctaaatatttgtcctg

SEQ ID NO: 64292 - DNA, 25 bp, Saccharomyces pastorianus
gggaatcaatctgctcaacctaaag

SEQ ID NO: 64293 - DNA, 25 bp, Saccharomyces pastorianus
aagtggcgaaacatcttcgggatac

SEQ ID NO: 64294 - DNA, 25 bp, Saccharomyces pastorianus
gatatacgtgctttcactcatagaa

SEQ ID NO: 64295 - DNA, 25 bp, Saccharomyces pastorianus
gagttgttgaatcccactatctaca

SEQ ID NO: 64296 - DNA, 25 bp, Saccharomyces pastorianus
aacctaaaggtaacactggagcaga

SEQ ID NO: 64297 - DNA, 25 bp, Saccharomyces pastorianus
agattacctaactgggctcacacat

SEQ ID NO: 64298 - DNA, 25 bp, Saccharomyces pastorianus
accaatgtgcatttagtgtgccaga

SEQ ID NO: 64299 - DNA, 25 bp, Saccharomyces pastorianus
ggtggtagaaagctccctagcaaaa

SEQ ID NO: 64300 - DNA, 25 bp, Saccharomyces pastorianus
aaccaaccttggtgtgtcatcggta

SEQ ID NO: 64301 - DNA, 25 bp, Saccharomyces pastorianus
atctttgtgatagattctagtgcta

SEQ ID NO: 64302 - DNA, 25 bp, Saccharomyces pastorianus
gacctctctggagacattattttcc

SEQ ID NO: 64303 - DNA, 25 bp, Saccharomyces pastorianus
ggagacattattttccagccaccac

SEQ ID NO: 64304 - DNA, 25 bp, Saccharomyces pastorianus
gtagtactgctggtatgggcaaaca

SEQ ID NO: 64305 - DNA, 25 bp, Saccharomyces pastorianus
gtaacgccttatccggacagggtct

SEQ ID NO: 64306 - DNA, 25 bp, Saccharomyces pastorianus
tgtcatcggtagtaacgccttatcc

SEQ ID NO: 64307 - DNA, 25 bp, Saccharomyces pastorianus
caccaccgcacttatctttgtgata

SEQ ID NO: 64308 - DNA, 25 bp, Saccharomyces pastorianus
tctagtgctagaaaccgtatggaag

SEQ ID NO: 64309 - DNA, 25 bp, Saccharomyces pastorianus
gacaacaaagattgagacctctctg

SEQ ID NO: 64310 - DNA, 25 bp, Saccharomyces pastorianus
acagggtcttgttgaaggattatcc

SEQ ID NO: 64311 - DNA, 25 bp, Saccharomyces pastorianus
ctgggaaaactatttggctcgaaag

SEQ ID NO: 64312 - DNA, 25 bp, Saccharomyces pastorianus
ggcaattcaatttcgaaggttctgg

SEQ ID NO: 64313 - DNA, 25 bp, Saccharomyces pastorianus
atgggcaattcaatttcgaaggttc

SEQ ID NO: 64314 - DNA, 25 bp, Saccharomyces pastorianus
caattcaatttcgaaggttctggga

SEQ ID NO: 64315 - DNA, 25 bp, Saccharomyces pastorianus
gggcaattcaatttcgaaggttctg

SEQ ID NO: 64316 - DNA, 25 bp, Saccharomyces pastorianus
gttctgggaaaactatttggctcga

SEQ ID NO: 64317 - DNA, 25 bp, Saccharomyces pastorianus
ggttctgggaaaactatttggctcg

SEQ ID NO: 64318 - DNA, 25 bp, Saccharomyces pastorianus
tgggaaaactatttggctcgaaaga

SEQ ID NO: 64319 - DNA, 25 bp, Saccharomyces pastorianus
ttctgggaaaactatttggctcgaa

SEQ ID NO: 64320 - DNA, 25 bp, Saccharomyces pastorianus
tctgggaaaactatttggctcgaaa

SEQ ID NO: 64321 - DNA, 25 bp, Saccharomyces pastorianus
tgggcaattcaatttcgaaggttct

SEQ ID NO: 64322 - DNA, 25 bp, Saccharomyces pastorianus
ttggaattacaagttgctcaagctt

SEQ ID NO: 64323 - DNA, 25 bp, Saccharomyces pastorianus
ccacaagccaagattttgtctcaag

SEQ ID NO: 64324 - DNA, 25 bp, Saccharomyces pastorianus
atgtctgctccacaagccaagattt

SEQ ID NO: 64325 - DNA, 25 bp, Saccharomyces pastorianus
tgtctgctccacaagccaagatttt

SEQ ID NO: 64326 - DNA, 25 bp, Saccharomyces pastorianus
tccacaagccaagattttgtctcaa

SEQ ID NO: 64327 - DNA, 25 bp, Saccharomyces pastorianus
gtctgctccacaagccaagattttg

SEQ ID NO: 64328 - DNA, 25 bp, Saccharomyces pastorianus
tctgctccacaagccaagattttgt

SEQ ID NO: 64329 - DNA, 25 bp, Saccharomyces pastorianus
gctccacaagccaagattttgtctc

SEQ ID NO: 64330 - DNA, 25 bp, Saccharomyces pastorianus
cacaagccaagattttgtctcaagc

SEQ ID NO: 64331 - DNA, 25 bp, Saccharomyces pastorianus
acaagccaagattttgtctcaagct

SEQ ID NO: 64332 - DNA, 25 bp, Saccharomyces pastorianus
tgctccacaagccaagattttgtct

SEQ ID NO: 64333 - DNA, 25 bp, Saccharomyces pastorianus
gtaacctcaaactcaccaacaagac

SEQ ID NO: 64334 - DNA, 25 bp, Saccharomyces pastorianus
ttgccccacacagatgatgaaacct

SEQ ID NO: 64335 - DNA, 25 bp, Saccharomyces pastorianus
ggaatccctggaaaactatcacata

SEQ ID NO: 64336 - DNA, 25 bp, Saccharomyces pastorianus
gaatgcaaactggattattcctagc

SEQ ID NO: 64337 - DNA, 25 bp, Saccharomyces pastorianus
atgaactcaccaaaagctctgtttt

SEQ ID NO: 64338 - DNA, 25 bp, Saccharomyces pastorianus
gattattcctagcaaaaccaaaaag

SEQ ID NO: 64339 - DNA, 25 bp, Saccharomyces pastorianus
aagctctgttttttggaatccctgg

SEQ ID NO: 64340 - DNA, 25 bp, Saccharomyces pastorianus
aactatcacataattgtaacctcaa

SEQ ID NO: 64341 - DNA, 25 bp, Saccharomyces pastorianus
gaaacctgataaaaatgcgttgaag

SEQ ID NO: 64342 - DNA, 25 bp, Saccharomyces pastorianus
gacaaattgccccacacagatgatg

SEQ ID NO: 64343 - DNA, 25 bp, Saccharomyces pastorianus
aacaagacaaattgccccacacaga

SEQ ID NO: 64344 - DNA, 25 bp, Saccharomyces pastorianus
cgcatttttatcaggtttcatcatc

SEQ ID NO: 64345 - DNA, 25 bp, Saccharomyces pastorianus
aatccagtttgcattcattgtttta

SEQ ID NO: 64346 - DNA, 25 bp, Saccharomyces pastorianus
agacttccaagaaggcgtactttgc

SEQ ID NO: 64347 - DNA, 25 bp, Saccharomyces pastorianus
gtcttgttggtgagtttgaggttac

SEQ ID NO: 64348 - DNA, 25 bp, Saccharomyces pastorianus
aagcactacatcatctgcggtcata

SEQ ID NO: 64349 - DNA, 25 bp, Saccharomyces pastorianus
tttccccttcaacgcatttttatca

SEQ ID NO: 64350 - DNA, 25 bp, Saccharomyces pastorianus
gcgtactttgcccagattgaaaaaa

SEQ ID NO: 64351 - DNA, 25 bp, Saccharomyces pastorianus
gcttttggtgagttcattgttgcta

SEQ ID NO: 64352 - DNA, 25 bp, Saccharomyces pastorianus
cagggattccaaaaaacagagcttt

SEQ ID NO: 64353 - DNA, 25 bp, Saccharomyces pastorianus
tatgtgatagttttccagggattcc

SEQ ID NO: 64354 - DNA, 25 bp, Saccharomyces pastorianus
ttaatccgtgacaatttccccttca

SEQ ID NO: 64355 - DNA, 25 bp, Saccharomyces pastorianus
ttcaactcgggaaaggacctactgc

SEQ ID NO: 64356 - DNA, 25 bp, Saccharomyces pastorianus
aatagctctattgtctctttgtcgg

SEQ ID NO: 64357 - DNA, 25 bp, Saccharomyces pastorianus
aagagctaagcagtcatccacaata

SEQ ID NO: 64358 - DNA, 25 bp, Saccharomyces pastorianus
aaccggagcggcgatggtcttccag

SEQ ID NO: 64359 - DNA, 25 bp, Saccharomyces pastorianus
gattactatacgcaatccactggcg

SEQ ID NO: 64360 - DNA, 25 bp, Saccharomyces pastorianus
ggagacttctacaaacacagccgct

SEQ ID NO: 64361 - DNA, 25 bp, Saccharomyces pastorianus
tgaatcacagagcagctgcgcttct

SEQ ID NO: 64362 - DNA, 25 bp, Saccharomyces pastorianus
gtaacagcaccatttgcctcaatat

SEQ ID NO: 64363 - DNA, 25 bp, Saccharomyces pastorianus
tctttgtcggcgctaggcgaagaaa

SEQ ID NO: 64364 - DNA, 25 bp, Saccharomyces pastorianus
gacgggtaccatcgatttgtgaatt

SEQ ID NO: 64365 - DNA, 25 bp, Saccharomyces pastorianus
ggctgtgcgccggaacaagaactta

SEQ ID NO: 64366 - DNA, 25 bp, Saccharomyces pastorianus
agtgttccgagcttatgcgacatac

SEQ ID NO: 64367 - DNA, 25 bp, Saccharomyces pastorianus
accgctagaaaagagtgatcacaaa

SEQ ID NO: 64368 - DNA, 25 bp, Saccharomyces pastorianus
cgagtgttccgagcttatgcgacat

SEQ ID NO: 64369 - DNA, 25 bp, Saccharomyces pastorianus
gagtgttccgagcttatgcgacata

SEQ ID NO: 64370 - DNA, 25 bp, Saccharomyces pastorianus
gcgagtgttccgagcttatgcgaca

SEQ ID NO: 64371 - DNA, 25 bp, Saccharomyces pastorianus
gttccgagcttatgcgacatactga

SEQ ID NO: 64372 - DNA, 25 bp, Saccharomyces pastorianus
taccgctagaaaagagtgatcacaa

SEQ ID NO: 64373 - DNA, 25 bp, Saccharomyces pastorianus
tgttccgagcttatgcgacatactg

SEQ ID NO: 64374 - DNA, 25 bp, Saccharomyces pastorianus
ggcgagtgttccgagcttatgcgac

SEQ ID NO: 64375 - DNA, 25 bp, Saccharomyces pastorianus
agaaaagagtgatcacaaagctcac

SEQ ID NO: 64376 - DNA, 25 bp, Saccharomyces pastorianus
gtgttccgagcttatgcgacatact

SEQ ID NO: 64377 - DNA, 25 bp, Saccharomyces pastorianus
agtgttccgagcttatgcgacatac

SEQ ID NO: 64378 - DNA, 25 bp, Saccharomyces pastorianus
ttatgcgacatactgataccgctag

SEQ ID NO: 64379 - DNA, 25 bp, Saccharomyces pastorianus
cgagtgttccgagcttatgcgacat

SEQ ID NO: 64380 - DNA, 25 bp, Saccharomyces pastorianus
gagtgttccgagcttatgcgacata

SEQ ID NO: 64381 - DNA, 25 bp, Saccharomyces pastorianus
gcgagtgttccgagcttatgcgaca

SEQ ID NO: 64382 - DNA, 25 bp, Saccharomyces pastorianus
gttccgagcttatgcgacatactga

SEQ ID NO: 64383 - DNA, 25 bp, Saccharomyces pastorianus
tgatcacaaagctcactcaattcaa

SEQ ID NO: 64384 - DNA, 25 bp, Saccharomyces pastorianus
taccgctagaaaagagtgatcacaa

SEQ ID NO: 64385 - DNA, 25 bp, Saccharomyces pastorianus
ggcgagtgttccgagcttatgcgac

SEQ ID NO: 64386 - DNA, 25 bp, Saccharomyces pastorianus
gtgttccgagcttatgcgacatact

SEQ ID NO: 64387 - DNA, 25 bp, Saccharomyces pastorianus
aaagctcactcaattcaacttcgaa

SEQ ID NO: 64388 - DNA, 25 bp, Saccharomyces pastorianus
gtggtagcatgatcatttttcctta

SEQ ID NO: 64389 - DNA, 25 bp, Saccharomyces pastorianus
gcatgatcatttttccttatatagg

SEQ ID NO: 64390 - DNA, 25 bp, Saccharomyces pastorianus
agcatctccagtgtcctcagataca

SEQ ID NO: 64391 - DNA, 25 bp, Saccharomyces pastorianus
gatacaccaataccccacatgttag

SEQ ID NO: 64392 - DNA, 25 bp, Saccharomyces pastorianus
agaagcatctccagtgtcctcagat

SEQ ID NO: 64393 - DNA, 25 bp, Saccharomyces pastorianus
aatgatgttattcaccgtagcaaag

SEQ ID NO: 64394 - DNA, 25 bp, Saccharomyces pastorianus
gctctgacagaagcatctccagtgt

SEQ ID NO: 64395 - DNA, 25 bp, Saccharomyces pastorianus
ataccccacatgttagtggtagcat

SEQ ID NO: 64396 - DNA, 25 bp, Saccharomyces pastorianus
attcaccgtagcaaagacggctctg

SEQ ID NO: 64397 - DNA, 25 bp, Saccharomyces pastorianus
agtgtcctcagatacaccaataccc

SEQ ID NO: 64398 - DNA, 25 bp, Saccharomyces pastorianus
agcaaagacggctctgacagaagca

SEQ ID NO: 64399 - DNA, 25 bp, Saccharomyces pastorianus
gactttgacacctacggttgtgacg

SEQ ID NO: 64400 - DNA, 25 bp, Saccharomyces pastorianus
gaacgaaagcatctcccaagtcaac

SEQ ID NO: 64401 - DNA, 25 bp, Saccharomyces pastorianus
tgcttctaaagcttccacatcaaac

SEQ ID NO: 64402 - DNA, 25 bp, Saccharomyces pastorianus
aagtcaaccagtcgtatggccacag

SEQ ID NO: 64403 - DNA, 25 bp, Saccharomyces pastorianus
agaagcgaattcagcagtgcccaca

SEQ ID NO: 64404 - DNA, 25 bp, Saccharomyces pastorianus
acggtgatactaacgattccatgac

SEQ ID NO: 64405 - DNA, 25 bp, Saccharomyces pastorianus
aaggaagataatctcctcgccgcac

SEQ ID NO: 64406 - DNA, 25 bp, Saccharomyces pastorianus
gaacaatttacgcttgaactcgccc

SEQ ID NO: 64407 - DNA, 25 bp, Saccharomyces pastorianus
tgaggatcgtccaaaaccgcaggtc

SEQ ID NO: 64408 - DNA, 25 bp, Saccharomyces pastorianus
tattgccaaatagtgccgctgacag

SEQ ID NO: 64409 - DNA, 25 bp, Saccharomyces pastorianus
tggcacctagtgtaaagctttcaat

SEQ ID NO: 64410 - DNA, 25 bp, Saccharomyces pastorianus
gaaaccgagattggccgcactttat

SEQ ID NO: 64411 - DNA, 25 bp, Saccharomyces pastorianus
gaaagatccccaagtgaaaccgaga

SEQ ID NO: 64412 - DNA, 25 bp, Saccharomyces pastorianus
gccaccctcaggttgcaaacattaa

SEQ ID NO: 64413 - DNA, 25 bp, Saccharomyces pastorianus
attgtaccatgcttgactgagagac

SEQ ID NO: 64414 - DNA, 25 bp, Saccharomyces pastorianus
gacacaggttgattccgatatcgaa

SEQ ID NO: 64415 - DNA, 25 bp, Saccharomyces pastorianus
ttaacagattctgatgccaccctca

SEQ ID NO: 64416 - DNA, 25 bp, Saccharomyces pastorianus
ttcagaaaccaacactttcccagtt

SEQ ID NO: 64417 - DNA, 25 bp, Saccharomyces pastorianus
cgacttctgttggtaatcgttcgaa

SEQ ID NO: 64418 - DNA, 25 bp, Saccharomyces pastorianus
atcgttcgaatatcttggctacagc

SEQ ID NO: 64419 - DNA, 25 bp, Saccharomyces pastorianus
atgagctgctgagatttcttgcgaa

SEQ ID NO: 64420 - DNA, 25 bp, Saccharomyces pastorianus
taacggttattgctcctggtttgtt

SEQ ID NO: 64421 - DNA, 25 bp, Saccharomyces pastorianus
gcaacaataacaattcgggctcgaa

SEQ ID NO: 64422 - DNA, 25 bp, Saccharomyces pastorianus
ggaagtagcagctccagcaatacta

SEQ ID NO: 64423 - DNA, 25 bp, Saccharomyces pastorianus
gctccaggtgttttattggcgccag

SEQ ID NO: 64424 - DNA, 25 bp, Saccharomyces pastorianus
taaactacaactacactacactacc

SEQ ID NO: 64425 - DNA, 25 bp, Saccharomyces pastorianus
gcgccagccgccaataatgactttg

SEQ ID NO: 64426 - DNA, 25 bp, Saccharomyces pastorianus
aatctcctcaccagaaagccattct

SEQ ID NO: 64427 - DNA, 25 bp, Saccharomyces pastorianus
aacaatcttcctgttgcatcggtag

SEQ ID NO: 64428 - DNA, 25 bp, Saccharomyces pastorianus
tatgaacagctcaaacccctctaat

SEQ ID NO: 64429 - DNA, 25 bp, Saccharomyces pastorianus
tgcatcggtaggtcctgctccaggt

SEQ ID NO: 64430 - DNA, 25 bp, Saccharomyces pastorianus
gggctcgaataccttaatttcacct

SEQ ID NO: 64431 - DNA, 25 bp, Saccharomyces pastorianus
accctacaatcccaatatgttcaca

SEQ ID NO: 64432 - DNA, 25 bp, Saccharomyces pastorianus
aacccagccggtttacaaagcaatg

SEQ ID NO: 64433 - DNA, 25 bp, Saccharomyces pastorianus
ggagaaattgttcaaggtttcgaca

SEQ ID NO: 64434 - DNA, 25 bp, Saccharomyces pastorianus
acaaagcaatggtttgcatatccaa

SEQ ID NO: 64435 - DNA, 25 bp, Saccharomyces pastorianus
attgttcaaggtttcgacaacccag

SEQ ID NO: 64436 - DNA, 25 bp, Saccharomyces pastorianus
gtttatgttgctgagagcagatgat

SEQ ID NO: 64437 - DNA, 25 bp, Saccharomyces pastorianus
tcaaggtttcgacaacccagccggt

SEQ ID NO: 64438 - DNA, 25 bp, Saccharomyces pastorianus
atggtttgcatatccaagggcaaaa

SEQ ID NO: 64439 - DNA, 25 bp, Saccharomyces pastorianus
atatccaagggcaaaagtttatgtt

SEQ ID NO: 64440 - DNA, 25 bp, Saccharomyces pastorianus
tgttcaaggtttcgacaacccagcc

SEQ ID NO: 64441 - DNA, 25 bp, Saccharomyces pastorianus
gcaatggtttgcatatccaagggca

SEQ ID NO: 64442 - DNA, 25 bp, Saccharomyces pastorianus
caaaagtttatgttgctgagagcag

SEQ ID NO: 64443 - DNA, 25 bp, Saccharomyces pastorianus
gttggttttgaaactgcattcagaa

SEQ ID NO: 64444 - DNA, 25 bp, Saccharomyces pastorianus
attccaacatccaccagttcgaaaa

SEQ ID NO: 64445 - DNA, 25 bp, Saccharomyces pastorianus
attcagaaaacagagctcccctact

SEQ ID NO: 64446 - DNA, 25 bp, Saccharomyces pastorianus
gaagacgactttttagtcgacgatg

SEQ ID NO: 64447 - DNA, 25 bp, Saccharomyces pastorianus
tcgacgaagacaatgcggcacgctt

SEQ ID NO: 64448 - DNA, 25 bp, Saccharomyces pastorianus
aatgcggcacgcttaagaaacttaa

SEQ ID NO: 64449 - DNA, 25 bp, Saccharomyces pastorianus
caaggtcctggtacatatattatca

SEQ ID NO: 64450 - DNA, 25 bp, Saccharomyces pastorianus
gagccaccagaagaaacgagtacga

SEQ ID NO: 64451 - DNA, 25 bp, Saccharomyces pastorianus
aacaaagccaaatcctaagagacag

SEQ ID NO: 64452 - DNA, 25 bp, Saccharomyces pastorianus
cctactgcatatggagccaccagaa

SEQ ID NO: 64453 - DNA, 25 bp, Saccharomyces pastorianus
aagaatctccagatgttggttttga

SEQ ID NO: 64454 - DNA, 25 bp, Saccharomyces pastorianus
gaggccgcacatactttcaaagaag

SEQ ID NO: 64455 - DNA, 25 bp, Saccharomyces pastorianus
agctttgaggccagcgttaacgaaa

SEQ ID NO: 64456 - DNA, 25 bp, Saccharomyces pastorianus
tttttatgccagaattccgaacttt

SEQ ID NO: 64457 - DNA, 25 bp, Saccharomyces pastorianus
tccgaactttctaacgattgatcca

SEQ ID NO: 64458 - DNA, 25 bp, Saccharomyces pastorianus
gaagatgccaatgacttttctgacc

SEQ ID NO: 64459 - DNA, 25 bp, Saccharomyces pastorianus
ggaaagtgccaaccatagagaacat

SEQ ID NO: 64460 - DNA, 25 bp, Saccharomyces pastorianus
gattgatccagttccgtttgaccct

SEQ ID NO: 64461 - DNA, 25 bp, Saccharomyces pastorianus
gtttgaccctccaagctttgaggcc

SEQ ID NO: 64462 - DNA, 25 bp, Saccharomyces pastorianus
ttttctgaccaagatgaggccgcac

SEQ ID NO: 64463 - DNA, 25 bp, Saccharomyces pastorianus
gaccaactggatgaccgtcttatcg

SEQ ID NO: 64464 - DNA, 25 bp, Saccharomyces pastorianus
gagatattcccgtgacattgaccaa

SEQ ID NO: 64465 - DNA, 25 bp, Saccharomyces pastorianus
acgctgatacagataaccttacttt

SEQ ID NO: 64466 - DNA, 25 bp, Saccharomyces pastorianus
gatttcaaggaatacggatactcgc

SEQ ID NO: 64467 - DNA, 25 bp, Saccharomyces pastorianus
ttcaacgaaggcaataccgcgactc

SEQ ID NO: 64468 - DNA, 25 bp, Saccharomyces pastorianus
gaaaccatcagtgaagttccagaag

SEQ ID NO: 64469 - DNA, 25 bp, Saccharomyces pastorianus
gatactcgctattttccgttttcat

SEQ ID NO: 64470 - DNA, 25 bp, Saccharomyces pastorianus
gagcccttgccgttcaaggaagtta

SEQ ID NO: 64471 - DNA, 25 bp, Saccharomyces pastorianus
gcgactccttatttcctggtatatg

SEQ ID NO: 64472 - DNA, 25 bp, Saccharomyces pastorianus
ggatgcattcttagaaaccgttaaa

SEQ ID NO: 64473 - DNA, 25 bp, Saccharomyces pastorianus
ccgttttcattcatcgaggcgaggc

SEQ ID NO: 64474 - DNA, 25 bp, Saccharomyces pastorianus
tttaaatctattgagcccttgccgt

SEQ ID NO: 64475 - DNA, 25 bp, Saccharomyces pastorianus
ggaactgttgaatcgtgatggatca

SEQ ID NO: 64476 - DNA, 25 bp, Saccharomyces pastorianus
gatgccccagatttggcttcaccta

SEQ ID NO: 64477 - DNA, 25 bp, Saccharomyces pastorianus
aaagaactggcctatctagcctttg

SEQ ID NO: 64478 - DNA, 25 bp, Saccharomyces pastorianus
agcaaagatgcgtaactccgtcaaa

SEQ ID NO: 64479 - DNA, 25 bp, Saccharomyces pastorianus
gcaatcttttctatgcaatggtgca

SEQ ID NO: 64480 - DNA, 25 bp, Saccharomyces pastorianus
agttgaaaggttcctctcgttattg

SEQ ID NO: 64481 - DNA, 25 bp, Saccharomyces pastorianus
gaaccgcgaggtgcaaacgttataa

SEQ ID NO: 64482 - DNA, 25 bp, Saccharomyces pastorianus
tagttatgagcgacgatgccccaga

SEQ ID NO: 64483 - DNA, 25 bp, Saccharomyces pastorianus
agcctttgccccaagtaatgtcgaa

SEQ ID NO: 64484 - DNA, 25 bp, Saccharomyces pastorianus
acaatgtattgttccgttatctgca

SEQ ID NO: 64485 - DNA, 25 bp, Saccharomyces pastorianus
aagtggttcagagcctattagatat

SEQ ID NO: 64486 - DNA, 25 bp, Saccharomyces pastorianus
gcaatggtgcattcacagcaaagat

SEQ ID NO: 64487 - DNA, 25 bp, Saccharomyces pastorianus
ggtacatcatcataacacgttcaat

SEQ ID NO: 64488 - DNA, 25 bp, Saccharomyces pastorianus
gaacatgctgtcaagtccgagaact

SEQ ID NO: 64489 - DNA, 25 bp, Saccharomyces pastorianus
tggcgtgtactgaggctgttgaaac

SEQ ID NO: 64490 - DNA, 25 bp, Saccharomyces pastorianus
gtattggctcatagatttcctcatt

SEQ ID NO: 64491 - DNA, 25 bp, Saccharomyces pastorianus
gagaacttatccgacgcacaagctg

SEQ ID NO: 64492 - DNA, 25 bp, Saccharomyces pastorianus
aaacggtcattggaggccactacaa

SEQ ID NO: 64493 - DNA, 25 bp, Saccharomyces pastorianus
attcttacatggcaattccctatac

SEQ ID NO: 64494 - DNA, 25 bp, Saccharomyces pastorianus
ggatcgtgttattcgtgttgaccaa

SEQ ID NO: 64495 - DNA, 25 bp, Saccharomyces pastorianus
taccatccgacaattccgggacgat

SEQ ID NO: 64496 - DNA, 25 bp, Saccharomyces pastorianus
aagctgccttcttggatcgtgttat

SEQ ID NO: 64497 - DNA, 25 bp, Saccharomyces pastorianus
acctggccaaccaattcgatctgga

SEQ ID NO: 64498 - DNA, 25 bp, Saccharomyces pastorianus
agtttatttctcttctcatcggtga

SEQ ID NO: 64499 - DNA, 25 bp, Saccharomyces pastorianus
gaaagtcttcttaatgctaccaaaa

SEQ ID NO: 64500 - DNA, 25 bp, Saccharomyces pastorianus
tatctaccttggatagctgtctcct

SEQ ID NO: 64501 - DNA, 25 bp, Saccharomyces pastorianus
tggaaactacaaaccaactccgagg

SEQ ID NO: 64502 - DNA, 25 bp, Saccharomyces pastorianus
ggatagctgtctcctcaacttggga

SEQ ID NO: 64503 - DNA, 25 bp, Saccharomyces pastorianus
atatatcgcttgttgatggcttacg

SEQ ID NO: 64504 - DNA, 25 bp, Saccharomyces pastorianus
cttcacctcatgcagttgctcaaaa

SEQ ID NO: 64505 - DNA, 25 bp, Saccharomyces pastorianus
tccgattttccggtaccaaatagat

SEQ ID NO: 64506 - DNA, 25 bp, Saccharomyces pastorianus
atcgattttcttggatcttttgcaa

SEQ ID NO: 64507 - DNA, 25 bp, Saccharomyces pastorianus
ttgggaccgcgaatccgattttccg

SEQ ID NO: 64508 - DNA, 25 bp, Saccharomyces pastorianus
gtttttcgactattttacattgcat

SEQ ID NO: 64509 - DNA, 25 bp, Saccharomyces pastorianus
gcagttcagccaatgctaatcctaa

SEQ ID NO: 64510 - DNA, 25 bp, Saccharomyces pastorianus
ggacaatctacccattgtttcttca

SEQ ID NO: 64511 - DNA, 25 bp, Saccharomyces pastorianus
aaatcaagcatttcgggcacctcaa

SEQ ID NO: 64512 - DNA, 25 bp, Saccharomyces pastorianus
gagaaacagccccttgaaattaaca

SEQ ID NO: 64513 - DNA, 25 bp, Saccharomyces pastorianus
gaacgtcggacacggcacaagcata

SEQ ID NO: 64514 - DNA, 25 bp, Saccharomyces pastorianus
atggaactaccgcaaccatcgttgc

SEQ ID NO: 64515 - DNA, 25 bp, Saccharomyces pastorianus
tccggattcagcaactccattggac

SEQ ID NO: 64516 - DNA, 25 bp, Saccharomyces pastorianus
tacaagctctttacccaacgatagg

SEQ ID NO: 64517 - DNA, 25 bp, Saccharomyces pastorianus
gttgcccacaacaaacgtcactaaa

SEQ ID NO: 64518 - DNA, 25 bp, Saccharomyces pastorianus
tgacgggtcctactcctaaaaacat

SEQ ID NO: 64519 - DNA, 25 bp, Saccharomyces pastorianus
ttaacaccaagatcctcgttgaatg

SEQ ID NO: 64520 - DNA, 25 bp, Saccharomyces pastorianus
gaaagtcattttgtcagtgcacctg

SEQ ID NO: 64521 - DNA, 25 bp, Saccharomyces pastorianus
aggtgctagtgttttggcgcaaata

SEQ ID NO: 64522 - DNA, 25 bp, Saccharomyces pastorianus
tccagctttggattttattctaact

SEQ ID NO: 64523 - DNA, 25 bp, Saccharomyces pastorianus
gaaaaatacgggagcacttccaaag

SEQ ID NO: 64524 - DNA, 25 bp, Saccharomyces pastorianus
ggtggtagttccaaaattccagctt

SEQ ID NO: 64525 - DNA, 25 bp, Saccharomyces pastorianus
cacgtgatatgaaccctgccttaat

SEQ ID NO: 64526 - DNA, 25 bp, Saccharomyces pastorianus
cggcaatgaacatcttttcccaatc

SEQ ID NO: 64527 - DNA, 25 bp, Saccharomyces pastorianus
tttcccaatcagtattattccgccc

SEQ ID NO: 64528 - DNA, 25 bp, Saccharomyces pastorianus
gagaccttctttgttgagttccaca

SEQ ID NO: 64529 - DNA, 25 bp, Saccharomyces pastorianus
ggatgctcataccatgattgaccaa

SEQ ID NO: 64530 - DNA, 25 bp, Saccharomyces pastorianus
gttccacatcattcccacaatttta

SEQ ID NO: 64531 - DNA, 25 bp, Saccharomyces pastorianus
agacgcccagaagtgtcacgggtct

SEQ ID NO: 64532 - DNA, 25 bp, Saccharomyces pastorianus
tgactccgatgatagcgtcgataac

SEQ ID NO: 64533 - DNA, 25 bp, Saccharomyces pastorianus
gacaatggtgataatgactccgatg

SEQ ID NO: 64534 - DNA, 25 bp, Saccharomyces pastorianus
ggatgataacgatggtgacaatgac

SEQ ID NO: 64535 - DNA, 25 bp, Saccharomyces pastorianus
atccagagacgctgcagaagaggaa

SEQ ID NO: 64536 - DNA, 25 bp, Saccharomyces pastorianus
tagcgtcgataacggaatcggatcc

SEQ ID NO: 64537 - DNA, 25 bp, Saccharomyces pastorianus
aagtgtcacgggtctttcggctgat

SEQ ID NO: 64538 - DNA, 25 bp, Saccharomyces pastorianus
aatcggatccgagacgcccagaagt

SEQ ID NO: 64539 - DNA, 25 bp, Saccharomyces pastorianus
tttcggctgatccagagacgctgca

SEQ ID NO: 64540 - DNA, 25 bp, Saccharomyces pastorianus
aaacattgtgcgtttgagcagccag

SEQ ID NO: 64541 - DNA, 25 bp, Saccharomyces pastorianus
agcagccaggcggaccaggacaatg

SEQ ID NO: 64542 - DNA, 25 bp, Saccharomyces pastorianus
tgaccaaatccttagttttttcgca

SEQ ID NO: 64543 - DNA, 25 bp, Saccharomyces pastorianus
gttacctattggagaagctactgtg

SEQ ID NO: 64544 - DNA, 25 bp, Saccharomyces pastorianus
agttccattccttgatatccaacaa

SEQ ID NO: 64545 - DNA, 25 bp, Saccharomyces pastorianus
tcagacgatccactcaataacgcaa

SEQ ID NO: 64546 - DNA, 25 bp, Saccharomyces pastorianus
acaagaacgctcttcagtcaaatca

SEQ ID NO: 64547 - DNA, 25 bp, Saccharomyces pastorianus
gaattggcccactagcgtggtcaat

SEQ ID NO: 64548 - DNA, 25 bp, Saccharomyces pastorianus
caattcaccaaagttccattccttg

SEQ ID NO: 64549 - DNA, 25 bp, Saccharomyces pastorianus
agttttttcgcaagtgactccaata

SEQ ID NO: 64550 - DNA, 25 bp, Saccharomyces pastorianus
aataagcttattggccctaggaggt

SEQ ID NO: 64551 - DNA, 25 bp, Saccharomyces pastorianus
ggcgagttattttaagctgtgttac

SEQ ID NO: 64552 - DNA, 25 bp, Saccharomyces pastorianus
tacaccttatccaaagaggcgagtt

SEQ ID NO: 64553 - DNA, 25 bp, Saccharomyces pastorianus
tccccgttaacactcactatggtat

SEQ ID NO: 64554 - DNA, 25 bp, Saccharomyces pastorianus
ttccccgttaacactcactatggta

SEQ ID NO: 64555 - DNA, 25 bp, Saccharomyces pastorianus
tgtcttccccgttaacactcactat

SEQ ID NO: 64556 - DNA, 25 bp, Saccharomyces pastorianus
tgctgctgtcttccccgttaacact

SEQ ID NO: 64557 - DNA, 25 bp, Saccharomyces pastorianus
tgcttttgctgctgtcttccccgtt

SEQ ID NO: 64558 - DNA, 25 bp, Saccharomyces pastorianus
cttttgctgctgtcttccccgttaa

SEQ ID NO: 64559 - DNA, 25 bp, Saccharomyces pastorianus
tttgctgctgtcttccccgttaaca

SEQ ID NO: 64560 - DNA, 25 bp, Saccharomyces pastorianus
attctgcttttgctgctgtcttccc

SEQ ID NO: 64561 - DNA, 25 bp, Saccharomyces pastorianus
ccccgttaacactcactatggtatc

SEQ ID NO: 64562 - DNA, 25 bp, Saccharomyces pastorianus
cccgttaacactcactatggtatcc

SEQ ID NO: 64563 - DNA, 25 bp, Saccharomyces pastorianus
tcttccccgttaacactcactatgg

SEQ ID NO: 64564 - DNA, 25 bp, Saccharomyces pastorianus
tccccgttaacactcactatggtat

SEQ ID NO: 64565 - DNA, 25 bp, Saccharomyces pastorianus
atgctttcagtattatttattccta

SEQ ID NO: 64566 - DNA, 25 bp, Saccharomyces pastorianus
ataattctgcttttgctgctgtctt

SEQ ID NO: 64567 - DNA, 25 bp, Saccharomyces pastorianus
ttccccgttaacactcactatggta

SEQ ID NO: 64568 - DNA, 25 bp, Saccharomyces pastorianus
tgtcttccccgttaacactcactat

SEQ ID NO: 64569 - DNA, 25 bp, Saccharomyces pastorianus
attcctataattctgcttttgctgc

SEQ ID NO: 64570 - DNA, 25 bp, Saccharomyces pastorianus
tgctgctgtcttccccgttaacact

SEQ ID NO: 64571 - DNA, 25 bp, Saccharomyces pastorianus
cttttgctgctgtcttccccgttaa

SEQ ID NO: 64572 - DNA, 25 bp, Saccharomyces pastorianus
tttgctgctgtcttccccgttaaca

SEQ ID NO: 64573 - DNA, 25 bp, Saccharomyces pastorianus
attctgcttttgctgctgtcttccc

SEQ ID NO: 64574 - DNA, 25 bp, Saccharomyces pastorianus
cccgttaacactcactatggtatcc

SEQ ID NO: 64575 - DNA, 25 bp, Saccharomyces pastorianus
gatttcgccgaaaacgaactgctga

SEQ ID NO: 64576 - DNA, 25 bp, Saccharomyces pastorianus
aaattccatagtctggagctctccc

SEQ ID NO: 64577 - DNA, 25 bp, Saccharomyces pastorianus
aagttccataatcagcccaattcgg

SEQ ID NO: 64578 - DNA, 25 bp, Saccharomyces pastorianus
tcaacgggtgacagcattgtttcgc

SEQ ID NO: 64579 - DNA, 25 bp, Saccharomyces pastorianus
ttcctcaagagccaccaatgttatc

SEQ ID NO: 64580 - DNA, 25 bp, Saccharomyces pastorianus
tctcccaatgtctcgatcaataggc

SEQ ID NO: 64581 - DNA, 25 bp, Saccharomyces pastorianus
atgtaatgctaacgaactccacctc

SEQ ID NO: 64582 - DNA, 25 bp, Saccharomyces pastorianus
aatcagcccaattcggatgccaatg

SEQ ID NO: 64583 - DNA, 25 bp, Saccharomyces pastorianus
cctttccgatttgcaactggttaat

SEQ ID NO: 64584 - DNA, 25 bp, Saccharomyces pastorianus
atagtgttgcgctgtaagatggtta

SEQ ID NO: 64585 - DNA, 25 bp, Saccharomyces pastorianus
gaaattttggccgatgtaatgctaa

SEQ ID NO: 64586 - DNA, 25 bp, Saccharomyces pastorianus
aattgctaaccccagtattgaacgt

SEQ ID NO: 64587 - DNA, 25 bp, Saccharomyces pastorianus
cgtttccctggaatgcgttagcaaa

SEQ ID NO: 64588 - DNA, 25 bp, Saccharomyces pastorianus
agacgccattagctgtattgtaaag

SEQ ID NO: 64589 - DNA, 25 bp, Saccharomyces pastorianus
gaaaataccgcccattcagacgcca

SEQ ID NO: 64590 - DNA, 25 bp, Saccharomyces pastorianus
taatcggttgatcgtagtactgttc

SEQ ID NO: 64591 - DNA, 25 bp, Saccharomyces pastorianus
agcaactgggtcaggtgaccgtcaa

SEQ ID NO: 64592 - DNA, 25 bp, Saccharomyces pastorianus
gggattcaatactccaccaatctcc

SEQ ID NO: 64593 - DNA, 25 bp, Saccharomyces pastorianus
atctccaccgtatccattgaagttg

SEQ ID NO: 64594 - DNA, 25 bp, Saccharomyces pastorianus
gatttaattatgttctaccccggcg

SEQ ID NO: 64595 - DNA, 25 bp, Saccharomyces pastorianus
gtactgttcataggactggtaacca

SEQ ID NO: 64596 - DNA, 25 bp, Saccharomyces pastorianus
ggaggcgaacaacaacgattccaca

SEQ ID NO: 64597 - DNA, 25 bp, Saccharomyces pastorianus
agaaacgttggacatcgcctccact

SEQ ID NO: 64598 - DNA, 25 bp, Saccharomyces pastorianus
aagtcacgtacgatctatcacaact

SEQ ID NO: 64599 - DNA, 25 bp, Saccharomyces pastorianus
ctgttaaccgttcagccattggtat

SEQ ID NO: 64600 - DNA, 25 bp, Saccharomyces pastorianus
gcacgtttagccatccaatttctag

SEQ ID NO: 64601 - DNA, 25 bp, Saccharomyces pastorianus
ccattggtatccctagtgttcgaga

SEQ ID NO: 64602 - DNA, 25 bp, Saccharomyces pastorianus
gatcccatagccgaagacgtgttga

SEQ ID NO: 64603 - DNA, 25 bp, Saccharomyces pastorianus
attcgccatcgaacagctgttaacc

SEQ ID NO: 64604 - DNA, 25 bp, Saccharomyces pastorianus
gtgttcgagaccatttccaacggta

SEQ ID NO: 64605 - DNA, 25 bp, Saccharomyces pastorianus
agatcccacgaactcacttttggag

SEQ ID NO: 64606 - DNA, 25 bp, Saccharomyces pastorianus
aatgttgcacttgcacgtttagcca

SEQ ID NO: 64607 - DNA, 25 bp, Saccharomyces pastorianus
ttaacactaactcatctccgatttc

SEQ ID NO: 64608 - DNA, 25 bp, Saccharomyces pastorianus
gacccgaattgctagaagccctgga

SEQ ID NO: 64609 - DNA, 25 bp, Saccharomyces pastorianus
ggtatagtacgttctgagactgcac

SEQ ID NO: 64610 - DNA, 25 bp, Saccharomyces pastorianus
aactatactcttatgcggaagccaa

SEQ ID NO: 64611 - DNA, 25 bp, Saccharomyces pastorianus
catctgtttgactcccgacaagaag

SEQ ID NO: 64612 - DNA, 25 bp, Saccharomyces pastorianus
acatccacctagaaccgagtttcat

SEQ ID NO: 64613 - DNA, 25 bp, Saccharomyces pastorianus
tggttgctggctgcatctgtttgac

SEQ ID NO: 64614 - DNA, 25 bp, Saccharomyces pastorianus
tcttatgatcacttcttctgcacat

SEQ ID NO: 64615 - DNA, 25 bp, Saccharomyces pastorianus
aattgttgccaacttgggtacggtg

SEQ ID NO: 64616 - DNA, 25 bp, Saccharomyces pastorianus
ttgagaccgcaagagatgatcctga

SEQ ID NO: 64617 - DNA, 25 bp, Saccharomyces pastorianus
gaacctgattatgaaacgacggcac

SEQ ID NO: 64618 - DNA, 25 bp, Saccharomyces pastorianus
gaaccaagtttattctgccattact

SEQ ID NO: 64619 - DNA, 25 bp, Saccharomyces pastorianus
agggtatatttcattctcgtcgctt

SEQ ID NO: 64620 - DNA, 25 bp, Saccharomyces pastorianus
ctttgaagttctctcacttgctgta

SEQ ID NO: 64621 - DNA, 25 bp, Saccharomyces pastorianus
gggcctgttgtcaatgttgtccaaa

SEQ ID NO: 64622 - DNA, 25 bp, Saccharomyces pastorianus
ccttattcgtgactcttaccttggt

SEQ ID NO: 64623 - DNA, 25 bp, Saccharomyces pastorianus
ttaccttggtctttggagcaacctt

SEQ ID NO: 64624 - DNA, 25 bp, Saccharomyces pastorianus
ggagcaacctttttcgtgattcata

SEQ ID NO: 64625 - DNA, 25 bp, Saccharomyces pastorianus
gaacacgcgctggaagtctttgaag

SEQ ID NO: 64626 - DNA, 25 bp, Saccharomyces pastorianus
gttttagaccaattccgcagacaga

SEQ ID NO: 64627 - DNA, 25 bp, Saccharomyces pastorianus
catgcctgatgtaccaattgctgaa

SEQ ID NO: 64628 - DNA, 25 bp, Saccharomyces pastorianus
tcgctttgcacacatcttgacagaa

SEQ ID NO: 64629 - DNA, 25 bp, Saccharomyces pastorianus
tgacaacgttgagatcatgcctgat

SEQ ID NO: 64630 - DNA, 25 bp, Saccharomyces pastorianus
cggaaaccgttcgccatcgactgaa

SEQ ID NO: 64631 - DNA, 25 bp, Saccharomyces pastorianus
tgggcataatttcgacctgtaaagg

SEQ ID NO: 64632 - DNA, 25 bp, Saccharomyces pastorianus
acggaaaccgttcgccatcgactga

SEQ ID NO: 64633 - DNA, 25 bp, Saccharomyces pastorianus
aacggaaaccgttcgccatcgactg

SEQ ID NO: 64634 - DNA, 25 bp, Saccharomyces pastorianus
gggcataatttcgacctgtaaaggt

SEQ ID NO: 64635 - DNA, 25 bp, Saccharomyces pastorianus
gcataatttcgacctgtaaaggttc

SEQ ID NO: 64636 - DNA, 25 bp, Saccharomyces pastorianus
ttccaacggaaaccgttcgccatcg

SEQ ID NO: 64637 - DNA, 25 bp, Saccharomyces pastorianus
caacggaaaccgttcgccatcgact

SEQ ID NO: 64638 - DNA, 25 bp, Saccharomyces pastorianus
ggcataatttcgacctgtaaaggtt

SEQ ID NO: 64639 - DNA, 25 bp, Saccharomyces pastorianus
gaaaccgttcgccatcgactgaaaa

SEQ ID NO: 64640 - DNA, 25 bp, Saccharomyces pastorianus
atgggcataatttcgacctgtaaag

SEQ ID NO: 64641 - DNA, 25 bp, Saccharomyces pastorianus
ttaccacttccatgtccatatagta

SEQ ID NO: 64642 - DNA, 25 bp, Saccharomyces pastorianus
gctatacctggtcgctattgtgtac

SEQ ID NO: 64643 - DNA, 25 bp, Saccharomyces pastorianus
tcttgggccctgatggttacatgaa

SEQ ID NO: 64644 - DNA, 25 bp, Saccharomyces pastorianus
aaaactcttacgtatgtcattggtg

SEQ ID NO: 64645 - DNA, 25 bp, Saccharomyces pastorianus
aagacgattattcctcaacactatg

SEQ ID NO: 64646 - DNA, 25 bp, Saccharomyces pastorianus
gtgggtcaacaatattctttacgag

SEQ ID NO: 64647 - DNA, 25 bp, Saccharomyces pastorianus
gacggatttgtcatcttacccgata

SEQ ID NO: 64648 - DNA, 25 bp, Saccharomyces pastorianus
agagtttttgtccattaccagccct

SEQ ID NO: 64649 - DNA, 25 bp, Saccharomyces pastorianus
atggttgttcctttcatccaggaga

SEQ ID NO: 64650 - DNA, 25 bp, Saccharomyces pastorianus
tgatggcattgctactagccctgaa

SEQ ID NO: 64651 - DNA, 25 bp, Saccharomyces pastorianus
aatccttgagagacttgggtcccaa

SEQ ID NO: 64652 - DNA, 25 bp, Saccharomyces pastorianus
agaacgcgtgcctgagcgatgactc

SEQ ID NO: 64653 - DNA, 25 bp, Saccharomyces pastorianus
gactctttaaccgatcatcacggaa

SEQ ID NO: 64654 - DNA, 25 bp, Saccharomyces pastorianus
gaagataataagaacgcgtgcctga

SEQ ID NO: 64655 - DNA, 25 bp, Saccharomyces pastorianus
tttcacctcattttttacttgaatg

SEQ ID NO: 64656 - DNA, 25 bp, Saccharomyces pastorianus
gagcgatgactctttaaccgatcat

SEQ ID NO: 64657 - DNA, 25 bp, Saccharomyces pastorianus
gcgtgcctgagcgatgactctttaa

SEQ ID NO: 64658 - DNA, 25 bp, Saccharomyces pastorianus
taataagaacgcgtgcctgagcgat

SEQ ID NO: 64659 - DNA, 25 bp, Saccharomyces pastorianus
taaccgatcatcacggaaacaacaa

SEQ ID NO: 64660 - DNA, 25 bp, Saccharomyces pastorianus
gtgcctgagcgatgactctttaacc

SEQ ID NO: 64661 - DNA, 25 bp, Saccharomyces pastorianus
atgactctttaaccgatcatcacgg

SEQ ID NO: 64662 - DNA, 25 bp, Saccharomyces pastorianus
gcctgagcgatgactctttaaccga

SEQ ID NO: 64663 - DNA, 25 bp, Saccharomyces pastorianus
gtgatctataccttcacatagtaca

SEQ ID NO: 64664 - DNA, 25 bp, Saccharomyces pastorianus
aaacagcattgttatcgagtggaca

SEQ ID NO: 64665 - DNA, 25 bp, Saccharomyces pastorianus
aagaacgtactgtctgaatcaaaac

SEQ ID NO: 64666 - DNA, 25 bp, Saccharomyces pastorianus
gatcgattgcaattcgaatccatta

SEQ ID NO: 64667 - DNA, 25 bp, Saccharomyces pastorianus
aatggtaagtgaaacggtcgccgat

SEQ ID NO: 64668 - DNA, 25 bp, Saccharomyces pastorianus
ctctaccatgaagctgatcgattgc

SEQ ID NO: 64669 - DNA, 25 bp, Saccharomyces pastorianus
aattgcagctactagacgacgttga

SEQ ID NO: 64670 - DNA, 25 bp, Saccharomyces pastorianus
aagctatagtcgacttctctaccat

SEQ ID NO: 64671 - DNA, 25 bp, Saccharomyces pastorianus
aacggtcgccgatagtataataata

SEQ ID NO: 64672 - DNA, 25 bp, Saccharomyces pastorianus
caagcttgattgcagcgaagacgat

SEQ ID NO: 64673 - DNA, 25 bp, Saccharomyces pastorianus
caattcggagattgttttagtgccg

SEQ ID NO: 64674 - DNA, 25 bp, Saccharomyces pastorianus
aataggtatgctccacaagcccaac

SEQ ID NO: 64675 - DNA, 25 bp, Saccharomyces pastorianus
agctaattatgctgcacctgctcag

SEQ ID NO: 64676 - DNA, 25 bp, Saccharomyces pastorianus
agacgatgtcgtatgcaccttctaa

SEQ ID NO: 64677 - DNA, 25 bp, Saccharomyces pastorianus
agttttacttgccagaagctcccca

SEQ ID NO: 64678 - DNA, 25 bp, Saccharomyces pastorianus
aactcgcctattcaaccgcaaatga

SEQ ID NO: 64679 - DNA, 25 bp, Saccharomyces pastorianus
aatgggccacaacctaatatgcaag

SEQ ID NO: 64680 - DNA, 25 bp, Saccharomyces pastorianus
gcacattactcagctggcggaaaca

SEQ ID NO: 64681 - DNA, 25 bp, Saccharomyces pastorianus
aaggtattcgccctaatcagtttca

SEQ ID NO: 64682 - DNA, 25 bp, Saccharomyces pastorianus
atacatactacgtaggccgttcacc

SEQ ID NO: 64683 - DNA, 25 bp, Saccharomyces pastorianus
atggaaacggccactcaggcattgc

SEQ ID NO: 64684 - DNA, 25 bp, Saccharomyces pastorianus
gacgcagttatccacacagcatgaa

SEQ ID NO: 64685 - DNA, 25 bp, Saccharomyces pastorianus
atcttaaccattcccttagtgactt

SEQ ID NO: 64686 - DNA, 25 bp, Saccharomyces pastorianus
atttcaagcaggttgggcccctaga

SEQ ID NO: 64687 - DNA, 25 bp, Saccharomyces pastorianus
ttaataaccagtatcctccgaagga

SEQ ID NO: 64688 - DNA, 25 bp, Saccharomyces pastorianus
ggatccctggttcggatgccatatt

SEQ ID NO: 64689 - DNA, 25 bp, Saccharomyces pastorianus
actgccgcgcgcactaaagagttta

SEQ ID NO: 64690 - DNA, 25 bp, Saccharomyces pastorianus
cagacacgttttccagaaagccctg

SEQ ID NO: 64691 - DNA, 25 bp, Saccharomyces pastorianus
ggaacgctgcaatgatcttttagac

SEQ ID NO: 64692 - DNA, 25 bp, Saccharomyces pastorianus
gccatattccatctgcttttagcat

SEQ ID NO: 64693 - DNA, 25 bp, Saccharomyces pastorianus
gagttttgttcctcaagatctcgaa

SEQ ID NO: 64694 - DNA, 25 bp, Saccharomyces pastorianus
ttactgaccatgatgccttcgaagc

SEQ ID NO: 64695 - DNA, 25 bp, Saccharomyces pastorianus
gaaagccctggcaattactggaacg

SEQ ID NO: 64696 - DNA, 25 bp, Saccharomyces pastorianus
gaacatacactcgtttgagcaaaaa

SEQ ID NO: 64697 - DNA, 25 bp, Saccharomyces pastorianus
cgtgctgggcataaacaaacataat

SEQ ID NO: 64698 - DNA, 25 bp, Saccharomyces pastorianus
acagtcccaactccatatattcaag

SEQ ID NO: 64699 - DNA, 25 bp, Saccharomyces pastorianus
atcacacagtgattagtaaggacgt

SEQ ID NO: 64700 - DNA, 25 bp, Saccharomyces pastorianus
ataagaacatacactcgtttgagca

SEQ ID NO: 64701 - DNA, 25 bp, Saccharomyces pastorianus
gcacctcaaccagacactgtggaaa

SEQ ID NO: 64702 - DNA, 25 bp, Saccharomyces pastorianus
attagtaaggacgtgctgggcataa

SEQ ID NO: 64703 - DNA, 25 bp, Saccharomyces pastorianus
gaaacagtcccaactccatatattc

SEQ ID NO: 64704 - DNA, 25 bp, Saccharomyces pastorianus
attcaaggaacttatcacacagtga

SEQ ID NO: 64705 - DNA, 25 bp, Saccharomyces pastorianus
actgtggaaacagtcccaactccat

SEQ ID NO: 64706 - DNA, 25 bp, Saccharomyces pastorianus
gtcccaactccatatattcaaggaa

SEQ ID NO: 64707 - DNA, 25 bp, Saccharomyces pastorianus
aacagccttgtttgattcctgtcac

SEQ ID NO: 64708 - DNA, 25 bp, Saccharomyces pastorianus
aaagccacaattgtcatcgtcacat

SEQ ID NO: 64709 - DNA, 25 bp, Saccharomyces pastorianus
ggatctttgggctccatattcaaaa

SEQ ID NO: 64710 - DNA, 25 bp, Saccharomyces pastorianus
caagatgggctgcaagctgcgcttt

SEQ ID NO: 64711 - DNA, 25 bp, Saccharomyces pastorianus
acagggctgcgttaatgggatcttt

SEQ ID NO: 64712 - DNA, 25 bp, Saccharomyces pastorianus
gattcctgtcactcaggtacagttt

SEQ ID NO: 64713 - DNA, 25 bp, Saccharomyces pastorianus
gctgcgctttcgtatgctacgggaa

SEQ ID NO: 64714 - DNA, 25 bp, Saccharomyces pastorianus
aaattctcacctgcggatattgtta

SEQ ID NO: 64715 - DNA, 25 bp, Saccharomyces pastorianus
gcgatgtcgcatgcctttatcaagg

SEQ ID NO: 64716 - DNA, 25 bp, Saccharomyces pastorianus
gcaatcgtatttgtctctgctacaa

SEQ ID NO: 64717 - DNA, 25 bp, Saccharomyces pastorianus
ttggatctaccatacacttactcta

SEQ ID NO: 64718 - DNA, 25 bp, Saccharomyces pastorianus
atgccgttcaggtcatgtacgctga

SEQ ID NO: 64719 - DNA, 25 bp, Saccharomyces pastorianus
aagtggctcgtgacgaacgtccagc

SEQ ID NO: 64720 - DNA, 25 bp, Saccharomyces pastorianus
cctgtcgtgtacttttctgcggtag

SEQ ID NO: 64721 - DNA, 25 bp, Saccharomyces pastorianus
cagccaagtggctcgtgacgaacgt

SEQ ID NO: 64722 - DNA, 25 bp, Saccharomyces pastorianus
tgagcgccttccctgtcgtgtactt

SEQ ID NO: 64723 - DNA, 25 bp, Saccharomyces pastorianus
gtgacgaacgtccagcctcccattt

SEQ ID NO: 64724 - DNA, 25 bp, Saccharomyces pastorianus
ttttctgcggtagcgtcagccaagt

SEQ ID NO: 64725 - DNA, 25 bp, Saccharomyces pastorianus
tcaggtcatgtacgctgagcgcctt

SEQ ID NO: 64726 - DNA, 25 bp, Saccharomyces pastorianus
tacttttctgcggtagcgtcagcca

SEQ ID NO: 64727 - DNA, 25 bp, Saccharomyces pastorianus
cgtgtacttttctgcggtagcgtca

SEQ ID NO: 64728 - DNA, 25 bp, Saccharomyces pastorianus
tgcggtagcgtcagccaagtggctc

SEQ ID NO: 64729 - DNA, 25 bp, Saccharomyces pastorianus
caggcgaggatattgtctattaaca

SEQ ID NO: 64730 - DNA, 25 bp, Saccharomyces pastorianus
gaggatattgtctattaacagtgca

SEQ ID NO: 64731 - DNA, 25 bp, Saccharomyces pastorianus
cagtgcagtggccacactcacgttg

SEQ ID NO: 64732 - DNA, 25 bp, Saccharomyces pastorianus
aaggctatttacaggcgaggatatt

SEQ ID NO: 64733 - DNA, 25 bp, Saccharomyces pastorianus
gtctattaacagtgcagtggccaca

SEQ ID NO: 64734 - DNA, 25 bp, Saccharomyces pastorianus
ctatgtgaaggctatttacaggcga

SEQ ID NO: 64735 - DNA, 25 bp, Saccharomyces pastorianus
gtgaaggctatttacaggcgaggat

SEQ ID NO: 64736 - DNA, 25 bp, Saccharomyces pastorianus
attaacagtgcagtggccacactca

SEQ ID NO: 64737 - DNA, 25 bp, Saccharomyces pastorianus
ttgtctattaacagtgcagtggcca

SEQ ID NO: 64738 - DNA, 25 bp, Saccharomyces pastorianus
tttacaggcgaggatattgtctatt

SEQ ID NO: 64739 - DNA, 25 bp, Saccharomyces pastorianus
taacagtgcagtggccacactcacg

SEQ ID NO: 64740 - DNA, 25 bp, Saccharomyces pastorianus
aacatcgcatttcccgaacttgtga

SEQ ID NO: 64741 - DNA, 25 bp, Saccharomyces pastorianus
ggtttatctgaacaatttgcggact

SEQ ID NO: 64742 - DNA, 25 bp, Saccharomyces pastorianus
gtgacaccagtgattatctccttgc

SEQ ID NO: 64743 - DNA, 25 bp, Saccharomyces pastorianus
aatagtggcgtattcattccaatat

SEQ ID NO: 64744 - DNA, 25 bp, Saccharomyces pastorianus
acctggctgcttttgactttgatca

SEQ ID NO: 64745 - DNA, 25 bp, Saccharomyces pastorianus
aagaaaagtgtcaacctggctgctt

SEQ ID NO: 64746 - DNA, 25 bp, Saccharomyces pastorianus
gattcttgaacgatgtagcttggga

SEQ ID NO: 64747 - DNA, 25 bp, Saccharomyces pastorianus
gtagcttgggagaaaacgcctttag

SEQ ID NO: 64748 - DNA, 25 bp, Saccharomyces pastorianus
ttatctccttgcgtcgttatatcaa

SEQ ID NO: 64749 - DNA, 25 bp, Saccharomyces pastorianus
cgcctttaggttcatacgttattgt

SEQ ID NO: 64750 - DNA, 25 bp, Saccharomyces pastorianus
ccaatataccctcttctttctgaaa

SEQ ID NO: 64751 - DNA, 25 bp, Saccharomyces pastorianus
tggttccctagaatacggtacttgt

SEQ ID NO: 64752 - DNA, 25 bp, Saccharomyces pastorianus
gcttacggtgcctctcaattattat

SEQ ID NO: 64753 - DNA, 25 bp, Saccharomyces pastorianus
ttcccatcgcgtatgactgtgggca

SEQ ID NO: 64754 - DNA, 25 bp, Saccharomyces pastorianus
ggtcgatcaaggttttagttattca

SEQ ID NO: 64755 - DNA, 25 bp, Saccharomyces pastorianus
gcatatatcttttttgggccaattt

SEQ ID NO: 64756 - DNA, 25 bp, Saccharomyces pastorianus
tgacgcgtcaacctaccgaaggtag

SEQ ID NO: 64757 - DNA, 25 bp, Saccharomyces pastorianus
aaaatgcacgcaagagcccgtggtc

SEQ ID NO: 64758 - DNA, 25 bp, Saccharomyces pastorianus
gatatgttgtactccggtataacgg

SEQ ID NO: 64759 - DNA, 25 bp, Saccharomyces pastorianus
gagattgtgtcatcgcttacggtgc

SEQ ID NO: 64760 - DNA, 25 bp, Saccharomyces pastorianus
tggtcctagggctgtcctgacgcgt

SEQ ID NO: 64761 - DNA, 25 bp, Saccharomyces pastorianus
agcaggtgttctgaatggttcccta

SEQ ID NO: 64762 - DNA, 25 bp, Saccharomyces pastorianus
agaacattgttcaggcttccgtcac

SEQ ID NO: 64763 - DNA, 25 bp, Saccharomyces pastorianus
aagtgtattctattcgacgccgacg

SEQ ID NO: 64764 - DNA, 25 bp, Saccharomyces pastorianus
gcgaccacagtcattgctcatttga

SEQ ID NO: 64765 - DNA, 25 bp, Saccharomyces pastorianus
aagacctttttgctgtcaatctgga

SEQ ID NO: 64766 - DNA, 25 bp, Saccharomyces pastorianus
gtatagaagccattgcgaccacagt

SEQ ID NO: 64767 - DNA, 25 bp, Saccharomyces pastorianus
gatccaggtggttatttcatcgtta

SEQ ID NO: 64768 - DNA, 25 bp, Saccharomyces pastorianus
cgttgttctcaaagcttgcggtatt

SEQ ID NO: 64769 - DNA, 25 bp, Saccharomyces pastorianus
gaacgaatgcccattggatccaggt

SEQ ID NO: 64770 - DNA, 25 bp, Saccharomyces pastorianus
ggatgcccatcatgctaaggtctaa

SEQ ID NO: 64771 - DNA, 25 bp, Saccharomyces pastorianus
tcatttgaccgtagaggcccttgac

SEQ ID NO: 64772 - DNA, 25 bp, Saccharomyces pastorianus
agaagaaattcctatcgccgttgtt

SEQ ID NO: 64773 - DNA, 25 bp, Saccharomyces pastorianus
gaactcgcaaaaggagacgctcggt

SEQ ID NO: 64774 - DNA, 25 bp, Saccharomyces pastorianus
aattaacaaacgtcatgggctattt

SEQ ID NO: 64775 - DNA, 25 bp, Saccharomyces pastorianus
ggaccgttgtccagaagtgtttcta

SEQ ID NO: 64776 - DNA, 25 bp, Saccharomyces pastorianus
gacgctcggtatgtctaaattacta

SEQ ID NO: 64777 - DNA, 25 bp, Saccharomyces pastorianus
gtgtaaggtgctatcgttcagacta

SEQ ID NO: 64778 - DNA, 25 bp, Saccharomyces pastorianus
aagtgtttctatccgcagttagtga

SEQ ID NO: 64779 - DNA, 25 bp, Saccharomyces pastorianus
gcggttctattcctcaatgttgaat

SEQ ID NO: 64780 - DNA, 25 bp, Saccharomyces pastorianus
aatcgattctattttggtcttcaag

SEQ ID NO: 64781 - DNA, 25 bp, Saccharomyces pastorianus
aagttgacttctacagcggttctat

SEQ ID NO: 64782 - DNA, 25 bp, Saccharomyces pastorianus
acgtcaatgtaattccaggtatcag

SEQ ID NO: 64783 - DNA, 25 bp, Saccharomyces pastorianus
gaggttctgaggctatttttctaga

SEQ ID NO: 64784 - DNA, 25 bp, Saccharomyces pastorianus
gaagcaaatagtctctcaccaattt

SEQ ID NO: 64785 - DNA, 25 bp, Saccharomyces pastorianus
aaggaccttcttcatcattgggcga

SEQ ID NO: 64786 - DNA, 25 bp, Saccharomyces pastorianus
tagtggaccccgaaaaagccaggag

SEQ ID NO: 64787 - DNA, 25 bp, Saccharomyces pastorianus
agctctgccttgaaggcttccaaag

SEQ ID NO: 64788 - DNA, 25 bp, Saccharomyces pastorianus
ggcttccaaagttgcagaccctaag

SEQ ID NO: 64789 - DNA, 25 bp, Saccharomyces pastorianus
ttttgccaattgtcaagtttccaca

SEQ ID NO: 64790 - DNA, 25 bp, Saccharomyces pastorianus
aaacacctgggtcttttcagcgaag

SEQ ID NO: 64791 - DNA, 25 bp, Saccharomyces pastorianus
gtcgaatgcattagagcccacatcc

SEQ ID NO: 64792 - DNA, 25 bp, Saccharomyces pastorianus
gggcgatttattctccaaaagacag

SEQ ID NO: 64793 - DNA, 25 bp, Saccharomyces pastorianus
aagacagcacaatcaggacacaggt

SEQ ID NO: 64794 - DNA, 25 bp, Saccharomyces pastorianus
gcatgggctacgttggtgtgattac

SEQ ID NO: 64795 - DNA, 25 bp, Saccharomyces pastorianus
attttcgctagttgtggctcagacg

SEQ ID NO: 64796 - DNA, 25 bp, Saccharomyces pastorianus
ttggcattagccgttcccgaagagc

SEQ ID NO: 64797 - DNA, 25 bp, Saccharomyces pastorianus
aatagcactcaatcaccacaaactg

SEQ ID NO: 64798 - DNA, 25 bp, Saccharomyces pastorianus
atgatagatccccatctgcggtaca

SEQ ID NO: 64799 - DNA, 25 bp, Saccharomyces pastorianus
ggtgtacgctccagtccagatggac

SEQ ID NO: 64800 - DNA, 25 bp, Saccharomyces pastorianus
atagctagtttctctctctttcgaa

SEQ ID NO: 64801 - DNA, 25 bp, Saccharomyces pastorianus
agaggtctcctccaatattttcgct

SEQ ID NO: 64802 - DNA, 25 bp, Saccharomyces pastorianus
aagatcaacaacttcgggcttcctg

SEQ ID NO: 64803 - DNA, 25 bp, Saccharomyces pastorianus
tctgcggtacaaagcttctacgtta

SEQ ID NO: 64804 - DNA, 25 bp, Saccharomyces pastorianus
aggtcagactgctccatagctagtt

SEQ ID NO: 64805 - DNA, 25 bp, Saccharomyces pastorianus
ggagcatactcctacttatatggca

SEQ ID NO: 64806 - DNA, 25 bp, Saccharomyces pastorianus
gtgccatctcaccatcaagtaattt

SEQ ID NO: 64807 - DNA, 25 bp, Saccharomyces pastorianus
aatggattcaacagcgtatgccaat

SEQ ID NO: 64808 - DNA, 25 bp, Saccharomyces pastorianus
ggtttgaagcagaacgctatcccgt

SEQ ID NO: 64809 - DNA, 25 bp, Saccharomyces pastorianus
aatggccaataaactggcgccgcta

SEQ ID NO: 64810 - DNA, 25 bp, Saccharomyces pastorianus
acgctatcccgttagattcacaatg

SEQ ID NO: 64811 - DNA, 25 bp, Saccharomyces pastorianus
gacgcaaacctattccaaatggcca

SEQ ID NO: 64812 - DNA, 25 bp, Saccharomyces pastorianus
gtcactcagcaatatactcagccgc

SEQ ID NO: 64813 - DNA, 25 bp, Saccharomyces pastorianus
gtggcgagtgcaggtctgaacaata

SEQ ID NO: 64814 - DNA, 25 bp, Saccharomyces pastorianus
caatgggttctttcttgtgccatct

SEQ ID NO: 64815 - DNA, 25 bp, Saccharomyces pastorianus
gtaagcagcttcatgcgcaaataag

SEQ ID NO: 64816 - DNA, 25 bp, Saccharomyces pastorianus
agcgtatgccaatagtgtcactcag

SEQ ID NO: 64817 - DNA, 25 bp, Saccharomyces pastorianus
cagacactaaataccttttcgcctc

SEQ ID NO: 64818 - DNA, 25 bp, Saccharomyces pastorianus
aaatggtgcaggtggttccgcgtca

SEQ ID NO: 64819 - DNA, 25 bp, Saccharomyces pastorianus
caagctttctaggtcatcttcatca

SEQ ID NO: 64820 - DNA, 25 bp, Saccharomyces pastorianus
acttctggcactagcaacactacat

SEQ ID NO: 64821 - DNA, 25 bp, Saccharomyces pastorianus
gggtcaccatagtaagcctctttta

SEQ ID NO: 64822 - DNA, 25 bp, Saccharomyces pastorianus
aagcaagggaggctcttcgttgtcc

SEQ ID NO: 64823 - DNA, 25 bp, Saccharomyces pastorianus
ggattgaccattgacacttctggca

SEQ ID NO: 64824 - DNA, 25 bp, Saccharomyces pastorianus
agttatcaagaaccgctgcccaagc

SEQ ID NO: 64825 - DNA, 25 bp, Saccharomyces pastorianus
agaatcgcccacttttctaaggctt

SEQ ID NO: 64826 - DNA, 25 bp, Saccharomyces pastorianus
gggtagatacctcatcgctaagcaa

SEQ ID NO: 64827 - DNA, 25 bp, Saccharomyces pastorianus
atctttgccttcacaactcgagaat

SEQ ID NO: 64828 - DNA, 25 bp, Saccharomyces pastorianus
atattgatcactgacattcccagag

SEQ ID NO: 64829 - DNA, 25 bp, Saccharomyces pastorianus
cattcccagagagaaattcgacagt

SEQ ID NO: 64830 - DNA, 25 bp, Saccharomyces pastorianus
aattcgacagtaaatggcccaccca

SEQ ID NO: 64831 - DNA, 25 bp, Saccharomyces pastorianus
gatcactgacattcccagagagaaa

SEQ ID NO: 64832 - DNA, 25 bp, Saccharomyces pastorianus
ggagcagtttcctaaattacagagt

SEQ ID NO: 64833 - DNA, 25 bp, Saccharomyces pastorianus
gcaatactacacaccattaccgttt

SEQ ID NO: 64834 - DNA, 25 bp, Saccharomyces pastorianus
tactacacaccattaccgtttttga

SEQ ID NO: 64835 - DNA, 25 bp, Saccharomyces pastorianus
cagtaaatggcccacccagttggaa

SEQ ID NO: 64836 - DNA, 25 bp, Saccharomyces pastorianus
gagaacacaaatattgatcactgac

SEQ ID NO: 64837 - DNA, 25 bp, Saccharomyces pastorianus
gtaatctgcaatactacacaccatt

SEQ ID NO: 64838 - DNA, 25 bp, Saccharomyces pastorianus
ttatttacggagcagtttcctaaat

SEQ ID NO: 64839 - DNA, 25 bp, Saccharomyces pastorianus
tttactaccgtcttcacaaaacact

SEQ ID NO: 64840 - DNA, 25 bp, Saccharomyces pastorianus
acggatttgccacaccaagtacaga

SEQ ID NO: 64841 - DNA, 25 bp, Saccharomyces pastorianus
tagcaccgtattgaggcccgttcaa

SEQ ID NO: 64842 - DNA, 25 bp, Saccharomyces pastorianus
ggtgcagttcaccatgtgttacgac

SEQ ID NO: 64843 - DNA, 25 bp, Saccharomyces pastorianus
gaaactgccctcaggtggaaaccat

SEQ ID NO: 64844 - DNA, 25 bp, Saccharomyces pastorianus
tgaagcagtgtgtggttaccggcct

SEQ ID NO: 64845 - DNA, 25 bp, Saccharomyces pastorianus
ttaccggcctggtggatgacctaga

SEQ ID NO: 64846 - DNA, 25 bp, Saccharomyces pastorianus
tgttacgacaccatcaactctgcaa

SEQ ID NO: 64847 - DNA, 25 bp, Saccharomyces pastorianus
attacatccaccacgcgttagatag

SEQ ID NO: 64848 - DNA, 25 bp, Saccharomyces pastorianus
atataacattcccttccacaatagc

SEQ ID NO: 64849 - DNA, 25 bp, Saccharomyces pastorianus
gaatctaaggtttcctcgcttaaga

SEQ ID NO: 64850 - DNA, 25 bp, Saccharomyces pastorianus
taggaacgatcttatcgccggtgcc

SEQ ID NO: 64851 - DNA, 25 bp, Saccharomyces pastorianus
aatccaaagtgtgggcgcagttgac

SEQ ID NO: 64852 - DNA, 25 bp, Saccharomyces pastorianus
gattagctccaggtggttcgttaat

SEQ ID NO: 64853 - DNA, 25 bp, Saccharomyces pastorianus
ggtccctgccttcgctattgatcat

SEQ ID NO: 64854 - DNA, 25 bp, Saccharomyces pastorianus
atcgccggtgccatcggtggtactg

SEQ ID NO: 64855 - DNA, 25 bp, Saccharomyces pastorianus
ggttactttggtgttatcttccagg

SEQ ID NO: 64856 - DNA, 25 bp, Saccharomyces pastorianus
actccatttgacgtggtgaagtcca

SEQ ID NO: 64857 - DNA, 25 bp, Saccharomyces pastorianus
gtccccaaagtgtgtagattagctc

SEQ ID NO: 64858 - DNA, 25 bp, Saccharomyces pastorianus
gaaacgctctctggaacggtggtta

SEQ ID NO: 64859 - DNA, 25 bp, Saccharomyces pastorianus
ggtacgatgctgaacactccatttg

SEQ ID NO: 64860 - DNA, 25 bp, Saccharomyces pastorianus
gtgagaaactccatgcctgaggcaa

SEQ ID NO: 64861 - DNA, 25 bp, Saccharomyces pastorianus
aaggagggcttcagtagactctaca

SEQ ID NO: 64862 - DNA, 25 bp, Saccharomyces pastorianus
atgtcatcagatccaaacgcgaagc

SEQ ID NO: 64863 - DNA, 25 bp, Saccharomyces pastorianus
gaagccattgcccttcatatatcag

SEQ ID NO: 64864 - DNA, 25 bp, Saccharomyces pastorianus
aaaaatgttccagtcgctattccac

SEQ ID NO: 64865 - DNA, 25 bp, Saccharomyces pastorianus
gcgcctaagagagccaccaagtttg

SEQ ID NO: 64866 - DNA, 25 bp, Saccharomyces pastorianus
agacatcaggtccagctaccttgga

SEQ ID NO: 64867 - DNA, 25 bp, Saccharomyces pastorianus
aaggttccagctggaggtgaccaca

SEQ ID NO: 64868 - DNA, 25 bp, Saccharomyces pastorianus
ggctgttatgtatccacttgacgtg

SEQ ID NO: 64869 - DNA, 25 bp, Saccharomyces pastorianus
gtaattgtgccctttgagttgatca

SEQ ID NO: 64870 - DNA, 25 bp, Saccharomyces pastorianus
gcagctggtgcctcagcaggtatga

SEQ ID NO: 64871 - DNA, 25 bp, Saccharomyces pastorianus
agaaaatctccatcgcagctggtgc

SEQ ID NO: 64872 - DNA, 25 bp, Saccharomyces pastorianus
gtgttcttgatcttgacggcctcgt

SEQ ID NO: 64873 - DNA, 25 bp, Saccharomyces pastorianus
ttgtccatggatccgacgtttcttg

SEQ ID NO: 64874 - DNA, 25 bp, Saccharomyces pastorianus
cgacttgtcgttcacttggatctga

SEQ ID NO: 64875 - DNA, 25 bp, Saccharomyces pastorianus
tccttggcgatctctgtgttcttga

SEQ ID NO: 64876 - DNA, 25 bp, Saccharomyces pastorianus
gtccagcgacataccacgtatcagt

SEQ ID NO: 64877 - DNA, 25 bp, Saccharomyces pastorianus
ggatctgaagctttatcacgtcccc

SEQ ID NO: 64878 - DNA, 25 bp, Saccharomyces pastorianus
cgacgttggcctgggacttgtccat

SEQ ID NO: 64879 - DNA, 25 bp, Saccharomyces pastorianus
ccacgtatcagttcggtcatgtagg

SEQ ID NO: 64880 - DNA, 25 bp, Saccharomyces pastorianus
gaagaggacgcgatggccgacccac

SEQ ID NO: 64881 - DNA, 25 bp, Saccharomyces pastorianus
ttgacgttctcaatgatgcccgact

SEQ ID NO: 64882 - DNA, 25 bp, Saccharomyces pastorianus
gggcaggctcaattccttggcgatc

SEQ ID NO: 64883 - DNA, 25 bp, Saccharomyces pastorianus
caacgtcttgagattctgggacact

SEQ ID NO: 64884 - DNA, 25 bp, Saccharomyces pastorianus
ttggcatccggttatcgaagacctg

SEQ ID NO: 64885 - DNA, 25 bp, Saccharomyces pastorianus
tgaacccaaggtcagcaacacagct

SEQ ID NO: 64886 - DNA, 25 bp, Saccharomyces pastorianus
gttgtcgatgtccaattctccacga

SEQ ID NO: 64887 - DNA, 25 bp, Saccharomyces pastorianus
tgccaccaccgatttgacttacagg

SEQ ID NO: 64888 - DNA, 25 bp, Saccharomyces pastorianus
aattcttgactgttggcggtaccgg

SEQ ID NO: 64889 - DNA, 25 bp, Saccharomyces pastorianus
gatgctcgtgtagcggaagctgcca

SEQ ID NO: 64890 - DNA, 25 bp, Saccharomyces pastorianus
gaacctcggacaagcctctatggat

SEQ ID NO: 64891 - DNA, 25 bp, Saccharomyces pastorianus
tggaacaccgactacactctgtcaa

SEQ ID NO: 64892 - DNA, 25 bp, Saccharomyces pastorianus
gaagaaacgctactgcttggcatcc

SEQ ID NO: 64893 - DNA, 25 bp, Saccharomyces pastorianus
gattgacatcgtttgactgttctca

SEQ ID NO: 64894 - DNA, 25 bp, Saccharomyces pastorianus
gttcttcaccagaaaaaggccttga

SEQ ID NO: 64895 - DNA, 25 bp, Saccharomyces pastorianus
gaacatatctctagtttgagaccta

SEQ ID NO: 64896 - DNA, 25 bp, Saccharomyces pastorianus
taagaagacgaacactctatcctcg

SEQ ID NO: 64897 - DNA, 25 bp, Saccharomyces pastorianus
gtctcgtgtagataacgttcttcac

SEQ ID NO: 64898 - DNA, 25 bp, Saccharomyces pastorianus
ccgctccttccacatatgaacatat

SEQ ID NO: 64899 - DNA, 25 bp, Saccharomyces pastorianus
accttcagcaatgttgttgtcccag

SEQ ID NO: 64900 - DNA, 25 bp, Saccharomyces pastorianus
gaaaaaggccttgaccttcagcaat

SEQ ID NO: 64901 - DNA, 25 bp, Saccharomyces pastorianus
aggccttgaccttcagcaatgttgt

SEQ ID NO: 64902 - DNA, 25 bp, Saccharomyces pastorianus
gagacctaaattcacgtctcgtgta

SEQ ID NO: 64903 - DNA, 25 bp, Saccharomyces pastorianus
gcaatgttgttgtcccagataagaa

SEQ ID NO: 64904 - DNA, 25 bp, Saccharomyces pastorianus
gaaagtctggaaatcgtccgctcct

SEQ ID NO: 64905 - DNA, 25 bp, Saccharomyces pastorianus
gataccttggaaccggtgaaggact

SEQ ID NO: 64906 - DNA, 25 bp, Saccharomyces pastorianus
acggtgacgcttttgaaagtgccga

SEQ ID NO: 64907 - DNA, 25 bp, Saccharomyces pastorianus
ttgcaggataccttggaaccggtga

SEQ ID NO: 64908 - DNA, 25 bp, Saccharomyces pastorianus
gcaggataccttggaaccggtgaag

SEQ ID NO: 64909 - DNA, 25 bp, Saccharomyces pastorianus
aggactacggtgacgcttttgaaag

SEQ ID NO: 64910 - DNA, 25 bp, Saccharomyces pastorianus
ggtgacgcttttgaaagtgccgaga

SEQ ID NO: 64911 - DNA, 25 bp, Saccharomyces pastorianus
tgacgcttttgaaagtgccgagaag

SEQ ID NO: 64912 - DNA, 25 bp, Saccharomyces pastorianus
gccattgcaggataccttggaaccg

SEQ ID NO: 64913 - DNA, 25 bp, Saccharomyces pastorianus
gtgccattgcaggataccttggaac

SEQ ID NO: 64914 - DNA, 25 bp, Saccharomyces pastorianus
cattgcaggataccttggaaccggt

SEQ ID NO: 64915 - DNA, 25 bp, Saccharomyces pastorianus
actacggtgacgcttttgaaagtgc

SEQ ID NO: 64916 - DNA, 25 bp, Saccharomyces pastorianus
gagctactttcagaaacaacttgcc

SEQ ID NO: 64917 - DNA, 25 bp, Saccharomyces pastorianus
tactttcagaaacaacttgccagcc

SEQ ID NO: 64918 - DNA, 25 bp, Saccharomyces pastorianus
cggtaactctggtgttgtcagagct

SEQ ID NO: 64919 - DNA, 25 bp, Saccharomyces pastorianus
cagagctactttcagaaacaacttg

SEQ ID NO: 64920 - DNA, 25 bp, Saccharomyces pastorianus
tcagagctactttcagaaacaactt

SEQ ID NO: 64921 - DNA, 25 bp, Saccharomyces pastorianus
cttgccagccaagactttcggtgct

SEQ ID NO: 64922 - DNA, 25 bp, Saccharomyces pastorianus
tgtcagagctactttcagaaacaac

SEQ ID NO: 64923 - DNA, 25 bp, Saccharomyces pastorianus
gctactttcagaaacaacttgccag

SEQ ID NO: 64924 - DNA, 25 bp, Saccharomyces pastorianus
agccaagactttcggtgcttctgtc

SEQ ID NO: 64925 - DNA, 25 bp, Saccharomyces pastorianus
tggggtaaggtcaccagaacccacg

SEQ ID NO: 64926 - DNA, 25 bp, Saccharomyces pastorianus
gtcagagctactttcagaaacaact

SEQ ID NO: 64927 - DNA, 25 bp, Saccharomyces pastorianus
gagcctcattccgttgatattgcag

SEQ ID NO: 64928 - DNA, 25 bp, Saccharomyces pastorianus
aattcaactccaagtacggccatgc

SEQ ID NO: 64929 - DNA, 25 bp, Saccharomyces pastorianus
ttgtctttagtgctttggctccaaa

SEQ ID NO: 64930 - DNA, 25 bp, Saccharomyces pastorianus
gaattcccgattttatatgcatcta

SEQ ID NO: 64931 - DNA, 25 bp, Saccharomyces pastorianus
ggatttggccaaccctgatggtaac

SEQ ID NO: 64932 - DNA, 25 bp, Saccharomyces pastorianus
gggaccaagctatggacaacctcca

SEQ ID NO: 64933 - DNA, 25 bp, Saccharomyces pastorianus
gaagggtgctgatcctgtcacaatc

SEQ ID NO: 64934 - DNA, 25 bp, Saccharomyces pastorianus
caagagtctactttttctccgaaga

SEQ ID NO: 64935 - DNA, 25 bp, Saccharomyces pastorianus
tttggctccaaaccagtgggaccaa

SEQ ID NO: 64936 - DNA, 25 bp, Saccharomyces pastorianus
tggtaacttacctgacggcgtcgag

SEQ ID NO: 64937 - DNA, 25 bp, Saccharomyces pastorianus
tcatagctgctgattttgctccaag

SEQ ID NO: 64938 - DNA, 25 bp, Saccharomyces pastorianus
aatgcacccagagataacgccgaca

SEQ ID NO: 64939 - DNA, 25 bp, Saccharomyces pastorianus
gaggctcccaaaggccaaggtgtta

SEQ ID NO: 64940 - DNA, 25 bp, Saccharomyces pastorianus
gtgagcagcacgaagatgtaccaat

SEQ ID NO: 64941 - DNA, 25 bp, Saccharomyces pastorianus
atccgtatccgcaccagttaagaag

SEQ ID NO: 64942 - DNA, 25 bp, Saccharomyces pastorianus
tctgatgccaatgctagcgccaatg

SEQ ID NO: 64943 - DNA, 25 bp, Saccharomyces pastorianus
aacgccggtgaaggaactgatgctc

SEQ ID NO: 64944 - DNA, 25 bp, Saccharomyces pastorianus
agaagaatgacaccacctctgatgc

SEQ ID NO: 64945 - DNA, 25 bp, Saccharomyces pastorianus
gaaggagctgccaacgaatccgtat

SEQ ID NO: 64946 - DNA, 25 bp, Saccharomyces pastorianus
gatgccgatatcgaccaagttgata

SEQ ID NO: 64947 - DNA, 25 bp, Saccharomyces pastorianus
gaagaacctgaaactatccacgaaa

SEQ ID NO: 64948 - DNA, 25 bp, Saccharomyces pastorianus
ctgactccgcagttcaagaagtgaa

SEQ ID NO: 64949 - DNA, 25 bp, Saccharomyces pastorianus
tcaggttcatacagtgccgatcttg

SEQ ID NO: 64950 - DNA, 25 bp, Saccharomyces pastorianus
ggtggcagcttctacatggttcaga

SEQ ID NO: 64951 - DNA, 25 bp, Saccharomyces pastorianus
gtttctccggatgtcaattttgatg

SEQ ID NO: 64952 - DNA, 25 bp, Saccharomyces pastorianus
tttgttgtaacccagatgcaccact

SEQ ID NO: 64953 - DNA, 25 bp, Saccharomyces pastorianus
gtgccgatcttgtttccatgaacac

SEQ ID NO: 64954 - DNA, 25 bp, Saccharomyces pastorianus
ttggcttccgaagtcttaagtgcat

SEQ ID NO: 64955 - DNA, 25 bp, Saccharomyces pastorianus
aaatcatacgattgccctgttgaga

SEQ ID NO: 64956 - DNA, 25 bp, Saccharomyces pastorianus
tgatattcaccacaaacgtcacctg

SEQ ID NO: 64957 - DNA, 25 bp, Saccharomyces pastorianus
atttgtaaccggttcgttgcatctc

SEQ ID NO: 64958 - DNA, 25 bp, Saccharomyces pastorianus
aatttacacgcatctgtttctccgg

SEQ ID NO: 64959 - DNA, 25 bp, Saccharomyces pastorianus
atgctcgtgtacatgtgactccgaa

SEQ ID NO: 64960 - DNA, 25 bp, Saccharomyces pastorianus
gggcgccaacatcagatcattggac

SEQ ID NO: 64961 - DNA, 25 bp, Saccharomyces pastorianus
atcattggaccaaacctcgacttct

SEQ ID NO: 64962 - DNA, 25 bp, Saccharomyces pastorianus
gtcttggctccatcgtcatctgcag

SEQ ID NO: 64963 - DNA, 25 bp, Saccharomyces pastorianus
atctgcagcagccagtatcggcgac

SEQ ID NO: 64964 - DNA, 25 bp, Saccharomyces pastorianus
acaagggcgccaacatcagatcatt

SEQ ID NO: 64965 - DNA, 25 bp, Saccharomyces pastorianus
cagtatcggcgacgacggctcgaac

SEQ ID NO: 64966 - DNA, 25 bp, Saccharomyces pastorianus
acctcgacttcttccaatggttgcg

SEQ ID NO: 64967 - DNA, 25 bp, Saccharomyces pastorianus
aaacctcgacttcttccaatggttg

SEQ ID NO: 64968 - DNA, 25 bp, Saccharomyces pastorianus
aagttcgtcaccgtcaccaaggagc

SEQ ID NO: 64969 - DNA, 25 bp, Saccharomyces pastorianus
atcgtcatctgcagcagccagtatc

SEQ ID NO: 64970 - DNA, 25 bp, Saccharomyces pastorianus
gacggctcgaacaacaagggcgcca

SEQ ID NO: 64971 - DNA, 25 bp, Saccharomyces pastorianus
aaggaccagccaatattcgaccacg

SEQ ID NO: 64972 - DNA, 25 bp, Saccharomyces pastorianus
gatcaaacagaccaccaagcaccag

SEQ ID NO: 64973 - DNA, 25 bp, Saccharomyces pastorianus
gaattccgtggagggtttctctgtc

SEQ ID NO: 64974 - DNA, 25 bp, Saccharomyces pastorianus
accagacaggtgcagctacaacaga

SEQ ID NO: 64975 - DNA, 25 bp, Saccharomyces pastorianus
ggtacattcggtctcttaaatactt

SEQ ID NO: 64976 - DNA, 25 bp, Saccharomyces pastorianus
cgcccacaccagagaattcattcaa

SEQ ID NO: 64977 - DNA, 25 bp, Saccharomyces pastorianus
ctgactcgggtcaagttcatccaag

SEQ ID NO: 64978 - DNA, 25 bp, Saccharomyces pastorianus
gaaaatccacgaactgactcgggtc

SEQ ID NO: 64979 - DNA, 25 bp, Saccharomyces pastorianus
gatcgccattaagaagaagctgcac

SEQ ID NO: 64980 - DNA, 25 bp, Saccharomyces pastorianus
gacgtggtaaactccaatacattca

SEQ ID NO: 64981 - DNA, 25 bp, Saccharomyces pastorianus
ctgtcccgatttgagtgatgcgaaa

SEQ ID NO: 64982 - DNA, 25 bp, Saccharomyces pastorianus
cttcggaagatacctttgagcactt

SEQ ID NO: 64983 - DNA, 25 bp, Saccharomyces pastorianus
aacgtgctacatcagtcagctgcat

SEQ ID NO: 64984 - DNA, 25 bp, Saccharomyces pastorianus
ggttgacgacccattattacacttt

SEQ ID NO: 64985 - DNA, 25 bp, Saccharomyces pastorianus
aaacatagtctggtcacacggtgat

SEQ ID NO: 64986 - DNA, 25 bp, Saccharomyces pastorianus
agagccttctttactttcaattcac

SEQ ID NO: 64987 - DNA, 25 bp, Saccharomyces pastorianus
tagaaggacgtgctctcctgcaggt

SEQ ID NO: 64988 - DNA, 25 bp, Saccharomyces pastorianus
tatcccgggaaactagactacaact

SEQ ID NO: 64989 - DNA, 25 bp, Saccharomyces pastorianus
ggttgacctcatcggtaacgtgcta

SEQ ID NO: 64990 - DNA, 25 bp, Saccharomyces pastorianus
aagctggagcaagcatatcccggga

SEQ ID NO: 64991 - DNA, 25 bp, Saccharomyces pastorianus
aagccagctctggtagcaacgaggg

SEQ ID NO: 64992 - DNA, 25 bp, Saccharomyces pastorianus
tatttgggccaacactaatgcagga

SEQ ID NO: 64993 - DNA, 25 bp, Saccharomyces pastorianus
cggacgctgatcacgaaaacactat

SEQ ID NO: 64994 - DNA, 25 bp, Saccharomyces pastorianus
acagcatcttcttcgcatactttgt

SEQ ID NO: 64995 - DNA, 25 bp, Saccharomyces pastorianus
ggaaaccccttcatacttcgaagat

SEQ ID NO: 64996 - DNA, 25 bp, Saccharomyces pastorianus
gaaaacactatacccacagcatctt

SEQ ID NO: 64997 - DNA, 25 bp, Saccharomyces pastorianus
gatcgcacttgcaaagagtttccat

SEQ ID NO: 64998 - DNA, 25 bp, Saccharomyces pastorianus
aaccggtggcgaatacggacgctga

SEQ ID NO: 64999 - DNA, 25 bp, Saccharomyces pastorianus
gagcgaatcctggaacccttagtag

SEQ ID NO: 65000 - DNA, 25 bp, Saccharomyces pastorianus
agaggatcctcgtaacgaccttcat

SEQ ID NO: 65001 - DNA, 25 bp, Saccharomyces pastorianus
tgatgatttccaggccaactctaat

SEQ ID NO: 65002 - DNA, 25 bp, Saccharomyces pastorianus
ggagcaattatcaaccggtggcgaa

SEQ ID NO: 65003 - DNA, 25 bp, Saccharomyces pastorianus
gagtttccatcggatttcaagagcg

SEQ ID NO: 65004 - DNA, 25 bp, Saccharomyces pastorianus
ggtacccaggctactattggttcca

SEQ ID NO: 65005 - DNA, 25 bp, Saccharomyces pastorianus
aatatacaaatccaatccgcagcca

SEQ ID NO: 65006 - DNA, 25 bp, Saccharomyces pastorianus
gctgatgccatcgtagaccctaaat

SEQ ID NO: 65007 - DNA, 25 bp, Saccharomyces pastorianus
aatccgcagccattggtgctgatgc

SEQ ID NO: 65008 - DNA, 25 bp, Saccharomyces pastorianus
tattggttccagatgccgtattgct

SEQ ID NO: 65009 - DNA, 25 bp, Saccharomyces pastorianus
ttgttcccaggtgtccaattaggtg

SEQ ID NO: 65010 - DNA, 25 bp, Saccharomyces pastorianus
ggccaagatcggctctaagtgtaaa

SEQ ID NO: 65011 - DNA, 25 bp, Saccharomyces pastorianus
gggtatcttcattttaccagacgaa

SEQ ID NO: 65012 - DNA, 25 bp, Saccharomyces pastorianus
aactgtattgttggacccatggcca

SEQ ID NO: 65013 - DNA, 25 bp, Saccharomyces pastorianus
caaaatgtcggttgtcggtacccag

SEQ ID NO: 65014 - DNA, 25 bp, Saccharomyces pastorianus
aaatgtcagatttcggcccacagta

SEQ ID NO: 65015 - DNA, 25 bp, Saccharomyces pastorianus
gttactacctagaatccacggcgac

SEQ ID NO: 65016 - DNA, 25 bp, Saccharomyces pastorianus
aaggcattgtcgagttccaaccaca

SEQ ID NO: 65017 - DNA, 25 bp, Saccharomyces pastorianus
gacttcgtactcttgccttgtgatt

SEQ ID NO: 65018 - DNA, 25 bp, Saccharomyces pastorianus
gaactccttggatagtaacatcgat

SEQ ID NO: 65019 - DNA, 25 bp, Saccharomyces pastorianus
ctcagagggacgttaccaagactaa

SEQ ID NO: 65020 - DNA, 25 bp, Saccharomyces pastorianus
tattagacatctactctcagaggga

SEQ ID NO: 65021 - DNA, 25 bp, Saccharomyces pastorianus
attggcaacagacctatgatcgaat

SEQ ID NO: 65022 - DNA, 25 bp, Saccharomyces pastorianus
gatcaatttcattccttccaagacc

SEQ ID NO: 65023 - DNA, 25 bp, Saccharomyces pastorianus
gatctcatttactgtggaactaccc

SEQ ID NO: 65024 - DNA, 25 bp, Saccharomyces pastorianus
ttccaagaccaattccacaggcgag

SEQ ID NO: 65025 - DNA, 25 bp, Saccharomyces pastorianus
gaaagtgggctagccgcgtttttgt

SEQ ID NO: 65026 - DNA, 25 bp, Saccharomyces pastorianus
atttaccctgtaccattgaagctga

SEQ ID NO: 65027 - DNA, 25 bp, Saccharomyces pastorianus
ttggaacacccgatgaagacgaaat

SEQ ID NO: 65028 - DNA, 25 bp, Saccharomyces pastorianus
taccaaaccttggaacacccgatga

SEQ ID NO: 65029 - DNA, 25 bp, Saccharomyces pastorianus
ggttgactaaccagctaaaatcctt

SEQ ID NO: 65030 - DNA, 25 bp, Saccharomyces pastorianus
gatgcatacgttgccattgaacaag

SEQ ID NO: 65031 - DNA, 25 bp, Saccharomyces pastorianus
aaagatgatggtacttccacagaaa

SEQ ID NO: 65032 - DNA, 25 bp, Saccharomyces pastorianus
ttggccttccaacagatgcatacgt

SEQ ID NO: 65033 - DNA, 25 bp, Saccharomyces pastorianus
caattatcgcatttgatgatctaat

SEQ ID NO: 65034 - DNA, 25 bp, Saccharomyces pastorianus
atcaagcagcgggtggattgtccat

SEQ ID NO: 65035 - DNA, 25 bp, Saccharomyces pastorianus
acaacaaggtgttggccttccaaca

SEQ ID NO: 65036 - DNA, 25 bp, Saccharomyces pastorianus
gtggattgtccatcaggttgactaa

SEQ ID NO: 65037 - DNA, 25 bp, Saccharomyces pastorianus
gggagtcgataatatttcactcttg

SEQ ID NO: 65038 - DNA, 25 bp, Saccharomyces pastorianus
aatggttaatgatacttcagggcaa

SEQ ID NO: 65039 - DNA, 25 bp, Saccharomyces pastorianus
atatttcttgattgatgactggtta

SEQ ID NO: 65040 - DNA, 25 bp, Saccharomyces pastorianus
gtactcgaaaggaagctttatcgta

SEQ ID NO: 65041 - DNA, 25 bp, Saccharomyces pastorianus
gaggtacgatgacactatttcattt

SEQ ID NO: 65042 - DNA, 25 bp, Saccharomyces pastorianus
tctttattggtcattgaggtacgat

SEQ ID NO: 65043 - DNA, 25 bp, Saccharomyces pastorianus
gactggttattgttgcaaggtatac

SEQ ID NO: 65044 - DNA, 25 bp, Saccharomyces pastorianus
gaaggtggaacagccaaagttgttt

SEQ ID NO: 65045 - DNA, 25 bp, Saccharomyces pastorianus
aacggagaacatacattcagcgaaa

SEQ ID NO: 65046 - DNA, 25 bp, Saccharomyces pastorianus
gaattggtcaattgtgtactcgaaa

SEQ ID NO: 65047 - DNA, 25 bp, Saccharomyces pastorianus
gacactatttcatttaacggagaac

SEQ ID NO: 65048 - DNA, 25 bp, Saccharomyces pastorianus
actcccggtgggtacaagaagctct

SEQ ID NO: 65049 - DNA, 25 bp, Saccharomyces pastorianus
gaaccaccgtatgctattccaattg

SEQ ID NO: 65050 - DNA, 25 bp, Saccharomyces pastorianus
taatgacaaccgtggtctgggtcct

SEQ ID NO: 65051 - DNA, 25 bp, Saccharomyces pastorianus
tctttggccaaactggtccgtgaaa

SEQ ID NO: 65052 - DNA, 25 bp, Saccharomyces pastorianus
aggttgcttcaataccgttttcaat

SEQ ID NO: 65053 - DNA, 25 bp, Saccharomyces pastorianus
cggtctttttcagtttggtattcat

SEQ ID NO: 65054 - DNA, 25 bp, Saccharomyces pastorianus
cagtttcctaaaatgctttccgcag

SEQ ID NO: 65055 - DNA, 25 bp, Saccharomyces pastorianus
atcagggattcaggacacttttaaa

SEQ ID NO: 65056 - DNA, 25 bp, Saccharomyces pastorianus
tctttccacgtgtttgcccatataa

SEQ ID NO: 65057 - DNA, 25 bp, Saccharomyces pastorianus
catataactgtttaactcccggtgg

SEQ ID NO: 65058 - DNA, 25 bp, Saccharomyces pastorianus
agtgaatatcaagctgtcctcctca

SEQ ID NO: 65059 - DNA, 25 bp, Saccharomyces pastorianus
aaagggccatctttcatgggttaga

SEQ ID NO: 65060 - DNA, 25 bp, Saccharomyces pastorianus
acactgggcaatgtttacatacttg

SEQ ID NO: 65061 - DNA, 25 bp, Saccharomyces pastorianus
tttcatccgtggtcagtatctgttt

SEQ ID NO: 65062 - DNA, 25 bp, Saccharomyces pastorianus
ggtcagtatctgttttcttgtggtg

SEQ ID NO: 65063 - DNA, 25 bp, Saccharomyces pastorianus
ggaacgatttgcattcagggtttat

SEQ ID NO: 65064 - DNA, 25 bp, Saccharomyces pastorianus
ttacatacttggaacgatttgcatt

SEQ ID NO: 65065 - DNA, 25 bp, Saccharomyces pastorianus
ggttagagacattttcatccgtggt

SEQ ID NO: 65066 - DNA, 25 bp, Saccharomyces pastorianus
gccttttaacgctaaagggccatct

SEQ ID NO: 65067 - DNA, 25 bp, Saccharomyces pastorianus
cagggtttattaattgtctggatat

SEQ ID NO: 65068 - DNA, 25 bp, Saccharomyces pastorianus
aatcccacagattcgaattttaaat

SEQ ID NO: 65069 - DNA, 25 bp, Saccharomyces pastorianus
gttgggatttaaacactgggcaatg

SEQ ID NO: 65070 - DNA, 25 bp, Saccharomyces pastorianus
gaagccgaaggtgacgttgatgact

SEQ ID NO: 65071 - DNA, 25 bp, Saccharomyces pastorianus
tcattcaaacacgagggcacacaac

SEQ ID NO: 65072 - DNA, 25 bp, Saccharomyces pastorianus
tattctcagctgttaaggataccga

SEQ ID NO: 65073 - DNA, 25 bp, Saccharomyces pastorianus
gaacttgacaagaatggcaacttta

SEQ ID NO: 65074 - DNA, 25 bp, Saccharomyces pastorianus
aaacgagcccatctccaatagtcta

SEQ ID NO: 65075 - DNA, 25 bp, Saccharomyces pastorianus
gactttgatactgccaatggtgaaa

SEQ ID NO: 65076 - DNA, 25 bp, Saccharomyces pastorianus
gcattacacagaactcatacacaga

SEQ ID NO: 65077 - DNA, 25 bp, Saccharomyces pastorianus
ccaatagtctattctcagctgttaa

SEQ ID NO: 65078 - DNA, 25 bp, Saccharomyces pastorianus
ggataccgaagatggctattcatat

SEQ ID NO: 65079 - DNA, 25 bp, Saccharomyces pastorianus
acagacaaaccaatcctcattcaaa

SEQ ID NO: 65080 - DNA, 25 bp, Saccharomyces pastorianus
acgagggcacacaacgccaacaaaa

SEQ ID NO: 65081 - DNA, 25 bp, Saccharomyces pastorianus
ggtaccatgttagccagaccttggc

SEQ ID NO: 65082 - DNA, 25 bp, Saccharomyces pastorianus
taagatttctatccggtgtctttgc

SEQ ID NO: 65083 - DNA, 25 bp, Saccharomyces pastorianus
cggttattggcgctccattgagtga

SEQ ID NO: 65084 - DNA, 25 bp, Saccharomyces pastorianus
tttctaccttttgggtctagcgacg

SEQ ID NO: 65085 - DNA, 25 bp, Saccharomyces pastorianus
taaacccgtctatttgttctccttg

SEQ ID NO: 65086 - DNA, 25 bp, Saccharomyces pastorianus
gcatcgatgctcttcactatgggtg

SEQ ID NO: 65087 - DNA, 25 bp, Saccharomyces pastorianus
aatggtatgctacgatgtcttccgc

SEQ ID NO: 65088 - DNA, 25 bp, Saccharomyces pastorianus
tgatgatccggataacccacacaac

SEQ ID NO: 65089 - DNA, 25 bp, Saccharomyces pastorianus
atgtcgatcaggtctctgtagccat

SEQ ID NO: 65090 - DNA, 25 bp, Saccharomyces pastorianus
acacaactggccctcttggaagaaa

SEQ ID NO: 65091 - DNA, 25 bp, Saccharomyces pastorianus
gatgggtagttctctttacgtctcc

SEQ ID NO: 65092 - DNA, 25 bp, Saccharomyces pastorianus
aataagcccattcaagttccctctt

SEQ ID NO: 65093 - DNA, 25 bp, Saccharomyces pastorianus
gtgcccatttcattccaaactcaaa

SEQ ID NO: 65094 - DNA, 25 bp, Saccharomyces pastorianus
ttgggtttagtcaaggtgccggcct

SEQ ID NO: 65095 - DNA, 25 bp, Saccharomyces pastorianus
gaacagcaacctgccttgaaatttt

SEQ ID NO: 65096 - DNA, 25 bp, Saccharomyces pastorianus
ggccaaggagttcagcacgtcagca

SEQ ID NO: 65097 - DNA, 25 bp, Saccharomyces pastorianus
tattaattcatcctggtgcccattt

SEQ ID NO: 65098 - DNA, 25 bp, Saccharomyces pastorianus
caaaaccttttgtgtcccaagtctg

SEQ ID NO: 65099 - DNA, 25 bp, Saccharomyces pastorianus
ggtacttagctacttgcatgactac

SEQ ID NO: 65100 - DNA, 25 bp, Saccharomyces pastorianus
gaacatggtccattcgacggtataa

SEQ ID NO: 65101 - DNA, 25 bp, Saccharomyces pastorianus
agagtctagagtgctggcgctatac

SEQ ID NO: 65102 - DNA, 25 bp, Saccharomyces pastorianus
gcgctatacgatgcatggcccaaaa

SEQ ID NO: 65103 - DNA, 25 bp, Saccharomyces pastorianus
cgagcgtaacattcttaaggactat

SEQ ID NO: 65104 - DNA, 25 bp, Saccharomyces pastorianus
agacctcgagcgtaacattcttaag

SEQ ID NO: 65105 - DNA, 25 bp, Saccharomyces pastorianus
tgatcacatgaagactaaacaacgt

SEQ ID NO: 65106 - DNA, 25 bp, Saccharomyces pastorianus
gtatcatttgaaggagtccgagaaa

SEQ ID NO: 65107 - DNA, 25 bp, Saccharomyces pastorianus
gacattaggtttgaccggtccacag

SEQ ID NO: 65108 - DNA, 25 bp, Saccharomyces pastorianus
gtaaagccactgatacctctgttat

SEQ ID NO: 65109 - DNA, 25 bp, Saccharomyces pastorianus
gcgttaccaatttttagacgaatat

SEQ ID NO: 65110 - DNA, 25 bp, Saccharomyces pastorianus
gaaatctagactacaatcgatgaaa

SEQ ID NO: 65111 - DNA, 25 bp, Saccharomyces pastorianus
agccactgatacctctgttataaga

SEQ ID NO: 65112 - DNA, 25 bp, Saccharomyces pastorianus
gatcaaatctttaccaggacattag

SEQ ID NO: 65113 - DNA, 25 bp, Saccharomyces pastorianus
tgaccggtccacaggtaaagccact

SEQ ID NO: 65114 - DNA, 25 bp, Saccharomyces pastorianus
atcaagcgacgatgagttaaaaacg

SEQ ID NO: 65115 - DNA, 25 bp, Saccharomyces pastorianus
aaaagctgagacgttgatggacgaa

SEQ ID NO: 65116 - DNA, 25 bp, Saccharomyces pastorianus
ggccgaggaacaagaatcaagcgac

SEQ ID NO: 65117 - DNA, 25 bp, Saccharomyces pastorianus
gaaataaccaagtggccgaggaaca

SEQ ID NO: 65118 - DNA, 25 bp, Saccharomyces pastorianus
aggattcgaaggataaaaagccaat

SEQ ID NO: 65119 - DNA, 25 bp, Saccharomyces pastorianus
agccggatttgaattctgatggaga

SEQ ID NO: 65120 - DNA, 25 bp, Saccharomyces pastorianus
gagtcattggaggaaatactggcca

SEQ ID NO: 65121 - DNA, 25 bp, Saccharomyces pastorianus
ggaggaaatactggccaaaagaaat

SEQ ID NO: 65122 - DNA, 25 bp, Saccharomyces pastorianus
aagccaatccacagaaaacggactg

SEQ ID NO: 65123 - DNA, 25 bp, Saccharomyces pastorianus
taaaaacgttgtctttcagctcttt

SEQ ID NO: 65124 - DNA, 25 bp, Saccharomyces pastorianus
atttgaagccggatttgaattctga

SEQ ID NO: 65125 - DNA, 25 bp, Saccharomyces pastorianus
gggagctcaacccaagagaactata

SEQ ID NO: 65126 - DNA, 25 bp, Saccharomyces pastorianus
ctcagaggttgcattggtacatttg

SEQ ID NO: 65127 - DNA, 25 bp, Saccharomyces pastorianus
aagaggacacgtttgttaacttgat

SEQ ID NO: 65128 - DNA, 25 bp, Saccharomyces pastorianus
tgaactgtatttcaagcacccgaaa

SEQ ID NO: 65129 - DNA, 25 bp, Saccharomyces pastorianus
tgggccatttcaaaaccattttcca

SEQ ID NO: 65130 - DNA, 25 bp, Saccharomyces pastorianus
gatattctttaattgctgctctaga

SEQ ID NO: 65131 - DNA, 25 bp, Saccharomyces pastorianus
aacatgcagtgcgacttttctacct

SEQ ID NO: 65132 - DNA, 25 bp, Saccharomyces pastorianus
gtagttgcaatattctgggccattt

SEQ ID NO: 65133 - DNA, 25 bp, Saccharomyces pastorianus
ttttctacctgacgtcatgcctgaa

SEQ ID NO: 65134 - DNA, 25 bp, Saccharomyces pastorianus
gtcatgcctgaacagcactggagta

SEQ ID NO: 65135 - DNA, 25 bp, Saccharomyces pastorianus
cgaaaatgccaatagcgtccggtat

SEQ ID NO: 65136 - DNA, 25 bp, Saccharomyces pastorianus
tagagccattccaaaccaacaggtt

SEQ ID NO: 65137 - DNA, 25 bp, Saccharomyces pastorianus
cttggccaccaagatcaacgaaaag

SEQ ID NO: 65138 - DNA, 25 bp, Saccharomyces pastorianus
tatcaagttgagaggtaacgacatt

SEQ ID NO: 65139 - DNA, 25 bp, Saccharomyces pastorianus
gtccaagctggaaagagccctgggt

SEQ ID NO: 65140 - DNA, 25 bp, Saccharomyces pastorianus
aagagccctgggtatcaagttgaga

SEQ ID NO: 65141 - DNA, 25 bp, Saccharomyces pastorianus
aaaccaacaggttttgtccaagctg

SEQ ID NO: 65142 - DNA, 25 bp, Saccharomyces pastorianus
gtggttaatgattacgaagccgcta

SEQ ID NO: 65143 - DNA, 25 bp, Saccharomyces pastorianus
gatcaacgaaaagccaaccgtggtt

SEQ ID NO: 65144 - DNA, 25 bp, Saccharomyces pastorianus
gccaaccgtggttaatgattacgaa

SEQ ID NO: 65145 - DNA, 25 bp, Saccharomyces pastorianus
atgtctcagaaggacttggccacca

SEQ ID NO: 65146 - DNA, 25 bp, Saccharomyces pastorianus
ttacgaagccgctagagccattcca

SEQ ID NO: 65147 - DNA, 25 bp, Saccharomyces pastorianus
gcattgggttctggatcggatacgt

SEQ ID NO: 65148 - DNA, 25 bp, Saccharomyces pastorianus
gatacgtgctgatcttcctggcata

SEQ ID NO: 65149 - DNA, 25 bp, Saccharomyces pastorianus
acgagatttccgactggcggttcca

SEQ ID NO: 65150 - DNA, 25 bp, Saccharomyces pastorianus
atccgcgtggtcactgtggtgccat

SEQ ID NO: 65151 - DNA, 25 bp, Saccharomyces pastorianus
aagcgcggattgtggtgtctgctac

SEQ ID NO: 65152 - DNA, 25 bp, Saccharomyces pastorianus
actgcatcgtgtgcggcatgtacca

SEQ ID NO: 65153 - DNA, 25 bp, Saccharomyces pastorianus
ctagagatggactgcttcccgaaat

SEQ ID NO: 65154 - DNA, 25 bp, Saccharomyces pastorianus
tgccatttgcgctgggatgctactg

SEQ ID NO: 65155 - DNA, 25 bp, Saccharomyces pastorianus
atatcgtgtactcctggtttggcgt

SEQ ID NO: 65156 - DNA, 25 bp, Saccharomyces pastorianus
attggcctcggcttactatggttgg

SEQ ID NO: 65157 - DNA, 25 bp, Saccharomyces pastorianus
ctgcacaacatccacgacgagattt

SEQ ID NO: 65158 - DNA, 25 bp, Saccharomyces pastorianus
caagccaccattgcgaacgtcaaag

SEQ ID NO: 65159 - DNA, 25 bp, Saccharomyces pastorianus
gacaccgccattttgttcgacaagt

SEQ ID NO: 65160 - DNA, 25 bp, Saccharomyces pastorianus
catcacttcgcaaaaccacggttat

SEQ ID NO: 65161 - DNA, 25 bp, Saccharomyces pastorianus
agtggatcctgagactctacccaag

SEQ ID NO: 65162 - DNA, 25 bp, Saccharomyces pastorianus
tacccagtttcacccggaagcaaag

SEQ ID NO: 65163 - DNA, 25 bp, Saccharomyces pastorianus
gaagcttatcagtccgattctcaaa

SEQ ID NO: 65164 - DNA, 25 bp, Saccharomyces pastorianus
tttcttgtccaatggcccaggcaat

SEQ ID NO: 65165 - DNA, 25 bp, Saccharomyces pastorianus
aatccaggatgttgcgtccgagttc

SEQ ID NO: 65166 - DNA, 25 bp, Saccharomyces pastorianus
gtatccccatctttggtatttgcct

SEQ ID NO: 65167 - DNA, 25 bp, Saccharomyces pastorianus
tagagctcataatatccctgccatg

SEQ ID NO: 65168 - DNA, 25 bp, Saccharomyces pastorianus
tttgcaaaggcctattttctctacc

SEQ ID NO: 65169 - DNA, 25 bp, Saccharomyces pastorianus
ctggtcggttatccggagtccatga

SEQ ID NO: 65170 - DNA, 25 bp, Saccharomyces pastorianus
actcagcccttaattggcactacgg

SEQ ID NO: 65171 - DNA, 25 bp, Saccharomyces pastorianus
tatccggagtccatgacggatcctt

SEQ ID NO: 65172 - DNA, 25 bp, Saccharomyces pastorianus
ttcgaagccatctccttcggcgcaa

SEQ ID NO: 65173 - DNA, 25 bp, Saccharomyces pastorianus
ggtcagatactagtcttcactcagc

SEQ ID NO: 65174 - DNA, 25 bp, Saccharomyces pastorianus
gaagccgttttcaccacttccctgg

SEQ ID NO: 65175 - DNA, 25 bp, Saccharomyces pastorianus
tagtcttcactcagcccttaattgg

SEQ ID NO: 65176 - DNA, 25 bp, Saccharomyces pastorianus
cttaattggcactacggtgtcccat

SEQ ID NO: 65177 - DNA, 25 bp, Saccharomyces pastorianus
tctccttcggcgcaaacaagtctgt

SEQ ID NO: 65178 - DNA, 25 bp, Saccharomyces pastorianus
cacttccctggtcggttatccggag

SEQ ID NO: 65179 - DNA, 25 bp, Saccharomyces pastorianus
ctgtcgctggtgaagccgttttcac

SEQ ID NO: 65180 - DNA, 25 bp, Saccharomyces pastorianus
aattcaggaagattggtcaactact

SEQ ID NO: 65181 - DNA, 25 bp, Saccharomyces pastorianus
ggaagattggtcaactactatgaaa

SEQ ID NO: 65182 - DNA, 25 bp, Saccharomyces pastorianus
gaagggaagttgacttgatcaattc

SEQ ID NO: 65183 - DNA, 25 bp, Saccharomyces pastorianus
tcaggaagattggtcaactactatg

SEQ ID NO: 65184 - DNA, 25 bp, Saccharomyces pastorianus
gattggtcaactactatgaaaactc

SEQ ID NO: 65185 - DNA, 25 bp, Saccharomyces pastorianus
ttgacttgatcaattcaggaagatt

SEQ ID NO: 65186 - DNA, 25 bp, Saccharomyces pastorianus
cgtcgatcgaaatgtgaaagagagc

SEQ ID NO: 65187 - DNA, 25 bp, Saccharomyces pastorianus
gaagttgacttgatcaattcaggaa

SEQ ID NO: 65188 - DNA, 25 bp, Saccharomyces pastorianus
tcggcgtcgatcgaaatgtgaaaga

SEQ ID NO: 65189 - DNA, 25 bp, Saccharomyces pastorianus
attggtcaactactatgaaaactca

SEQ ID NO: 65190 - DNA, 25 bp, Saccharomyces pastorianus
cggcgaagggaagttgacttgatca

SEQ ID NO: 65191 - DNA, 25 bp, Saccharomyces pastorianus
actggtccaatgtaaagccttcact

SEQ ID NO: 65192 - DNA, 25 bp, Saccharomyces pastorianus
gaacgcactcccaaaatggtttcgt

SEQ ID NO: 65193 - DNA, 25 bp, Saccharomyces pastorianus
gaacattcatctcactggtatccaa

SEQ ID NO: 65194 - DNA, 25 bp, Saccharomyces pastorianus
ttcactaaatcaaagctggccccga

SEQ ID NO: 65195 - DNA, 25 bp, Saccharomyces pastorianus
gctcattcgacggttttccaaggaa

SEQ ID NO: 65196 - DNA, 25 bp, Saccharomyces pastorianus
gaacaaaattctgctgtcgctcatt

SEQ ID NO: 65197 - DNA, 25 bp, Saccharomyces pastorianus
ggagctggccagtagattacattta

SEQ ID NO: 65198 - DNA, 25 bp, Saccharomyces pastorianus
aactgtctgtattatgtgctctcct

SEQ ID NO: 65199 - DNA, 25 bp, Saccharomyces pastorianus
gtgctctcctcatttgcttacaaaa

SEQ ID NO: 65200 - DNA, 25 bp, Saccharomyces pastorianus
tggtatccaatagccagcgcaataa

SEQ ID NO: 65201 - DNA, 25 bp, Saccharomyces pastorianus
gctggccccgaaagaattccgtgaa

SEQ ID NO: 65202 - DNA, 25 bp, Saccharomyces pastorianus
gctgatgctgacacagctaccactg

SEQ ID NO: 65203 - DNA, 25 bp, Saccharomyces pastorianus
ctagtcggtcaagccactggtaaga

SEQ ID NO: 65204 - DNA, 25 bp, Saccharomyces pastorianus
ggtttgctataccatgcttctctag

SEQ ID NO: 65205 - DNA, 25 bp, Saccharomyces pastorianus
gctagagcttacaacgctgatgctg

SEQ ID NO: 65206 - DNA, 25 bp, Saccharomyces pastorianus
ggtagaaaacagactatcccaatta

SEQ ID NO: 65207 - DNA, 25 bp, Saccharomyces pastorianus
ataccatgcttctctagtcggtcaa

SEQ ID NO: 65208 - DNA, 25 bp, Saccharomyces pastorianus
gagaaccactccaaagattgtccgt

SEQ ID NO: 65209 - DNA, 25 bp, Saccharomyces pastorianus
taaatctccagcttctaccattcaa

SEQ ID NO: 65210 - DNA, 25 bp, Saccharomyces pastorianus
tccgactctgactctgatgacgaag

SEQ ID NO: 65211 - DNA, 25 bp, Saccharomyces pastorianus
gattgtccgtgaagccaagaaggta

SEQ ID NO: 65212 - DNA, 25 bp, Saccharomyces pastorianus
tgccaaggctgattccgattccgac

SEQ ID NO: 65213 - DNA, 25 bp, Saccharomyces pastorianus
catcggtcgtcacaagttgaagttt

SEQ ID NO: 65214 - DNA, 25 bp, Saccharomyces pastorianus
atgccgttactttagacatctacag

SEQ ID NO: 65215 - DNA, 25 bp, Saccharomyces pastorianus
gatggtaaagtatcctcccaattag

SEQ ID NO: 65216 - DNA, 25 bp, Saccharomyces pastorianus
tgttttaactgaaacctctgctggt

SEQ ID NO: 65217 - DNA, 25 bp, Saccharomyces pastorianus
ggagttcaagattgctgctttttct

SEQ ID NO: 65218 - DNA, 25 bp, Saccharomyces pastorianus
ggttatgctcttttgaaagcctctg

SEQ ID NO: 65219 - DNA, 25 bp, Saccharomyces pastorianus
gaagaagctaactccattattgatg

SEQ ID NO: 65220 - DNA, 25 bp, Saccharomyces pastorianus
atacttgccagagttattgccaggt

SEQ ID NO: 65221 - DNA, 25 bp, Saccharomyces pastorianus
gctttttctaaattcaactctgcag

SEQ ID NO: 65222 - DNA, 25 bp, Saccharomyces pastorianus
ttcaacgttgtttccgatgccgtta

SEQ ID NO: 65223 - DNA, 25 bp, Saccharomyces pastorianus
gtcaaccttgattgtcagtgaaacc

SEQ ID NO: 65224 - DNA, 25 bp, Saccharomyces pastorianus
gagaatttttgcctcaaacgaagtt

SEQ ID NO: 65225 - DNA, 25 bp, Saccharomyces pastorianus
gtcattggtcgtcgtttaccaactg

SEQ ID NO: 65226 - DNA, 25 bp, Saccharomyces pastorianus
tctattttcccctttaaatcagtgg

SEQ ID NO: 65227 - DNA, 25 bp, Saccharomyces pastorianus
tcgtcgtttaccaactgaatccgtt

SEQ ID NO: 65228 - DNA, 25 bp, Saccharomyces pastorianus
gaatgagaatttttgcctcaaacga

SEQ ID NO: 65229 - DNA, 25 bp, Saccharomyces pastorianus
ggctcatttcaaagaataccaagtc

SEQ ID NO: 65230 - DNA, 25 bp, Saccharomyces pastorianus
aaatcagtggctcatttcaaagaat

SEQ ID NO: 65231 - DNA, 25 bp, Saccharomyces pastorianus
ggtcgtcgtttaccaactgaatccg

SEQ ID NO: 65232 - DNA, 25 bp, Saccharomyces pastorianus
ttcccctttaaatcagtggctcatt

SEQ ID NO: 65233 - DNA, 25 bp, Saccharomyces pastorianus
ataccaagtcattggtcgtcgttta

SEQ ID NO: 65234 - DNA, 25 bp, Saccharomyces pastorianus
ccaagtcattggtcgtcgtttacca

SEQ ID NO: 65235 - DNA, 25 bp, Saccharomyces pastorianus
gatgccatgccaactctgtttataa

SEQ ID NO: 65236 - DNA, 25 bp, Saccharomyces pastorianus
ccaagtgatactttttgctgcgagt

SEQ ID NO: 65237 - DNA, 25 bp, Saccharomyces pastorianus
ggtcaccaggttgttgatgttgcaa

SEQ ID NO: 65238 - DNA, 25 bp, Saccharomyces pastorianus
aagagcaatctctgctgtcggtcac

SEQ ID NO: 65239 - DNA, 25 bp, Saccharomyces pastorianus
cggtgagatatctacccaaaggtca

SEQ ID NO: 65240 - DNA, 25 bp, Saccharomyces pastorianus
gggtttctgttaccgataagagctt

SEQ ID NO: 65241 - DNA, 25 bp, Saccharomyces pastorianus
gagggctagccttggattacaattt

SEQ ID NO: 65242 - DNA, 25 bp, Saccharomyces pastorianus
gtagaacgcgttgttccatctttaa

SEQ ID NO: 65243 - DNA, 25 bp, Saccharomyces pastorianus
taccatttgcttacggatgccatgc

SEQ ID NO: 65244 - DNA, 25 bp, Saccharomyces pastorianus
cggagacaactacgtttaccagcct

SEQ ID NO: 65245 - DNA, 25 bp, Saccharomyces pastorianus
agaggacaccttgatcctgttttac

SEQ ID NO: 65246 - DNA, 25 bp, Saccharomyces pastorianus
gtctggaattgcaaacctcttgtca

SEQ ID NO: 65247 - DNA, 25 bp, Saccharomyces pastorianus
accaaatctctcaacctcatagtga

SEQ ID NO: 65248 - DNA, 25 bp, Saccharomyces pastorianus
aagggcttcctgatgcggcggtaat

SEQ ID NO: 65249 - DNA, 25 bp, Saccharomyces pastorianus
gatgattcattcttcatttcctatg

SEQ ID NO: 65250 - DNA, 25 bp, Saccharomyces pastorianus
ctcaccggttgctgaagcccaaaaa

SEQ ID NO: 65251 - DNA, 25 bp, Saccharomyces pastorianus
gcaaatatgagccttctcaccggtt

SEQ ID NO: 65252 - DNA, 25 bp, Saccharomyces pastorianus
gcgttgacccttttgtctggaattg

SEQ ID NO: 65253 - DNA, 25 bp, Saccharomyces pastorianus
ggcagtcctacttttaaaccaagca

SEQ ID NO: 65254 - DNA, 25 bp, Saccharomyces pastorianus
gtgagttcatcacgaggctcattaa

SEQ ID NO: 65255 - DNA, 25 bp, Saccharomyces pastorianus
agacagtctccaattggcagtccta

SEQ ID NO: 65256 - DNA, 25 bp, Saccharomyces pastorianus
acaccccattactattaccaataca

SEQ ID NO: 65257 - DNA, 25 bp, Saccharomyces pastorianus
gttggttaaagctgcctattccgat

SEQ ID NO: 65258 - DNA, 25 bp, Saccharomyces pastorianus
tatgtcacctctgcccagaaattga

SEQ ID NO: 65259 - DNA, 25 bp, Saccharomyces pastorianus
aggagacttctcaagctctaacttc

SEQ ID NO: 65260 - DNA, 25 bp, Saccharomyces pastorianus
agatccaacgagtacgtcgccaaca

SEQ ID NO: 65261 - DNA, 25 bp, Saccharomyces pastorianus
gtcgccaacatttgtgtttacgccg

SEQ ID NO: 65262 - DNA, 25 bp, Saccharomyces pastorianus
ctctaacttccgatggttggttcaa

SEQ ID NO: 65263 - DNA, 25 bp, Saccharomyces pastorianus
tgtcacgcccgaatactataaaaac

SEQ ID NO: 65264 - DNA, 25 bp, Saccharomyces pastorianus
attattgtcccaaacaatgctccgc

SEQ ID NO: 65265 - DNA, 25 bp, Saccharomyces pastorianus
aatgctccgctgacaaaattggcca

SEQ ID NO: 65266 - DNA, 25 bp, Saccharomyces pastorianus
gtcggtattgaattgctagcgggta

SEQ ID NO: 65267 - DNA, 25 bp, Saccharomyces pastorianus
tattccgatcttttgaagaccggca

SEQ ID NO: 65268 - DNA, 25 bp, Saccharomyces pastorianus
gaaatcgacattcatccacctagtg

SEQ ID NO: 65269 - DNA, 25 bp, Saccharomyces pastorianus
taccaaggaccgtgttatttgcttt

SEQ ID NO: 65270 - DNA, 25 bp, Saccharomyces pastorianus
gtgcaagtttgaacgtcaccggctt

SEQ ID NO: 65271 - DNA, 25 bp, Saccharomyces pastorianus
agtgcggatgacctttcttgtatca

SEQ ID NO: 65272 - DNA, 25 bp, Saccharomyces pastorianus
aaagcattcgaacgtcgttgcaggt

SEQ ID NO: 65273 - DNA, 25 bp, Saccharomyces pastorianus
gtcaccggcttcatagataccaagg

SEQ ID NO: 65274 - DNA, 25 bp, Saccharomyces pastorianus
ggtgtttgagctattatccttttat

SEQ ID NO: 65275 - DNA, 25 bp, Saccharomyces pastorianus
gtacacctcaggttctacgggtgaa

SEQ ID NO: 65276 - DNA, 25 bp, Saccharomyces pastorianus
aaacccactatcatggtcggtgtcg

SEQ ID NO: 65277 - DNA, 25 bp, Saccharomyces pastorianus
aagaactctgtgaagcattgccaag

SEQ ID NO: 65278 - DNA, 25 bp, Saccharomyces pastorianus
ggactacctataatgccaagctaaa

SEQ ID NO: 65279 - DNA, 25 bp, Saccharomyces pastorianus
gattacgcttacttggcatggctac

SEQ ID NO: 65280 - DNA, 25 bp, Saccharomyces pastorianus
atgtcaagagtcgtttacgcccacc

SEQ ID NO: 65281 - DNA, 25 bp, Saccharomyces pastorianus
tttgcgctaatgatcctaacgtact

SEQ ID NO: 65282 - DNA, 25 bp, Saccharomyces pastorianus
gctatgacttcatctgcttggcaat

SEQ ID NO: 65283 - DNA, 25 bp, Saccharomyces pastorianus
tgtttggccctcaagcattgcagtc

SEQ ID NO: 65284 - DNA, 25 bp, Saccharomyces pastorianus
tgcagtctgcgctctaataatacat

SEQ ID NO: 65285 - DNA, 25 bp, Saccharomyces pastorianus
acggatcattggttatcgctgggtt

SEQ ID NO: 65286 - DNA, 25 bp, Saccharomyces pastorianus
taggatctccaggttctgtttggcc

SEQ ID NO: 65287 - DNA, 25 bp, Saccharomyces pastorianus
gtgacaagttctttatggccgcttt

SEQ ID NO: 65288 - DNA, 25 bp, Saccharomyces pastorianus
gtgttgtcctacctgatccaattaa

SEQ ID NO: 65289 - DNA, 25 bp, Saccharomyces pastorianus
attatttgcccactctttactttgc

SEQ ID NO: 65290 - DNA, 25 bp, Saccharomyces pastorianus
ggcaagtttgggtcctactatctga

SEQ ID NO: 65291 - DNA, 25 bp, Saccharomyces pastorianus
tccgcccttagggaagatgctagtt

SEQ ID NO: 65292 - DNA, 25 bp, Saccharomyces pastorianus
tagttgggctctctggttatttggc

SEQ ID NO: 65293 - DNA, 25 bp, Saccharomyces pastorianus
gagtattaccacgatgttcatccgc

SEQ ID NO: 65294 - DNA, 25 bp, Saccharomyces pastorianus
aggactgtcggattttccaggctga

SEQ ID NO: 65295 - DNA, 25 bp, Saccharomyces pastorianus
catgcccattgtttttacgctactg

SEQ ID NO: 65296 - DNA, 25 bp, Saccharomyces pastorianus
gtctcttcttatttttgtctagcca

SEQ ID NO: 65297 - DNA, 25 bp, Saccharomyces pastorianus
attagtgtcccgcttggaacctata

SEQ ID NO: 65298 - DNA, 25 bp, Saccharomyces pastorianus
gtctagccaagttccataccatgag

SEQ ID NO: 65299 - DNA, 25 bp, Saccharomyces pastorianus
gcaatgttctcttcactatgcgtac

SEQ ID NO: 65300 - DNA, 25 bp, Saccharomyces pastorianus
ggaacctatagtcatgcccattgtt

SEQ ID NO: 65301 - DNA, 25 bp, Saccharomyces pastorianus
tacctccaagattcacgctcgtggg

SEQ ID NO: 65302 - DNA, 25 bp, Saccharomyces pastorianus
ggccaagttgcaagtgactacctag

SEQ ID NO: 65303 - DNA, 25 bp, Saccharomyces pastorianus
tagctgctaagttcgttggatccac

SEQ ID NO: 65304 - DNA, 25 bp, Saccharomyces pastorianus
cgtccacgctacaaagggcttgaaa

SEQ ID NO: 65305 - DNA, 25 bp, Saccharomyces pastorianus
acataaatacgcattcttcgagaca

SEQ ID NO: 65306 - DNA, 25 bp, Saccharomyces pastorianus
aaggtgttgattcatctggtgtcta

SEQ ID NO: 65307 - DNA, 25 bp, Saccharomyces pastorianus
aggtgggtatctctacctccaagat

SEQ ID NO: 65308 - DNA, 25 bp, Saccharomyces pastorianus
ggtgtctattggaacgcgtcaacta

SEQ ID NO: 65309 - DNA, 25 bp, Saccharomyces pastorianus
gaaaggtgacgttaccgtccacgct

SEQ ID NO: 65310 - DNA, 25 bp, Saccharomyces pastorianus
cgctcgtgggccagtcggtttagaa

SEQ ID NO: 65311 - DNA, 25 bp, Saccharomyces pastorianus
gagacataccgatgccatagtaacg

SEQ ID NO: 65312 - DNA, 25 bp, Saccharomyces pastorianus
ggataccttgttgacgggagctcga

SEQ ID NO: 65313 - DNA, 25 bp, Saccharomyces pastorianus
acaaatgatttcctggccaccgtaa

SEQ ID NO: 65314 - DNA, 25 bp, Saccharomyces pastorianus
gtaagctcctcgtattctcataggt

SEQ ID NO: 65315 - DNA, 25 bp, Saccharomyces pastorianus
accgaatgccatttctgtcgattta

SEQ ID NO: 65316 - DNA, 25 bp, Saccharomyces pastorianus
cattgacgccttgttgtctgttgga

SEQ ID NO: 65317 - DNA, 25 bp, Saccharomyces pastorianus
tatcattctgtggtgtctttgctac

SEQ ID NO: 65318 - DNA, 25 bp, Saccharomyces pastorianus
attgtctttaactattgcgctggaa

SEQ ID NO: 65319 - DNA, 25 bp, Saccharomyces pastorianus
ggattttacgagaacgcctcctatg

SEQ ID NO: 65320 - DNA, 25 bp, Saccharomyces pastorianus
gaactcttgactatgattccaccta

SEQ ID NO: 65321 - DNA, 25 bp, Saccharomyces pastorianus
gctactccaagtgttctaccaagat

SEQ ID NO: 65322 - DNA, 25 bp, Saccharomyces pastorianus
ggaacgttagcttactttgtctact

SEQ ID NO: 65323 - DNA, 25 bp, Saccharomyces pastorianus
aggctaataccagccgacgaaccga

SEQ ID NO: 65324 - DNA, 25 bp, Saccharomyces pastorianus
gctaatgattctataacgccccaag

SEQ ID NO: 65325 - DNA, 25 bp, Saccharomyces pastorianus
gaagcgttttacgattgtgcaaata

SEQ ID NO: 65326 - DNA, 25 bp, Saccharomyces pastorianus
atgcacgattatggttcgcttcata

SEQ ID NO: 65327 - DNA, 25 bp, Saccharomyces pastorianus
gtctttcagactatctacaggatgt

SEQ ID NO: 65328 - DNA, 25 bp, Saccharomyces pastorianus
taacgccccaagagcaacttgtgaa

SEQ ID NO: 65329 - DNA, 25 bp, Saccharomyces pastorianus
ggcaacactgcggaatacagtcttt

SEQ ID NO: 65330 - DNA, 25 bp, Saccharomyces pastorianus
gacccctctgtcaatatgcacgatt

SEQ ID NO: 65331 - DNA, 25 bp, Saccharomyces pastorianus
tcatcaacacgcaagaccgcaaagg

SEQ ID NO: 65332 - DNA, 25 bp, Saccharomyces pastorianus
gccactggactacgctttagagacc

SEQ ID NO: 65333 - DNA, 25 bp, Saccharomyces pastorianus
aaagaagactacatccatggacagg

SEQ ID NO: 65334 - DNA, 25 bp, Saccharomyces pastorianus
aaggaccatttggagaacttctcag

SEQ ID NO: 65335 - DNA, 25 bp, Saccharomyces pastorianus
atcgatggaggagttgtcaattttc

SEQ ID NO: 65336 - DNA, 25 bp, Saccharomyces pastorianus
aagcgagtgctcagttaaaaaggac

SEQ ID NO: 65337 - DNA, 25 bp, Saccharomyces pastorianus
gaacaccgtgcatgaaatgaacagc

SEQ ID NO: 65338 - DNA, 25 bp, Saccharomyces pastorianus
atgcagtccggcttgcacatgatgg

SEQ ID NO: 65339 - DNA, 25 bp, Saccharomyces pastorianus
gacattgagatgatgttcccctcgg

SEQ ID NO: 65340 - DNA, 25 bp, Saccharomyces pastorianus
gagatgggcttcaacgacagcaact

SEQ ID NO: 65341 - DNA, 25 bp, Saccharomyces pastorianus
gttcccctcggaattgaacaccgtg

SEQ ID NO: 65342 - DNA, 25 bp, Saccharomyces pastorianus
tgtcaattttcctcaaatctctggg

SEQ ID NO: 65343 - DNA, 25 bp, Saccharomyces pastorianus
gacagcaactgcttccgcaagatgg

SEQ ID NO: 65344 - DNA, 25 bp, Saccharomyces pastorianus
ggcttgcacatgatggtcgggataa

SEQ ID NO: 65345 - DNA, 25 bp, Saccharomyces pastorianus
gagacttactacacccagtgtgacg

SEQ ID NO: 65346 - DNA, 25 bp, Saccharomyces pastorianus
gggatttaccgtagcatccgtccta

SEQ ID NO: 65347 - DNA, 25 bp, Saccharomyces pastorianus
tttggcaaacatgtacctgaccgta

SEQ ID NO: 65348 - DNA, 25 bp, Saccharomyces pastorianus
agaaattccttgatgctgttagagt

SEQ ID NO: 65349 - DNA, 25 bp, Saccharomyces pastorianus
ttgtggcattctccatcatgtctgc

SEQ ID NO: 65350 - DNA, 25 bp, Saccharomyces pastorianus
atgtctgccctgtacatcaccaaga

SEQ ID NO: 65351 - DNA, 25 bp, Saccharomyces pastorianus
cgtcctacctgcattttacggtatg

SEQ ID NO: 65352 - DNA, 25 bp, Saccharomyces pastorianus
ggctttacatccgttgtggcattct

SEQ ID NO: 65353 - DNA, 25 bp, Saccharomyces pastorianus
tttccccaagacatcaatatccact

SEQ ID NO: 65354 - DNA, 25 bp, Saccharomyces pastorianus
aaacttcaattctctaaggtcagtg

SEQ ID NO: 65355 - DNA, 25 bp, Saccharomyces pastorianus
tgaccatgtacccaaattcaaccac

SEQ ID NO: 65356 - DNA, 25 bp, Saccharomyces pastorianus
gtatgtggtcaaactttgtgactct

SEQ ID NO: 65357 - DNA, 25 bp, Saccharomyces pastorianus
aatagagttcatttggttcttcaat

SEQ ID NO: 65358 - DNA, 25 bp, Saccharomyces pastorianus
aatcctactcagtgttataattcca

SEQ ID NO: 65359 - DNA, 25 bp, Saccharomyces pastorianus
aaaccaggatcgtactggcttccaa

SEQ ID NO: 65360 - DNA, 25 bp, Saccharomyces pastorianus
agaattaaatctccgagcctcttta

SEQ ID NO: 65361 - DNA, 25 bp, Saccharomyces pastorianus
ggtcatgacagcatcttcaaaccaa

SEQ ID NO: 65362 - DNA, 25 bp, Saccharomyces pastorianus
gggaaaaaatcctactcagtgttat

SEQ ID NO: 65363 - DNA, 25 bp, Saccharomyces pastorianus
gtcaattagtaacgcaatgggttgc

SEQ ID NO: 65364 - DNA, 25 bp, Saccharomyces pastorianus
tctccgagcctctttaaaccaggat

SEQ ID NO: 65365 - DNA, 25 bp, Saccharomyces pastorianus
ggttcttcaattatcgaatctaata

SEQ ID NO: 65366 - DNA, 25 bp, Saccharomyces pastorianus
aactttgggcgagggaggaccacat

SEQ ID NO: 65367 - DNA, 25 bp, Saccharomyces pastorianus
aaattggtcgatatggattccggca

SEQ ID NO: 65368 - DNA, 25 bp, Saccharomyces pastorianus
gtgcgattcattcagccgaggcagc

SEQ ID NO: 65369 - DNA, 25 bp, Saccharomyces pastorianus
tgtatcgaagtttagcttgccctcc

SEQ ID NO: 65370 - DNA, 25 bp, Saccharomyces pastorianus
aatgaattaccaacgcaggttcgag

SEQ ID NO: 65371 - DNA, 25 bp, Saccharomyces pastorianus
gtttagcttgccctccaaaggaatt

SEQ ID NO: 65372 - DNA, 25 bp, Saccharomyces pastorianus
tggattccggcaacaaccagccaaa

SEQ ID NO: 65373 - DNA, 25 bp, Saccharomyces pastorianus
gaggcagcaaattaggtattccaac

SEQ ID NO: 65374 - DNA, 25 bp, Saccharomyces pastorianus
aaagatgctcctattgaacctccaa

SEQ ID NO: 65375 - DNA, 25 bp, Saccharomyces pastorianus
aaacgaatctgggttagcttctaat

SEQ ID NO: 65376 - DNA, 25 bp, Saccharomyces pastorianus
gagtttggaattatcgctacggaaa

SEQ ID NO: 65377 - DNA, 25 bp, Saccharomyces pastorianus
aaacgacttgcccagcactgtggaa

SEQ ID NO: 65378 - DNA, 25 bp, Saccharomyces pastorianus
gaccaagttgtcctatcatactagt

SEQ ID NO: 65379 - DNA, 25 bp, Saccharomyces pastorianus
aaaacgcttggacgactgggctgaa

SEQ ID NO: 65380 - DNA, 25 bp, Saccharomyces pastorianus
acagaggtgtttttccatttgtctt

SEQ ID NO: 65381 - DNA, 25 bp, Saccharomyces pastorianus
gcgattacccagtcaatgcggtcaa

SEQ ID NO: 65382 - DNA, 25 bp, Saccharomyces pastorianus
ggctgaagacgtgcacagacgctta

SEQ ID NO: 65383 - DNA, 25 bp, Saccharomyces pastorianus
tgccactgcagcgattttggagcaa

SEQ ID NO: 65384 - DNA, 25 bp, Saccharomyces pastorianus
gcactattgcgcatttggctctata

SEQ ID NO: 65385 - DNA, 25 bp, Saccharomyces pastorianus
actacagaaaccgttgcagccgctg

SEQ ID NO: 65386 - DNA, 25 bp, Saccharomyces pastorianus
ttgcgcgacccaaatgctggagtca

SEQ ID NO: 65387 - DNA, 25 bp, Saccharomyces pastorianus
aatggcggccacagctttaattgca

SEQ ID NO: 65388 - DNA, 25 bp, Saccharomyces pastorianus
agggctgaagtctctgatgtcggaa

SEQ ID NO: 65389 - DNA, 25 bp, Saccharomyces pastorianus
cacccctgagccatgtactagaata

SEQ ID NO: 65390 - DNA, 25 bp, Saccharomyces pastorianus
aaagtcttgagcatatttggatcgc

SEQ ID NO: 65391 - DNA, 25 bp, Saccharomyces pastorianus
gaaagttacccaaaagtgttgtcat

SEQ ID NO: 65392 - DNA, 25 bp, Saccharomyces pastorianus
tagggacaccggaatactgtgctcc

SEQ ID NO: 65393 - DNA, 25 bp, Saccharomyces pastorianus
ggtccctgggtgttattacacacat

SEQ ID NO: 65394 - DNA, 25 bp, Saccharomyces pastorianus
gaatgcataccgtagtagggacacc

SEQ ID NO: 65395 - DNA, 25 bp, Saccharomyces pastorianus
aatattttgttatgcacccctgagc

SEQ ID NO: 65396 - DNA, 25 bp, Saccharomyces pastorianus
aaatgtgacctatggtccctgggtg

SEQ ID NO: 65397 - DNA, 25 bp, Saccharomyces pastorianus
tactgtgctcccgaagtgggattta

SEQ ID NO: 65398 - DNA, 25 bp, Saccharomyces pastorianus
tgtactagaatagtcttggccgatt

SEQ ID NO: 65399 - DNA, 25 bp, Saccharomyces pastorianus
gggtatttctccgttttatggtgat

SEQ ID NO: 65400 - DNA, 25 bp, Saccharomyces pastorianus
cgttgggcatacctaattaccttag

SEQ ID NO: 65401 - DNA, 25 bp, Saccharomyces pastorianus
gaccattgtctatatcagcacgttg

SEQ ID NO: 65402 - DNA, 25 bp, Saccharomyces pastorianus
aatttgatttcatctccgaggccat

SEQ ID NO: 65403 - DNA, 25 bp, Saccharomyces pastorianus
gcaggattgctttggtgattcatat

SEQ ID NO: 65404 - DNA, 25 bp, Saccharomyces pastorianus
ataaagatcatcgtccagagcagga

SEQ ID NO: 65405 - DNA, 25 bp, Saccharomyces pastorianus
ggcctcaactgttagctatttcgaa

SEQ ID NO: 65406 - DNA, 25 bp, Saccharomyces pastorianus
aagaacacccgtatattcccaatgg

SEQ ID NO: 65407 - DNA, 25 bp, Saccharomyces pastorianus
tagaattcggtgactgtgctctttt

SEQ ID NO: 65408 - DNA, 25 bp, Saccharomyces pastorianus
gactgtgctcttttggaatcatttc

SEQ ID NO: 65409 - DNA, 25 bp, Saccharomyces pastorianus
ccgaggccattttagcgactgatat

SEQ ID NO: 65410 - DNA, 25 bp, Saccharomyces pastorianus
tattatcagatcattggcctcaact

SEQ ID NO: 65411 - DNA, 25 bp, Saccharomyces pastorianus
attcgttgtcgttggtgctttggtc

SEQ ID NO: 65412 - DNA, 25 bp, Saccharomyces pastorianus
tgcttctttgaaggacgtcggccac

SEQ ID NO: 65413 - DNA, 25 bp, Saccharomyces pastorianus
atgttaccgcttggtctagttcttt

SEQ ID NO: 65414 - DNA, 25 bp, Saccharomyces pastorianus
taagaacttcgcttggagacccaga

SEQ ID NO: 65415 - DNA, 25 bp, Saccharomyces pastorianus
tcaacgttgctggtaacatggtcaa

SEQ ID NO: 65416 - DNA, 25 bp, Saccharomyces pastorianus
gagatttgatcttgcaccaacgtga

SEQ ID NO: 65417 - DNA, 25 bp, Saccharomyces pastorianus
gaccagtttctatcttgcctaattc

SEQ ID NO: 65418 - DNA, 25 bp, Saccharomyces pastorianus
gacatccaaccagaaaacgccagtg

SEQ ID NO: 65419 - DNA, 25 bp, Saccharomyces pastorianus
gggacccatccggtagatatgttac

SEQ ID NO: 65420 - DNA, 25 bp, Saccharomyces pastorianus
gtccccagctggtagattcgttgtc

SEQ ID NO: 65421 - DNA, 25 bp, Saccharomyces pastorianus
aacgacgatgtttctgcttctttga

SEQ ID NO: 65422 - DNA, 25 bp, Saccharomyces pastorianus
aaagaaagcagcttcaaaatacgat

SEQ ID NO: 65423 - DNA, 25 bp, Saccharomyces pastorianus
ctcattcataattgtttgggcttca

SEQ ID NO: 65424 - DNA, 25 bp, Saccharomyces pastorianus
gggttccgaaaacagttgcgacgca

SEQ ID NO: 65425 - DNA, 25 bp, Saccharomyces pastorianus
gacgtcttcaagtatttagtggata

SEQ ID NO: 65426 - DNA, 25 bp, Saccharomyces pastorianus
tgttctcattcataattgtttgggc

SEQ ID NO: 65427 - DNA, 25 bp, Saccharomyces pastorianus
attgtttgggcttcaatatcaaaga

SEQ ID NO: 65428 - DNA, 25 bp, Saccharomyces pastorianus
aagtcaataaagctgacgtcttcaa

SEQ ID NO: 65429 - DNA, 25 bp, Saccharomyces pastorianus
gtgaatttctcacacaagtcaataa

SEQ ID NO: 65430 - DNA, 25 bp, Saccharomyces pastorianus
agtggatatatcgaagggttccgaa

SEQ ID NO: 65431 - DNA, 25 bp, Saccharomyces pastorianus
ttccgaaaacagttgcgacgcatta

SEQ ID NO: 65432 - DNA, 25 bp, Saccharomyces pastorianus
aaagctgacgtcttcaagtatttag

SEQ ID NO: 65433 - DNA, 25 bp, Saccharomyces pastorianus
taaggacccagccatcgtttatcaa

SEQ ID NO: 65434 - DNA, 25 bp, Saccharomyces pastorianus
aaatctttatctcggtacgctaaca

SEQ ID NO: 65435 - DNA, 25 bp, Saccharomyces pastorianus
ctgagcaattactgcagtgcctgaa

SEQ ID NO: 65436 - DNA, 25 bp, Saccharomyces pastorianus
agaagcatccagacaggtttccagt

SEQ ID NO: 65437 - DNA, 25 bp, Saccharomyces pastorianus
gttcttacctgaagcgatccaacat

SEQ ID NO: 65438 - DNA, 25 bp, Saccharomyces pastorianus
caggtttccagtcttagggccacaa

SEQ ID NO: 65439 - DNA, 25 bp, Saccharomyces pastorianus
aatcagtgctaacagaaaccgcccc

SEQ ID NO: 65440 - DNA, 25 bp, Saccharomyces pastorianus
aagcagacgtcacctctttagatga

SEQ ID NO: 65441 - DNA, 25 bp, Saccharomyces pastorianus
aatttctatcgtttgcaagggcata

SEQ ID NO: 65442 - DNA, 25 bp, Saccharomyces pastorianus
agggccacaactatcgacgaagaag

SEQ ID NO: 65443 - DNA, 25 bp, Saccharomyces pastorianus
agtcaaatctaaaccacaccatcta

SEQ ID NO: 65444 - DNA, 25 bp, Saccharomyces pastorianus
atgccaatccgtaaagttgctcgat

SEQ ID NO: 65445 - DNA, 25 bp, Saccharomyces pastorianus
gagtcattcgcgcaactgagcaaat

SEQ ID NO: 65446 - DNA, 25 bp, Saccharomyces pastorianus
aattgcccgtgaatctgtccaacga

SEQ ID NO: 65447 - DNA, 25 bp, Saccharomyces pastorianus
acgagctgccgtttctgcaagaatt

SEQ ID NO: 65448 - DNA, 25 bp, Saccharomyces pastorianus
tcagagatctcacgcaattgcccgt

SEQ ID NO: 65449 - DNA, 25 bp, Saccharomyces pastorianus
gaggcgcgctgtccaagttacaaaa

SEQ ID NO: 65450 - DNA, 25 bp, Saccharomyces pastorianus
tgtctgccccacttgaagattttaa

SEQ ID NO: 65451 - DNA, 25 bp, Saccharomyces pastorianus
tagcacaaacctgtacgagcttgcc

SEQ ID NO: 65452 - DNA, 25 bp, Saccharomyces pastorianus
tgctggtaaccctctggcttgatga

SEQ ID NO: 65453 - DNA, 25 bp, Saccharomyces pastorianus
tgctcgatctacgaaacaacccgat

SEQ ID NO: 65454 - DNA, 25 bp, Saccharomyces pastorianus
gagctctttccatcaaaaacaccgg

SEQ ID NO: 65455 - DNA, 25 bp, Saccharomyces pastorianus
gggtcatggcatcaagctttttcat

SEQ ID NO: 65456 - DNA, 25 bp, Saccharomyces pastorianus
gaacattttgatttcttcaacgaaa

SEQ ID NO: 65457 - DNA, 25 bp, Saccharomyces pastorianus
ggtcaatttcaagggtcatggcatc

SEQ ID NO: 65458 - DNA, 25 bp, Saccharomyces pastorianus
gaaaaatgtcgtgggtagtcaagaa

SEQ ID NO: 65459 - DNA, 25 bp, Saccharomyces pastorianus
ggagaccgaacacaagtatcgtata

SEQ ID NO: 65460 - DNA, 25 bp, Saccharomyces pastorianus
gcatcaagctttttcattgggtgtt

SEQ ID NO: 65461 - DNA, 25 bp, Saccharomyces pastorianus
tgtttcttcgactaatgtgaaggga

SEQ ID NO: 65462 - DNA, 25 bp, Saccharomyces pastorianus
ttccaccaatcggaggagaccgaac

SEQ ID NO: 65463 - DNA, 25 bp, Saccharomyces pastorianus
agaattgttggaggaactttgtgct

SEQ ID NO: 65464 - DNA, 25 bp, Saccharomyces pastorianus
gagatttggcctttggtcaatttca

SEQ ID NO: 65465 - DNA, 25 bp, Saccharomyces pastorianus
gtatcgtataagagatttggccttt

SEQ ID NO: 65466 - DNA, 25 bp, Saccharomyces pastorianus
accatcactccgttcttagaagttt

SEQ ID NO: 65467 - DNA, 25 bp, Saccharomyces pastorianus
aaatttctggccacttattgcacat

SEQ ID NO: 65468 - DNA, 25 bp, Saccharomyces pastorianus
ttcaggccgccatatttgtttattc

SEQ ID NO: 65469 - DNA, 25 bp, Saccharomyces pastorianus
gtggctcactgatgtttttatacct

SEQ ID NO: 65470 - DNA, 25 bp, Saccharomyces pastorianus
aaacattcccggtaagtgcaccatc

SEQ ID NO: 65471 - DNA, 25 bp, Saccharomyces pastorianus
tgccgctcattgctgcctgaagatg

SEQ ID NO: 65472 - DNA, 25 bp, Saccharomyces pastorianus
gttggtttgttactctccataaatg

SEQ ID NO: 65473 - DNA, 25 bp, Saccharomyces pastorianus
tgagaaagctcccagaacccattga

SEQ ID NO: 65474 - DNA, 25 bp, Saccharomyces pastorianus
gtttgttgacttcactccatggata

SEQ ID NO: 65475 - DNA, 25 bp, Saccharomyces pastorianus
tttatacctgcagattgccgctcat

SEQ ID NO: 65476 - DNA, 25 bp, Saccharomyces pastorianus
tacggcgctaacgttgggtttgttg

SEQ ID NO: 65477 - DNA, 25 bp, Saccharomyces pastorianus
gaaaaacttcagcagcagccggaaa

SEQ ID NO: 65478 - DNA, 25 bp, Saccharomyces pastorianus
tcccattgcccatgcgattaaactt

SEQ ID NO: 65479 - DNA, 25 bp, Saccharomyces pastorianus
gattgtgccgtttttcatcatggaa

SEQ ID NO: 65480 - DNA, 25 bp, Saccharomyces pastorianus
aagcgatagtttaagcacgtctcaa

SEQ ID NO: 65481 - DNA, 25 bp, Saccharomyces pastorianus
gtccctttgagtttgattgtgccgt

SEQ ID NO: 65482 - DNA, 25 bp, Saccharomyces pastorianus
atatcttgctacttaccggagggac

SEQ ID NO: 65483 - DNA, 25 bp, Saccharomyces pastorianus
ctcttcgtcaccagttcataactat

SEQ ID NO: 65484 - DNA, 25 bp, Saccharomyces pastorianus
agacaaatcatccagtccctttgag

SEQ ID NO: 65485 - DNA, 25 bp, Saccharomyces pastorianus
gagggtttgacgtacttgaagctta

SEQ ID NO: 65486 - DNA, 25 bp, Saccharomyces pastorianus
gggcctcctgtgtttgttgacaaag

SEQ ID NO: 65487 - DNA, 25 bp, Saccharomyces pastorianus
taaaccagagctgttgtgcctaaca

SEQ ID NO: 65488 - DNA, 25 bp, Saccharomyces pastorianus
attgacagagatgcttgcctgccag

SEQ ID NO: 65489 - DNA, 25 bp, Saccharomyces pastorianus
ttctccccaggtctatagcaaaagc

SEQ ID NO: 65490 - DNA, 25 bp, Saccharomyces pastorianus
gccttggtatcagttctgttccaga

SEQ ID NO: 65491 - DNA, 25 bp, Saccharomyces pastorianus
aaccgactctcctgattttgtactt

SEQ ID NO: 65492 - DNA, 25 bp, Saccharomyces pastorianus
tatccctccagaagtcagtctgtta

SEQ ID NO: 65493 - DNA, 25 bp, Saccharomyces pastorianus
aaagttctaagcgatcattaccgat

SEQ ID NO: 65494 - DNA, 25 bp, Saccharomyces pastorianus
gataaggcctttcgtttatgcaaga

SEQ ID NO: 65495 - DNA, 25 bp, Saccharomyces pastorianus
tgcctgccagggagctctagttgaa

SEQ ID NO: 65496 - DNA, 25 bp, Saccharomyces pastorianus
aagagcgcaagacccacctttgtat

SEQ ID NO: 65497 - DNA, 25 bp, Saccharomyces pastorianus
agtacgaatttttctatccctccag

SEQ ID NO: 65498 - DNA, 25 bp, Saccharomyces pastorianus
gtatgaacttccgttggcatgtgaa

SEQ ID NO: 65499 - DNA, 25 bp, Saccharomyces pastorianus
aggtaatgctatcgtctttgcctcc

SEQ ID NO: 65500 - DNA, 25 bp, Saccharomyces pastorianus
ttagacagctactaccagtatccgc

SEQ ID NO: 65501 - DNA, 25 bp, Saccharomyces pastorianus
tatctttcaaacatcctgactcggc

SEQ ID NO: 65502 - DNA, 25 bp, Saccharomyces pastorianus
taataattcatttcccgcgccatat

SEQ ID NO: 65503 - DNA, 25 bp, Saccharomyces pastorianus
tatgcaggtgcaatacccgctgaac

SEQ ID NO: 65504 - DNA, 25 bp, Saccharomyces pastorianus
agtactgctgttaattacctgccct

SEQ ID NO: 65505 - DNA, 25 bp, Saccharomyces pastorianus
aacagcagtatttcggcgctacttc

SEQ ID NO: 65506 - DNA, 25 bp, Saccharomyces pastorianus
taaaagcccctctgacgacgacaat

SEQ ID NO: 65507 - DNA, 25 bp, Saccharomyces pastorianus
gtaattttccaacagcatcaccaac

SEQ ID NO: 65508 - DNA, 25 bp, Saccharomyces pastorianus
tgcctccgagatctgtaccaaatgt

SEQ ID NO: 65509 - DNA, 25 bp, Saccharomyces pastorianus
actctaacagactcggaccttttga

SEQ ID NO: 65510 - DNA, 25 bp, Saccharomyces pastorianus
gtgccagaagatgcaaccagtttca

SEQ ID NO: 65511 - DNA, 25 bp, Saccharomyces pastorianus
caatggtctaataaacgcctacgaa

SEQ ID NO: 65512 - DNA, 25 bp, Saccharomyces pastorianus
ataccccggtatttcgcatatgagg

SEQ ID NO: 65513 - DNA, 25 bp, Saccharomyces pastorianus
gtaaagagactactcgtccgacttt

SEQ ID NO: 65514 - DNA, 25 bp, Saccharomyces pastorianus
aagacatactatttcccacgagggc

SEQ ID NO: 65515 - DNA, 25 bp, Saccharomyces pastorianus
aactcttcgcctatcaacaaatcat

SEQ ID NO: 65516 - DNA, 25 bp, Saccharomyces pastorianus
atcaaccggcagtacaaactcttcg

SEQ ID NO: 65517 - DNA, 25 bp, Saccharomyces pastorianus
tacgacgatgagaaaaccggttcca

SEQ ID NO: 65518 - DNA, 25 bp, Saccharomyces pastorianus
accggttccaactcagataatgcag

SEQ ID NO: 65519 - DNA, 25 bp, Saccharomyces pastorianus
aatcttttcggcgtcgaatacgacg

SEQ ID NO: 65520 - DNA, 25 bp, Saccharomyces pastorianus
agcatgccaaatacccaagacgtta

SEQ ID NO: 65521 - DNA, 25 bp, Saccharomyces pastorianus
ggatcgcgtaccaagtgccggacat

SEQ ID NO: 65522 - DNA, 25 bp, Saccharomyces pastorianus
tgcacccaggtaacatccagatcga

SEQ ID NO: 65523 - DNA, 25 bp, Saccharomyces pastorianus
ctggatatgaccacgcagatcgatt

SEQ ID NO: 65524 - DNA, 25 bp, Saccharomyces pastorianus
aggacttcgacgtgtgctctatgaa

SEQ ID NO: 65525 - DNA, 25 bp, Saccharomyces pastorianus
aatagcttcgaggtgtcgttctctc

SEQ ID NO: 65526 - DNA, 25 bp, Saccharomyces pastorianus
gataagcgcatgtctggtggcacca

SEQ ID NO: 65527 - DNA, 25 bp, Saccharomyces pastorianus
ggagaattcacagctatcggccaat

SEQ ID NO: 65528 - DNA, 25 bp, Saccharomyces pastorianus
gattcatacatcagcgcgtacgtgg

SEQ ID NO: 65529 - DNA, 25 bp, Saccharomyces pastorianus
gtacgcgtacgggttcaaaatcata

SEQ ID NO: 65530 - DNA, 25 bp, Saccharomyces pastorianus
gactcgatcgagtacatcgcgcaga

SEQ ID NO: 65531 - DNA, 25 bp, Saccharomyces pastorianus
ttacgtggacatgattcccgggatc

SEQ ID NO: 65532 - DNA, 25 bp, Saccharomyces pastorianus
ttgcgtatgacgagggctttgctac

SEQ ID NO: 65533 - DNA, 25 bp, Saccharomyces pastorianus
tttgctacagatgatcccacgcttg

SEQ ID NO: 65534 - DNA, 25 bp, Saccharomyces pastorianus
ttaattcacagtttagaggcgcggt

SEQ ID NO: 65535 - DNA, 25 bp, Saccharomyces pastorianus
gatatgctacacttagaatctgttg

SEQ ID NO: 65536 - DNA, 25 bp, Saccharomyces pastorianus
ggctcaagataaagaccccaacact

SEQ ID NO: 65537 - DNA, 25 bp, Saccharomyces pastorianus
atacgttttgagtaggctatcggat

SEQ ID NO: 65538 - DNA, 25 bp, Saccharomyces pastorianus
tactgcattgcacgagtggatgctt

SEQ ID NO: 65539 - DNA, 25 bp, Saccharomyces pastorianus
tacattcactcccaactatacgttt

SEQ ID NO: 65540 - DNA, 25 bp, Saccharomyces pastorianus
ggagaaatctattcggtggcagaaa

SEQ ID NO: 65541 - DNA, 25 bp, Saccharomyces pastorianus
gacgaaccgctatcagagactgcta

SEQ ID NO: 65542 - DNA, 25 bp, Saccharomyces pastorianus
ccacgcttgctacagcagtttggag

SEQ ID NO: 65543 - DNA, 25 bp, Saccharomyces pastorianus
cattctggaagcacgttgggttcga

SEQ ID NO: 65544 - DNA, 25 bp, Saccharomyces pastorianus
tacaaagccgtgacgcttccaaatt

SEQ ID NO: 65545 - DNA, 25 bp, Saccharomyces pastorianus
aagcgtgtggacaaattcctacaaa

SEQ ID NO: 65546 - DNA, 25 bp, Saccharomyces pastorianus
gggttcgaactattgtccataggca

SEQ ID NO: 65547 - DNA, 25 bp, Saccharomyces pastorianus
gaaagctttactcagggagctctca

SEQ ID NO: 65548 - DNA, 25 bp, Saccharomyces pastorianus
cgatcctgaaagatggcttccaata

SEQ ID NO: 65549 - DNA, 25 bp, Saccharomyces pastorianus
ggacagatctacatacagaccaaag

SEQ ID NO: 65550 - DNA, 25 bp, Saccharomyces pastorianus
tccaaattgcccgatcctgaaagat

SEQ ID NO: 65551 - DNA, 25 bp, Saccharomyces pastorianus
tagtcaacagaattgtctcatccaa

SEQ ID NO: 65552 - DNA, 25 bp, Saccharomyces pastorianus
gggagctctcaagcttcaataaagt

SEQ ID NO: 65553 - DNA, 25 bp, Saccharomyces pastorianus
aagaagtctgaacaagcccttgata

SEQ ID NO: 65554 - DNA, 25 bp, Saccharomyces pastorianus
cctcgttgcaccaaaaatttctcca

SEQ ID NO: 65555 - DNA, 25 bp, Saccharomyces pastorianus
gttgcaccaaaaatttctccagaaa

SEQ ID NO: 65556 - DNA, 25 bp, Saccharomyces pastorianus
ctcgttgcaccaaaaatttctccag

SEQ ID NO: 65557 - DNA, 25 bp, Saccharomyces pastorianus
tcctcgttgcaccaaaaatttctcc

SEQ ID NO: 65558 - DNA, 25 bp, Saccharomyces pastorianus
tttcctcgttgcaccaaaaatttct

SEQ ID NO: 65559 - DNA, 25 bp, Saccharomyces pastorianus
cgttgcaccaaaaatttctccagaa

SEQ ID NO: 65560 - DNA, 25 bp, Saccharomyces pastorianus
tccttttcctcgttgcaccaaaaat

SEQ ID NO: 65561 - DNA, 25 bp, Saccharomyces pastorianus
ttgcaccaaaaatttctccagaaaa

SEQ ID NO: 65562 - DNA, 25 bp, Saccharomyces pastorianus
ttcctcgttgcaccaaaaatttctc

SEQ ID NO: 65563 - DNA, 25 bp, Saccharomyces pastorianus
tcgttgcaccaaaaatttctccaga

SEQ ID NO: 65564 - DNA, 25 bp, Saccharomyces pastorianus
tttcttcctctccttttcctcgttg

SEQ ID NO: 65565 - DNA, 25 bp, Saccharomyces pastorianus
caaactacagaaacaggaatgctaa

SEQ ID NO: 65566 - DNA, 25 bp, Saccharomyces pastorianus
gctagagtatgagttaacacaagaa

SEQ ID NO: 65567 - DNA, 25 bp, Saccharomyces pastorianus
tggtacccctgaagataatactaga

SEQ ID NO: 65568 - DNA, 25 bp, Saccharomyces pastorianus
cagccgagcattccgagagagtcta

SEQ ID NO: 65569 - DNA, 25 bp, Saccharomyces pastorianus
aacattaaattgattcagcgagagt

SEQ ID NO: 65570 - DNA, 25 bp, Saccharomyces pastorianus
gcgaatgaaaactctcaaattttgg

SEQ ID NO: 65571 - DNA, 25 bp, Saccharomyces pastorianus
gattcagcgagagtttgcgaatgaa

SEQ ID NO: 65572 - DNA, 25 bp, Saccharomyces pastorianus
gaagggtcagccgagcattccgaga

SEQ ID NO: 65573 - DNA, 25 bp, Saccharomyces pastorianus
gagcattccgagagagtctaggaaa

SEQ ID NO: 65574 - DNA, 25 bp, Saccharomyces pastorianus
gaaacaactataaaccaaactacag

SEQ ID NO: 65575 - DNA, 25 bp, Saccharomyces pastorianus
gggatgccaatttgctagagtatga

SEQ ID NO: 65576 - DNA, 25 bp, Saccharomyces pastorianus
tacacggtatccacatcatccagag

SEQ ID NO: 65577 - DNA, 25 bp, Saccharomyces pastorianus
tcactatattttgaagccgctcctc

SEQ ID NO: 65578 - DNA, 25 bp, Saccharomyces pastorianus
ggttgtggttcctgggacttctatc

SEQ ID NO: 65579 - DNA, 25 bp, Saccharomyces pastorianus
aagacagccttgattctgaactgga

SEQ ID NO: 65580 - DNA, 25 bp, Saccharomyces pastorianus
taaagcctacaagtcgggttccagc

SEQ ID NO: 65581 - DNA, 25 bp, Saccharomyces pastorianus
actttcactccccataatcaatatt

SEQ ID NO: 65582 - DNA, 25 bp, Saccharomyces pastorianus
gagataccaaagcaaccatcactat

SEQ ID NO: 65583 - DNA, 25 bp, Saccharomyces pastorianus
aaagacggagcctactctgaatgta

SEQ ID NO: 65584 - DNA, 25 bp, Saccharomyces pastorianus
taccgcaatcgacccaatacaaatt

SEQ ID NO: 65585 - DNA, 25 bp, Saccharomyces pastorianus
gggttccagcttcacttaaattcga

SEQ ID NO: 65586 - DNA, 25 bp, Saccharomyces pastorianus
gattttccaagctctaatgtccaag

SEQ ID NO: 65587 - DNA, 25 bp, Saccharomyces pastorianus
ggctaataacaaagcactccccaat

SEQ ID NO: 65588 - DNA, 25 bp, Saccharomyces pastorianus
tgccattgttggttcattccttggg

SEQ ID NO: 65589 - DNA, 25 bp, Saccharomyces pastorianus
taagaaggctatctcgccgggaaga

SEQ ID NO: 65590 - DNA, 25 bp, Saccharomyces pastorianus
tccccaataaaaatccgccagttca

SEQ ID NO: 65591 - DNA, 25 bp, Saccharomyces pastorianus
gggctgctgtaacaaccgttctgag

SEQ ID NO: 65592 - DNA, 25 bp, Saccharomyces pastorianus
gatatttcagaaagcgcgattccta

SEQ ID NO: 65593 - DNA, 25 bp, Saccharomyces pastorianus
acatctcccacgaaatcacatttga

SEQ ID NO: 65594 - DNA, 25 bp, Saccharomyces pastorianus
ccgccagttcacaataaagcacata

SEQ ID NO: 65595 - DNA, 25 bp, Saccharomyces pastorianus
gaacaagggcacattttatcaaggt

SEQ ID NO: 65596 - DNA, 25 bp, Saccharomyces pastorianus
gataatacttctctaagtacgccga

SEQ ID NO: 65597 - DNA, 25 bp, Saccharomyces pastorianus
aagcacaaagctacaacatctccca

SEQ ID NO: 65598 - DNA, 25 bp, Saccharomyces pastorianus
gcaacagctgggtggatatgcttcg

SEQ ID NO: 65599 - DNA, 25 bp, Saccharomyces pastorianus
gcctcctcctatgaataattacaat

SEQ ID NO: 65600 - DNA, 25 bp, Saccharomyces pastorianus
gtggatatgcttcgatgaacccatc

SEQ ID NO: 65601 - DNA, 25 bp, Saccharomyces pastorianus
tatgtctgcaaaatctccagtccca

SEQ ID NO: 65602 - DNA, 25 bp, Saccharomyces pastorianus
ggtcaaaatatgtctgcaaaatctc

SEQ ID NO: 65603 - DNA, 25 bp, Saccharomyces pastorianus
atcgcctcctcctatgaataattac

SEQ ID NO: 65604 - DNA, 25 bp, Saccharomyces pastorianus
atatgcttcgatgaacccatcgcct

SEQ ID NO: 65605 - DNA, 25 bp, Saccharomyces pastorianus
tgcaaaatctccagtcccacctatg

SEQ ID NO: 65606 - DNA, 25 bp, Saccharomyces pastorianus
atcatcagcaacctgctggaaataa

SEQ ID NO: 65607 - DNA, 25 bp, Saccharomyces pastorianus
aacaacatcatcagcaacctgctgg

SEQ ID NO: 65608 - DNA, 25 bp, Saccharomyces pastorianus
gcaacctcacgctcaacagcaattg

SEQ ID NO: 65609 - DNA, 25 bp, Saccharomyces pastorianus
caaatccctatcaaccaaaactacg

SEQ ID NO: 65610 - DNA, 25 bp, Saccharomyces pastorianus
taccgtgccatgaaccatcaacaaa

SEQ ID NO: 65611 - DNA, 25 bp, Saccharomyces pastorianus
atctctgctgaagatgcggttgcaa

SEQ ID NO: 65612 - DNA, 25 bp, Saccharomyces pastorianus
acagcagcaacaaccttatggccaa

SEQ ID NO: 65613 - DNA, 25 bp, Saccharomyces pastorianus
aactacggtcgctaccaaagttctg

SEQ ID NO: 65614 - DNA, 25 bp, Saccharomyces pastorianus
atggtcgttatcaaggtgctccacc

SEQ ID NO: 65615 - DNA, 25 bp, Saccharomyces pastorianus
aagactaacttaccaaactccaatg

SEQ ID NO: 65616 - DNA, 25 bp, Saccharomyces pastorianus
ctaccaaagttctgtgtctgcgcca

SEQ ID NO: 65617 - DNA, 25 bp, Saccharomyces pastorianus
acgaccaaggttatgcggcacaggc

SEQ ID NO: 65618 - DNA, 25 bp, Saccharomyces pastorianus
caacaaaatgtatatggcgctcccc

SEQ ID NO: 65619 - DNA, 25 bp, Saccharomyces pastorianus
ttaccaaaattacggcatgcctcct

SEQ ID NO: 65620 - DNA, 25 bp, Saccharomyces pastorianus
gacggtgtggcattagctactccaa

SEQ ID NO: 65621 - DNA, 25 bp, Saccharomyces pastorianus
tacatagaggtaactctccccatct

SEQ ID NO: 65622 - DNA, 25 bp, Saccharomyces pastorianus
gtttagaccattgattttgcctcat

SEQ ID NO: 65623 - DNA, 25 bp, Saccharomyces pastorianus
atccgcaggagggtcaatcgtttct

SEQ ID NO: 65624 - DNA, 25 bp, Saccharomyces pastorianus
gtacctgctatcttaatgaccccaa

SEQ ID NO: 65625 - DNA, 25 bp, Saccharomyces pastorianus
gaacttttgggcttcaattccagct

SEQ ID NO: 65626 - DNA, 25 bp, Saccharomyces pastorianus
aacagttcgtctatcgtaacccatg

SEQ ID NO: 65627 - DNA, 25 bp, Saccharomyces pastorianus
ctgtccacgttctttgtcgtttaga

SEQ ID NO: 65628 - DNA, 25 bp, Saccharomyces pastorianus
gaagtcggcactatttacattgatg

SEQ ID NO: 65629 - DNA, 25 bp, Saccharomyces pastorianus
attgatggtactcaactcccaacca

SEQ ID NO: 65630 - DNA, 25 bp, Saccharomyces pastorianus
atcgtttctccattagtacctgcta

SEQ ID NO: 65631 - DNA, 25 bp, Saccharomyces pastorianus
cagtctttgatctggcacaatccgt

SEQ ID NO: 65632 - DNA, 25 bp, Saccharomyces pastorianus
tgacgagcggctcaaaatttgtaaa

SEQ ID NO: 65633 - DNA, 25 bp, Saccharomyces pastorianus
gtacacttgattcacatgccataag

SEQ ID NO: 65634 - DNA, 25 bp, Saccharomyces pastorianus
aagcgatggtcgaatttataacaca

SEQ ID NO: 65635 - DNA, 25 bp, Saccharomyces pastorianus
gagactgaaattgaaccacccaatg

SEQ ID NO: 65636 - DNA, 25 bp, Saccharomyces pastorianus
acatttgcatgagtcataccctgag

SEQ ID NO: 65637 - DNA, 25 bp, Saccharomyces pastorianus
aaaccttggactccgtctacaagag

SEQ ID NO: 65638 - DNA, 25 bp, Saccharomyces pastorianus
gccataagattgacgagcggctcaa

SEQ ID NO: 65639 - DNA, 25 bp, Saccharomyces pastorianus
acccaatgaggtggtctagaatcta

SEQ ID NO: 65640 - DNA, 25 bp, Saccharomyces pastorianus
ggcacaatccgttacagaatgttta

SEQ ID NO: 65641 - DNA, 25 bp, Saccharomyces pastorianus
ggtctagaatctatagtacacttga

SEQ ID NO: 65642 - DNA, 25 bp, Saccharomyces pastorianus
tgggtcatggttctcttggctgaca

SEQ ID NO: 65643 - DNA, 25 bp, Saccharomyces pastorianus
gaaggtgatacacgtcctcaagact

SEQ ID NO: 65644 - DNA, 25 bp, Saccharomyces pastorianus
gataaaccaggtgatcaaccggcga

SEQ ID NO: 65645 - DNA, 25 bp, Saccharomyces pastorianus
atcttggaaaagttgctaggagcat

SEQ ID NO: 65646 - DNA, 25 bp, Saccharomyces pastorianus
gcgtttctttgggtcatggttctct

SEQ ID NO: 65647 - DNA, 25 bp, Saccharomyces pastorianus
gatacacgtcctcaagactatgaaa

SEQ ID NO: 65648 - DNA, 25 bp, Saccharomyces pastorianus
accaggtgatcaaccggcgaagtca

SEQ ID NO: 65649 - DNA, 25 bp, Saccharomyces pastorianus
tcaaccggcgaagtcagtggtcagg

SEQ ID NO: 65650 - DNA, 25 bp, Saccharomyces pastorianus
agcattagggcgtttctttgggtca

SEQ ID NO: 65651 - DNA, 25 bp, Saccharomyces pastorianus
gctaggagcattagggcgtttcttt

SEQ ID NO: 65652 - DNA, 25 bp, Saccharomyces pastorianus
gtcagggaaggtgatacacgtcctc

SEQ ID NO: 65653 - DNA, 25 bp, Saccharomyces pastorianus
tgcttcgtcaccttcattgatccta

SEQ ID NO: 65654 - DNA, 25 bp, Saccharomyces pastorianus
ttggcagtcagtaacggcgcgtcaa

SEQ ID NO: 65655 - DNA, 25 bp, Saccharomyces pastorianus
gatgaacgtatcttcacggaaacca

SEQ ID NO: 65656 - DNA, 25 bp, Saccharomyces pastorianus
ttgttacaacaatcagcggtcgctg

SEQ ID NO: 65657 - DNA, 25 bp, Saccharomyces pastorianus
atatgtaacgcggttcgtggcggct

SEQ ID NO: 65658 - DNA, 25 bp, Saccharomyces pastorianus
ttcgtggcggcttattacagagtat

SEQ ID NO: 65659 - DNA, 25 bp, Saccharomyces pastorianus
caagtccaacccatatttcaaagat

SEQ ID NO: 65660 - DNA, 25 bp, Saccharomyces pastorianus
gtttatatctgagcgccttgttaca

SEQ ID NO: 65661 - DNA, 25 bp, Saccharomyces pastorianus
ggcaattgccacatcagccggaggc

SEQ ID NO: 65662 - DNA, 25 bp, Saccharomyces pastorianus
gaatgatcgctacgtgtgcttcgtc

SEQ ID NO: 65663 - DNA, 25 bp, Saccharomyces pastorianus
ttgattttgctagcgattccttaaa

SEQ ID NO: 65664 - DNA, 25 bp, Saccharomyces pastorianus
ataactaccgatggtgcgacaagaa

SEQ ID NO: 65665 - DNA, 25 bp, Saccharomyces pastorianus
gatgtgcgcattcatatcctttgtc

SEQ ID NO: 65666 - DNA, 25 bp, Saccharomyces pastorianus
attgtggctgcgagaataactaccg

SEQ ID NO: 65667 - DNA, 25 bp, Saccharomyces pastorianus
attttacttctgctccaaccagaac

SEQ ID NO: 65668 - DNA, 25 bp, Saccharomyces pastorianus
aacccgcattgatcctattgtggct

SEQ ID NO: 65669 - DNA, 25 bp, Saccharomyces pastorianus
tagatcatgttaggagcggtgtcgt

SEQ ID NO: 65670 - DNA, 25 bp, Saccharomyces pastorianus
ggtaatgtaccaccacatctgacag

SEQ ID NO: 65671 - DNA, 25 bp, Saccharomyces pastorianus
atacattggtcgtatgacagtcgaa

SEQ ID NO: 65672 - DNA, 25 bp, Saccharomyces pastorianus
gtgcagcactattgtttcattcgga

SEQ ID NO: 65673 - DNA, 25 bp, Saccharomyces pastorianus
gcaaatgctcccttgtcagtaaatt

SEQ ID NO: 65674 - DNA, 25 bp, Saccharomyces pastorianus
tcctttgtcgatgagagtgcagcac

SEQ ID NO: 65675 - DNA, 25 bp, Saccharomyces pastorianus
gcatcgagcacaagccacagcataa

SEQ ID NO: 65676 - DNA, 25 bp, Saccharomyces pastorianus
gttattaactctttacagccgacta

SEQ ID NO: 65677 - DNA, 25 bp, Saccharomyces pastorianus
taacggtctgcagaacacacgcaat

SEQ ID NO: 65678 - DNA, 25 bp, Saccharomyces pastorianus
aaattcaagcagtgttgtccaacat

SEQ ID NO: 65679 - DNA, 25 bp, Saccharomyces pastorianus
acgcaatctattgagaggccctatg

SEQ ID NO: 65680 - DNA, 25 bp, Saccharomyces pastorianus
gaagtttgatgacctttacccacac

SEQ ID NO: 65681 - DNA, 25 bp, Saccharomyces pastorianus
aacctacaatggctgggaacactaa

SEQ ID NO: 65682 - DNA, 25 bp, Saccharomyces pastorianus
gagtgactccatctttatggcggga

SEQ ID NO: 65683 - DNA, 25 bp, Saccharomyces pastorianus
attgccccatcagcgcgttattaac

SEQ ID NO: 65684 - DNA, 25 bp, Saccharomyces pastorianus
gttttataacccattagacgaggca

SEQ ID NO: 65685 - DNA, 25 bp, Saccharomyces pastorianus
acgatgggcaatcgattactccctc

SEQ ID NO: 65686 - DNA, 25 bp, Saccharomyces pastorianus
gatccggaaaacatttcttccaatg

SEQ ID NO: 65687 - DNA, 25 bp, Saccharomyces pastorianus
gtactttcgatgacctggatgatga

SEQ ID NO: 65688 - DNA, 25 bp, Saccharomyces pastorianus
atattgaaggcgctaatccattaga

SEQ ID NO: 65689 - DNA, 25 bp, Saccharomyces pastorianus
atgattctttcccagtccactggag

SEQ ID NO: 65690 - DNA, 25 bp, Saccharomyces pastorianus
tatgcacctgacatgattctttccc

SEQ ID NO: 65691 - DNA, 25 bp, Saccharomyces pastorianus
acgtaggtttgaggatttatcttct

SEQ ID NO: 65692 - DNA, 25 bp, Saccharomyces pastorianus
tctaaacaacgccaaccgctaaacg

SEQ ID NO: 65693 - DNA, 25 bp, Saccharomyces pastorianus
tccagaagatcgtttgaattcggat

SEQ ID NO: 65694 - DNA, 25 bp, Saccharomyces pastorianus
gcgacacaagttttatgtccttgag

SEQ ID NO: 65695 - DNA, 25 bp, Saccharomyces pastorianus
gtccactggagtagaacgtaggttt

SEQ ID NO: 65696 - DNA, 25 bp, Saccharomyces pastorianus
aattcggatggtactttcgatgacc

SEQ ID NO: 65697 - DNA, 25 bp, Saccharomyces pastorianus
acagttttttcagcgcccaattatt

SEQ ID NO: 65698 - DNA, 25 bp, Saccharomyces pastorianus
ggaatgtcctcgatttttgtgctaa

SEQ ID NO: 65699 - DNA, 25 bp, Saccharomyces pastorianus
ggtatttcgcctgatttacatgata

SEQ ID NO: 65700 - DNA, 25 bp, Saccharomyces pastorianus
ggagtgatccagatgcccaggtttc

SEQ ID NO: 65701 - DNA, 25 bp, Saccharomyces pastorianus
gtgtccatggaggtatttcgcctga

SEQ ID NO: 65702 - DNA, 25 bp, Saccharomyces pastorianus
ttagcagccattatccaagacaaga

SEQ ID NO: 65703 - DNA, 25 bp, Saccharomyces pastorianus
gttgcaaggccgactgatatacctg

SEQ ID NO: 65704 - DNA, 25 bp, Saccharomyces pastorianus
atgcccaggtttccgattggtcgga

SEQ ID NO: 65705 - DNA, 25 bp, Saccharomyces pastorianus
gacggttatgagttttttgccagga

SEQ ID NO: 65706 - DNA, 25 bp, Saccharomyces pastorianus
gatcgtggtgtttcgtatacctttt

SEQ ID NO: 65707 - DNA, 25 bp, Saccharomyces pastorianus
gtctttaacactttgcccttagcag

SEQ ID NO: 65708 - DNA, 25 bp, Saccharomyces pastorianus
agcaatgataacatgccgttccccg

SEQ ID NO: 65709 - DNA, 25 bp, Saccharomyces pastorianus
tgtttcagtgaccaaagctctttct

SEQ ID NO: 65710 - DNA, 25 bp, Saccharomyces pastorianus
taacaactccttcagatgagctcaa

SEQ ID NO: 65711 - DNA, 25 bp, Saccharomyces pastorianus
gcatccgccgcaaaaaacaacaaca

SEQ ID NO: 65712 - DNA, 25 bp, Saccharomyces pastorianus
gaagaagcccgtctaaatcaaacaa

SEQ ID NO: 65713 - DNA, 25 bp, Saccharomyces pastorianus
acaatcacagcactttagcatccgc

SEQ ID NO: 65714 - DNA, 25 bp, Saccharomyces pastorianus
gcactttagcatccgccgcaaaaaa

SEQ ID NO: 65715 - DNA, 25 bp, Saccharomyces pastorianus
tcaaacaacaacttcgcagtaccga

SEQ ID NO: 65716 - DNA, 25 bp, Saccharomyces pastorianus
gaaaatataacgagcttgtatctag

SEQ ID NO: 65717 - DNA, 25 bp, Saccharomyces pastorianus
tctagatttcgatgtttcagtgacc

SEQ ID NO: 65718 - DNA, 25 bp, Saccharomyces pastorianus
gttccccgggcagaatgctcataaa

SEQ ID NO: 65719 - DNA, 25 bp, Saccharomyces pastorianus
aacttttgggatccgttgctcatga

SEQ ID NO: 65720 - DNA, 25 bp, Saccharomyces pastorianus
ttatgccgaagagacatctgtttca

SEQ ID NO: 65721 - DNA, 25 bp, Saccharomyces pastorianus
tttcagatctcgtccaggcaacaaa

SEQ ID NO: 65722 - DNA, 25 bp, Saccharomyces pastorianus
ggatgtagcccaaaggacagttagt

SEQ ID NO: 65723 - DNA, 25 bp, Saccharomyces pastorianus
gaaagggcatttgggctaaacattt

SEQ ID NO: 65724 - DNA, 25 bp, Saccharomyces pastorianus
gtattccagaggtgctacccaatga

SEQ ID NO: 65725 - DNA, 25 bp, Saccharomyces pastorianus
gaggctgcatcctgcaatttactga

SEQ ID NO: 65726 - DNA, 25 bp, Saccharomyces pastorianus
ggcgatatatatttgcatgctagtt

SEQ ID NO: 65727 - DNA, 25 bp, Saccharomyces pastorianus
acaccgatatttcttctacttcttc

SEQ ID NO: 65728 - DNA, 25 bp, Saccharomyces pastorianus
ctttggacacatcttcttttcacga

SEQ ID NO: 65729 - DNA, 25 bp, Saccharomyces pastorianus
attgatatagctcccaaatggccga

SEQ ID NO: 65730 - DNA, 25 bp, Saccharomyces pastorianus
gaacgcggagtacacgtttatgttg

SEQ ID NO: 65731 - DNA, 25 bp, Saccharomyces pastorianus
caccggacgtccaatcgcgcttgaa

SEQ ID NO: 65732 - DNA, 25 bp, Saccharomyces pastorianus
ggaactacgaagtcgccataaaggg

SEQ ID NO: 65733 - DNA, 25 bp, Saccharomyces pastorianus
aaccaagttgaacgcggagtacacg

SEQ ID NO: 65734 - DNA, 25 bp, Saccharomyces pastorianus
aatggtcatggcacccactctacaa

SEQ ID NO: 65735 - DNA, 25 bp, Saccharomyces pastorianus
aactcgagctgctaaacaagttgca

SEQ ID NO: 65736 - DNA, 25 bp, Saccharomyces pastorianus
gagcaaagcaactggaactacgaag

SEQ ID NO: 65737 - DNA, 25 bp, Saccharomyces pastorianus
gctgctaaacaagttgcatctgcaa

SEQ ID NO: 65738 - DNA, 25 bp, Saccharomyces pastorianus
gggaatgaacatgcccggcgtgccc

SEQ ID NO: 65739 - DNA, 25 bp, Saccharomyces pastorianus
aatcgcgcttgaaccccgtacaact

SEQ ID NO: 65740 - DNA, 25 bp, Saccharomyces pastorianus
gttgcatctgcaaaccaagttgaac

SEQ ID NO: 65741 - DNA, 25 bp, Saccharomyces pastorianus
ccatgttcacgcaatatctccaaag

SEQ ID NO: 65742 - DNA, 25 bp, Saccharomyces pastorianus
gatcagctatcctcaaatcaacggg

SEQ ID NO: 65743 - DNA, 25 bp, Saccharomyces pastorianus
gcatagtgtctattcgttaccaatg

SEQ ID NO: 65744 - DNA, 25 bp, Saccharomyces pastorianus
gactattccccaagttagtggtgct

SEQ ID NO: 65745 - DNA, 25 bp, Saccharomyces pastorianus
gggttcatcattactttacacggtt

SEQ ID NO: 65746 - DNA, 25 bp, Saccharomyces pastorianus
gtatccagtgagaaatccatccagc

SEQ ID NO: 65747 - DNA, 25 bp, Saccharomyces pastorianus
acaatcccaattttctgtctccgtg

SEQ ID NO: 65748 - DNA, 25 bp, Saccharomyces pastorianus
gtagcagactctgatcaaaccccgt

SEQ ID NO: 65749 - DNA, 25 bp, Saccharomyces pastorianus
agtcgtccacggattttgcaaccaa

SEQ ID NO: 65750 - DNA, 25 bp, Saccharomyces pastorianus
taaccccatcactaccgataagttg

SEQ ID NO: 65751 - DNA, 25 bp, Saccharomyces pastorianus
ggccaagagtccatcaacaacatat

SEQ ID NO: 65752 - DNA, 25 bp, Saccharomyces pastorianus
ggttctgctggaacttcagacacta

SEQ ID NO: 65753 - DNA, 25 bp, Saccharomyces pastorianus
tcgagtagctgtgcttgacgcccat

SEQ ID NO: 65754 - DNA, 25 bp, Saccharomyces pastorianus
accattggttgtcggttttgtgaat

SEQ ID NO: 65755 - DNA, 25 bp, Saccharomyces pastorianus
aagaggtatgatccccagtcgaaac

SEQ ID NO: 65756 - DNA, 25 bp, Saccharomyces pastorianus
atggcaatggaggttctgctggaac

SEQ ID NO: 65757 - DNA, 25 bp, Saccharomyces pastorianus
cataagcaggaacgctcgagtagct

SEQ ID NO: 65758 - DNA, 25 bp, Saccharomyces pastorianus
tcagacactatttcgtttctaaggg

SEQ ID NO: 65759 - DNA, 25 bp, Saccharomyces pastorianus
aaggctgaagccgaatcgttaatga

SEQ ID NO: 65760 - DNA, 25 bp, Saccharomyces pastorianus
aacggtgtccgttttgcaggtagca

SEQ ID NO: 65761 - DNA, 25 bp, Saccharomyces pastorianus
aaatttgagcttttggatggcaatg

SEQ ID NO: 65762 - DNA, 25 bp, Saccharomyces pastorianus
ttgacgcccatgtggacggaccatt

SEQ ID NO: 65763 - DNA, 25 bp, Saccharomyces pastorianus
cacagacttattcggcgtcatcaac

SEQ ID NO: 65764 - DNA, 25 bp, Saccharomyces pastorianus
taaaaggccgtctactgctcgcaag

SEQ ID NO: 65765 - DNA, 25 bp, Saccharomyces pastorianus
gaatccgtaccgttgacagcaggaa

SEQ ID NO: 65766 - DNA, 25 bp, Saccharomyces pastorianus
gttttccaaagtagcgatccattat

SEQ ID NO: 65767 - DNA, 25 bp, Saccharomyces pastorianus
tatttaagaggagacccagccgccc

SEQ ID NO: 65768 - DNA, 25 bp, Saccharomyces pastorianus
aatggagcgctgattctttctctga

SEQ ID NO: 65769 - DNA, 25 bp, Saccharomyces pastorianus
aaggacatcactgtgtctgccgaat

SEQ ID NO: 65770 - DNA, 25 bp, Saccharomyces pastorianus
agccgcccattaaagcacttagcaa

SEQ ID NO: 65771 - DNA, 25 bp, Saccharomyces pastorianus
ggtttcttcaacatcaacttcacag

SEQ ID NO: 65772 - DNA, 25 bp, Saccharomyces pastorianus
ggagtaggctactgttgcattcatt

SEQ ID NO: 65773 - DNA, 25 bp, Saccharomyces pastorianus
gccgaatttgactatggtttcttca

SEQ ID NO: 65774 - DNA, 25 bp, Saccharomyces pastorianus
agtatatcaatctgccgtaggtaaa

SEQ ID NO: 65775 - DNA, 25 bp, Saccharomyces pastorianus
atatgtctcgagtatttgattcaaa

SEQ ID NO: 65776 - DNA, 25 bp, Saccharomyces pastorianus
gtgtactatatatatctccactact

SEQ ID NO: 65777 - DNA, 25 bp, Saccharomyces pastorianus
gattcaaagatcctcaaatcgggac

SEQ ID NO: 65778 - DNA, 25 bp, Saccharomyces pastorianus
gcgctggataagatttgtatcgcat

SEQ ID NO: 65779 - DNA, 25 bp, Saccharomyces pastorianus
aagccttcaaacatgcagtatatca

SEQ ID NO: 65780 - DNA, 25 bp, Saccharomyces pastorianus
aatcgggacgtatcaaagccttcaa

SEQ ID NO: 65781 - DNA, 25 bp, Saccharomyces pastorianus
tatcgcatgcaaaaggtggtggtac

SEQ ID NO: 65782 - DNA, 25 bp, Saccharomyces pastorianus
gccgtaggtaaaggcaaagctaact

SEQ ID NO: 65783 - DNA, 25 bp, Saccharomyces pastorianus
gtacgaaaattgcagaccataatat

SEQ ID NO: 65784 - DNA, 25 bp, Saccharomyces pastorianus
tctggagtagatgtgcgctggataa

SEQ ID NO: 65785 - DNA, 25 bp, Saccharomyces pastorianus
gagctaactcaagtacgtccatcgc

SEQ ID NO: 65786 - DNA, 25 bp, Saccharomyces pastorianus
acatgcacatatcgctacactttgg

SEQ ID NO: 65787 - DNA, 25 bp, Saccharomyces pastorianus
gagagtgaccatatcgccagtgaat

SEQ ID NO: 65788 - DNA, 25 bp, Saccharomyces pastorianus
ataggaacctctttaacgtgctgta

SEQ ID NO: 65789 - DNA, 25 bp, Saccharomyces pastorianus
agtttcacaacatcatcgcttctaa

SEQ ID NO: 65790 - DNA, 25 bp, Saccharomyces pastorianus
taaaacgttggtgcctccccttgat

SEQ ID NO: 65791 - DNA, 25 bp, Saccharomyces pastorianus
gagcgtgtaccatacctggttgtta

SEQ ID NO: 65792 - DNA, 25 bp, Saccharomyces pastorianus
aaatcctatgactgcccgatattct

SEQ ID NO: 65793 - DNA, 25 bp, Saccharomyces pastorianus
gtgtatcgcccgaagagttctttga

SEQ ID NO: 65794 - DNA, 25 bp, Saccharomyces pastorianus
ccgatattctattcccgtgtcaaaa

SEQ ID NO: 65795 - DNA, 25 bp, Saccharomyces pastorianus
ctccccttgataggctgttcaattt

SEQ ID NO: 65796 - DNA, 25 bp, Saccharomyces pastorianus
gattctctgacacatttgacgcttg

SEQ ID NO: 65797 - DNA, 25 bp, Saccharomyces pastorianus
gtgtgttggcaacattccagtcatg

SEQ ID NO: 65798 - DNA, 25 bp, Saccharomyces pastorianus
gaaagccacctagatttgatgaagt

SEQ ID NO: 65799 - DNA, 25 bp, Saccharomyces pastorianus
aaatgttcgaagcactgaccgattt

SEQ ID NO: 65800 - DNA, 25 bp, Saccharomyces pastorianus
gatagatttgcagacacctcataat

SEQ ID NO: 65801 - DNA, 25 bp, Saccharomyces pastorianus
tggatagtaatttccccactcaaat

SEQ ID NO: 65802 - DNA, 25 bp, Saccharomyces pastorianus
attgttgaagagcttgcccgagtta

SEQ ID NO: 65803 - DNA, 25 bp, Saccharomyces pastorianus
aagaacacggatctacagcaacgaa

SEQ ID NO: 65804 - DNA, 25 bp, Saccharomyces pastorianus
gatcctgacattctatcgggttttg

SEQ ID NO: 65805 - DNA, 25 bp, Saccharomyces pastorianus
aaatttgctagtgatgcctccgtca

SEQ ID NO: 65806 - DNA, 25 bp, Saccharomyces pastorianus
cgcttgaaatccacgttaacaccag

SEQ ID NO: 65807 - DNA, 25 bp, Saccharomyces pastorianus
ataacggaaagttcattgcgggtat

SEQ ID NO: 65808 - DNA, 25 bp, Saccharomyces pastorianus
gcgaggcaaatgatgccagccccat

SEQ ID NO: 65809 - DNA, 25 bp, Saccharomyces pastorianus
ggcccatcggaacagctatcaattt

SEQ ID NO: 65810 - DNA, 25 bp, Saccharomyces pastorianus
caaaggtaccgaatatttgacacca

SEQ ID NO: 65811 - DNA, 25 bp, Saccharomyces pastorianus
aaccgttatgggacacgatcttcaa

SEQ ID NO: 65812 - DNA, 25 bp, Saccharomyces pastorianus
aaatttcaaaatccaggcccatcgg

SEQ ID NO: 65813 - DNA, 25 bp, Saccharomyces pastorianus
atgccagccccatcgaaaatatact

SEQ ID NO: 65814 - DNA, 25 bp, Saccharomyces pastorianus
ttcagatttatttcacattaccaaa

SEQ ID NO: 65815 - DNA, 25 bp, Saccharomyces pastorianus
gatgctagaaactatactttcgttc

SEQ ID NO: 65816 - DNA, 25 bp, Saccharomyces pastorianus
caaaggtagcgaaagctgtttcaat

SEQ ID NO: 65817 - DNA, 25 bp, Saccharomyces pastorianus
tctaccgaagtgtgaaaccgttatg

SEQ ID NO: 65818 - DNA, 25 bp, Saccharomyces pastorianus
aagacttgtatcgtgtgctggaaac

SEQ ID NO: 65819 - DNA, 25 bp, Saccharomyces pastorianus
aagccgacgctgatgctctgatgaa

SEQ ID NO: 65820 - DNA, 25 bp, Saccharomyces pastorianus
gcatcattagactgtttggcaccga

SEQ ID NO: 65821 - DNA, 25 bp, Saccharomyces pastorianus
gaagcgctcgtagccagtaccgaag

SEQ ID NO: 65822 - DNA, 25 bp, Saccharomyces pastorianus
ggagcagcctttgtgcatcgaaacc

SEQ ID NO: 65823 - DNA, 25 bp, Saccharomyces pastorianus
tgatgaaactcgtatcctttggtga

SEQ ID NO: 65824 - DNA, 25 bp, Saccharomyces pastorianus
agttcaacagaacctcgctaatgag

SEQ ID NO: 65825 - DNA, 25 bp, Saccharomyces pastorianus
gttacactttggctgcatctttgat

SEQ ID NO: 65826 - DNA, 25 bp, Saccharomyces pastorianus
gtgagctcttaaagttccactacaa

SEQ ID NO: 65827 - DNA, 25 bp, Saccharomyces pastorianus
caaccttgcattggtattggaccta

SEQ ID NO: 65828 - DNA, 25 bp, Saccharomyces pastorianus
tagcgatttgttctttttgagtcag

SEQ ID NO: 65829 - DNA, 25 bp, Saccharomyces pastorianus
aagaatcatgctccgggtgcagatt

SEQ ID NO: 65830 - DNA, 25 bp, Saccharomyces pastorianus
agcgaaagtgtctccaatgatgtga

SEQ ID NO: 65831 - DNA, 25 bp, Saccharomyces pastorianus
ggcaattcctcccaaatacttgatg

SEQ ID NO: 65832 - DNA, 25 bp, Saccharomyces pastorianus
gccatgttaaactctgcctattcta

SEQ ID NO: 65833 - DNA, 25 bp, Saccharomyces pastorianus
agtgtttcctcatctgactatgacc

SEQ ID NO: 65834 - DNA, 25 bp, Saccharomyces pastorianus
atctatgaagatctcgtcgactccc

SEQ ID NO: 65835 - DNA, 25 bp, Saccharomyces pastorianus
gattgcgcgtctacaggattctaaa

SEQ ID NO: 65836 - DNA, 25 bp, Saccharomyces pastorianus
aagccattcagatcacgcggatgca

SEQ ID NO: 65837 - DNA, 25 bp, Saccharomyces pastorianus
atatcaggcggatggcaattcctcc

SEQ ID NO: 65838 - DNA, 25 bp, Saccharomyces pastorianus
tactttgagatcaccattcgccatg

SEQ ID NO: 65839 - DNA, 25 bp, Saccharomyces pastorianus
cgtcgactccctcttaattgaatat

SEQ ID NO: 65840 - DNA, 25 bp, Saccharomyces pastorianus
aatgtaaccggctcagtatcgtcag

SEQ ID NO: 65841 - DNA, 25 bp, Saccharomyces pastorianus
cgactattttgcttcccatgatgta

SEQ ID NO: 65842 - DNA, 25 bp, Saccharomyces pastorianus
gaagacgccacctctcaaattttat

SEQ ID NO: 65843 - DNA, 25 bp, Saccharomyces pastorianus
gagaacgtttcctacaacatcgcat

SEQ ID NO: 65844 - DNA, 25 bp, Saccharomyces pastorianus
aaattctggctactcctctaatgga

SEQ ID NO: 65845 - DNA, 25 bp, Saccharomyces pastorianus
ttgctaatatctccgacaacaccac

SEQ ID NO: 65846 - DNA, 25 bp, Saccharomyces pastorianus
tttccagaccattccaactgcagag

SEQ ID NO: 65847 - DNA, 25 bp, Saccharomyces pastorianus
cagattgacatcctcagactctaac

SEQ ID NO: 65848 - DNA, 25 bp, Saccharomyces pastorianus
tttatctgactatacatccgcatcc

SEQ ID NO: 65849 - DNA, 25 bp, Saccharomyces pastorianus
accacatcatctccacgaattattg

SEQ ID NO: 65850 - DNA, 25 bp, Saccharomyces pastorianus
aacatcgcatcgtcatcggcatcat

SEQ ID NO: 65851 - DNA, 25 bp, Saccharomyces pastorianus
gattcagatggtaatcgccaacgca

SEQ ID NO: 65852 - DNA, 25 bp, Saccharomyces pastorianus
gaagaccataatgttctcgataaga

SEQ ID NO: 65853 - DNA, 25 bp, Saccharomyces pastorianus
ggtgatgacgagtatgccattcata

SEQ ID NO: 65854 - DNA, 25 bp, Saccharomyces pastorianus
cattcaggaagtgagctcatcggaa

SEQ ID NO: 65855 - DNA, 25 bp, Saccharomyces pastorianus
aatacagtcttccaataccgattcc

SEQ ID NO: 65856 - DNA, 25 bp, Saccharomyces pastorianus
tccaataccgattccatcattcagg

SEQ ID NO: 65857 - DNA, 25 bp, Saccharomyces pastorianus
aaccgccaggcgttcatctaaaaga

SEQ ID NO: 65858 - DNA, 25 bp, Saccharomyces pastorianus
atctcgtcatggtaaaaccgccagg

SEQ ID NO: 65859 - DNA, 25 bp, Saccharomyces pastorianus
gccaacgcatatctccaatggtgga

SEQ ID NO: 65860 - DNA, 25 bp, Saccharomyces pastorianus
atatcacaacagcttctccagctat

SEQ ID NO: 65861 - DNA, 25 bp, Saccharomyces pastorianus
aagggcatatgcgacatctcgtcat

SEQ ID NO: 65862 - DNA, 25 bp, Saccharomyces pastorianus
aaatggctcctcgaagggtatcatg

SEQ ID NO: 65863 - DNA, 25 bp, Saccharomyces pastorianus
gtaatccccatcttaagtagcagta

SEQ ID NO: 65864 - DNA, 25 bp, Saccharomyces pastorianus
gttatgtgatcgtagcccaaggaat

SEQ ID NO: 65865 - DNA, 25 bp, Saccharomyces pastorianus
acaaccaactatccgcatggctgga

SEQ ID NO: 65866 - DNA, 25 bp, Saccharomyces pastorianus
atggctggagtcaatcccacactga

SEQ ID NO: 65867 - DNA, 25 bp, Saccharomyces pastorianus
agataagcccatcaagaccgcggca

SEQ ID NO: 65868 - DNA, 25 bp, Saccharomyces pastorianus
gaaattccttgggacactgcactgc

SEQ ID NO: 65869 - DNA, 25 bp, Saccharomyces pastorianus
ttgcaagcaacgctacttttgccac

SEQ ID NO: 65870 - DNA, 25 bp, Saccharomyces pastorianus
gaccgcggcatgttccgattattat

SEQ ID NO: 65871 - DNA, 25 bp, Saccharomyces pastorianus
actgcactgcttgatttgtacctca

SEQ ID NO: 65872 - DNA, 25 bp, Saccharomyces pastorianus
gggtatcatgtctttgtcggtaaac

SEQ ID NO: 65873 - DNA, 25 bp, Saccharomyces pastorianus
aatttgccagccaagactttcggtg

SEQ ID NO: 65874 - DNA, 25 bp, Saccharomyces pastorianus
cccacggtaactctggtgttgttag

SEQ ID NO: 65875 - DNA, 25 bp, Saccharomyces pastorianus
ttagagctaccttcagaaacaattt

SEQ ID NO: 65876 - DNA, 25 bp, Saccharomyces pastorianus
cggtaactctggtgttgttagagct

SEQ ID NO: 65877 - DNA, 25 bp, Saccharomyces pastorianus
gttagagctaccttcagaaacaatt

SEQ ID NO: 65878 - DNA, 25 bp, Saccharomyces pastorianus
gaaacaatttgccagccaagacttt

SEQ ID NO: 65879 - DNA, 25 bp, Saccharomyces pastorianus
tgtggggtaaggtcaccagaaccca

SEQ ID NO: 65880 - DNA, 25 bp, Saccharomyces pastorianus
tagagctaccttcagaaacaatttg

SEQ ID NO: 65881 - DNA, 25 bp, Saccharomyces pastorianus
agaacccacggtaactctggtgttg

SEQ ID NO: 65882 - DNA, 25 bp, Saccharomyces pastorianus
tgttagagctaccttcagaaacaat

SEQ ID NO: 65883 - DNA, 25 bp, Saccharomyces pastorianus
gccagccaagactttcggtgcttct

SEQ ID NO: 65884 - DNA, 25 bp, Saccharomyces pastorianus
gaaaacgatgttaaagaggatactt

SEQ ID NO: 65885 - DNA, 25 bp, Saccharomyces pastorianus
tagtcttttctattctcaaaatgta

SEQ ID NO: 65886 - DNA, 25 bp, Saccharomyces pastorianus
gcgcccaaaaatgtgaatatgccaa

SEQ ID NO: 65887 - DNA, 25 bp, Saccharomyces pastorianus
attagtcttttctattctcaaaatg

SEQ ID NO: 65888 - DNA, 25 bp, Saccharomyces pastorianus
atatattagtcttttctattctcaa

SEQ ID NO: 65889 - DNA, 25 bp, Saccharomyces pastorianus
gcccaaaaatgtgaatatgccaaat

SEQ ID NO: 65890 - DNA, 25 bp, Saccharomyces pastorianus
tataataggttctattaccttttat

SEQ ID NO: 65891 - DNA, 25 bp, Saccharomyces pastorianus
atatgccaaatataataggttctat

SEQ ID NO: 65892 - DNA, 25 bp, Saccharomyces pastorianus
gaggatacttatacaattaacaaat

SEQ ID NO: 65893 - DNA, 25 bp, Saccharomyces pastorianus
attgcgcccaaaaatgtgaatatgc

SEQ ID NO: 65894 - DNA, 25 bp, Saccharomyces pastorianus
gtcttttctattctcaaaatgtaat

SEQ ID NO: 65895 - DNA, 25 bp, Saccharomyces pastorianus
gacgatactcatatcaacccgagaa

SEQ ID NO: 65896 - DNA, 25 bp, Saccharomyces pastorianus
acaggttaatctttccttagagaga

SEQ ID NO: 65897 - DNA, 25 bp, Saccharomyces pastorianus
ctgtcagaactgagagggcctccat

SEQ ID NO: 65898 - DNA, 25 bp, Saccharomyces pastorianus
gagaacttcatcgacgaccacgtca

SEQ ID NO: 65899 - DNA, 25 bp, Saccharomyces pastorianus
tcaatccctacaaacaatcgctcaa

SEQ ID NO: 65900 - DNA, 25 bp, Saccharomyces pastorianus
aaggtaccggagtcagctgttgcac

SEQ ID NO: 65901 - DNA, 25 bp, Saccharomyces pastorianus
gacgaccacgtcaaatgtaccaaca

SEQ ID NO: 65902 - DNA, 25 bp, Saccharomyces pastorianus
gagagatcgctaaatgaccaggtta

SEQ ID NO: 65903 - DNA, 25 bp, Saccharomyces pastorianus
atatcatgcgatacagtcactgagg

SEQ ID NO: 65904 - DNA, 25 bp, Saccharomyces pastorianus
gagggcctccataatggtgtctgag

SEQ ID NO: 65905 - DNA, 25 bp, Saccharomyces pastorianus
tttagacacgacaaaggcgggcaat

SEQ ID NO: 65906 - DNA, 25 bp, Saccharomyces pastorianus
gataccatatcaaacgactacaaga

SEQ ID NO: 65907 - DNA, 25 bp, Saccharomyces pastorianus
acatcctaggatccacgttgggaga

SEQ ID NO: 65908 - DNA, 25 bp, Saccharomyces pastorianus
ctacctcagcttttgatttcccaaa

SEQ ID NO: 65909 - DNA, 25 bp, Saccharomyces pastorianus
tatacgcagcgaacggatgaacaaa

SEQ ID NO: 65910 - DNA, 25 bp, Saccharomyces pastorianus
gacccgtcgagcacatttcaatata

SEQ ID NO: 65911 - DNA, 25 bp, Saccharomyces pastorianus
gagcacatttcaatatacgcagcga

SEQ ID NO: 65912 - DNA, 25 bp, Saccharomyces pastorianus
aacaattctacctcagcttttgatt

SEQ ID NO: 65913 - DNA, 25 bp, Saccharomyces pastorianus
tttggtccttacatcctaggatcca

SEQ ID NO: 65914 - DNA, 25 bp, Saccharomyces pastorianus
gggattacgagcgacccgtcgagca

SEQ ID NO: 65915 - DNA, 25 bp, Saccharomyces pastorianus
aacaagtagccgttaagcttatcaa

SEQ ID NO: 65916 - DNA, 25 bp, Saccharomyces pastorianus
agccgttaagcttatcaaacgtgat

SEQ ID NO: 65917 - DNA, 25 bp, Saccharomyces pastorianus
gaataatgttgaagaaggcgagttt

SEQ ID NO: 65918 - DNA, 25 bp, Saccharomyces pastorianus
aatgttgaagaaggcgagtttataa

SEQ ID NO: 65919 - DNA, 25 bp, Saccharomyces pastorianus
gtcactgacaataaaacacctgaga

SEQ ID NO: 65920 - DNA, 25 bp, Saccharomyces pastorianus
tggtcactgacaataaaacacctga

SEQ ID NO: 65921 - DNA, 25 bp, Saccharomyces pastorianus
tgacaataaaacacctgagatgaac

SEQ ID NO: 65922 - DNA, 25 bp, Saccharomyces pastorianus
cactgacaataaaacacctgagatg

SEQ ID NO: 65923 - DNA, 25 bp, Saccharomyces pastorianus
gaaggcgagtttataatcgatttgt

SEQ ID NO: 65924 - DNA, 25 bp, Saccharomyces pastorianus
aacacctgagatgaacgtgacgaat

SEQ ID NO: 65925 - DNA, 25 bp, Saccharomyces pastorianus
cgatttgtatagtttacctgaagga

SEQ ID NO: 65926 - DNA, 25 bp, Saccharomyces pastorianus
gaagaaggcgagtttataatcgatt

SEQ ID NO: 65927 - DNA, 25 bp, Saccharomyces pastorianus
ggcgagtttataatcgatttgtata

SEQ ID NO: 65928 - DNA, 25 bp, Saccharomyces pastorianus
taaaccgctccctgactatttgata

SEQ ID NO: 65929 - DNA, 25 bp, Saccharomyces pastorianus
gattctggatttatacggtcctggt

SEQ ID NO: 65930 - DNA, 25 bp, Saccharomyces pastorianus
tcgcaatctccaaactcatctagta

SEQ ID NO: 65931 - DNA, 25 bp, Saccharomyces pastorianus
agtctcaccgggatgattctcatgg

SEQ ID NO: 65932 - DNA, 25 bp, Saccharomyces pastorianus
tcatcttcaggtgcttctgctaata

SEQ ID NO: 65933 - DNA, 25 bp, Saccharomyces pastorianus
atgccgtctaatgggcttttcggaa

SEQ ID NO: 65934 - DNA, 25 bp, Saccharomyces pastorianus
acaatctatcgtggatgctgccgtt

SEQ ID NO: 65935 - DNA, 25 bp, Saccharomyces pastorianus
gaagtcggtccatcatggtccaaga

SEQ ID NO: 65936 - DNA, 25 bp, Saccharomyces pastorianus
gaacaaaatttatctcaacgcccct

SEQ ID NO: 65937 - DNA, 25 bp, Saccharomyces pastorianus
gaataatagcggctcaggccccagc

SEQ ID NO: 65938 - DNA, 25 bp, Saccharomyces pastorianus
tgaagagtggtaaaccgctccctga

SEQ ID NO: 65939 - DNA, 25 bp, Saccharomyces pastorianus
ttaattttcccatctaacctagccg

SEQ ID NO: 65940 - DNA, 25 bp, Saccharomyces pastorianus
acacaggcctatattgccgggttga

SEQ ID NO: 65941 - DNA, 25 bp, Saccharomyces pastorianus
atcactgaactgtctcaactacgga

SEQ ID NO: 65942 - DNA, 25 bp, Saccharomyces pastorianus
aacgctggtcaagcttttcaagcag

SEQ ID NO: 65943 - DNA, 25 bp, Saccharomyces pastorianus
aagaggccacgaggctttcatcatc

SEQ ID NO: 65944 - DNA, 25 bp, Saccharomyces pastorianus
gctgcagtcgattttccttgatatt

SEQ ID NO: 65945 - DNA, 25 bp, Saccharomyces pastorianus
tcagaaaggccaacctgctgacttt

SEQ ID NO: 65946 - DNA, 25 bp, Saccharomyces pastorianus
aactacggattcgagctgctgcagt

SEQ ID NO: 65947 - DNA, 25 bp, Saccharomyces pastorianus
ctgactttcctgttgacatcactga

SEQ ID NO: 65948 - DNA, 25 bp, Saccharomyces pastorianus
aacctagccgatattctcgtgcgaa

SEQ ID NO: 65949 - DNA, 25 bp, Saccharomyces pastorianus
catcctttacctcgatctgaaaaca

SEQ ID NO: 65950 - DNA, 25 bp, Saccharomyces pastorianus
agtcaatgactttaagccccgcaaa

SEQ ID NO: 65951 - DNA, 25 bp, Saccharomyces pastorianus
acatcagacagtcctggcggttggt

SEQ ID NO: 65952 - DNA, 25 bp, Saccharomyces pastorianus
tcgtccttttcttctcaaacacgtt

SEQ ID NO: 65953 - DNA, 25 bp, Saccharomyces pastorianus
gaaatcaacgctgcattaggccaat

SEQ ID NO: 65954 - DNA, 25 bp, Saccharomyces pastorianus
aataatgatgcttccatcctggaat

SEQ ID NO: 65955 - DNA, 25 bp, Saccharomyces pastorianus
ttaatccttttgttggccactataa

SEQ ID NO: 65956 - DNA, 25 bp, Saccharomyces pastorianus
aactgcgtggtagcaacccgaatct

SEQ ID NO: 65957 - DNA, 25 bp, Saccharomyces pastorianus
agctttctacaatagcgtcgtcctt

SEQ ID NO: 65958 - DNA, 25 bp, Saccharomyces pastorianus
ggcggttggttaattctacctgtct

SEQ ID NO: 65959 - DNA, 25 bp, Saccharomyces pastorianus
taatgggctatctgttaaactgcgt

SEQ ID NO: 65960 - DNA, 25 bp, Saccharomyces pastorianus
cctggaattgccctacatgatgaat

SEQ ID NO: 65961 - DNA, 25 bp, Saccharomyces pastorianus
gacgccggtttcctcatttttgaag

SEQ ID NO: 65962 - DNA, 25 bp, Saccharomyces pastorianus
tagtaattcctgcttgacgccggtt

SEQ ID NO: 65963 - DNA, 25 bp, Saccharomyces pastorianus
gtttcaagatcatgtcggctaccgt

SEQ ID NO: 65964 - DNA, 25 bp, Saccharomyces pastorianus
atttttgaagacgtccagcccacaa

SEQ ID NO: 65965 - DNA, 25 bp, Saccharomyces pastorianus
tggacattctccaacgtaataagcg

SEQ ID NO: 65966 - DNA, 25 bp, Saccharomyces pastorianus
ccacaacttgtcactttaccagatt

SEQ ID NO: 65967 - DNA, 25 bp, Saccharomyces pastorianus
tcaggtcagcatttttccaagtgtc

SEQ ID NO: 65968 - DNA, 25 bp, Saccharomyces pastorianus
ggctaccgtgctaccgatatgtggt

SEQ ID NO: 65969 - DNA, 25 bp, Saccharomyces pastorianus
tacacatcgccaaagttttacggtt

SEQ ID NO: 65970 - DNA, 25 bp, Saccharomyces pastorianus
atatgtggtagtgccgtgacatccc

SEQ ID NO: 65971 - DNA, 25 bp, Saccharomyces pastorianus
gtgacatcccatctacgtagtaatt

SEQ ID NO: 65972 - DNA, 25 bp, Saccharomyces pastorianus
atagcgctattcaatgcactggcaa

SEQ ID NO: 65973 - DNA, 25 bp, Saccharomyces pastorianus
ttctttccagattacgcacgcgtta

SEQ ID NO: 65974 - DNA, 25 bp, Saccharomyces pastorianus
aatgtcataatcaggttcgtcaaga

SEQ ID NO: 65975 - DNA, 25 bp, Saccharomyces pastorianus
gcagatttgcatcccgggaatgtca

SEQ ID NO: 65976 - DNA, 25 bp, Saccharomyces pastorianus
aaggtcagcgatccctttgttgacg

SEQ ID NO: 65977 - DNA, 25 bp, Saccharomyces pastorianus
agaactccagaaacggccattgata

SEQ ID NO: 65978 - DNA, 25 bp, Saccharomyces pastorianus
ttttaacgaattacacgccccagat

SEQ ID NO: 65979 - DNA, 25 bp, Saccharomyces pastorianus
acgccccagatttgctttatcgata

SEQ ID NO: 65980 - DNA, 25 bp, Saccharomyces pastorianus
accatttcttcccttatcaaacaga

SEQ ID NO: 65981 - DNA, 25 bp, Saccharomyces pastorianus
tatcttctgaacatgattctttcca

SEQ ID NO: 65982 - DNA, 25 bp, Saccharomyces pastorianus
acgggacaaacattatatcttctga

SEQ ID NO: 65983 - DNA, 25 bp, Saccharomyces pastorianus
taagcaccagcgacaagtactcagt

SEQ ID NO: 65984 - DNA, 25 bp, Saccharomyces pastorianus
gcaagtatgagcaatgtctggacct

SEQ ID NO: 65985 - DNA, 25 bp, Saccharomyces pastorianus
tggattctgccaccgtttctactac

SEQ ID NO: 65986 - DNA, 25 bp, Saccharomyces pastorianus
ggtaaccaagcccatctctttagat

SEQ ID NO: 65987 - DNA, 25 bp, Saccharomyces pastorianus
aagccccatggcgtgaaggaccaat

SEQ ID NO: 65988 - DNA, 25 bp, Saccharomyces pastorianus
gacaaagtggatcctctgacccaga

SEQ ID NO: 65989 - DNA, 25 bp, Saccharomyces pastorianus
gcagcagttgcaacactatttccaa

SEQ ID NO: 65990 - DNA, 25 bp, Saccharomyces pastorianus
tggacctcagcagctacttgttggg

SEQ ID NO: 65991 - DNA, 25 bp, Saccharomyces pastorianus
gtatgacgtctccaataagcaccag

SEQ ID NO: 65992 - DNA, 25 bp, Saccharomyces pastorianus
gaaaagggccctgtacggacagata

SEQ ID NO: 65993 - DNA, 25 bp, Saccharomyces pastorianus
gaaaaccacagtaggaagccccatg

SEQ ID NO: 65994 - DNA, 25 bp, Saccharomyces pastorianus
tagcttctctaggtaacgttatcag

SEQ ID NO: 65995 - DNA, 25 bp, Saccharomyces pastorianus
gaatcctctcaaatggctgctttgg

SEQ ID NO: 65996 - DNA, 25 bp, Saccharomyces pastorianus
cccatctggcttacacactattgaa

SEQ ID NO: 65997 - DNA, 25 bp, Saccharomyces pastorianus
gaagaggctgttccattagcagaag

SEQ ID NO: 65998 - DNA, 25 bp, Saccharomyces pastorianus
gaatacatttacaccttgcgtggta

SEQ ID NO: 65999 - DNA, 25 bp, Saccharomyces pastorianus
gtctattatcgaacacacttttggt

SEQ ID NO: 66000 - DNA, 25 bp, Saccharomyces pastorianus
tgaagaatactctacctttgcctct

SEQ ID NO: 66001 - DNA, 25 bp, Saccharomyces pastorianus
gaagaagcctactcaatcgaagata

SEQ ID NO: 66002 - DNA, 25 bp, Saccharomyces pastorianus
ggtttcgattccatcaaggccaaat

SEQ ID NO: 66003 - DNA, 25 bp, Saccharomyces pastorianus
ctacctttgcctctgatgctgaaaa

SEQ ID NO: 66004 - DNA, 25 bp, Saccharomyces pastorianus
gctccagaagatgccgaaccagaat

SEQ ID NO: 66005 - DNA, 25 bp, Saccharomyces pastorianus
ttaaactcaggcgttcaacccgaca

SEQ ID NO: 66006 - DNA, 25 bp, Saccharomyces pastorianus
tgatttcatttcaaggacgccttcc

SEQ ID NO: 66007 - DNA, 25 bp, Saccharomyces pastorianus
tatcccggtaatgcttcggtttcta

SEQ ID NO: 66008 - DNA, 25 bp, Saccharomyces pastorianus
gcggccaattcgtcaaatcctagta

SEQ ID NO: 66009 - DNA, 25 bp, Saccharomyces pastorianus
gaaatgttgctgagcttgccaccag

SEQ ID NO: 66010 - DNA, 25 bp, Saccharomyces pastorianus
gcaaatcggctcatctactagtatc

SEQ ID NO: 66011 - DNA, 25 bp, Saccharomyces pastorianus
tagtatccctaacctgaaagcccgt

SEQ ID NO: 66012 - DNA, 25 bp, Saccharomyces pastorianus
gaagtattaactatgcccgaaggta

SEQ ID NO: 66013 - DNA, 25 bp, Saccharomyces pastorianus
gtgtccgtaaatcaaccaaggtcat

SEQ ID NO: 66014 - DNA, 25 bp, Saccharomyces pastorianus
agagtactaccacttcgacaacttc

SEQ ID NO: 66015 - DNA, 25 bp, Saccharomyces pastorianus
aagtggtgtcggtctcaattgaagt

SEQ ID NO: 66016 - DNA, 25 bp, Saccharomyces pastorianus
gaaattgctggatctggcccacaga

SEQ ID NO: 66017 - DNA, 25 bp, Saccharomyces pastorianus
accccgaccttgcagatttgtagat

SEQ ID NO: 66018 - DNA, 25 bp, Saccharomyces pastorianus
gtgccggtgctgttccaatgaatgc

SEQ ID NO: 66019 - DNA, 25 bp, Saccharomyces pastorianus
ccaaggcccctttagtagcaacaat

SEQ ID NO: 66020 - DNA, 25 bp, Saccharomyces pastorianus
tcaacgtggcgtctaatttgcatgt

SEQ ID NO: 66021 - DNA, 25 bp, Saccharomyces pastorianus
gacaacagcggtgcgttcaacgtgg

SEQ ID NO: 66022 - DNA, 25 bp, Saccharomyces pastorianus
actagcagtgcttctcttaacaaca

SEQ ID NO: 66023 - DNA, 25 bp, Saccharomyces pastorianus
caggacccatttaccacttttgatt

SEQ ID NO: 66024 - DNA, 25 bp, Saccharomyces pastorianus
aattcagcaggacttgcctctaacg

SEQ ID NO: 66025 - DNA, 25 bp, Saccharomyces pastorianus
aacgcgttgccgaatatgggttctt

SEQ ID NO: 66026 - DNA, 25 bp, Saccharomyces pastorianus
tgtcacaccaattgcgccagaaaac

SEQ ID NO: 66027 - DNA, 25 bp, Saccharomyces pastorianus
tagggtttttctgaaccgccagaga

SEQ ID NO: 66028 - DNA, 25 bp, Saccharomyces pastorianus
gccagagagccagatttcctcatag

SEQ ID NO: 66029 - DNA, 25 bp, Saccharomyces pastorianus
gatcgaaggtcacaacccgtagtct

SEQ ID NO: 66030 - DNA, 25 bp, Saccharomyces pastorianus
atgttaacgaactacttgggccaag

SEQ ID NO: 66031 - DNA, 25 bp, Saccharomyces pastorianus
attttctaggacactgacccagttt

SEQ ID NO: 66032 - DNA, 25 bp, Saccharomyces pastorianus
gatagtcttttcactgctccttcaa

SEQ ID NO: 66033 - DNA, 25 bp, Saccharomyces pastorianus
aatgggcctgccagacgggttaacg

SEQ ID NO: 66034 - DNA, 25 bp, Saccharomyces pastorianus
gacaactgtccattgaacgccgctg

SEQ ID NO: 66035 - DNA, 25 bp, Saccharomyces pastorianus
tagggacttcctttggagctgctat

SEQ ID NO: 66036 - DNA, 25 bp, Saccharomyces pastorianus
ttcaccgccttgcatacagatgacg

SEQ ID NO: 66037 - DNA, 25 bp, Saccharomyces pastorianus
tgccgctctatcgaatccgtgggat

SEQ ID NO: 66038 - DNA, 25 bp, Saccharomyces pastorianus
gcctgtaccttctagcaagatcgaa

SEQ ID NO: 66039 - DNA, 25 bp, Saccharomyces pastorianus
gccttctttatcgtcgctattgcaa

SEQ ID NO: 66040 - DNA, 25 bp, Saccharomyces pastorianus
acgttttatcactggctgtctacaa

SEQ ID NO: 66041 - DNA, 25 bp, Saccharomyces pastorianus
agacctacatggactacgtgatcgt

SEQ ID NO: 66042 - DNA, 25 bp, Saccharomyces pastorianus
tggttcatactacgtgtctctgggt

SEQ ID NO: 66043 - DNA, 25 bp, Saccharomyces pastorianus
aaggacttcccgaacttgattgtgt

SEQ ID NO: 66044 - DNA, 25 bp, Saccharomyces pastorianus
atcatactggcccttgtgtgctacc

SEQ ID NO: 66045 - DNA, 25 bp, Saccharomyces pastorianus
ttcaagccattctacggattcggtg

SEQ ID NO: 66046 - DNA, 25 bp, Saccharomyces pastorianus
ttgtggccgcagtccatgagacgtg

SEQ ID NO: 66047 - DNA, 25 bp, Saccharomyces pastorianus
gcacagttggatgccgacgagtact

SEQ ID NO: 66048 - DNA, 25 bp, Saccharomyces pastorianus
gagtcagccagaggtgtatccgcct

SEQ ID NO: 66049 - DNA, 25 bp, Saccharomyces pastorianus
gttggctaagagattgtctgaaaga

SEQ ID NO: 66050 - DNA, 25 bp, Saccharomyces pastorianus
ctcaaagagaagctgctgccgaata

SEQ ID NO: 66051 - DNA, 25 bp, Saccharomyces pastorianus
actcctcaaagattgcaaagaaaga

SEQ ID NO: 66052 - DNA, 25 bp, Saccharomyces pastorianus
acgctcaattgttggctaagagatt

SEQ ID NO: 66053 - DNA, 25 bp, Saccharomyces pastorianus
gaatacgctcaattgttggctaaga

SEQ ID NO: 66054 - DNA, 25 bp, Saccharomyces pastorianus
agacttacaccaaggctccaaagat

SEQ ID NO: 66055 - DNA, 25 bp, Saccharomyces pastorianus
ccaaggctccaaagatccaaagatt

SEQ ID NO: 66056 - DNA, 25 bp, Saccharomyces pastorianus
gaaagagacaccaaagagctttgaa

SEQ ID NO: 66057 - DNA, 25 bp, Saccharomyces pastorianus
gaagctgctgccgaatacgctcaat

SEQ ID NO: 66058 - DNA, 25 bp, Saccharomyces pastorianus
gaaaagacttacaccaaggctccaa

SEQ ID NO: 66059 - DNA, 25 bp, Saccharomyces pastorianus
tgctgccgaatacgctcaattgttg

SEQ ID NO: 66060 - DNA, 25 bp, Saccharomyces pastorianus
caagacggcgtcaaaatctcgaaat

SEQ ID NO: 66061 - DNA, 25 bp, Saccharomyces pastorianus
tagaggtcccactgactttcaatgt

SEQ ID NO: 66062 - DNA, 25 bp, Saccharomyces pastorianus
tggcctgcccgatttccaaataatc

SEQ ID NO: 66063 - DNA, 25 bp, Saccharomyces pastorianus
gtaccggagtttcattcttgcgatt

SEQ ID NO: 66064 - DNA, 25 bp, Saccharomyces pastorianus
agaagaaaaatcctggcctgcccga

SEQ ID NO: 66065 - DNA, 25 bp, Saccharomyces pastorianus
tgggatgccaactcttatgtcgaag

SEQ ID NO: 66066 - DNA, 25 bp, Saccharomyces pastorianus
atggtatacacctagctctcaaagt

SEQ ID NO: 66067 - DNA, 25 bp, Saccharomyces pastorianus
gaataccttgccttcaaaatcttta

SEQ ID NO: 66068 - DNA, 25 bp, Saccharomyces pastorianus
gacagttaagcccaattccaaaaag

SEQ ID NO: 66069 - DNA, 25 bp, Saccharomyces pastorianus
aggacgatctcgattgggatgccaa

SEQ ID NO: 66070 - DNA, 25 bp, Saccharomyces pastorianus
gataaatctcagcatttccctactt

SEQ ID NO: 66071 - DNA, 25 bp, Saccharomyces pastorianus
agcatccatggacactcatcaattg

SEQ ID NO: 66072 - DNA, 25 bp, Saccharomyces pastorianus
gaatattgcttctactgtcgttaac

SEQ ID NO: 66073 - DNA, 25 bp, Saccharomyces pastorianus
atcgctaacgaaacaggcttaactg

SEQ ID NO: 66074 - DNA, 25 bp, Saccharomyces pastorianus
ggcctaaatttgactggtgcagaca

SEQ ID NO: 66075 - DNA, 25 bp, Saccharomyces pastorianus
ggagttatgggatccatctcaatat

SEQ ID NO: 66076 - DNA, 25 bp, Saccharomyces pastorianus
aggctagatggtagtgtcgacccaa

SEQ ID NO: 66077 - DNA, 25 bp, Saccharomyces pastorianus
tttgatcctgatagtgttgcttctc

SEQ ID NO: 66078 - DNA, 25 bp, Saccharomyces pastorianus
gaatcccatgaacgatctgcaagca

SEQ ID NO: 66079 - DNA, 25 bp, Saccharomyces pastorianus
gattgtctactgttaactaccaaag

SEQ ID NO: 66080 - DNA, 25 bp, Saccharomyces pastorianus
ataatgattcacaaccagccaaggg

SEQ ID NO: 66081 - DNA, 25 bp, Saccharomyces pastorianus
gtatatgccttctgtaacgtacatg

SEQ ID NO: 66082 - DNA, 25 bp, Saccharomyces pastorianus
aagcatgttgactttgcgccaacct

SEQ ID NO: 66083 - DNA, 25 bp, Saccharomyces pastorianus
aaatgccgctagaaaggctgaatct

SEQ ID NO: 66084 - DNA, 25 bp, Saccharomyces pastorianus
aatgccgctagaaaggctgaatctt

SEQ ID NO: 66085 - DNA, 25 bp, Saccharomyces pastorianus
agcatgttgactttgcgccaacctc

SEQ ID NO: 66086 - DNA, 25 bp, Saccharomyces pastorianus
aaagcatgttgactttgcgccaacc

SEQ ID NO: 66087 - DNA, 25 bp, Saccharomyces pastorianus
atgccgctagaaaggctgaatcttc

SEQ ID NO: 66088 - DNA, 25 bp, Saccharomyces pastorianus
gttgactttgcgccaacctctccat

SEQ ID NO: 66089 - DNA, 25 bp, Saccharomyces pastorianus
agaaatgccgctagaaaggctgaat

SEQ ID NO: 66090 - DNA, 25 bp, Saccharomyces pastorianus
gcatgttgactttgcgccaacctct

SEQ ID NO: 66091 - DNA, 25 bp, Saccharomyces pastorianus
tgccgctagaaaggctgaatcttct

SEQ ID NO: 66092 - DNA, 25 bp, Saccharomyces pastorianus
gaaatgccgctagaaaggctgaatc

SEQ ID NO: 66093 - DNA, 25 bp, Saccharomyces pastorianus
agaaagcacggtgccgttcatttgt

SEQ ID NO: 66094 - DNA, 25 bp, Saccharomyces pastorianus
taacgtcaccaagtcttccgttggt

SEQ ID NO: 66095 - DNA, 25 bp, Saccharomyces pastorianus
gtgttgtttataacgtcaccaagtc

SEQ ID NO: 66096 - DNA, 25 bp, Saccharomyces pastorianus
gtttataacgtcaccaagtcttccg

SEQ ID NO: 66097 - DNA, 25 bp, Saccharomyces pastorianus
aagcacggtgccgttcatttgtcca

SEQ ID NO: 66098 - DNA, 25 bp, Saccharomyces pastorianus
tataacgtcaccaagtcttccgttg

SEQ ID NO: 66099 - DNA, 25 bp, Saccharomyces pastorianus
cggtgccgttcatttgtccacctac

SEQ ID NO: 66100 - DNA, 25 bp, Saccharomyces pastorianus
acggtgccgttcatttgtccaccta

SEQ ID NO: 66101 - DNA, 25 bp, Saccharomyces pastorianus
gttgtttataacgtcaccaagtctt

SEQ ID NO: 66102 - DNA, 25 bp, Saccharomyces pastorianus
tcagaaagcacggtgccgttcattt

SEQ ID NO: 66103 - DNA, 25 bp, Saccharomyces pastorianus
agcacggtgccgttcatttgtccac

SEQ ID NO: 66104 - DNA, 25 bp, Saccharomyces pastorianus
agagacaaccagctcaaccaagaga

SEQ ID NO: 66105 - DNA, 25 bp, Saccharomyces pastorianus
tttctactgaaggtaacgttcctca

SEQ ID NO: 66106 - DNA, 25 bp, Saccharomyces pastorianus
tatccaaaagggtatgccacacaag

SEQ ID NO: 66107 - DNA, 25 bp, Saccharomyces pastorianus
tactgaaggtaacgttcctcaaact

SEQ ID NO: 66108 - DNA, 25 bp, Saccharomyces pastorianus
tctacaaggttggtgacattgtcga

SEQ ID NO: 66109 - DNA, 25 bp, Saccharomyces pastorianus
tccaaaagggtatgccacacaagtt

SEQ ID NO: 66110 - DNA, 25 bp, Saccharomyces pastorianus
gccaatggttctatccaaaagggta

SEQ ID NO: 66111 - DNA, 25 bp, Saccharomyces pastorianus
agacaaccagctcaaccaagagaat

SEQ ID NO: 66112 - DNA, 25 bp, Saccharomyces pastorianus
tgaagagacaaccagctcaaccaag

SEQ ID NO: 66113 - DNA, 25 bp, Saccharomyces pastorianus
gtccaattgaagagacaaccagctc

SEQ ID NO: 66114 - DNA, 25 bp, Saccharomyces pastorianus
ggttctatccaaaagggtatgccac

SEQ ID NO: 66115 - DNA, 25 bp, Saccharomyces pastorianus
atgacaaaggtatccccatcgttct

SEQ ID NO: 66116 - DNA, 25 bp, Saccharomyces pastorianus
ggcggtactccatgtagtacagatg

SEQ ID NO: 66117 - DNA, 25 bp, Saccharomyces pastorianus
gaagccacaaattcaacctgtacga

SEQ ID NO: 66118 - DNA, 25 bp, Saccharomyces pastorianus
aaagctcggtagattcacgaatcct

SEQ ID NO: 66119 - DNA, 25 bp, Saccharomyces pastorianus
aagcaggaccaaatgaggccatcaa

SEQ ID NO: 66120 - DNA, 25 bp, Saccharomyces pastorianus
aatggcctgactttgaactctttat

SEQ ID NO: 66121 - DNA, 25 bp, Saccharomyces pastorianus
aaaactagtgcccatttccactatt

SEQ ID NO: 66122 - DNA, 25 bp, Saccharomyces pastorianus
atgtgaccgtggcataaagctcggt

SEQ ID NO: 66123 - DNA, 25 bp, Saccharomyces pastorianus
attaatggttccactgaagccacaa

SEQ ID NO: 66124 - DNA, 25 bp, Saccharomyces pastorianus
atcgttctcgcaaaatgcacccaaa

SEQ ID NO: 66125 - DNA, 25 bp, Saccharomyces pastorianus
gaaagttagcgaagattcccatttt

SEQ ID NO: 66126 - DNA, 25 bp, Saccharomyces pastorianus
ggttctgaccttacatcgttagcaa

SEQ ID NO: 66127 - DNA, 25 bp, Saccharomyces pastorianus
agtgtatcgccggaatccctacaag

SEQ ID NO: 66128 - DNA, 25 bp, Saccharomyces pastorianus
gagcttctcattcaatggtcttcgt

SEQ ID NO: 66129 - DNA, 25 bp, Saccharomyces pastorianus
gccaccaatttaccttgggctattg

SEQ ID NO: 66130 - DNA, 25 bp, Saccharomyces pastorianus
aaatgcgactgctcaggctgaagat

SEQ ID NO: 66131 - DNA, 25 bp, Saccharomyces pastorianus
catggccaaaaaactgtcaccttct

SEQ ID NO: 66132 - DNA, 25 bp, Saccharomyces pastorianus
tatatattccccttccagattacga

SEQ ID NO: 66133 - DNA, 25 bp, Saccharomyces pastorianus
tggtcttcgttatcaaatgcgactg

SEQ ID NO: 66134 - DNA, 25 bp, Saccharomyces pastorianus
gatcgattcgatgttgactgctcgt

SEQ ID NO: 66135 - DNA, 25 bp, Saccharomyces pastorianus
agagtacttgttttgggagccacca

SEQ ID NO: 66136 - DNA, 25 bp, Saccharomyces pastorianus
tgttgactgctcgttctgataatga

SEQ ID NO: 66137 - DNA, 25 bp, Saccharomyces pastorianus
ttgacgtctataatctcacccattg

SEQ ID NO: 66138 - DNA, 25 bp, Saccharomyces pastorianus
gatattgttttcttatgctctctca

SEQ ID NO: 66139 - DNA, 25 bp, Saccharomyces pastorianus
gcctccacatctattgacgtctata

SEQ ID NO: 66140 - DNA, 25 bp, Saccharomyces pastorianus
atctggtttatttaattctcgaagg

SEQ ID NO: 66141 - DNA, 25 bp, Saccharomyces pastorianus
tatgctctctcatagacaccagatc

SEQ ID NO: 66142 - DNA, 25 bp, Saccharomyces pastorianus
ataatctcacccattgcaaggcttt

SEQ ID NO: 66143 - DNA, 25 bp, Saccharomyces pastorianus
aaactcagaaggctttcatgcaaga

SEQ ID NO: 66144 - DNA, 25 bp, Saccharomyces pastorianus
tccctctgcatctctggataaatcg

SEQ ID NO: 66145 - DNA, 25 bp, Saccharomyces pastorianus
gatcaagttgatcgccttcagatat

SEQ ID NO: 66146 - DNA, 25 bp, Saccharomyces pastorianus
agatgatgaaagctggcctccacat

SEQ ID NO: 66147 - DNA, 25 bp, Saccharomyces pastorianus
gacaccagatccgaaactaaactca

SEQ ID NO: 66148 - DNA, 25 bp, Saccharomyces pastorianus
gcagaatacgcatccatcgagaatg

SEQ ID NO: 66149 - DNA, 25 bp, Saccharomyces pastorianus
ggaacccctgtaatgtgaaatttga

SEQ ID NO: 66150 - DNA, 25 bp, Saccharomyces pastorianus
tgatgttgaagccaagaaccacatt

SEQ ID NO: 66151 - DNA, 25 bp, Saccharomyces pastorianus
agggtgatattctctttgacagtga

SEQ ID NO: 66152 - DNA, 25 bp, Saccharomyces pastorianus
gttgtgaagcacactggctctcatt

SEQ ID NO: 66153 - DNA, 25 bp, Saccharomyces pastorianus
gaaccacattcaaaccattacatct

SEQ ID NO: 66154 - DNA, 25 bp, Saccharomyces pastorianus
cgtagaaagcgcatcaattatcatt

SEQ ID NO: 66155 - DNA, 25 bp, Saccharomyces pastorianus
gttcaactgcctgaaatcttggtaa

SEQ ID NO: 66156 - DNA, 25 bp, Saccharomyces pastorianus
agtgctctaaagtatccttattggc

SEQ ID NO: 66157 - DNA, 25 bp, Saccharomyces pastorianus
gaatgacatataccaggaacccctg

SEQ ID NO: 66158 - DNA, 25 bp, Saccharomyces pastorianus
attcacgcggccactacgtttgcta

SEQ ID NO: 66159 - DNA, 25 bp, Saccharomyces pastorianus
tctactgtttggctttacggaaaag

SEQ ID NO: 66160 - DNA, 25 bp, Saccharomyces pastorianus
aaggccgtcctagttagggatatgc

SEQ ID NO: 66161 - DNA, 25 bp, Saccharomyces pastorianus
ggaggtgctctatttttaggttcta

SEQ ID NO: 66162 - DNA, 25 bp, Saccharomyces pastorianus
tggctgtctttattttcgggctaat

SEQ ID NO: 66163 - DNA, 25 bp, Saccharomyces pastorianus
agaaaccaactgatgctgctaggaa

SEQ ID NO: 66164 - DNA, 25 bp, Saccharomyces pastorianus
gtatgctataggaatgctctcgttg

SEQ ID NO: 66165 - DNA, 25 bp, Saccharomyces pastorianus
tatgtaaaggcgtcctccaagacct

SEQ ID NO: 66166 - DNA, 25 bp, Saccharomyces pastorianus
ataagctgaggttcttgttaggtca

SEQ ID NO: 66167 - DNA, 25 bp, Saccharomyces pastorianus
gcaattacggctacatggctgtctt

SEQ ID NO: 66168 - DNA, 25 bp, Saccharomyces pastorianus
gaaggtactcctaaccatatgtaaa

SEQ ID NO: 66169 - DNA, 25 bp, Saccharomyces pastorianus
gaacaggacgatttgctttgcgata

SEQ ID NO: 66170 - DNA, 25 bp, Saccharomyces pastorianus
tacaagatgcatacctactccttct

SEQ ID NO: 66171 - DNA, 25 bp, Saccharomyces pastorianus
gctctgaaatccctgaaacactacg

SEQ ID NO: 66172 - DNA, 25 bp, Saccharomyces pastorianus
caaaggttcctcgtggcacttggat

SEQ ID NO: 66173 - DNA, 25 bp, Saccharomyces pastorianus
tccaccggtcctttgtttttgagtg

SEQ ID NO: 66174 - DNA, 25 bp, Saccharomyces pastorianus
aaccacattctgtcgtgtgtcgtca

SEQ ID NO: 66175 - DNA, 25 bp, Saccharomyces pastorianus
aaatactggttcattccttacataa

SEQ ID NO: 66176 - DNA, 25 bp, Saccharomyces pastorianus
acataaccattatgggctccaccgg

SEQ ID NO: 66177 - DNA, 25 bp, Saccharomyces pastorianus
accataagaatcctgcaacctgctt

SEQ ID NO: 66178 - DNA, 25 bp, Saccharomyces pastorianus
gtttgtctttggctttttcatccta

SEQ ID NO: 66179 - DNA, 25 bp, Saccharomyces pastorianus
gaattggaagttcggctctttcaaa

SEQ ID NO: 66180 - DNA, 25 bp, Saccharomyces pastorianus
tctttcaaagccagggtcgctgcaa

SEQ ID NO: 66181 - DNA, 25 bp, Saccharomyces pastorianus
gacatcgcatattctgcgtccagta

SEQ ID NO: 66182 - DNA, 25 bp, Saccharomyces pastorianus
aagggcctatcgaaattgcgccttc

SEQ ID NO: 66183 - DNA, 25 bp, Saccharomyces pastorianus
gaacaaggccagaccgcattgtcaa

SEQ ID NO: 66184 - DNA, 25 bp, Saccharomyces pastorianus
gaataccaggtactgcacaagccct

SEQ ID NO: 66185 - DNA, 25 bp, Saccharomyces pastorianus
aataattacttctctcactccagat

SEQ ID NO: 66186 - DNA, 25 bp, Saccharomyces pastorianus
cagtacaaactatttcgctccacaa

SEQ ID NO: 66187 - DNA, 25 bp, Saccharomyces pastorianus
aattgtcaagctggctcatcgtgtc

SEQ ID NO: 66188 - DNA, 25 bp, Saccharomyces pastorianus
atgctcatattcttccaaacgggtt

SEQ ID NO: 66189 - DNA, 25 bp, Saccharomyces pastorianus
gagccctgaggccttacattcggat

SEQ ID NO: 66190 - DNA, 25 bp, Saccharomyces pastorianus
atatcacctccaatgtctgctaata

SEQ ID NO: 66191 - DNA, 25 bp, Saccharomyces pastorianus
ttcttcttcgtcatacgtcaactac

SEQ ID NO: 66192 - DNA, 25 bp, Saccharomyces pastorianus
gggttggatcttctcaaaaacttga

SEQ ID NO: 66193 - DNA, 25 bp, Saccharomyces pastorianus
ctcttttggagctgacgtctaattt

SEQ ID NO: 66194 - DNA, 25 bp, Saccharomyces pastorianus
aaattatttccatgttatactgcca

SEQ ID NO: 66195 - DNA, 25 bp, Saccharomyces pastorianus
gttatactgccatctttattgaaaa

SEQ ID NO: 66196 - DNA, 25 bp, Saccharomyces pastorianus
gcaaacggcaatgataacgacggtt

SEQ ID NO: 66197 - DNA, 25 bp, Saccharomyces pastorianus
gattggctgcttgctcttttggagc

SEQ ID NO: 66198 - DNA, 25 bp, Saccharomyces pastorianus
gagcagtgacctcacaacgaaggat

SEQ ID NO: 66199 - DNA, 25 bp, Saccharomyces pastorianus
taacgacggttacaactggagaaat

SEQ ID NO: 66200 - DNA, 25 bp, Saccharomyces pastorianus
agaacttcaggttcgaatacatgaa

SEQ ID NO: 66201 - DNA, 25 bp, Saccharomyces pastorianus
tgttgaattcgagtggtgcggccac

SEQ ID NO: 66202 - DNA, 25 bp, Saccharomyces pastorianus
acggactctatctcacatctattag

SEQ ID NO: 66203 - DNA, 25 bp, Saccharomyces pastorianus
ttcacgacgttccagcgcagtctgc

SEQ ID NO: 66204 - DNA, 25 bp, Saccharomyces pastorianus
agcgcagtctgcagcagcagcaatc

SEQ ID NO: 66205 - DNA, 25 bp, Saccharomyces pastorianus
ttgagtttcccgtgagctcgagcaa

SEQ ID NO: 66206 - DNA, 25 bp, Saccharomyces pastorianus
atatctttgcctttgagtttcccgt

SEQ ID NO: 66207 - DNA, 25 bp, Saccharomyces pastorianus
tcccgtgagctcgagcaatgttgat

SEQ ID NO: 66208 - DNA, 25 bp, Saccharomyces pastorianus
ggcagaggttcgtcttcaccacgca

SEQ ID NO: 66209 - DNA, 25 bp, Saccharomyces pastorianus
aagctgaacccgatgaagacgacga

SEQ ID NO: 66210 - DNA, 25 bp, Saccharomyces pastorianus
aagacgacgaagagggcactgactt

SEQ ID NO: 66211 - DNA, 25 bp, Saccharomyces pastorianus
gaaatccgactctcgtcccatatct

SEQ ID NO: 66212 - DNA, 25 bp, Saccharomyces pastorianus
cactgacttggccattgaggacgga

SEQ ID NO: 66213 - DNA, 25 bp, Saccharomyces pastorianus
gcacacgcgaagctgaacccgatga

SEQ ID NO: 66214 - DNA, 25 bp, Saccharomyces pastorianus
gacatcttgcaagcatctgctgtca

SEQ ID NO: 66215 - DNA, 25 bp, Saccharomyces pastorianus
gcacgtttgccccaggtgctggaaa

SEQ ID NO: 66216 - DNA, 25 bp, Saccharomyces pastorianus
atagagcgattcttgcgccaatctt

SEQ ID NO: 66217 - DNA, 25 bp, Saccharomyces pastorianus
gaagtgtgcccagaaatcaacgact

SEQ ID NO: 66218 - DNA, 25 bp, Saccharomyces pastorianus
cgaagttgcaaatcttggtcgaaca

SEQ ID NO: 66219 - DNA, 25 bp, Saccharomyces pastorianus
aagtccaaactacgctatttcatgt

SEQ ID NO: 66220 - DNA, 25 bp, Saccharomyces pastorianus
aacagcagcttaccagccattgaat

SEQ ID NO: 66221 - DNA, 25 bp, Saccharomyces pastorianus
agttccagcgagctttgcgacatct

SEQ ID NO: 66222 - DNA, 25 bp, Saccharomyces pastorianus
gccaatcttacctgttatggtccaa

SEQ ID NO: 66223 - DNA, 25 bp, Saccharomyces pastorianus
aactcacgttactgttttcaccgat

SEQ ID NO: 66224 - DNA, 25 bp, Saccharomyces pastorianus
aacaaccatttgtcagcgttttatt

SEQ ID NO: 66225 - DNA, 25 bp, Saccharomyces pastorianus
acattgttactgtcgttcgtgtttg

SEQ ID NO: 66226 - DNA, 25 bp, Saccharomyces pastorianus
tattactagggctgctggtccattc

SEQ ID NO: 66227 - DNA, 25 bp, Saccharomyces pastorianus
ggagggttttactacatgatgtcta

SEQ ID NO: 66228 - DNA, 25 bp, Saccharomyces pastorianus
tgtcgttcgtgtttggatctggtcc

SEQ ID NO: 66229 - DNA, 25 bp, Saccharomyces pastorianus
ggtgtcatgttcttacaaatttcat

SEQ ID NO: 66230 - DNA, 25 bp, Saccharomyces pastorianus
gggtattgttttggctataggttct

SEQ ID NO: 66231 - DNA, 25 bp, Saccharomyces pastorianus
gggtgccgtcttctctgtcgatatc

SEQ ID NO: 66232 - DNA, 25 bp, Saccharomyces pastorianus
atgatgtctacgtctgaaacctttg

SEQ ID NO: 66233 - DNA, 25 bp, Saccharomyces pastorianus
tccattctggtcttcgattccgtcg

SEQ ID NO: 66234 - DNA, 25 bp, Saccharomyces pastorianus
gtctgaaacctttgaccgattgatg

SEQ ID NO: 66235 - DNA, 25 bp, Saccharomyces pastorianus
ttcgattccgtcgtggcagttagcg

SEQ ID NO: 66236 - DNA, 25 bp, Saccharomyces pastorianus
ttcaaatcctttgttctctccgaaa

SEQ ID NO: 66237 - DNA, 25 bp, Saccharomyces pastorianus
gaataaccaattcaaatcctttgtt

SEQ ID NO: 66238 - DNA, 25 bp, Saccharomyces pastorianus
attcaaatcctttgttctctccgaa

SEQ ID NO: 66239 - DNA, 25 bp, Saccharomyces pastorianus
tcgttatccacccattgttttttct

SEQ ID NO: 66240 - DNA, 25 bp, Saccharomyces pastorianus
ttaccgttaaccataattattgact

SEQ ID NO: 66241 - DNA, 25 bp, Saccharomyces pastorianus
tcaaatcctttgttctctccgaaat

SEQ ID NO: 66242 - DNA, 25 bp, Saccharomyces pastorianus
accgttaaccataattattgactca

SEQ ID NO: 66243 - DNA, 25 bp, Saccharomyces pastorianus
caaatcctttgttctctccgaaatg

SEQ ID NO: 66244 - DNA, 25 bp, Saccharomyces pastorianus
caattcaaatcctttgttctctccg

SEQ ID NO: 66245 - DNA, 25 bp, Saccharomyces pastorianus
ttgactcatcaatgaataaccaatt

SEQ ID NO: 66246 - DNA, 25 bp, Saccharomyces pastorianus
aattcaaatcctttgttctctccga

SEQ ID NO: 66247 - DNA, 25 bp, Saccharomyces pastorianus
taagtgtgattcacccaaacctcgc

SEQ ID NO: 66248 - DNA, 25 bp, Saccharomyces pastorianus
aagggattacacatttcgttatcaa

SEQ ID NO: 66249 - DNA, 25 bp, Saccharomyces pastorianus
gacggtggctactttattgacggaa

SEQ ID NO: 66250 - DNA, 25 bp, Saccharomyces pastorianus
gtaccggtattagaactaccatctg

SEQ ID NO: 66251 - DNA, 25 bp, Saccharomyces pastorianus
ggatgtgatccaaccggtaagaaaa

SEQ ID NO: 66252 - DNA, 25 bp, Saccharomyces pastorianus
aaacctcgctattcgaaactccagc

SEQ ID NO: 66253 - DNA, 25 bp, Saccharomyces pastorianus
aaactccagccatcaagattccgtt

SEQ ID NO: 66254 - DNA, 25 bp, Saccharomyces pastorianus
gttcttacaaagacggtggctactt

SEQ ID NO: 66255 - DNA, 25 bp, Saccharomyces pastorianus
gcataccgaatggttcaatgtaccg

SEQ ID NO: 66256 - DNA, 25 bp, Saccharomyces pastorianus
acagtggactcgaggcttttagaat

SEQ ID NO: 66257 - DNA, 25 bp, Saccharomyces pastorianus
ctaccatctgtgttaacgaccatcg

SEQ ID NO: 66258 - DNA, 25 bp, Saccharomyces pastorianus
gtattcccgtgaacacgttttccag

SEQ ID NO: 66259 - DNA, 25 bp, Saccharomyces pastorianus
gaagctgatcttcgacatcatgggt

SEQ ID NO: 66260 - DNA, 25 bp, Saccharomyces pastorianus
agggatctacgccaagtcttacaac

SEQ ID NO: 66261 - DNA, 25 bp, Saccharomyces pastorianus
agaacaagatactccaccgtgacct

SEQ ID NO: 66262 - DNA, 25 bp, Saccharomyces pastorianus
aggagccactggacgggaaccttat

SEQ ID NO: 66263 - DNA, 25 bp, Saccharomyces pastorianus
accgagtcactatggctggcagtca

SEQ ID NO: 66264 - DNA, 25 bp, Saccharomyces pastorianus
gtgacctgaagcctcaaaacctatt

SEQ ID NO: 66265 - DNA, 25 bp, Saccharomyces pastorianus
gacatatggtcgtgtggctgcatcc

SEQ ID NO: 66266 - DNA, 25 bp, Saccharomyces pastorianus
actgttcccaggtaccaatgacgag

SEQ ID NO: 66267 - DNA, 25 bp, Saccharomyces pastorianus
ttttccagcgaggttgtcacactat

SEQ ID NO: 66268 - DNA, 25 bp, Saccharomyces pastorianus
aaggactagcgttctgccacgagaa

SEQ ID NO: 66269 - DNA, 25 bp, Saccharomyces pastorianus
gtgcatacccagtgagagctactcc

SEQ ID NO: 66270 - DNA, 25 bp, Saccharomyces pastorianus
agtaccctgttgcaaactatcgcag

SEQ ID NO: 66271 - DNA, 25 bp, Saccharomyces pastorianus
atatgcgcccaactgatgactcaat

SEQ ID NO: 66272 - DNA, 25 bp, Saccharomyces pastorianus
aaggcttttaccaagttctgcgaga

SEQ ID NO: 66273 - DNA, 25 bp, Saccharomyces pastorianus
aacgcacccgtgaaggatatgccta

SEQ ID NO: 66274 - DNA, 25 bp, Saccharomyces pastorianus
cttcaacctgctggactacaagtgc

SEQ ID NO: 66275 - DNA, 25 bp, Saccharomyces pastorianus
aaagaaaaatccctacgcacgcaag

SEQ ID NO: 66276 - DNA, 25 bp, Saccharomyces pastorianus
gaggacattccgtttctggacaagc

SEQ ID NO: 66277 - DNA, 25 bp, Saccharomyces pastorianus
agttgttcactttgtccgatctaaa

SEQ ID NO: 66278 - DNA, 25 bp, Saccharomyces pastorianus
taaaaactgctgtgacgtggcccac

SEQ ID NO: 66279 - DNA, 25 bp, Saccharomyces pastorianus
tccctagaggtttacgagtcgctgt

SEQ ID NO: 66280 - DNA, 25 bp, Saccharomyces pastorianus
taaaggaaatccagccgggctcact

SEQ ID NO: 66281 - DNA, 25 bp, Saccharomyces pastorianus
aacccggctgaatggttctcagaag

SEQ ID NO: 66282 - DNA, 25 bp, Saccharomyces pastorianus
gtgtccctccattaagtgaactcat

SEQ ID NO: 66283 - DNA, 25 bp, Saccharomyces pastorianus
gtcgatataacgaacccggctgaat

SEQ ID NO: 66284 - DNA, 25 bp, Saccharomyces pastorianus
agtgaactcatacatctttcctgtc

SEQ ID NO: 66285 - DNA, 25 bp, Saccharomyces pastorianus
gccagagcaatgatgtcagcacttt

SEQ ID NO: 66286 - DNA, 25 bp, Saccharomyces pastorianus
tggatcgtggatactatgcaggacc

SEQ ID NO: 66287 - DNA, 25 bp, Saccharomyces pastorianus
gatggcgctcacaatgtcgatataa

SEQ ID NO: 66288 - DNA, 25 bp, Saccharomyces pastorianus
aactccatctggaaggcgattttga

SEQ ID NO: 66289 - DNA, 25 bp, Saccharomyces pastorianus
ggctcacttcgggtaccgtagagat

SEQ ID NO: 66290 - DNA, 25 bp, Saccharomyces pastorianus
gcaaacttttgaccacacgtatgaa

SEQ ID NO: 66291 - DNA, 25 bp, Saccharomyces pastorianus
gcgttttccccaacagtcaagtgaa

SEQ ID NO: 66292 - DNA, 25 bp, Saccharomyces pastorianus
ggcgtttgctgagatgttcattcac

SEQ ID NO: 66293 - DNA, 25 bp, Saccharomyces pastorianus
gattcttccggctcatttgaaacga

SEQ ID NO: 66294 - DNA, 25 bp, Saccharomyces pastorianus
tgcgattccatggtccgacttggga

SEQ ID NO: 66295 - DNA, 25 bp, Saccharomyces pastorianus
gaagttcagctactatgcgggcgat

SEQ ID NO: 66296 - DNA, 25 bp, Saccharomyces pastorianus
gggcaagctgttcccaagaaacacc

SEQ ID NO: 66297 - DNA, 25 bp, Saccharomyces pastorianus
gaaggctcaactgatgcgattccat

SEQ ID NO: 66298 - DNA, 25 bp, Saccharomyces pastorianus
aagctggaccattacggacgtagga

SEQ ID NO: 66299 - DNA, 25 bp, Saccharomyces pastorianus
acctggatccgtatagttctagtgt

SEQ ID NO: 66300 - DNA, 25 bp, Saccharomyces pastorianus
actgtcttgtttccattgttcacca

SEQ ID NO: 66301 - DNA, 25 bp, Saccharomyces pastorianus
tcgcgggtatttgacgttggcatct

SEQ ID NO: 66302 - DNA, 25 bp, Saccharomyces pastorianus
attagagtccttccttgtatgttga

SEQ ID NO: 66303 - DNA, 25 bp, Saccharomyces pastorianus
agagcaaagccatctgaccgcaatt

SEQ ID NO: 66304 - DNA, 25 bp, Saccharomyces pastorianus
tgcaggaaatcatgccttcttatat

SEQ ID NO: 66305 - DNA, 25 bp, Saccharomyces pastorianus
gccaatctgtcgcatcactttgaaa

SEQ ID NO: 66306 - DNA, 25 bp, Saccharomyces pastorianus
gaaccagatatctccttcattaggc

SEQ ID NO: 66307 - DNA, 25 bp, Saccharomyces pastorianus
tagtctctactttcaagagcctcaa

SEQ ID NO: 66308 - DNA, 25 bp, Saccharomyces pastorianus
cattgccaggtttactctttcgata

SEQ ID NO: 66309 - DNA, 25 bp, Saccharomyces pastorianus
caggacgttgtcattgtggatactc

SEQ ID NO: 66310 - DNA, 25 bp, Saccharomyces pastorianus
gatactcgtgagttcaatgcttcat

SEQ ID NO: 66311 - DNA, 25 bp, Saccharomyces pastorianus
atgggccgaacattgcagtgagtat

SEQ ID NO: 66312 - DNA, 25 bp, Saccharomyces pastorianus
gaaacatgtatctgttcacttcaat

SEQ ID NO: 66313 - DNA, 25 bp, Saccharomyces pastorianus
ttgaacatctccatgatcgggttga

SEQ ID NO: 66314 - DNA, 25 bp, Saccharomyces pastorianus
aaacgggcaaggctttcttctcgca

SEQ ID NO: 66315 - DNA, 25 bp, Saccharomyces pastorianus
tatcggagtcgttcaagcaggccac

SEQ ID NO: 66316 - DNA, 25 bp, Saccharomyces pastorianus
ttggtgggttctcgcgacttgaaaa

SEQ ID NO: 66317 - DNA, 25 bp, Saccharomyces pastorianus
ccccatgctggctttgaaggcggaa

SEQ ID NO: 66318 - DNA, 25 bp, Saccharomyces pastorianus
gaacagcaattggtttcctctcata

SEQ ID NO: 66319 - DNA, 25 bp, Saccharomyces pastorianus
gtccccggcttcattaaagtcttgg

SEQ ID NO: 66320 - DNA, 25 bp, Saccharomyces pastorianus
tcggtgatgtcactttaggccccat

SEQ ID NO: 66321 - DNA, 25 bp, Saccharomyces pastorianus
gtccccttctggagcatttgaacat

SEQ ID NO: 66322 - DNA, 25 bp, Saccharomyces pastorianus
cgaacgtgctgtattgtcaacctca

SEQ ID NO: 66323 - DNA, 25 bp, Saccharomyces pastorianus
attcaatctatactctctgcgggtt

SEQ ID NO: 66324 - DNA, 25 bp, Saccharomyces pastorianus
gaggatatggacagcacgtttcagc

SEQ ID NO: 66325 - DNA, 25 bp, Saccharomyces pastorianus
atgtttcaattcgatcctgacgtag

SEQ ID NO: 66326 - DNA, 25 bp, Saccharomyces pastorianus
gtttcaattcgatcctgacgtagac

SEQ ID NO: 66327 - DNA, 25 bp, Saccharomyces pastorianus
atcctgacgtagacactaaatgggc

SEQ ID NO: 66328 - DNA, 25 bp, Saccharomyces pastorianus
gacgtagacactaaatgggcagaac

SEQ ID NO: 66329 - DNA, 25 bp, Saccharomyces pastorianus
gaacaggaggatatggacagcacgt

SEQ ID NO: 66330 - DNA, 25 bp, Saccharomyces pastorianus
aattcgatcctgacgtagacactaa

SEQ ID NO: 66331 - DNA, 25 bp, Saccharomyces pastorianus
ttcgatcctgacgtagacactaaat

SEQ ID NO: 66332 - DNA, 25 bp, Saccharomyces pastorianus
ggatatggacagcacgtttcagcgc

SEQ ID NO: 66333 - DNA, 25 bp, Saccharomyces pastorianus
tcaattcgatcctgacgtagacact

SEQ ID NO: 66334 - DNA, 25 bp, Saccharomyces pastorianus
tagacactaaatgggcagaacagga

SEQ ID NO: 66335 - DNA, 25 bp, Saccharomyces pastorianus
aataccagactacctcaaccagtta

SEQ ID NO: 66336 - DNA, 25 bp, Saccharomyces pastorianus
gtggtgcttaagtgctcaatcgagt

SEQ ID NO: 66337 - DNA, 25 bp, Saccharomyces pastorianus
tggtggcgagacaacgaatcaactt

SEQ ID NO: 66338 - DNA, 25 bp, Saccharomyces pastorianus
agtcaaatcctctatcggcaatacc

SEQ ID NO: 66339 - DNA, 25 bp, Saccharomyces pastorianus
agccatccacaccatagtacgataa

SEQ ID NO: 66340 - DNA, 25 bp, Saccharomyces pastorianus
gaagacaggctaccttcaaccatga

SEQ ID NO: 66341 - DNA, 25 bp, Saccharomyces pastorianus
tgactcccagagatgaggacgcttt

SEQ ID NO: 66342 - DNA, 25 bp, Saccharomyces pastorianus
gctgccgataatgaggaccgaaaat

SEQ ID NO: 66343 - DNA, 25 bp, Saccharomyces pastorianus
atcgttaagcctacagatgtcctgg

SEQ ID NO: 66344 - DNA, 25 bp, Saccharomyces pastorianus
gaataaccgctttacctacagtgga

SEQ ID NO: 66345 - DNA, 25 bp, Saccharomyces pastorianus
aatcttcacttttaagccatccaca

SEQ ID NO: 66346 - DNA, 25 bp, Saccharomyces pastorianus
ttgcgtttagaagctttgggtacct

SEQ ID NO: 66347 - DNA, 25 bp, Saccharomyces pastorianus
ttgatattgtgcctgtgtttgctcc

SEQ ID NO: 66348 - DNA, 25 bp, Saccharomyces pastorianus
ctccttggcctgcacttcaaaaata

SEQ ID NO: 66349 - DNA, 25 bp, Saccharomyces pastorianus
agatgagcatgaacgccttttgcgt

SEQ ID NO: 66350 - DNA, 25 bp, Saccharomyces pastorianus
aaacggactggccaaaagaacatga

SEQ ID NO: 66351 - DNA, 25 bp, Saccharomyces pastorianus
aaggagcaagacctggttcttctgc

SEQ ID NO: 66352 - DNA, 25 bp, Saccharomyces pastorianus
ctggttcttctgctgtgcgttgata

SEQ ID NO: 66353 - DNA, 25 bp, Saccharomyces pastorianus
atggccgaactaaaaccatctctcg

SEQ ID NO: 66354 - DNA, 25 bp, Saccharomyces pastorianus
aatccaccaagaacagtggcggctc

SEQ ID NO: 66355 - DNA, 25 bp, Saccharomyces pastorianus
gtggcggctcacaaaagggcaagaa

SEQ ID NO: 66356 - DNA, 25 bp, Saccharomyces pastorianus
aacgattgctggtcaaaaatccacc

SEQ ID NO: 66357 - DNA, 25 bp, Saccharomyces pastorianus
ataactggttcatttcaagcgaagg

SEQ ID NO: 66358 - DNA, 25 bp, Saccharomyces pastorianus
agccggcatattatgtatgtcttca

SEQ ID NO: 66359 - DNA, 25 bp, Saccharomyces pastorianus
agcagagacggatcaaatcttttct

SEQ ID NO: 66360 - DNA, 25 bp, Saccharomyces pastorianus
gaacaccttgatgcaagccggcata

SEQ ID NO: 66361 - DNA, 25 bp, Saccharomyces pastorianus
tccccgtggtggtgttttgctaaga

SEQ ID NO: 66362 - DNA, 25 bp, Saccharomyces pastorianus
agttctgataattccgttttgccgg

SEQ ID NO: 66363 - DNA, 25 bp, Saccharomyces pastorianus
gaagaggattcgtactccctatttt

SEQ ID NO: 66364 - DNA, 25 bp, Saccharomyces pastorianus
tcgtaatgggcttcgggtttttatg

SEQ ID NO: 66365 - DNA, 25 bp, Saccharomyces pastorianus
taccacctgctcaactcgtaatggg

SEQ ID NO: 66366 - DNA, 25 bp, Saccharomyces pastorianus
gaaaaagatcagaaccctctaccac

SEQ ID NO: 66367 - DNA, 25 bp, Saccharomyces pastorianus
tggtctaagaagatagcctcctccc

SEQ ID NO: 66368 - DNA, 25 bp, Saccharomyces pastorianus
gatactgaacagacaagcgccgatt

SEQ ID NO: 66369 - DNA, 25 bp, Saccharomyces pastorianus
agagcttcaaagctgaccctgaaat

SEQ ID NO: 66370 - DNA, 25 bp, Saccharomyces pastorianus
atgacaaatcaatgcctcgacttcc

SEQ ID NO: 66371 - DNA, 25 bp, Saccharomyces pastorianus
aaacaactttgatttagcctgcgta

SEQ ID NO: 66372 - DNA, 25 bp, Saccharomyces pastorianus
ggatttcaaatcatacctcatagct

SEQ ID NO: 66373 - DNA, 25 bp, Saccharomyces pastorianus
atggaagctaccctattagtctgga

SEQ ID NO: 66374 - DNA, 25 bp, Saccharomyces pastorianus
aaagatgcggtgtgactctacttcc

SEQ ID NO: 66375 - DNA, 25 bp, Saccharomyces pastorianus
tacttccgatactcactacgcaagt

SEQ ID NO: 66376 - DNA, 25 bp, Saccharomyces pastorianus
tagcctgcgtattgtctttagcaaa

SEQ ID NO: 66377 - DNA, 25 bp, Saccharomyces pastorianus
atggctggttcacaagaggtctact

SEQ ID NO: 66378 - DNA, 25 bp, Saccharomyces pastorianus
ggtcccatcacttttatcatttcaa

SEQ ID NO: 66379 - DNA, 25 bp, Saccharomyces pastorianus
gaaacaggtgtttctgcttcagttt

SEQ ID NO: 66380 - DNA, 25 bp, Saccharomyces pastorianus
gctccgtattcaacttctttggtgt

SEQ ID NO: 66381 - DNA, 25 bp, Saccharomyces pastorianus
tatcagcctctttccctgaattaga

SEQ ID NO: 66382 - DNA, 25 bp, Saccharomyces pastorianus
ttcttctcttttcttgcggaacaaa

SEQ ID NO: 66383 - DNA, 25 bp, Saccharomyces pastorianus
aactttgctgccattaacgttgaag

SEQ ID NO: 66384 - DNA, 25 bp, Saccharomyces pastorianus
gaaactcattcttattggccttggt

SEQ ID NO: 66385 - DNA, 25 bp, Saccharomyces pastorianus
ttcagttttcaggacagcgcatcgt

SEQ ID NO: 66386 - DNA, 25 bp, Saccharomyces pastorianus
ctccttttttccctagcagaagttg

SEQ ID NO: 66387 - DNA, 25 bp, Saccharomyces pastorianus
ggccttggttgttactatgatcatc

SEQ ID NO: 66388 - DNA, 25 bp, Saccharomyces pastorianus
tagttagtgccatcgttctgatctt

SEQ ID NO: 66389 - DNA, 25 bp, Saccharomyces pastorianus
cagatgaagtttgtcctcctttttt

SEQ ID NO: 66390 - DNA, 25 bp, Saccharomyces pastorianus
aaattggccagtgctttctcgaaag

SEQ ID NO: 66391 - DNA, 25 bp, Saccharomyces pastorianus
gaaagtggcacaattttccgtccaa

SEQ ID NO: 66392 - DNA, 25 bp, Saccharomyces pastorianus
taccggagtcggcttctttggatga

SEQ ID NO: 66393 - DNA, 25 bp, Saccharomyces pastorianus
tgcattcggttttatcatctttcaa

SEQ ID NO: 66394 - DNA, 25 bp, Saccharomyces pastorianus
atgtttctccttttctgtggtgata

SEQ ID NO: 66395 - DNA, 25 bp, Saccharomyces pastorianus
ttgacgataattttgggccattcta

SEQ ID NO: 66396 - DNA, 25 bp, Saccharomyces pastorianus
gcccttagtatctttgcattcggtt

SEQ ID NO: 66397 - DNA, 25 bp, Saccharomyces pastorianus
gaagactctacctgcgttatagaat

SEQ ID NO: 66398 - DNA, 25 bp, Saccharomyces pastorianus
aacagggcctgttctatcgtatgag

SEQ ID NO: 66399 - DNA, 25 bp, Saccharomyces pastorianus
gctacgtggtattgcttcttcaaga

SEQ ID NO: 66400 - DNA, 25 bp, Saccharomyces pastorianus
gtctgtgcactttttgtagctacgt

SEQ ID NO: 66401 - DNA, 25 bp, Saccharomyces pastorianus
attacctgggtgcacaatcttttga

SEQ ID NO: 66402 - DNA, 25 bp, Saccharomyces pastorianus
aagcgttcgacgatcttcgcgatag

SEQ ID NO: 66403 - DNA, 25 bp, Saccharomyces pastorianus
aaggaagccctgatgaactcatttg

SEQ ID NO: 66404 - DNA, 25 bp, Saccharomyces pastorianus
agagcactcggaacacgcgttttta

SEQ ID NO: 66405 - DNA, 25 bp, Saccharomyces pastorianus
aatatctcaattcctcattttccct

SEQ ID NO: 66406 - DNA, 25 bp, Saccharomyces pastorianus
tttgttgccgcgttacgagagcact

SEQ ID NO: 66407 - DNA, 25 bp, Saccharomyces pastorianus
ctgggagatcttttggcttttgaac

SEQ ID NO: 66408 - DNA, 25 bp, Saccharomyces pastorianus
tgattcttctttccaacaagtctcc

SEQ ID NO: 66409 - DNA, 25 bp, Saccharomyces pastorianus
aggacacggctcctgtctttatgaa

SEQ ID NO: 66410 - DNA, 25 bp, Saccharomyces pastorianus
attttgatgctctcagtggcacaga

SEQ ID NO: 66411 - DNA, 25 bp, Saccharomyces pastorianus
cattttccctccctatcagaataaa

SEQ ID NO: 66412 - DNA, 25 bp, Saccharomyces pastorianus
aggcaatgtttctgcacacactact

SEQ ID NO: 66413 - DNA, 25 bp, Saccharomyces pastorianus
caaaagctgtcggaggttgcgccta

SEQ ID NO: 66414 - DNA, 25 bp, Saccharomyces pastorianus
ggagtgcgttaagtgacccatacct

SEQ ID NO: 66415 - DNA, 25 bp, Saccharomyces pastorianus
accattgcatgggttagccgcgcaa

SEQ ID NO: 66416 - DNA, 25 bp, Saccharomyces pastorianus
tgggatcgcgttttaggcctaccaa

SEQ ID NO: 66417 - DNA, 25 bp, Saccharomyces pastorianus
tcagctactcatccggcataatggg

SEQ ID NO: 66418 - DNA, 25 bp, Saccharomyces pastorianus
taagaatccgttccccaatgtagac

SEQ ID NO: 66419 - DNA, 25 bp, Saccharomyces pastorianus
ttgaatttgcgcaagccaggcccga

SEQ ID NO: 66420 - DNA, 25 bp, Saccharomyces pastorianus
gaactcaagccgtgtaattcctgga

SEQ ID NO: 66421 - DNA, 25 bp, Saccharomyces pastorianus
aatgtagactctgcttccggaattt

SEQ ID NO: 66422 - DNA, 25 bp, Saccharomyces pastorianus
tataggacctttgacccaacttgtt

SEQ ID NO: 66423 - DNA, 25 bp, Saccharomyces pastorianus
gtatccttctgggagttggccaaca

SEQ ID NO: 66424 - DNA, 25 bp, Saccharomyces pastorianus
gagagatgaaacttctggcccaaga

SEQ ID NO: 66425 - DNA, 25 bp, Saccharomyces pastorianus
ggagcgcgcacggattcgatgacaa

SEQ ID NO: 66426 - DNA, 25 bp, Saccharomyces pastorianus
ttcccggctaccaagttagtgtaca

SEQ ID NO: 66427 - DNA, 25 bp, Saccharomyces pastorianus
gtacaatctctctccaagtttcaat

SEQ ID NO: 66428 - DNA, 25 bp, Saccharomyces pastorianus
tatttgcaccatactcagacttgat

SEQ ID NO: 66429 - DNA, 25 bp, Saccharomyces pastorianus
agttatttttgattgggacgctcca

SEQ ID NO: 66430 - DNA, 25 bp, Saccharomyces pastorianus
gatgtactaacacaccagctttggt

SEQ ID NO: 66431 - DNA, 25 bp, Saccharomyces pastorianus
tggagaccaaaacccctgatctaga

SEQ ID NO: 66432 - DNA, 25 bp, Saccharomyces pastorianus
tttacggtgcagttagtttcccttg

SEQ ID NO: 66433 - DNA, 25 bp, Saccharomyces pastorianus
gatctagagcaagcacgttcgtttt

SEQ ID NO: 66434 - DNA, 25 bp, Saccharomyces pastorianus
gatcgtttgctaaattcttcggatt

SEQ ID NO: 66435 - DNA, 25 bp, Saccharomyces pastorianus
gagacaactacagtggctataccat

SEQ ID NO: 66436 - DNA, 25 bp, Saccharomyces pastorianus
ttcgatttcgacagtttgttgccgt

SEQ ID NO: 66437 - DNA, 25 bp, Saccharomyces pastorianus
tcggattacacgcaagcatctgttt

SEQ ID NO: 66438 - DNA, 25 bp, Saccharomyces pastorianus
ggacatggtacctcattcttgttac

SEQ ID NO: 66439 - DNA, 25 bp, Saccharomyces pastorianus
aaggtgttttcattgacgattctca

SEQ ID NO: 66440 - DNA, 25 bp, Saccharomyces pastorianus
tgagtgtggctccatcttgaccaca

SEQ ID NO: 66441 - DNA, 25 bp, Saccharomyces pastorianus
cagagcagatatttatgtcggtgtt

SEQ ID NO: 66442 - DNA, 25 bp, Saccharomyces pastorianus
ggattctgaattatccgctatgggt

SEQ ID NO: 66443 - DNA, 25 bp, Saccharomyces pastorianus
catctgtttgtcgtgagtgtggctc

SEQ ID NO: 66444 - DNA, 25 bp, Saccharomyces pastorianus
tccgttccaccggtcctgttaatag

SEQ ID NO: 66445 - DNA, 25 bp, Saccharomyces pastorianus
aatctcggttcattaatcctcctaa

SEQ ID NO: 66446 - DNA, 25 bp, Saccharomyces pastorianus
gtccaacgatggtgtttcttctgca

SEQ ID NO: 66447 - DNA, 25 bp, Saccharomyces pastorianus
attgcaaagcccatgtccaacgatg

SEQ ID NO: 66448 - DNA, 25 bp, Saccharomyces pastorianus
gattaaaccacctagccaaaccaga

SEQ ID NO: 66449 - DNA, 25 bp, Saccharomyces pastorianus
aacaagtttccattgcaaagcccat

SEQ ID NO: 66450 - DNA, 25 bp, Saccharomyces pastorianus
attagaggaagctgtccggccacat

SEQ ID NO: 66451 - DNA, 25 bp, Saccharomyces pastorianus
aaatcggcatttcccttattagagg

SEQ ID NO: 66452 - DNA, 25 bp, Saccharomyces pastorianus
gaacggcagatttccgcactctgga

SEQ ID NO: 66453 - DNA, 25 bp, Saccharomyces pastorianus
tgaaaccgccaatagcagctacctt

SEQ ID NO: 66454 - DNA, 25 bp, Saccharomyces pastorianus
tccggccacatattggttcctttaa

SEQ ID NO: 66455 - DNA, 25 bp, Saccharomyces pastorianus
gcactctggaacgtgaatctcggtt

SEQ ID NO: 66456 - DNA, 25 bp, Saccharomyces pastorianus
gttgtacttcgataaatgcctgggt

SEQ ID NO: 66457 - DNA, 25 bp, Saccharomyces pastorianus
aactgcctgctgatgtgacggtgga

SEQ ID NO: 66458 - DNA, 25 bp, Saccharomyces pastorianus
tacctatcaaagtttatgggcccat

SEQ ID NO: 66459 - DNA, 25 bp, Saccharomyces pastorianus
ggttgcaatatgacgagatcctcaa

SEQ ID NO: 66460 - DNA, 25 bp, Saccharomyces pastorianus
tagagtcgccgggatcgcaatcgca

SEQ ID NO: 66461 - DNA, 25 bp, Saccharomyces pastorianus
aacgacaaagatcccaaccgcagtg

SEQ ID NO: 66462 - DNA, 25 bp, Saccharomyces pastorianus
aaccgcagtgacgatgctctatacg

SEQ ID NO: 66463 - DNA, 25 bp, Saccharomyces pastorianus
ttgtgctggccttaagttgtacttc

SEQ ID NO: 66464 - DNA, 25 bp, Saccharomyces pastorianus
tacatcatatggctggctatccgct

SEQ ID NO: 66465 - DNA, 25 bp, Saccharomyces pastorianus
gggcccatccatctgttgaggctga

SEQ ID NO: 66466 - DNA, 25 bp, Saccharomyces pastorianus
gaggctgacaagtgtcctaccagaa

SEQ ID NO: 66467 - DNA, 25 bp, Saccharomyces pastorianus
acttctactagtttgggcggatccg

SEQ ID NO: 66468 - DNA, 25 bp, Saccharomyces pastorianus
acaggtgttcctaatgacaagccgg

SEQ ID NO: 66469 - DNA, 25 bp, Saccharomyces pastorianus
taaaggagacacaaccacagaattt

SEQ ID NO: 66470 - DNA, 25 bp, Saccharomyces pastorianus
tgcctggcgttccatggtcctctaa

SEQ ID NO: 66471 - DNA, 25 bp, Saccharomyces pastorianus
gaacaagaatttgcgctcggcggac

SEQ ID NO: 66472 - DNA, 25 bp, Saccharomyces pastorianus
agaaatcgcttctcgagcagcagaa

SEQ ID NO: 66473 - DNA, 25 bp, Saccharomyces pastorianus
gatggccgtgcaaatgccggtataa

SEQ ID NO: 66474 - DNA, 25 bp, Saccharomyces pastorianus
tcgttagcgtcctccatgagtggaa

SEQ ID NO: 66475 - DNA, 25 bp, Saccharomyces pastorianus
gggttcaactcgcaaacaataaagg

SEQ ID NO: 66476 - DNA, 25 bp, Saccharomyces pastorianus
atgggatccatcttctcaaacttat

SEQ ID NO: 66477 - DNA, 25 bp, Saccharomyces pastorianus
agagtgtgtcgcaaagttcgttagc

SEQ ID NO: 66478 - DNA, 25 bp, Saccharomyces pastorianus
aattgttgctccattgactgacaga

SEQ ID NO: 66479 - DNA, 25 bp, Saccharomyces pastorianus
agacgttagcaagactgaaaaggac

SEQ ID NO: 66480 - DNA, 25 bp, Saccharomyces pastorianus
gttgctccattgactgacagatata

SEQ ID NO: 66481 - DNA, 25 bp, Saccharomyces pastorianus
aattagagcctctgttaacgaagct

SEQ ID NO: 66482 - DNA, 25 bp, Saccharomyces pastorianus
tgagagacgttagcaagactgaaaa

SEQ ID NO: 66483 - DNA, 25 bp, Saccharomyces pastorianus
tgttaacgaagcttcaagatccgga

SEQ ID NO: 66484 - DNA, 25 bp, Saccharomyces pastorianus
aaggacgaaattagagcctctgtta

SEQ ID NO: 66485 - DNA, 25 bp, Saccharomyces pastorianus
gcctctgttaacgaagcttcaagat

SEQ ID NO: 66486 - DNA, 25 bp, Saccharomyces pastorianus
agagcctctgttaacgaagcttcaa

SEQ ID NO: 66487 - DNA, 25 bp, Saccharomyces pastorianus
gacagatatattttgagagacgtta

SEQ ID NO: 66488 - DNA, 25 bp, Saccharomyces pastorianus
aaaaattgttgctccattgactgac

SEQ ID NO: 66489 - DNA, 25 bp, Saccharomyces pastorianus
gaatcatccaaggttctaccaccaa

SEQ ID NO: 66490 - DNA, 25 bp, Saccharomyces pastorianus
caggtcaacttccttggcaaacggt

SEQ ID NO: 66491 - DNA, 25 bp, Saccharomyces pastorianus
tagtgccccgtttcaaggccagaaa

SEQ ID NO: 66492 - DNA, 25 bp, Saccharomyces pastorianus
ggcaatccttgtacccttattagta

SEQ ID NO: 66493 - DNA, 25 bp, Saccharomyces pastorianus
ttccaatattgacttacccacgtac

SEQ ID NO: 66494 - DNA, 25 bp, Saccharomyces pastorianus
aagacgggcctggtccaatagttca

SEQ ID NO: 66495 - DNA, 25 bp, Saccharomyces pastorianus
ccacgtacgatatggccactactga

SEQ ID NO: 66496 - DNA, 25 bp, Saccharomyces pastorianus
aacaactacatctttccaggtcaac

SEQ ID NO: 66497 - DNA, 25 bp, Saccharomyces pastorianus
gaagaggcaacgtctgtctcagcat

SEQ ID NO: 66498 - DNA, 25 bp, Saccharomyces pastorianus
ggaccgaagatttttcaccgcaaat

SEQ ID NO: 66499 - DNA, 25 bp, Saccharomyces pastorianus
tggatggcttactttcgcaagacat

SEQ ID NO: 66500 - DNA, 25 bp, Saccharomyces pastorianus
tgtggatccacattcgcatacctac

SEQ ID NO: 66501 - DNA, 25 bp, Saccharomyces pastorianus
tttagtgagaactccgcccgaaata

SEQ ID NO: 66502 - DNA, 25 bp, Saccharomyces pastorianus
cagagtatccactccatttagtgag

SEQ ID NO: 66503 - DNA, 25 bp, Saccharomyces pastorianus
tccatttccttcttcatggctgaaa

SEQ ID NO: 66504 - DNA, 25 bp, Saccharomyces pastorianus
gggagaattctctctcttatgagat

SEQ ID NO: 66505 - DNA, 25 bp, Saccharomyces pastorianus
gagccgacttaaattccttggtata

SEQ ID NO: 66506 - DNA, 25 bp, Saccharomyces pastorianus
gcaaatcccgtagcaaaactccatt

SEQ ID NO: 66507 - DNA, 25 bp, Saccharomyces pastorianus
gctgctgactctgcgtcacaaagag

SEQ ID NO: 66508 - DNA, 25 bp, Saccharomyces pastorianus
tgacagcaatggttcactcaccgct

SEQ ID NO: 66509 - DNA, 25 bp, Saccharomyces pastorianus
gcatacctactgtgatcctaacgaa

SEQ ID NO: 66510 - DNA, 25 bp, Saccharomyces pastorianus
attacccatcggcaaaggtctctta

SEQ ID NO: 66511 - DNA, 25 bp, Saccharomyces pastorianus
aggtttccgcagtacaagctgacta

SEQ ID NO: 66512 - DNA, 25 bp, Saccharomyces pastorianus
ttccctcgtggaacctaggcaagtg

SEQ ID NO: 66513 - DNA, 25 bp, Saccharomyces pastorianus
gggttgggcacaagccacatgcacg

SEQ ID NO: 66514 - DNA, 25 bp, Saccharomyces pastorianus
gattgctacgagtttgcagagtact

SEQ ID NO: 66515 - DNA, 25 bp, Saccharomyces pastorianus
aggagctgtccattaggtttccgca

SEQ ID NO: 66516 - DNA, 25 bp, Saccharomyces pastorianus
gggtcctcatctttgatcgaaggca

SEQ ID NO: 66517 - DNA, 25 bp, Saccharomyces pastorianus
gccggcgccagcataaactcaatga

SEQ ID NO: 66518 - DNA, 25 bp, Saccharomyces pastorianus
acaagaccatcaccttagacttcaa

SEQ ID NO: 66519 - DNA, 25 bp, Saccharomyces pastorianus
aagctgactacattcgccaaccaag

SEQ ID NO: 66520 - DNA, 25 bp, Saccharomyces pastorianus
ggctgggcgctgttacaatggctaa

SEQ ID NO: 66521 - DNA, 25 bp, Saccharomyces pastorianus
actgctggcgacaatgccaacggca

SEQ ID NO: 66522 - DNA, 25 bp, Saccharomyces pastorianus
actaccgaatcttccgccaattgat

SEQ ID NO: 66523 - DNA, 25 bp, Saccharomyces pastorianus
aattgatccagctcttgcgggcaaa

SEQ ID NO: 66524 - DNA, 25 bp, Saccharomyces pastorianus
ggactccaagctgttgtgctggtca

SEQ ID NO: 66525 - DNA, 25 bp, Saccharomyces pastorianus
acgtggtagagcttctccccgagag

SEQ ID NO: 66526 - DNA, 25 bp, Saccharomyces pastorianus
agagatacctgagcgacttcctgga

SEQ ID NO: 66527 - DNA, 25 bp, Saccharomyces pastorianus
aaggtctcccggttgtgcatatcga

SEQ ID NO: 66528 - DNA, 25 bp, Saccharomyces pastorianus
gaaaagatcattctccaggtcgcgc

SEQ ID NO: 66529 - DNA, 25 bp, Saccharomyces pastorianus
aagaactcacctctttcgacgaata

SEQ ID NO: 66530 - DNA, 25 bp, Saccharomyces pastorianus
tcgacaatggcttctggtccgacaa

SEQ ID NO: 66531 - DNA, 25 bp, Saccharomyces pastorianus
gacgaggaactacgcgatgacatca

SEQ ID NO: 66532 - DNA, 25 bp, Saccharomyces pastorianus
tatcgatcatcttgcagtgctgttc

SEQ ID NO: 66533 - DNA, 25 bp, Saccharomyces pastorianus
aaccgtctcgggtctcggcgcgtgc

SEQ ID NO: 66534 - DNA, 25 bp, Saccharomyces pastorianus
aacacaaacaagctatctctccact

SEQ ID NO: 66535 - DNA, 25 bp, Saccharomyces pastorianus
taatataacatcaagcaagcaagca

SEQ ID NO: 66536 - DNA, 25 bp, Saccharomyces pastorianus
gtgtcttctctcttaccttgttctt

SEQ ID NO: 66537 - DNA, 25 bp, Saccharomyces pastorianus
tgaactactctctcgtgtcttctct

SEQ ID NO: 66538 - DNA, 25 bp, Saccharomyces pastorianus
ggtctctggttcttcattaactgaa

SEQ ID NO: 66539 - DNA, 25 bp, Saccharomyces pastorianus
attaactgaactactctctcgtgtc

SEQ ID NO: 66540 - DNA, 25 bp, Saccharomyces pastorianus
ttctctcttaccttgttcttgtata

SEQ ID NO: 66541 - DNA, 25 bp, Saccharomyces pastorianus
cggcgcgtgcgtatataaggtctct

SEQ ID NO: 66542 - DNA, 25 bp, Saccharomyces pastorianus
gtgcgtatataaggtctctggttct

SEQ ID NO: 66543 - DNA, 25 bp, Saccharomyces pastorianus
ataaggtctctggttcttcattaac

SEQ ID NO: 66544 - DNA, 25 bp, Saccharomyces pastorianus
gcagacgatcatgccgctgatggga

SEQ ID NO: 66545 - DNA, 25 bp, Saccharomyces pastorianus
tgatcaagacggacgctggcgccaa

SEQ ID NO: 66546 - DNA, 25 bp, Saccharomyces pastorianus
gaggttccctgatgagcctagcgcg

SEQ ID NO: 66547 - DNA, 25 bp, Saccharomyces pastorianus
aacgaactatcgatcagcacgccaa

SEQ ID NO: 66548 - DNA, 25 bp, Saccharomyces pastorianus
acatctacgattgtgtcaccatcct

SEQ ID NO: 66549 - DNA, 25 bp, Saccharomyces pastorianus
gatgtttttctcctcgaacgaacta

SEQ ID NO: 66550 - DNA, 25 bp, Saccharomyces pastorianus
ggagccatgctatcaggatcatcgc

SEQ ID NO: 66551 - DNA, 25 bp, Saccharomyces pastorianus
gagaaactggccacgttcatcgagc

SEQ ID NO: 66552 - DNA, 25 bp, Saccharomyces pastorianus
taagcacccgatacagacgtcgagt

SEQ ID NO: 66553 - DNA, 25 bp, Saccharomyces pastorianus
gtgttcgtaccactttgtcaaactg

SEQ ID NO: 66554 - DNA, 25 bp, Saccharomyces pastorianus
ttcatcgagctttacgcacagctgt

SEQ ID NO: 66555 - DNA, 25 bp, Saccharomyces pastorianus
aatccaacaacacgctagatacgat

SEQ ID NO: 66556 - DNA, 25 bp, Saccharomyces pastorianus
acacgctagatacgattgttctttc

SEQ ID NO: 66557 - DNA, 25 bp, Saccharomyces pastorianus
gaaggttggtatcactggtaagtac

SEQ ID NO: 66558 - DNA, 25 bp, Saccharomyces pastorianus
ggttcctctttgagaagacaagtca

SEQ ID NO: 66559 - DNA, 25 bp, Saccharomyces pastorianus
gctagatacgattgttctttctgtg

SEQ ID NO: 66560 - DNA, 25 bp, Saccharomyces pastorianus
actaagaaggttggtatcactggta

SEQ ID NO: 66561 - DNA, 25 bp, Saccharomyces pastorianus
gacaagtcaagaagttggaaatcca

SEQ ID NO: 66562 - DNA, 25 bp, Saccharomyces pastorianus
ttggaaatccaacaacacgctagat

SEQ ID NO: 66563 - DNA, 25 bp, Saccharomyces pastorianus
acgattgttctttctgtggtaagaa

SEQ ID NO: 66564 - DNA, 25 bp, Saccharomyces pastorianus
tggtatcactggtaagtacggtgtc

SEQ ID NO: 66565 - DNA, 25 bp, Saccharomyces pastorianus
gatacgattgttctttctgtggtaa

SEQ ID NO: 66566 - DNA, 25 bp, Saccharomyces pastorianus
aacgctgaagtcaacgctttacaag

SEQ ID NO: 66567 - DNA, 25 bp, Saccharomyces pastorianus
taacgcttatttcccctggactgca

SEQ ID NO: 66568 - DNA, 25 bp, Saccharomyces pastorianus
aatacctgacattagactgctttgg

SEQ ID NO: 66569 - DNA, 25 bp, Saccharomyces pastorianus
atactccaaacatccaggctcattt

SEQ ID NO: 66570 - DNA, 25 bp, Saccharomyces pastorianus
gggacgttgcattttggttgccaat

SEQ ID NO: 66571 - DNA, 25 bp, Saccharomyces pastorianus
caggctcatttagggacgttgcatt

SEQ ID NO: 66572 - DNA, 25 bp, Saccharomyces pastorianus
gattagctctttcaaaccatactcc

SEQ ID NO: 66573 - DNA, 25 bp, Saccharomyces pastorianus
agacgtgctacttaaagcgggctat

SEQ ID NO: 66574 - DNA, 25 bp, Saccharomyces pastorianus
ggaactttgcggttgcggattgatt

SEQ ID NO: 66575 - DNA, 25 bp, Saccharomyces pastorianus
gctatgcttcttttcgaaatacctg

SEQ ID NO: 66576 - DNA, 25 bp, Saccharomyces pastorianus
gggcctggaccgtattgctatgctt

SEQ ID NO: 66577 - DNA, 25 bp, Saccharomyces pastorianus
atgtatcctctctgtctgacgttcc

SEQ ID NO: 66578 - DNA, 25 bp, Saccharomyces pastorianus
cagcaatgtacgtcaattcaggcca

SEQ ID NO: 66579 - DNA, 25 bp, Saccharomyces pastorianus
tgtctgacgttcctgtgcggatccg

SEQ ID NO: 66580 - DNA, 25 bp, Saccharomyces pastorianus
tactcttgacgtccacagcaatgta

SEQ ID NO: 66581 - DNA, 25 bp, Saccharomyces pastorianus
gtgcggatccgtcttgcacacaatg

SEQ ID NO: 66582 - DNA, 25 bp, Saccharomyces pastorianus
atcagcttcttgatgcttgcaaact

SEQ ID NO: 66583 - DNA, 25 bp, Saccharomyces pastorianus
ttgcacacaatgcacccgattggtg

SEQ ID NO: 66584 - DNA, 25 bp, Saccharomyces pastorianus
gaatacggctctgataagtccgcgt

SEQ ID NO: 66585 - DNA, 25 bp, Saccharomyces pastorianus
gtacgtcaattcaggccattggttt

SEQ ID NO: 66586 - DNA, 25 bp, Saccharomyces pastorianus
gcactaggtgtgctactcttgacgt

SEQ ID NO: 66587 - DNA, 25 bp, Saccharomyces pastorianus
ataagtccgcgtctatcagcttctt

SEQ ID NO: 66588 - DNA, 25 bp, Saccharomyces pastorianus
ttcatacaggttcagcgccgccaca

SEQ ID NO: 66589 - DNA, 25 bp, Saccharomyces pastorianus
atcccttcatacaggttcagcgccg

SEQ ID NO: 66590 - DNA, 25 bp, Saccharomyces pastorianus
caggttcagcgccgccacattttct

SEQ ID NO: 66591 - DNA, 25 bp, Saccharomyces pastorianus
tcatacaggttcagcgccgccacat

SEQ ID NO: 66592 - DNA, 25 bp, Saccharomyces pastorianus
gaaccccatcccttcatacaggttc

SEQ ID NO: 66593 - DNA, 25 bp, Saccharomyces pastorianus
acaggttcagcgccgccacattttc

SEQ ID NO: 66594 - DNA, 25 bp, Saccharomyces pastorianus
tacaggttcagcgccgccacatttt

SEQ ID NO: 66595 - DNA, 25 bp, Saccharomyces pastorianus
atacaggttcagcgccgccacattt

SEQ ID NO: 66596 - DNA, 25 bp, Saccharomyces pastorianus
tgaaccccatcccttcatacaggtt

SEQ ID NO: 66597 - DNA, 25 bp, Saccharomyces pastorianus
catacaggttcagcgccgccacatt

SEQ ID NO: 66598 - DNA, 25 bp, Saccharomyces pastorianus
aaccccatcccttcatacaggttca

SEQ ID NO: 66599 - DNA, 25 bp, Saccharomyces pastorianus
gaagccatagacctcatcgaatcgc

SEQ ID NO: 66600 - DNA, 25 bp, Saccharomyces pastorianus
ttatgcccggaaacctgtcttcatg

SEQ ID NO: 66601 - DNA, 25 bp, Saccharomyces pastorianus
attgggactccacgcacaggctgaa

SEQ ID NO: 66602 - DNA, 25 bp, Saccharomyces pastorianus
gaaccagtgtgtctacaaggcccct

SEQ ID NO: 66603 - DNA, 25 bp, Saccharomyces pastorianus
gatctgtgatttcggtctcgctaga

SEQ ID NO: 66604 - DNA, 25 bp, Saccharomyces pastorianus
tcggctgtatccttgcggaatttta

SEQ ID NO: 66605 - DNA, 25 bp, Saccharomyces pastorianus
acctgagctgcttttgtctaaccaa

SEQ ID NO: 66606 - DNA, 25 bp, Saccharomyces pastorianus
gagattccatgcaccaggttttcga

SEQ ID NO: 66607 - DNA, 25 bp, Saccharomyces pastorianus
atggtctaatatgttcccctttgcg

SEQ ID NO: 66608 - DNA, 25 bp, Saccharomyces pastorianus
ggtatccataccgagtttttccaat

SEQ ID NO: 66609 - DNA, 25 bp, Saccharomyces pastorianus
atcgaatcgctactccattgggact

SEQ ID NO: 66610 - DNA, 25 bp, Saccharomyces pastorianus
gcacagtcgaaaattgaacagctta

SEQ ID NO: 66611 - DNA, 25 bp, Saccharomyces pastorianus
gaaatctttcttcagagccatccaa

SEQ ID NO: 66612 - DNA, 25 bp, Saccharomyces pastorianus
acttctattctctatgtggttctaa

SEQ ID NO: 66613 - DNA, 25 bp, Saccharomyces pastorianus
ggctccataaaaccttctaacaaga

SEQ ID NO: 66614 - DNA, 25 bp, Saccharomyces pastorianus
attaaaggcgctaactccataaaag

SEQ ID NO: 66615 - DNA, 25 bp, Saccharomyces pastorianus
gaacgaactatcgtattgttccatc

SEQ ID NO: 66616 - DNA, 25 bp, Saccharomyces pastorianus
aacagccgaaatcaggagcacagtc

SEQ ID NO: 66617 - DNA, 25 bp, Saccharomyces pastorianus
cgtaaacgtcttacaacatgcttat

SEQ ID NO: 66618 - DNA, 25 bp, Saccharomyces pastorianus
aacgcagtgcttattggtcttgata

SEQ ID NO: 66619 - DNA, 25 bp, Saccharomyces pastorianus
cgtattgttccatcgatgatttgaa

SEQ ID NO: 66620 - DNA, 25 bp, Saccharomyces pastorianus
gcactaatgccaccaaaggctccat

SEQ ID NO: 66621 - DNA, 25 bp, Saccharomyces pastorianus
aaggtctttgctacactagaaatag

SEQ ID NO: 66622 - DNA, 25 bp, Saccharomyces pastorianus
gacagatttaatgacatccaatgga

SEQ ID NO: 66623 - DNA, 25 bp, Saccharomyces pastorianus
gtaccggataatgcaccaaaaatgc

SEQ ID NO: 66624 - DNA, 25 bp, Saccharomyces pastorianus
aacgcactaataccttctttagcat

SEQ ID NO: 66625 - DNA, 25 bp, Saccharomyces pastorianus
gcactaataccttctttagcatata

SEQ ID NO: 66626 - DNA, 25 bp, Saccharomyces pastorianus
tgaaaaacgcactaataccttcttt

SEQ ID NO: 66627 - DNA, 25 bp, Saccharomyces pastorianus
cagtttgcatgacagatttaatgac

SEQ ID NO: 66628 - DNA, 25 bp, Saccharomyces pastorianus
catcaaccataaggcggtaccggat

SEQ ID NO: 66629 - DNA, 25 bp, Saccharomyces pastorianus
aaggcggtaccggataatgcaccaa

SEQ ID NO: 66630 - DNA, 25 bp, Saccharomyces pastorianus
gggcttttgtaaattgtcagtttgc

SEQ ID NO: 66631 - DNA, 25 bp, Saccharomyces pastorianus
gcatataaggtctttgctacactag

SEQ ID NO: 66632 - DNA, 25 bp, Saccharomyces pastorianus
agcagtatttgcagacccgaggcca

SEQ ID NO: 66633 - DNA, 25 bp, Saccharomyces pastorianus
acggtagcgttcttggacgtggcca

SEQ ID NO: 66634 - DNA, 25 bp, Saccharomyces pastorianus
gaggccacgaagtcgtagtcgttga

SEQ ID NO: 66635 - DNA, 25 bp, Saccharomyces pastorianus
gaacatcaacttcaagagcgacggt

SEQ ID NO: 66636 - DNA, 25 bp, Saccharomyces pastorianus
ccacgctgtgtggtaggtgagaaca

SEQ ID NO: 66637 - DNA, 25 bp, Saccharomyces pastorianus
gacgtggccacaatatgagattcca

SEQ ID NO: 66638 - DNA, 25 bp, Saccharomyces pastorianus
gtcgccatgcgacatgtgcactggt

SEQ ID NO: 66639 - DNA, 25 bp, Saccharomyces pastorianus
gaaacagttcattgacgagaggccc

SEQ ID NO: 66640 - DNA, 25 bp, Saccharomyces pastorianus
aggataccactttgtacacgactct

SEQ ID NO: 66641 - DNA, 25 bp, Saccharomyces pastorianus
tgctacgctgcatggtgagatctcc

SEQ ID NO: 66642 - DNA, 25 bp, Saccharomyces pastorianus
aaaagggcatggacatcgcgtatga

SEQ ID NO: 66643 - DNA, 25 bp, Saccharomyces pastorianus
tccacaagctttatcctaggcgtaa

SEQ ID NO: 66644 - DNA, 25 bp, Saccharomyces pastorianus
gtcaaactacgaaatctgcatcccc

SEQ ID NO: 66645 - DNA, 25 bp, Saccharomyces pastorianus
aacccgcgctgtatcgagcatgtca

SEQ ID NO: 66646 - DNA, 25 bp, Saccharomyces pastorianus
tgcactcgagtttctacaagggctt

SEQ ID NO: 66647 - DNA, 25 bp, Saccharomyces pastorianus
atagaatccacagcggacgtgcagt

SEQ ID NO: 66648 - DNA, 25 bp, Saccharomyces pastorianus
tacaagggctttcacttcatcatct

SEQ ID NO: 66649 - DNA, 25 bp, Saccharomyces pastorianus
tgcatccccttcatagacggtggga

SEQ ID NO: 66650 - DNA, 25 bp, Saccharomyces pastorianus
gagctacgcgatttagtatctctac

SEQ ID NO: 66651 - DNA, 25 bp, Saccharomyces pastorianus
gagcatgtcatcgagtacgtctcca

SEQ ID NO: 66652 - DNA, 25 bp, Saccharomyces pastorianus
gagtatcatacctagcgtcagcacc

SEQ ID NO: 66653 - DNA, 25 bp, Saccharomyces pastorianus
gtgaaaacaatcatcccgggcatca

SEQ ID NO: 66654 - DNA, 25 bp, Saccharomyces pastorianus
ataacagccactaatacccacttaa

SEQ ID NO: 66655 - DNA, 25 bp, Saccharomyces pastorianus
aaagagtctttgatttcaccagaga

SEQ ID NO: 66656 - DNA, 25 bp, Saccharomyces pastorianus
aagcggtggatgtcatggtttccaa

SEQ ID NO: 66657 - DNA, 25 bp, Saccharomyces pastorianus
gctaaactgtttttgaccagactat

SEQ ID NO: 66658 - DNA, 25 bp, Saccharomyces pastorianus
tttttactccgatctggccactaaa

SEQ ID NO: 66659 - DNA, 25 bp, Saccharomyces pastorianus
agaacctgcgttcaagtcagatgaa

SEQ ID NO: 66660 - DNA, 25 bp, Saccharomyces pastorianus
cagactatactttaggcttccccgt

SEQ ID NO: 66661 - DNA, 25 bp, Saccharomyces pastorianus
atagtgttgacggtggtgattccaa

SEQ ID NO: 66662 - DNA, 25 bp, Saccharomyces pastorianus
ctgcgagaggtttcccactacagaa

SEQ ID NO: 66663 - DNA, 25 bp, Saccharomyces pastorianus
ggacatagtgtacgtgttacccgaa

SEQ ID NO: 66664 - DNA, 25 bp, Saccharomyces pastorianus
gggttgaacttatctatctctgaaa

SEQ ID NO: 66665 - DNA, 25 bp, Saccharomyces pastorianus
tttggacgagcaacctcactgggac

SEQ ID NO: 66666 - DNA, 25 bp, Saccharomyces pastorianus
gatctcgctggagcagattcttcag

SEQ ID NO: 66667 - DNA, 25 bp, Saccharomyces pastorianus
tgaacgaaatatcgccgtctttgga

SEQ ID NO: 66668 - DNA, 25 bp, Saccharomyces pastorianus
atcttcatcgggatcttcgccattt

SEQ ID NO: 66669 - DNA, 25 bp, Saccharomyces pastorianus
gttcctatttcttcgaagtgcgcag

SEQ ID NO: 66670 - DNA, 25 bp, Saccharomyces pastorianus
tatgcctgtcctacatcgaacaaga

SEQ ID NO: 66671 - DNA, 25 bp, Saccharomyces pastorianus
ggtaacctgcacaattgttcctatt

SEQ ID NO: 66672 - DNA, 25 bp, Saccharomyces pastorianus
aacggctcgatatgcccgaatggta

SEQ ID NO: 66673 - DNA, 25 bp, Saccharomyces pastorianus
ttcttggtcgagtttgccggcagaa

SEQ ID NO: 66674 - DNA, 25 bp, Saccharomyces pastorianus
agtcaacgttgtgggcatcttcatc

SEQ ID NO: 66675 - DNA, 25 bp, Saccharomyces pastorianus
agttggtggctcgtccatcaagaaa

SEQ ID NO: 66676 - DNA, 25 bp, Saccharomyces pastorianus
ttgatccatatttccaatgaccatt

SEQ ID NO: 66677 - DNA, 25 bp, Saccharomyces pastorianus
ggaactcagacgcatcaaaaccttg

SEQ ID NO: 66678 - DNA, 25 bp, Saccharomyces pastorianus
tgaccattacccaaacccaatacta

SEQ ID NO: 66679 - DNA, 25 bp, Saccharomyces pastorianus
atctagaatcgatcttcccctaaag

SEQ ID NO: 66680 - DNA, 25 bp, Saccharomyces pastorianus
aaccacttttgatgaggaactccag

SEQ ID NO: 66681 - DNA, 25 bp, Saccharomyces pastorianus
aatagaccttttaacacggcctgcg

SEQ ID NO: 66682 - DNA, 25 bp, Saccharomyces pastorianus
ggcctgcggcagaatacattaaaaa

SEQ ID NO: 66683 - DNA, 25 bp, Saccharomyces pastorianus
ggtcgccaacgacagttctatcgga

SEQ ID NO: 66684 - DNA, 25 bp, Saccharomyces pastorianus
cggacggtttcataagcaagcacaa

SEQ ID NO: 66685 - DNA, 25 bp, Saccharomyces pastorianus
aagggcgttgcggatttgatccata

SEQ ID NO: 66686 - DNA, 25 bp, Saccharomyces pastorianus
actatatagttgttccacggacggt

SEQ ID NO: 66687 - DNA, 25 bp, Saccharomyces pastorianus
ttgctttgccatttgtcgcatttga

SEQ ID NO: 66688 - DNA, 25 bp, Saccharomyces pastorianus
cctggcatacctggcatatttggca

SEQ ID NO: 66689 - DNA, 25 bp, Saccharomyces pastorianus
gtgcttgttgcatcatttgtggcga

SEQ ID NO: 66690 - DNA, 25 bp, Saccharomyces pastorianus
atacctggcatattgggcatacctg

SEQ ID NO: 66691 - DNA, 25 bp, Saccharomyces pastorianus
atatttggcattccaggcatcctgg

SEQ ID NO: 66692 - DNA, 25 bp, Saccharomyces pastorianus
gtttaacccataccgaattgctttg

SEQ ID NO: 66693 - DNA, 25 bp, Saccharomyces pastorianus
cattagaccgggattttgtttcagt

SEQ ID NO: 66694 - DNA, 25 bp, Saccharomyces pastorianus
tgtggcgatacttttggcatacctg

SEQ ID NO: 66695 - DNA, 25 bp, Saccharomyces pastorianus
aggcatcctggcattggctccgggt

SEQ ID NO: 66696 - DNA, 25 bp, Saccharomyces pastorianus
gctacctccaagcatattcatcatg

SEQ ID NO: 66697 - DNA, 25 bp, Saccharomyces pastorianus
atattgggcatacctggcatacctg

SEQ ID NO: 66698 - DNA, 25 bp, Saccharomyces pastorianus
gtggctacaacactcgacagcgagg

SEQ ID NO: 66699 - DNA, 25 bp, Saccharomyces pastorianus
gaaccacaaatttctcggagcgact

SEQ ID NO: 66700 - DNA, 25 bp, Saccharomyces pastorianus
attccatatttagtgctgccaacga

SEQ ID NO: 66701 - DNA, 25 bp, Saccharomyces pastorianus
gcatactttccaaccatttttacca

SEQ ID NO: 66702 - DNA, 25 bp, Saccharomyces pastorianus
aaggcttatggaggatctgaacgca

SEQ ID NO: 66703 - DNA, 25 bp, Saccharomyces pastorianus
gggctcacaccagttcaattactga

SEQ ID NO: 66704 - DNA, 25 bp, Saccharomyces pastorianus
aactaaatgttccatcttctaccgc

SEQ ID NO: 66705 - DNA, 25 bp, Saccharomyces pastorianus
cgctcaacgtcctgcttggtcaaat

SEQ ID NO: 66706 - DNA, 25 bp, Saccharomyces pastorianus
aaaggtcctgattcgcatactttcc

SEQ ID NO: 66707 - DNA, 25 bp, Saccharomyces pastorianus
cggagcgactcaaacactttagact

SEQ ID NO: 66708 - DNA, 25 bp, Saccharomyces pastorianus
gaatttattgccagggctcacacca

SEQ ID NO: 66709 - DNA, 25 bp, Saccharomyces pastorianus
agaccttctgcttttatcgatccaa

SEQ ID NO: 66710 - DNA, 25 bp, Saccharomyces pastorianus
aggaccattctcaaagaccttctgc

SEQ ID NO: 66711 - DNA, 25 bp, Saccharomyces pastorianus
aaatatctccaccaaagggctcttc

SEQ ID NO: 66712 - DNA, 25 bp, Saccharomyces pastorianus
ggctcactttatcttctgctgcaga

SEQ ID NO: 66713 - DNA, 25 bp, Saccharomyces pastorianus
agggctcttcttttctaatgactaa

SEQ ID NO: 66714 - DNA, 25 bp, Saccharomyces pastorianus
ttgacttgcaggtagctgggctcac

SEQ ID NO: 66715 - DNA, 25 bp, Saccharomyces pastorianus
actaataaggctgggctgtctgcat

SEQ ID NO: 66716 - DNA, 25 bp, Saccharomyces pastorianus
gacgttgtgggctacacgccgttaa

SEQ ID NO: 66717 - DNA, 25 bp, Saccharomyces pastorianus
gatgacaatctcttcctggatacgg

SEQ ID NO: 66718 - DNA, 25 bp, Saccharomyces pastorianus
aataacgacgatgccgctaccaagg

SEQ ID NO: 66719 - DNA, 25 bp, Saccharomyces pastorianus
attcgccactttccgaattcttgga

SEQ ID NO: 66720 - DNA, 25 bp, Saccharomyces pastorianus
aatgggtaccctgagtgagatgcta

SEQ ID NO: 66721 - DNA, 25 bp, Saccharomyces pastorianus
gtactgccaagactgcgatgcgata

SEQ ID NO: 66722 - DNA, 25 bp, Saccharomyces pastorianus
aaccagcatgactacgactcgttgg

SEQ ID NO: 66723 - DNA, 25 bp, Saccharomyces pastorianus
tgagatgctacaagacggcctggtc

SEQ ID NO: 66724 - DNA, 25 bp, Saccharomyces pastorianus
gaaacatgtctacgtggactggcat

SEQ ID NO: 66725 - DNA, 25 bp, Saccharomyces pastorianus
gaccaggtcaccagttatgactcga

SEQ ID NO: 66726 - DNA, 25 bp, Saccharomyces pastorianus
agatgctgctcgactgaacctgtac

SEQ ID NO: 66727 - DNA, 25 bp, Saccharomyces pastorianus
acagtgcggcatttgcggagacaca

SEQ ID NO: 66728 - DNA, 25 bp, Saccharomyces pastorianus
caagcatagcatccagacgcacgtg

SEQ ID NO: 66729 - DNA, 25 bp, Saccharomyces pastorianus
ggcctggtcatagacgccatcaagg

SEQ ID NO: 66730 - DNA, 25 bp, Saccharomyces pastorianus
gtgcggcgagcattggaccagtacc

SEQ ID NO: 66731 - DNA, 25 bp, Saccharomyces pastorianus
gtacaaacgccgaatgtgccagaaa

SEQ ID NO: 66732 - DNA, 25 bp, Saccharomyces pastorianus
cgacagctgcagtgacgatggtagt

SEQ ID NO: 66733 - DNA, 25 bp, Saccharomyces pastorianus
cttcatcacattccatcaactacat

SEQ ID NO: 66734 - DNA, 25 bp, Saccharomyces pastorianus
gagtatagatttaccgcctaagcct

SEQ ID NO: 66735 - DNA, 25 bp, Saccharomyces pastorianus
gcatgataaaccaccaggtcctttt

SEQ ID NO: 66736 - DNA, 25 bp, Saccharomyces pastorianus
gacccatcttcattatctcgttttt

SEQ ID NO: 66737 - DNA, 25 bp, Saccharomyces pastorianus
agctccagttccagtaacaattgcg

SEQ ID NO: 66738 - DNA, 25 bp, Saccharomyces pastorianus
acaaaacgctagagttgcatcccct

SEQ ID NO: 66739 - DNA, 25 bp, Saccharomyces pastorianus
taagcctacaccgacacagaatagt

SEQ ID NO: 66740 - DNA, 25 bp, Saccharomyces pastorianus
agcagcacagcatccagcagtgaaa

SEQ ID NO: 66741 - DNA, 25 bp, Saccharomyces pastorianus
gagcgaaagcggttccagcagcagc

SEQ ID NO: 66742 - DNA, 25 bp, Saccharomyces pastorianus
ttgccaacgatatatgaccgggttt

SEQ ID NO: 66743 - DNA, 25 bp, Saccharomyces pastorianus
ttgtcctctgggtaaagacgaatgt

SEQ ID NO: 66744 - DNA, 25 bp, Saccharomyces pastorianus
atatgaccgggttttgtcctctggg

SEQ ID NO: 66745 - DNA, 25 bp, Saccharomyces pastorianus
tctacatatagatccagccagcaag

SEQ ID NO: 66746 - DNA, 25 bp, Saccharomyces pastorianus
tgggattctgccctctagggaatac

SEQ ID NO: 66747 - DNA, 25 bp, Saccharomyces pastorianus
tctagggaatacttgccccaggcga

SEQ ID NO: 66748 - DNA, 25 bp, Saccharomyces pastorianus
gtccagactgccaatatctacatat

SEQ ID NO: 66749 - DNA, 25 bp, Saccharomyces pastorianus
ttgccccaggcgacatattaagaag

SEQ ID NO: 66750 - DNA, 25 bp, Saccharomyces pastorianus
ggtactgcacgcaaagtccagactg

SEQ ID NO: 66751 - DNA, 25 bp, Saccharomyces pastorianus
gacgaatgtgacatggagcatccac

SEQ ID NO: 66752 - DNA, 25 bp, Saccharomyces pastorianus
agccagcaagatacccaaatgtgag

SEQ ID NO: 66753 - DNA, 25 bp, Saccharomyces pastorianus
gaaggcccaaatcgtgtcccagagg

SEQ ID NO: 66754 - DNA, 25 bp, Saccharomyces pastorianus
taattcaccttgatacagcaaagta

SEQ ID NO: 66755 - DNA, 25 bp, Saccharomyces pastorianus
aaatcgtgtcccagagggcccctat

SEQ ID NO: 66756 - DNA, 25 bp, Saccharomyces pastorianus
attttacaactcgagagaaggccca

SEQ ID NO: 66757 - DNA, 25 bp, Saccharomyces pastorianus
tcactcgatcccgatagacctatat

SEQ ID NO: 66758 - DNA, 25 bp, Saccharomyces pastorianus
gatcccgatagacctatatgtgaat

SEQ ID NO: 66759 - DNA, 25 bp, Saccharomyces pastorianus
gagtttaattcaccttgatacagca

SEQ ID NO: 66760 - DNA, 25 bp, Saccharomyces pastorianus
gagccctttctcaggcaagagtact

SEQ ID NO: 66761 - DNA, 25 bp, Saccharomyces pastorianus
gagagaaggcccaaatcgtgtccca

SEQ ID NO: 66762 - DNA, 25 bp, Saccharomyces pastorianus
aaatttgagccctttctcaggcaag

SEQ ID NO: 66763 - DNA, 25 bp, Saccharomyces pastorianus
ctttctcaggcaagagtactcgttt

SEQ ID NO: 66764 - DNA, 25 bp, Saccharomyces pastorianus
gatgcaccaaaggattctacagatc

SEQ ID NO: 66765 - DNA, 25 bp, Saccharomyces pastorianus
aatgctcatgtctacgcgcgtgatc

SEQ ID NO: 66766 - DNA, 25 bp, Saccharomyces pastorianus
cttatagactattgccccagatcga

SEQ ID NO: 66767 - DNA, 25 bp, Saccharomyces pastorianus
gtagagagtgctggtgccatgacac

SEQ ID NO: 66768 - DNA, 25 bp, Saccharomyces pastorianus
agtttccacagcctcttatagacta

SEQ ID NO: 66769 - DNA, 25 bp, Saccharomyces pastorianus
tttcgctaattgtccagttgtccca

SEQ ID NO: 66770 - DNA, 25 bp, Saccharomyces pastorianus
gcgcgtgatctgaagtttgaacctc

SEQ ID NO: 66771 - DNA, 25 bp, Saccharomyces pastorianus
tagacagtctaccactttcgctaat

SEQ ID NO: 66772 - DNA, 25 bp, Saccharomyces pastorianus
agatcgatatcctgcagccaattaa

SEQ ID NO: 66773 - DNA, 25 bp, Saccharomyces pastorianus
tcccaccgggcgtcattggtattga

SEQ ID NO: 66774 - DNA, 25 bp, Saccharomyces pastorianus
gaaggcgcattgtattttaggtgtc

SEQ ID NO: 66775 - DNA, 25 bp, Saccharomyces pastorianus
gaggttttgcatttgtggaattctt

SEQ ID NO: 66776 - DNA, 25 bp, Saccharomyces pastorianus
atatctgctatggatggcaccgtaa

SEQ ID NO: 66777 - DNA, 25 bp, Saccharomyces pastorianus
ggtgtccatttgttaggccgtagat

SEQ ID NO: 66778 - DNA, 25 bp, Saccharomyces pastorianus
atggcaccgtaattgatgggcacaa

SEQ ID NO: 66779 - DNA, 25 bp, Saccharomyces pastorianus
caagtcgctactaatgaaatggcag

SEQ ID NO: 66780 - DNA, 25 bp, Saccharomyces pastorianus
caaggcaaaactttgtccatgggtt

SEQ ID NO: 66781 - DNA, 25 bp, Saccharomyces pastorianus
attatctcacagacaagcatctcat

SEQ ID NO: 66782 - DNA, 25 bp, Saccharomyces pastorianus
gtagattggccatgcaatatgcaga

SEQ ID NO: 66783 - DNA, 25 bp, Saccharomyces pastorianus
gaatttaccatttgaagctacgaga

SEQ ID NO: 66784 - DNA, 25 bp, Saccharomyces pastorianus
ctggatttgttgttgctcaggtaaa

SEQ ID NO: 66785 - DNA, 25 bp, Saccharomyces pastorianus
gcaaatgctgtcatatctgctatgg

SEQ ID NO: 66786 - DNA, 25 bp, Saccharomyces pastorianus
aaatcatctcgtgcttccagtgttc

SEQ ID NO: 66787 - DNA, 25 bp, Saccharomyces pastorianus
aagcgatcatttcagcaagtgcgta

SEQ ID NO: 66788 - DNA, 25 bp, Saccharomyces pastorianus
ccagtgttccttcgattgtcaatca

SEQ ID NO: 66789 - DNA, 25 bp, Saccharomyces pastorianus
ggatccgaactctcagcttttgaaa

SEQ ID NO: 66790 - DNA, 25 bp, Saccharomyces pastorianus
aagtacctcaggtagccgttaccag

SEQ ID NO: 66791 - DNA, 25 bp, Saccharomyces pastorianus
tggtagttcacccagttgtgtgcca

SEQ ID NO: 66792 - DNA, 25 bp, Saccharomyces pastorianus
tattaaaccaccttacaacagcctg

SEQ ID NO: 66793 - DNA, 25 bp, Saccharomyces pastorianus
gaaacgttccactagtgcgtaccga

SEQ ID NO: 66794 - DNA, 25 bp, Saccharomyces pastorianus
ccaacccaggtatgtcgcaatcaaa

SEQ ID NO: 66795 - DNA, 25 bp, Saccharomyces pastorianus
gaagacatctagtgccggaaacgtt

SEQ ID NO: 66796 - DNA, 25 bp, Saccharomyces pastorianus
gcttttgaaaaccagtcgcctttgt

SEQ ID NO: 66797 - DNA, 25 bp, Saccharomyces pastorianus
agcgttgggccttcttcaaaagaca

SEQ ID NO: 66798 - DNA, 25 bp, Saccharomyces pastorianus
ggttccgcctcgagaaaacttgttg

SEQ ID NO: 66799 - DNA, 25 bp, Saccharomyces pastorianus
ttagcagctgcaacatcttggttcc

SEQ ID NO: 66800 - DNA, 25 bp, Saccharomyces pastorianus
aactggcacccatactagattattc

SEQ ID NO: 66801 - DNA, 25 bp, Saccharomyces pastorianus
gattttcaacctgggatgtcttcaa

SEQ ID NO: 66802 - DNA, 25 bp, Saccharomyces pastorianus
aacatcttggttcccactttcaata

SEQ ID NO: 66803 - DNA, 25 bp, Saccharomyces pastorianus
gaattcagcttctattgtgcgggac

SEQ ID NO: 66804 - DNA, 25 bp, Saccharomyces pastorianus
ggaatttacgcagtcgattttcaac

SEQ ID NO: 66805 - DNA, 25 bp, Saccharomyces pastorianus
agaatacgacgttcaactgcgggaa

SEQ ID NO: 66806 - DNA, 25 bp, Saccharomyces pastorianus
tcttagcgtccccaatgagggcaga

SEQ ID NO: 66807 - DNA, 25 bp, Saccharomyces pastorianus
taatgtgtacggcaggctcttagcg

SEQ ID NO: 66808 - DNA, 25 bp, Saccharomyces pastorianus
aggctctcatagtctcttatccgat

SEQ ID NO: 66809 - DNA, 25 bp, Saccharomyces pastorianus
taattactctacatcctcatcaaat

SEQ ID NO: 66810 - DNA, 25 bp, Saccharomyces pastorianus
agcgtcactttttatgcagcctgat

SEQ ID NO: 66811 - DNA, 25 bp, Saccharomyces pastorianus
tcacaggaaaatatcagcgtcactt

SEQ ID NO: 66812 - DNA, 25 bp, Saccharomyces pastorianus
gattcctgggacttgcgcagtatac

SEQ ID NO: 66813 - DNA, 25 bp, Saccharomyces pastorianus
gtccgtgtgttataaaggctctcat

SEQ ID NO: 66814 - DNA, 25 bp, Saccharomyces pastorianus
taggctattaagtccaagttccgaa

SEQ ID NO: 66815 - DNA, 25 bp, Saccharomyces pastorianus
caagggcacccgaattcatttaatt

SEQ ID NO: 66816 - DNA, 25 bp, Saccharomyces pastorianus
acatactgttgaagcccaagggcac

SEQ ID NO: 66817 - DNA, 25 bp, Saccharomyces pastorianus
gagaagagtttttcacggccttgaa

SEQ ID NO: 66818 - DNA, 25 bp, Saccharomyces pastorianus
gtcaggattgttttacagcacttag

SEQ ID NO: 66819 - DNA, 25 bp, Saccharomyces pastorianus
gatggttatgtgctagcttgtcctt

SEQ ID NO: 66820 - DNA, 25 bp, Saccharomyces pastorianus
gtgacgacgatgacagctccagttc

SEQ ID NO: 66821 - DNA, 25 bp, Saccharomyces pastorianus
gaccacattggacacgatggaatct

SEQ ID NO: 66822 - DNA, 25 bp, Saccharomyces pastorianus
aaatcaggtatctctgggctcctca

SEQ ID NO: 66823 - DNA, 25 bp, Saccharomyces pastorianus
actcgcctaggatatcttacttcag

SEQ ID NO: 66824 - DNA, 25 bp, Saccharomyces pastorianus
agcaatacctttgttgtactcgcct

SEQ ID NO: 66825 - DNA, 25 bp, Saccharomyces pastorianus
gggctccgactaggatatcattatt

SEQ ID NO: 66826 - DNA, 25 bp, Saccharomyces pastorianus
gctactatgcaagttgagtcccctt

SEQ ID NO: 66827 - DNA, 25 bp, Saccharomyces pastorianus
agcttgtcctttcggcactgaagaa

SEQ ID NO: 66828 - DNA, 25 bp, Saccharomyces pastorianus
agttccagctcacttactgacatgg

SEQ ID NO: 66829 - DNA, 25 bp, Saccharomyces pastorianus
atgctaattttagaccacgttcggg

SEQ ID NO: 66830 - DNA, 25 bp, Saccharomyces pastorianus
agacatcgcatccatattcataccg

SEQ ID NO: 66831 - DNA, 25 bp, Saccharomyces pastorianus
tatagctttggttgcactggacata

SEQ ID NO: 66832 - DNA, 25 bp, Saccharomyces pastorianus
acatcgcatccatgttcattgatga

SEQ ID NO: 66833 - DNA, 25 bp, Saccharomyces pastorianus
atgttttgcttgcactggacatcgc

SEQ ID NO: 66834 - DNA, 25 bp, Saccharomyces pastorianus
gtggattgtgtaccggctgaactca

SEQ ID NO: 66835 - DNA, 25 bp, Saccharomyces pastorianus
acgctaccgtcttcgatgcactaga

SEQ ID NO: 66836 - DNA, 25 bp, Saccharomyces pastorianus
gccatcgatgccatacttgaagcca

SEQ ID NO: 66837 - DNA, 25 bp, Saccharomyces pastorianus
atacccgacatgcttgagcctgaag

SEQ ID NO: 66838 - DNA, 25 bp, Saccharomyces pastorianus
atactcatcgaagccatgctcgacg

SEQ ID NO: 66839 - DNA, 25 bp, Saccharomyces pastorianus
gaactcatggttgcagagctcccca

SEQ ID NO: 66840 - DNA, 25 bp, Saccharomyces pastorianus
gatgacatactcgaagctatagctt

SEQ ID NO: 66841 - DNA, 25 bp, Saccharomyces pastorianus
ggatctcttccacgacattattaga

SEQ ID NO: 66842 - DNA, 25 bp, Saccharomyces pastorianus
caccggcttagccttatcagaagtg

SEQ ID NO: 66843 - DNA, 25 bp, Saccharomyces pastorianus
agcacacctgatccaattgccgttg

SEQ ID NO: 66844 - DNA, 25 bp, Saccharomyces pastorianus
ttgccgataccacgtcagctagtga

SEQ ID NO: 66845 - DNA, 25 bp, Saccharomyces pastorianus
gacatacgttttcgcagtcatcacc

SEQ ID NO: 66846 - DNA, 25 bp, Saccharomyces pastorianus
ataggtgcaaactagccctgttaaa

SEQ ID NO: 66847 - DNA, 25 bp, Saccharomyces pastorianus
gaactgtcctggttttggtaactgc

SEQ ID NO: 66848 - DNA, 25 bp, Saccharomyces pastorianus
atgtaactgcgccaaagtctccaga

SEQ ID NO: 66849 - DNA, 25 bp, Saccharomyces pastorianus
atttacctccacaatgatcatctac

SEQ ID NO: 66850 - DNA, 25 bp, Saccharomyces pastorianus
ggtgacatattcgttccttctttaa

SEQ ID NO: 66851 - DNA, 25 bp, Saccharomyces pastorianus
atctgtctgaggttgctattgcgga

SEQ ID NO: 66852 - DNA, 25 bp, Saccharomyces pastorianus
tatggcatcgatggcgagcatgtcg

SEQ ID NO: 66853 - DNA, 25 bp, Saccharomyces pastorianus
cagctcgatggcaggcatgtcgatg

SEQ ID NO: 66854 - DNA, 25 bp, Saccharomyces pastorianus
acaatccacttcaggctcaagcatg

SEQ ID NO: 66855 - DNA, 25 bp, Saccharomyces pastorianus
gggagctctgcaaccatgagttcag

SEQ ID NO: 66856 - DNA, 25 bp, Saccharomyces pastorianus
tgagttcagccggtacacaatccac

SEQ ID NO: 66857 - DNA, 25 bp, Saccharomyces pastorianus
agctcaatggcaggcatgtcgatgg

SEQ ID NO: 66858 - DNA, 25 bp, Saccharomyces pastorianus
agcgtcgagcatggcttcgatgagt

SEQ ID NO: 66859 - DNA, 25 bp, Saccharomyces pastorianus
tatggatgcgatgtccagtgcaagc

SEQ ID NO: 66860 - DNA, 25 bp, Saccharomyces pastorianus
agctatagcttcgagtatgtcatca

SEQ ID NO: 66861 - DNA, 25 bp, Saccharomyces pastorianus
aacattggcttcaagtatggcatcg

SEQ ID NO: 66862 - DNA, 25 bp, Saccharomyces pastorianus
gacgctatgtccagtgcaaccaaag

SEQ ID NO: 66863 - DNA, 25 bp, Saccharomyces pastorianus
ggttcttctatctctaaggtcaatg

SEQ ID NO: 66864 - DNA, 25 bp, Saccharomyces pastorianus
gaaaacacaacttaccgacaaagag

SEQ ID NO: 66865 - DNA, 25 bp, Saccharomyces pastorianus
atccccattcccagtggttcttcta

SEQ ID NO: 66866 - DNA, 25 bp, Saccharomyces pastorianus
tctatctctaaggtcaatgaaaact

SEQ ID NO: 66867 - DNA, 25 bp, Saccharomyces pastorianus
aaattcatccccattcccagtggtt

SEQ ID NO: 66868 - DNA, 25 bp, Saccharomyces pastorianus
acgactcactacagggatcaaacac

SEQ ID NO: 66869 - DNA, 25 bp, Saccharomyces pastorianus
tatgttccggaatacaaaggcgcca

SEQ ID NO: 66870 - DNA, 25 bp, Saccharomyces pastorianus
gggatcaaacactggaactatgttc

SEQ ID NO: 66871 - DNA, 25 bp, Saccharomyces pastorianus
caaaggcgccaaattcatccccatt

SEQ ID NO: 66872 - DNA, 25 bp, Saccharomyces pastorianus
cacaacttaccgacaaagagttcaa

SEQ ID NO: 66873 - DNA, 25 bp, Saccharomyces pastorianus
aaacactggaactatgttccggaat

SEQ ID NO: 66874 - DNA, 25 bp, Saccharomyces pastorianus
gagagctgagcccattcctcaatcg

SEQ ID NO: 66875 - DNA, 25 bp, Saccharomyces pastorianus
gcacagagctgttgagttggccaga

SEQ ID NO: 66876 - DNA, 25 bp, Saccharomyces pastorianus
agttggccagagaacgtggacacaa

SEQ ID NO: 66877 - DNA, 25 bp, Saccharomyces pastorianus
accggttatggtctgatgagtttga

SEQ ID NO: 66878 - DNA, 25 bp, Saccharomyces pastorianus
tatccataagttagataccggttat

SEQ ID NO: 66879 - DNA, 25 bp, Saccharomyces pastorianus
tcttcaacgttggtgagttttacgg

SEQ ID NO: 66880 - DNA, 25 bp, Saccharomyces pastorianus
cactgaattgagaaacgatatccat

SEQ ID NO: 66881 - DNA, 25 bp, Saccharomyces pastorianus
ggccttcttcaacgttggtgagttt

SEQ ID NO: 66882 - DNA, 25 bp, Saccharomyces pastorianus
gagtttgacctggagagctgagccc

SEQ ID NO: 66883 - DNA, 25 bp, Saccharomyces pastorianus
attcctcaatcgcaagctttcgaag

SEQ ID NO: 66884 - DNA, 25 bp, Saccharomyces pastorianus
gctttcgaagcgatgcacagagctg

SEQ ID NO: 66885 - DNA, 25 bp, Saccharomyces pastorianus
ggaggttttctttcatgatcattct

SEQ ID NO: 66886 - DNA, 25 bp, Saccharomyces pastorianus
aacgatgtgggcaatctctcagcgg

SEQ ID NO: 66887 - DNA, 25 bp, Saccharomyces pastorianus
ttcgaggttcacttctttccaagaa

SEQ ID NO: 66888 - DNA, 25 bp, Saccharomyces pastorianus
tatcgcaaatcttcacgggaccaat

SEQ ID NO: 66889 - DNA, 25 bp, Saccharomyces pastorianus
ggaccaatggccgtggtggctacaa

SEQ ID NO: 66890 - DNA, 25 bp, Saccharomyces pastorianus
gatttccacgttaatcacgcaacct

SEQ ID NO: 66891 - DNA, 25 bp, Saccharomyces pastorianus
gtagagtccgccaagttcagtaatg

SEQ ID NO: 66892 - DNA, 25 bp, Saccharomyces pastorianus
aaactcattttcctgtactcttcat

SEQ ID NO: 66893 - DNA, 25 bp, Saccharomyces pastorianus
ggtggctgccagcatatcgcaaatc

SEQ ID NO: 66894 - DNA, 25 bp, Saccharomyces pastorianus
ataaacccgtccattacatatgcct

SEQ ID NO: 66895 - DNA, 25 bp, Saccharomyces pastorianus
aacaaactgtccactctgtagagtc

SEQ ID NO: 66896 - DNA, 25 bp, Saccharomyces pastorianus
aaagaagtctgttatggattctgcc

SEQ ID NO: 66897 - DNA, 25 bp, Saccharomyces pastorianus
tcacgcggatcttcagtacaaactc

SEQ ID NO: 66898 - DNA, 25 bp, Saccharomyces pastorianus
gaagactccacttcacgcggatctt

SEQ ID NO: 66899 - DNA, 25 bp, Saccharomyces pastorianus
aactctatacgaacaagctgccgca

SEQ ID NO: 66900 - DNA, 25 bp, Saccharomyces pastorianus
cctgcacaaactaccactgattaca

SEQ ID NO: 66901 - DNA, 25 bp, Saccharomyces pastorianus
acaagctgccgcaaggaggaacaga

SEQ ID NO: 66902 - DNA, 25 bp, Saccharomyces pastorianus
tctaaatccggtgaagactccactt

SEQ ID NO: 66903 - DNA, 25 bp, Saccharomyces pastorianus
agtatgctcctgtaagcaacatcaa

SEQ ID NO: 66904 - DNA, 25 bp, Saccharomyces pastorianus
tcaacacagtgcctacgaacgcgag

SEQ ID NO: 66905 - DNA, 25 bp, Saccharomyces pastorianus
tggttccaccttaaacaacagtgaa

SEQ ID NO: 66906 - DNA, 25 bp, Saccharomyces pastorianus
ggaacagagctgctgcacctgcaca

SEQ ID NO: 66907 - DNA, 25 bp, Saccharomyces pastorianus
tattgcggctcaactggacatcgac

SEQ ID NO: 66908 - DNA, 25 bp, Saccharomyces pastorianus
ggaagccacgcctgatgatggtaca

SEQ ID NO: 66909 - DNA, 25 bp, Saccharomyces pastorianus
gtgccactccaaccagtagacagga

SEQ ID NO: 66910 - DNA, 25 bp, Saccharomyces pastorianus
aaaccacactgatgacagcgggcgt

SEQ ID NO: 66911 - DNA, 25 bp, Saccharomyces pastorianus
aaactggcgatacttctttgattgc

SEQ ID NO: 66912 - DNA, 25 bp, Saccharomyces pastorianus
accaaagttctcaaccagcggtaga

SEQ ID NO: 66913 - DNA, 25 bp, Saccharomyces pastorianus
acagcgggcgtcaaggagtcacaga

SEQ ID NO: 66914 - DNA, 25 bp, Saccharomyces pastorianus
acagctttcctgcatgagtcggttt

SEQ ID NO: 66915 - DNA, 25 bp, Saccharomyces pastorianus
gatagggattctagtgccactccaa

SEQ ID NO: 66916 - DNA, 25 bp, Saccharomyces pastorianus
agcgcagacctctcggatgatgaat

SEQ ID NO: 66917 - DNA, 25 bp, Saccharomyces pastorianus
tggcccaaaggacacaggcgacttg

SEQ ID NO: 66918 - DNA, 25 bp, Saccharomyces pastorianus
gagacgtttggaagtgtattcgata

SEQ ID NO: 66919 - DNA, 25 bp, Saccharomyces pastorianus
gttacgattcattactcagtgcgga

SEQ ID NO: 66920 - DNA, 25 bp, Saccharomyces pastorianus
attatcatccaaatgtcgccacctt

SEQ ID NO: 66921 - DNA, 25 bp, Saccharomyces pastorianus
ttggccaaggtcttttctcaaccat

SEQ ID NO: 66922 - DNA, 25 bp, Saccharomyces pastorianus
aaagctgagttacaacatggaagat

SEQ ID NO: 66923 - DNA, 25 bp, Saccharomyces pastorianus
agattgaaaactcttcctactttag

SEQ ID NO: 66924 - DNA, 25 bp, Saccharomyces pastorianus
tcctactttagaatttgagacgttt

SEQ ID NO: 66925 - DNA, 25 bp, Saccharomyces pastorianus
atttcttggattggagttacgattc

SEQ ID NO: 66926 - DNA, 25 bp, Saccharomyces pastorianus
tcattactcagtgcggaatcatcaa

SEQ ID NO: 66927 - DNA, 25 bp, Saccharomyces pastorianus
aaatgtcgccaccttggccaaggtc

SEQ ID NO: 66928 - DNA, 25 bp, Saccharomyces pastorianus
gccaaggtcttttctcaaccattta

SEQ ID NO: 66929 - DNA, 25 bp, Saccharomyces pastorianus
cgaccatttgacgaatttgaaagac

SEQ ID NO: 66930 - DNA, 25 bp, Saccharomyces pastorianus
tgcacaatccagctttcatttccga

SEQ ID NO: 66931 - DNA, 25 bp, Saccharomyces pastorianus
tttgaaagacagttacgtggatcca

SEQ ID NO: 66932 - DNA, 25 bp, Saccharomyces pastorianus
tgttgcacaatccagctttcatttc

SEQ ID NO: 66933 - DNA, 25 bp, Saccharomyces pastorianus
aatccagctttcatttccgatccat

SEQ ID NO: 66934 - DNA, 25 bp, Saccharomyces pastorianus
tttcatttccgatccattccagatc

SEQ ID NO: 66935 - DNA, 25 bp, Saccharomyces pastorianus
gagcaagtcgaccatttgacgaatt

SEQ ID NO: 66936 - DNA, 25 bp, Saccharomyces pastorianus
agatccctgagcaagtcgaccattt

SEQ ID NO: 66937 - DNA, 25 bp, Saccharomyces pastorianus
atccctgagcaagtcgaccatttga

SEQ ID NO: 66938 - DNA, 25 bp, Saccharomyces pastorianus
atgataatgttgcacaatccagctt

SEQ ID NO: 66939 - DNA, 25 bp, Saccharomyces pastorianus
atccattccagatccctgagcaagt

SEQ ID NO: 66940 - DNA, 25 bp, Saccharomyces pastorianus
aaacccaccgcaagccattgagaat

SEQ ID NO: 66941 - DNA, 25 bp, Saccharomyces pastorianus
tgttatccccatcttggccttgaat

SEQ ID NO: 66942 - DNA, 25 bp, Saccharomyces pastorianus
aaaactggctctctttactgaacgg

SEQ ID NO: 66943 - DNA, 25 bp, Saccharomyces pastorianus
catttggtcgcttccttcatgaaga

SEQ ID NO: 66944 - DNA, 25 bp, Saccharomyces pastorianus
ggccttgaatggtcttttcgagcta

SEQ ID NO: 66945 - DNA, 25 bp, Saccharomyces pastorianus
ttggcgagactcacactggaatccc

SEQ ID NO: 66946 - DNA, 25 bp, Saccharomyces pastorianus
aacggtcaattatctcttcaacagt

SEQ ID NO: 66947 - DNA, 25 bp, Saccharomyces pastorianus
aacgcatctatcagctcatttggtc

SEQ ID NO: 66948 - DNA, 25 bp, Saccharomyces pastorianus
ggcttaccaggagctacttcttaaa

SEQ ID NO: 66949 - DNA, 25 bp, Saccharomyces pastorianus
ggacattttcttgtcttcaacgcat

SEQ ID NO: 66950 - DNA, 25 bp, Saccharomyces pastorianus
aattgtgtccgtgattccctttatt

SEQ ID NO: 66951 - DNA, 25 bp, Saccharomyces pastorianus
aactctattattaagctcgtcaatg

SEQ ID NO: 66952 - DNA, 25 bp, Saccharomyces pastorianus
gtcattccagaggatgtctcccaat

SEQ ID NO: 66953 - DNA, 25 bp, Saccharomyces pastorianus
ttaagctcgtcaatgaacttgtcat

SEQ ID NO: 66954 - DNA, 25 bp, Saccharomyces pastorianus
tgactactgccaccgacagaaagca

SEQ ID NO: 66955 - DNA, 25 bp, Saccharomyces pastorianus
tcttgatcatgtcgctgttccaaat

SEQ ID NO: 66956 - DNA, 25 bp, Saccharomyces pastorianus
gaggatgtctcccaattgaaagatg

SEQ ID NO: 66957 - DNA, 25 bp, Saccharomyces pastorianus
aagaagctgactactgccaccgaca

SEQ ID NO: 66958 - DNA, 25 bp, Saccharomyces pastorianus
ttgaggttcttgatcatgtcgctgt

SEQ ID NO: 66959 - DNA, 25 bp, Saccharomyces pastorianus
gccaccgacagaaagcagtataact

SEQ ID NO: 66960 - DNA, 25 bp, Saccharomyces pastorianus
tattgccaagaagctgactactgcc

SEQ ID NO: 66961 - DNA, 25 bp, Saccharomyces pastorianus
atgaacttgtcattccagaggatgt

SEQ ID NO: 66962 - DNA, 25 bp, Saccharomyces pastorianus
ggacgtctttccactcagggaagta

SEQ ID NO: 66963 - DNA, 25 bp, Saccharomyces pastorianus
gaagggacgtctttccactcaggga

SEQ ID NO: 66964 - DNA, 25 bp, Saccharomyces pastorianus
tatgaagggacgtctttccactcag

SEQ ID NO: 66965 - DNA, 25 bp, Saccharomyces pastorianus
gtatgaagggacgtctttccactca

SEQ ID NO: 66966 - DNA, 25 bp, Saccharomyces pastorianus
tgaagggacgtctttccactcaggg

SEQ ID NO: 66967 - DNA, 25 bp, Saccharomyces pastorianus
acgtctttccactcagggaagtact

SEQ ID NO: 66968 - DNA, 25 bp, Saccharomyces pastorianus
agggacgtctttccactcagggaag

SEQ ID NO: 66969 - DNA, 25 bp, Saccharomyces pastorianus
atgtatgaagggacgtctttccact

SEQ ID NO: 66970 - DNA, 25 bp, Saccharomyces pastorianus
atgaagggacgtctttccactcagg

SEQ ID NO: 66971 - DNA, 25 bp, Saccharomyces pastorianus
gtctttccactcagggaagtactcc

SEQ ID NO: 66972 - DNA, 25 bp, Saccharomyces pastorianus
gacgtctttccactcagggaagtac

SEQ ID NO: 66973 - DNA, 25 bp, Saccharomyces pastorianus
tgtccacctggatcccactttgttg

SEQ ID NO: 66974 - DNA, 25 bp, Saccharomyces pastorianus
ggttcagatcctttttgacgtggtc

SEQ ID NO: 66975 - DNA, 25 bp, Saccharomyces pastorianus
gttttctatgtccacctggatccca

SEQ ID NO: 66976 - DNA, 25 bp, Saccharomyces pastorianus
atgggattcctgataggcgccatct

SEQ ID NO: 66977 - DNA, 25 bp, Saccharomyces pastorianus
atgtacgtcacttttggcggcgtgc

SEQ ID NO: 66978 - DNA, 25 bp, Saccharomyces pastorianus
gcgcagtggttcagatcctttttga

SEQ ID NO: 66979 - DNA, 25 bp, Saccharomyces pastorianus
gacagcgggtacaatcatgggattc

SEQ ID NO: 66980 - DNA, 25 bp, Saccharomyces pastorianus
gcagggcctgacagcgggtacaatc

SEQ ID NO: 66981 - DNA, 25 bp, Saccharomyces pastorianus
gataggcgccatctacagatccgga

SEQ ID NO: 66982 - DNA, 25 bp, Saccharomyces pastorianus
actttgttgcgcagtggttcagatc

SEQ ID NO: 66983 - DNA, 25 bp, Saccharomyces pastorianus
acagatccggactgttttctatgtc

SEQ ID NO: 66984 - DNA, 25 bp, Saccharomyces pastorianus
gggacggtatctgcatatccagttt

SEQ ID NO: 66985 - DNA, 25 bp, Saccharomyces pastorianus
gagacttaaccctaaccttattgat

SEQ ID NO: 66986 - DNA, 25 bp, Saccharomyces pastorianus
tatccagtttaaccgatcgttttca

SEQ ID NO: 66987 - DNA, 25 bp, Saccharomyces pastorianus
gtcactggtacattcagactctgtg

SEQ ID NO: 66988 - DNA, 25 bp, Saccharomyces pastorianus
gggctctctacttttcacattcaga

SEQ ID NO: 66989 - DNA, 25 bp, Saccharomyces pastorianus
attcagacggacgaacccaatgata

SEQ ID NO: 66990 - DNA, 25 bp, Saccharomyces pastorianus
aagagcctttaatttgagtcgacag

SEQ ID NO: 66991 - DNA, 25 bp, Saccharomyces pastorianus
agaatacgtcacaagccgagcatac

SEQ ID NO: 66992 - DNA, 25 bp, Saccharomyces pastorianus
gtgagctttacaaccatcgcaaaaa

SEQ ID NO: 66993 - DNA, 25 bp, Saccharomyces pastorianus
agcatacctttagtgggctctctac

SEQ ID NO: 66994 - DNA, 25 bp, Saccharomyces pastorianus
gattcagaagccactcaaatgttat

SEQ ID NO: 66995 - DNA, 25 bp, Saccharomyces pastorianus
ggccgaacaagccaacaggccattt

SEQ ID NO: 66996 - DNA, 25 bp, Saccharomyces pastorianus
atttccagatgtctgggcaacaaat

SEQ ID NO: 66997 - DNA, 25 bp, Saccharomyces pastorianus
agatgtctgggcaacaaatggccga

SEQ ID NO: 66998 - DNA, 25 bp, Saccharomyces pastorianus
gccgaacaagccaacaggccatttt

SEQ ID NO: 66999 - DNA, 25 bp, Saccharomyces pastorianus
acaaatggccgaacaagccaacagg

SEQ ID NO: 67000 - DNA, 25 bp, Saccharomyces pastorianus
gaacaagccaacaggccatttttcc

SEQ ID NO: 67001 - DNA, 25 bp, Saccharomyces pastorianus
atgtctgggcaacaaatggccgaac

SEQ ID NO: 67002 - DNA, 25 bp, Saccharomyces pastorianus
aacaagccaacaggccatttttcca

SEQ ID NO: 67003 - DNA, 25 bp, Saccharomyces pastorianus
caagccaacaggccatttttccaag

SEQ ID NO: 67004 - DNA, 25 bp, Saccharomyces pastorianus
gtctgggcaacaaatggccgaacaa

SEQ ID NO: 67005 - DNA, 25 bp, Saccharomyces pastorianus
tgggcaacaaatggccgaacaagcc

SEQ ID NO: 67006 - DNA, 25 bp, Saccharomyces pastorianus
aaagatcaacatccttggggaattt

SEQ ID NO: 67007 - DNA, 25 bp, Saccharomyces pastorianus
gacaaaagatcaacatccttgggga

SEQ ID NO: 67008 - DNA, 25 bp, Saccharomyces pastorianus
tatacgagacaaaagatcaacatcc

SEQ ID NO: 67009 - DNA, 25 bp, Saccharomyces pastorianus
atatacgagacaaaagatcaacatc

SEQ ID NO: 67010 - DNA, 25 bp, Saccharomyces pastorianus
gagacaaaagatcaacatccttggg

SEQ ID NO: 67011 - DNA, 25 bp, Saccharomyces pastorianus
gatatacgagacaaaagatcaacat

SEQ ID NO: 67012 - DNA, 25 bp, Saccharomyces pastorianus
acgagacaaaagatcaacatccttg

SEQ ID NO: 67013 - DNA, 25 bp, Saccharomyces pastorianus
cgagacaaaagatcaacatccttgg

SEQ ID NO: 67014 - DNA, 25 bp, Saccharomyces pastorianus
caaaagatcaacatccttggggaat

SEQ ID NO: 67015 - DNA, 25 bp, Saccharomyces pastorianus
tacgagacaaaagatcaacatcctt

SEQ ID NO: 67016 - DNA, 25 bp, Saccharomyces pastorianus
atacgagacaaaagatcaacatcct

SEQ ID NO: 67017 - DNA, 25 bp, Saccharomyces pastorianus
gtctccatttatgacttccctggta

SEQ ID NO: 67018 - DNA, 25 bp, Saccharomyces pastorianus
gtctgtctaaggtcgacattccctt

SEQ ID NO: 67019 - DNA, 25 bp, Saccharomyces pastorianus
acaggaccaggtggcctcgattatt

SEQ ID NO: 67020 - DNA, 25 bp, Saccharomyces pastorianus
tgtgcagtacattgaggacggtcgt

SEQ ID NO: 67021 - DNA, 25 bp, Saccharomyces pastorianus
agactcgctggctgataagatcgtg

SEQ ID NO: 67022 - DNA, 25 bp, Saccharomyces pastorianus
aagcccgtcgaggatatcataaaga

SEQ ID NO: 67023 - DNA, 25 bp, Saccharomyces pastorianus
gtttgtcgaattaggcgtctccatt

SEQ ID NO: 67024 - DNA, 25 bp, Saccharomyces pastorianus
tggtactcccgaggccagcaaggga

SEQ ID NO: 67025 - DNA, 25 bp, Saccharomyces pastorianus
gaatttcccgagttacagaagcccg

SEQ ID NO: 67026 - DNA, 25 bp, Saccharomyces pastorianus
cgtggaccgtttgtacaagttgaat

SEQ ID NO: 67027 - DNA, 25 bp, Saccharomyces pastorianus
acaacaagagttgggcgccacacag

SEQ ID NO: 67028 - DNA, 25 bp, Saccharomyces pastorianus
agtccgatgaggatcttgccagttc

SEQ ID NO: 67029 - DNA, 25 bp, Saccharomyces pastorianus
gacgaggtcaatttcttggatttag

SEQ ID NO: 67030 - DNA, 25 bp, Saccharomyces pastorianus
tttagattgcgaataccgtgttgtt

SEQ ID NO: 67031 - DNA, 25 bp, Saccharomyces pastorianus
gaaactgaagtcacgcttgtcggac

SEQ ID NO: 67032 - DNA, 25 bp, Saccharomyces pastorianus
gatgagctggacaaagacttgaacc

SEQ ID NO: 67033 - DNA, 25 bp, Saccharomyces pastorianus
gaaatcataacagccttgacgaggt

SEQ ID NO: 67034 - DNA, 25 bp, Saccharomyces pastorianus
tatcgtcaccgtttggaaaccaaat

SEQ ID NO: 67035 - DNA, 25 bp, Saccharomyces pastorianus
tcacgcttgtcggactatcgaaaga

SEQ ID NO: 67036 - DNA, 25 bp, Saccharomyces pastorianus
atgggcgaaggtatcgtcaccgttt

SEQ ID NO: 67037 - DNA, 25 bp, Saccharomyces pastorianus
atacgcttttatgcgggatgggcga

SEQ ID NO: 67038 - DNA, 25 bp, Saccharomyces pastorianus
gatgacagctccgaagaaagttcta

SEQ ID NO: 67039 - DNA, 25 bp, Saccharomyces pastorianus
gtcgttggccctgtttcaagtaatc

SEQ ID NO: 67040 - DNA, 25 bp, Saccharomyces pastorianus
attttgccattaacgctcacattgt

SEQ ID NO: 67041 - DNA, 25 bp, Saccharomyces pastorianus
aaagggtcaccagtattttgccatt

SEQ ID NO: 67042 - DNA, 25 bp, Saccharomyces pastorianus
gggaaccgtcgcacaagatgtcatt

SEQ ID NO: 67043 - DNA, 25 bp, Saccharomyces pastorianus
agtactatgtacagccactctgaaa

SEQ ID NO: 67044 - DNA, 25 bp, Saccharomyces pastorianus
ttactgaaccgagaggcagctgcat

SEQ ID NO: 67045 - DNA, 25 bp, Saccharomyces pastorianus
gggtaaaagattgtctcctctgaat

SEQ ID NO: 67046 - DNA, 25 bp, Saccharomyces pastorianus
attacggagcataaggcctactgtc

SEQ ID NO: 67047 - DNA, 25 bp, Saccharomyces pastorianus
atattgaatttgctcctgtcgcagc

SEQ ID NO: 67048 - DNA, 25 bp, Saccharomyces pastorianus
actgggtgtccctatggcaatattg

SEQ ID NO: 67049 - DNA, 25 bp, Saccharomyces pastorianus
tgatcgaattcgtctcagaggatga

SEQ ID NO: 67050 - DNA, 25 bp, Saccharomyces pastorianus
ggttgagtcttctactgaattctgt

SEQ ID NO: 67051 - DNA, 25 bp, Saccharomyces pastorianus
ggagcaagggattcatcttagcgat

SEQ ID NO: 67052 - DNA, 25 bp, Saccharomyces pastorianus
tctcactcactaccagtcaatgcat

SEQ ID NO: 67053 - DNA, 25 bp, Saccharomyces pastorianus
aacaacttcgtctttttgcaaaatg

SEQ ID NO: 67054 - DNA, 25 bp, Saccharomyces pastorianus
atgtcccatttgcaacaagccttgt

SEQ ID NO: 67055 - DNA, 25 bp, Saccharomyces pastorianus
gatgaggatgttcccttagaattga

SEQ ID NO: 67056 - DNA, 25 bp, Saccharomyces pastorianus
aagaaaacacgaccttctcactcac

SEQ ID NO: 67057 - DNA, 25 bp, Saccharomyces pastorianus
gaataccgtatatggtcgcagttgc

SEQ ID NO: 67058 - DNA, 25 bp, Saccharomyces pastorianus
tgaagacgtcaccagcgaacaagat

SEQ ID NO: 67059 - DNA, 25 bp, Saccharomyces pastorianus
ggtcgcagttgcaatcacatattaa

SEQ ID NO: 67060 - DNA, 25 bp, Saccharomyces pastorianus
ttaagaacgaccatcctaaactgaa

SEQ ID NO: 67061 - DNA, 25 bp, Saccharomyces pastorianus
gaatgccccagtttttgtagacttg

SEQ ID NO: 67062 - DNA, 25 bp, Saccharomyces pastorianus
ttgggtacaagagctctgcaaattt

SEQ ID NO: 67063 - DNA, 25 bp, Saccharomyces pastorianus
ttttgggtacaagagctctgcaaat

SEQ ID NO: 67064 - DNA, 25 bp, Saccharomyces pastorianus
gccccagtttttgtagacttggaag

SEQ ID NO: 67065 - DNA, 25 bp, Saccharomyces pastorianus
gggtacaagagctctgcaaatttcc

SEQ ID NO: 67066 - DNA, 25 bp, Saccharomyces pastorianus
aatgccccagtttttgtagacttgg

SEQ ID NO: 67067 - DNA, 25 bp, Saccharomyces pastorianus
atgccccagtttttgtagacttgga

SEQ ID NO: 67068 - DNA, 25 bp, Saccharomyces pastorianus
agaattttgggtacaagagctctgc

SEQ ID NO: 67069 - DNA, 25 bp, Saccharomyces pastorianus
aattttgggtacaagagctctgcaa

SEQ ID NO: 67070 - DNA, 25 bp, Saccharomyces pastorianus
gaattttgggtacaagagctctgca

SEQ ID NO: 67071 - DNA, 25 bp, Saccharomyces pastorianus
tgccccagtttttgtagacttggaa

SEQ ID NO: 67072 - DNA, 25 bp, Saccharomyces pastorianus
atcatcgactgcattctggaatctc

SEQ ID NO: 67073 - DNA, 25 bp, Saccharomyces pastorianus
gtccttcaattttttcgatcgcatc

SEQ ID NO: 67074 - DNA, 25 bp, Saccharomyces pastorianus
gtccctgggaacctaaccaagtcat

SEQ ID NO: 67075 - DNA, 25 bp, Saccharomyces pastorianus
gatcctgaggctaagaaaccccatt

SEQ ID NO: 67076 - DNA, 25 bp, Saccharomyces pastorianus
gtctcgacgattcttcagagcgcaa

SEQ ID NO: 67077 - DNA, 25 bp, Saccharomyces pastorianus
gaaatcgtgcctcaaggcgtctcga

SEQ ID NO: 67078 - DNA, 25 bp, Saccharomyces pastorianus
gagcggatctcctaacatgatgata

SEQ ID NO: 67079 - DNA, 25 bp, Saccharomyces pastorianus
tcagtacttactattgccgtcgttc

SEQ ID NO: 67080 - DNA, 25 bp, Saccharomyces pastorianus
acagcgaaacggtgtccttcaattt

SEQ ID NO: 67081 - DNA, 25 bp, Saccharomyces pastorianus
gattgaaaacccactgtactacgaa

SEQ ID NO: 67082 - DNA, 25 bp, Saccharomyces pastorianus
gagcatggcgaatggatcccaccca

SEQ ID NO: 67083 - DNA, 25 bp, Saccharomyces pastorianus
tgaggcacgatttctcatgacccat

SEQ ID NO: 67084 - DNA, 25 bp, Saccharomyces pastorianus
gaatcgtcgagacgccttgaggcac

SEQ ID NO: 67085 - DNA, 25 bp, Saccharomyces pastorianus
gacgccttgaggcacgatttctcat

SEQ ID NO: 67086 - DNA, 25 bp, Saccharomyces pastorianus
gacccatgtcttatttccaatgatt

SEQ ID NO: 67087 - DNA, 25 bp, Saccharomyces pastorianus
gtcgagacgccttgaggcacgattt

SEQ ID NO: 67088 - DNA, 25 bp, Saccharomyces pastorianus
gctctgaagaatcgtcgagacgcct

SEQ ID NO: 67089 - DNA, 25 bp, Saccharomyces pastorianus
aggcacgatttctcatgacccatgt

SEQ ID NO: 67090 - DNA, 25 bp, Saccharomyces pastorianus
acgatttctcatgacccatgtctta

SEQ ID NO: 67091 - DNA, 25 bp, Saccharomyces pastorianus
ttgcgctctgaagaatcgtcgagac

SEQ ID NO: 67092 - DNA, 25 bp, Saccharomyces pastorianus
atgacccatgtcttatttccaatga

SEQ ID NO: 67093 - DNA, 25 bp, Saccharomyces pastorianus
tctcatgacccatgtcttatttcca

SEQ ID NO: 67094 - DNA, 25 bp, Saccharomyces pastorianus
aaacgtcttgtataatgggtatgaa

SEQ ID NO: 67095 - DNA, 25 bp, Saccharomyces pastorianus
gcatatcaccactcgaattgtttct

SEQ ID NO: 67096 - DNA, 25 bp, Saccharomyces pastorianus
tttggttgtaccgttctcgaatcgc

SEQ ID NO: 67097 - DNA, 25 bp, Saccharomyces pastorianus
tgtgacgtttggttgtaccgttctc

SEQ ID NO: 67098 - DNA, 25 bp, Saccharomyces pastorianus
tcgccctttggtgttgtatttgttt

SEQ ID NO: 67099 - DNA, 25 bp, Saccharomyces pastorianus
aagtctcttgggatagtaattggtg

SEQ ID NO: 67100 - DNA, 25 bp, Saccharomyces pastorianus
taattggtggtaaaacgtcttgtat

SEQ ID NO: 67101 - DNA, 25 bp, Saccharomyces pastorianus
tatgaattcagctttcgttaaggaa

SEQ ID NO: 67102 - DNA, 25 bp, Saccharomyces pastorianus
aattgtttctttagtcattgtgacg

SEQ ID NO: 67103 - DNA, 25 bp, Saccharomyces pastorianus
tagacttgatttaccaacgccttcg

SEQ ID NO: 67104 - DNA, 25 bp, Saccharomyces pastorianus
tctcgaatcgccctttggtgttgta

SEQ ID NO: 67105 - DNA, 25 bp, Saccharomyces pastorianus
atgacgacgctgattccaagccatt

SEQ ID NO: 67106 - DNA, 25 bp, Saccharomyces pastorianus
gagttcaattgtgtccttttctaat

SEQ ID NO: 67107 - DNA, 25 bp, Saccharomyces pastorianus
aacatatgatttgttccacgcctct

SEQ ID NO: 67108 - DNA, 25 bp, Saccharomyces pastorianus
tgtgtcggagtaccttttcctaaca

SEQ ID NO: 67109 - DNA, 25 bp, Saccharomyces pastorianus
agtgcgcatcaacaaatccttcaat

SEQ ID NO: 67110 - DNA, 25 bp, Saccharomyces pastorianus
aaattctcatttatcgctgttagcg

SEQ ID NO: 67111 - DNA, 25 bp, Saccharomyces pastorianus
agcgattgtcgactcgtggtatcaa

SEQ ID NO: 67112 - DNA, 25 bp, Saccharomyces pastorianus
ggccataacgaatccaagtgcgcat

SEQ ID NO: 67113 - DNA, 25 bp, Saccharomyces pastorianus
acacactggcctcttgttattggat

SEQ ID NO: 67114 - DNA, 25 bp, Saccharomyces pastorianus
gttccacgcctctattcagaatttt

SEQ ID NO: 67115 - DNA, 25 bp, Saccharomyces pastorianus
agaggctaaccttattggcaatgaa

SEQ ID NO: 67116 - DNA, 25 bp, Saccharomyces pastorianus
gtacgcattggcaaagtctctgaaa

SEQ ID NO: 67117 - DNA, 25 bp, Saccharomyces pastorianus
gaagaccagcattcacacatttctc

SEQ ID NO: 67118 - DNA, 25 bp, Saccharomyces pastorianus
tggtgctccctttttgaaggcttta

SEQ ID NO: 67119 - DNA, 25 bp, Saccharomyces pastorianus
caagctaagcacaaccgagtttggt

SEQ ID NO: 67120 - DNA, 25 bp, Saccharomyces pastorianus
gtcaccgtcttctgattcattgagc

SEQ ID NO: 67121 - DNA, 25 bp, Saccharomyces pastorianus
agctaagctcgcgtctgctatggaa

SEQ ID NO: 67122 - DNA, 25 bp, Saccharomyces pastorianus
gccttctctccgagacttaacaata

SEQ ID NO: 67123 - DNA, 25 bp, Saccharomyces pastorianus
aagtctctgaaactggcgacctcaa

SEQ ID NO: 67124 - DNA, 25 bp, Saccharomyces pastorianus
aactggcgacctcaaagctaagctc

SEQ ID NO: 67125 - DNA, 25 bp, Saccharomyces pastorianus
ctgttaacggccatgtacttcaacc

SEQ ID NO: 67126 - DNA, 25 bp, Saccharomyces pastorianus
gtttaagtcagttaagagcccgtat

SEQ ID NO: 67127 - DNA, 25 bp, Saccharomyces pastorianus
aagcatgtcgactttgccccaactt

SEQ ID NO: 67128 - DNA, 25 bp, Saccharomyces pastorianus
agaaacgccgccagaaaggccgaat

SEQ ID NO: 67129 - DNA, 25 bp, Saccharomyces pastorianus
gactttgccccaacttctccatttg

SEQ ID NO: 67130 - DNA, 25 bp, Saccharomyces pastorianus
aaagcatgtcgactttgccccaact

SEQ ID NO: 67131 - DNA, 25 bp, Saccharomyces pastorianus
actttgccccaacttctccatttgg

SEQ ID NO: 67132 - DNA, 25 bp, Saccharomyces pastorianus
aaacgccgccagaaaggccgaatct

SEQ ID NO: 67133 - DNA, 25 bp, Saccharomyces pastorianus
aacgccgccagaaaggccgaatctt

SEQ ID NO: 67134 - DNA, 25 bp, Saccharomyces pastorianus
gcatgtcgactttgccccaacttct

SEQ ID NO: 67135 - DNA, 25 bp, Saccharomyces pastorianus
acgccgccagaaaggccgaatcttc

SEQ ID NO: 67136 - DNA, 25 bp, Saccharomyces pastorianus
gaaacgccgccagaaaggccgaatc

SEQ ID NO: 67137 - DNA, 25 bp, Saccharomyces pastorianus
cgccagaaaggccgaatcttccggt

SEQ ID NO: 67138 - DNA, 25 bp, Saccharomyces pastorianus
ctaaacgtcacattgtcgcaactcg

SEQ ID NO: 67139 - DNA, 25 bp, Saccharomyces pastorianus
gaatctttagattcaacggtcgttt

SEQ ID NO: 67140 - DNA, 25 bp, Saccharomyces pastorianus
atgctgtacgtatgcggttggctca

SEQ ID NO: 67141 - DNA, 25 bp, Saccharomyces pastorianus
gcctaaatttccaactacttcgcat

SEQ ID NO: 67142 - DNA, 25 bp, Saccharomyces pastorianus
gatgtctaaagctgaactaccgcaa

SEQ ID NO: 67143 - DNA, 25 bp, Saccharomyces pastorianus
acggtcgtttatccattgcctaaat

SEQ ID NO: 67144 - DNA, 25 bp, Saccharomyces pastorianus
gatgcttcactccttgtacgagata

SEQ ID NO: 67145 - DNA, 25 bp, Saccharomyces pastorianus
agtacctggccaagctttagatgct

SEQ ID NO: 67146 - DNA, 25 bp, Saccharomyces pastorianus
ttacatctaccttgcaacatttcca

SEQ ID NO: 67147 - DNA, 25 bp, Saccharomyces pastorianus
gagataccaagccatcaaaaccttt

SEQ ID NO: 67148 - DNA, 25 bp, Saccharomyces pastorianus
tcgcaactcgtgtccgttacatcta

SEQ ID NO: 67149 - DNA, 25 bp, Saccharomyces pastorianus
acaggcgattgatgacccggaagta

SEQ ID NO: 67150 - DNA, 25 bp, Saccharomyces pastorianus
gacggattcccgcaggatttcgaga

SEQ ID NO: 67151 - DNA, 25 bp, Saccharomyces pastorianus
aaagctggaattcaagcccggcaaa

SEQ ID NO: 67152 - DNA, 25 bp, Saccharomyces pastorianus
agaagggccagcgtggtacttccgc

SEQ ID NO: 67153 - DNA, 25 bp, Saccharomyces pastorianus
gagcctatcatcaacgacggattcc

SEQ ID NO: 67154 - DNA, 25 bp, Saccharomyces pastorianus
aagcgtcaacggcagcagaatcaca

SEQ ID NO: 67155 - DNA, 25 bp, Saccharomyces pastorianus
taacctagtacccactgagacgcag

SEQ ID NO: 67156 - DNA, 25 bp, Saccharomyces pastorianus
aaaggatctccagactccacagttg

SEQ ID NO: 67157 - DNA, 25 bp, Saccharomyces pastorianus
ttggtctgagatcgacaccctagat

SEQ ID NO: 67158 - DNA, 25 bp, Saccharomyces pastorianus
agaagctaaacacgccgccgacgag

SEQ ID NO: 67159 - DNA, 25 bp, Saccharomyces pastorianus
gaatcacaatgcactctaacctagt

SEQ ID NO: 67160 - DNA, 25 bp, Saccharomyces pastorianus
gagattgtcctctttttgaattaga

SEQ ID NO: 67161 - DNA, 25 bp, Saccharomyces pastorianus
gccttgcgccgaaaactttctgagt

SEQ ID NO: 67162 - DNA, 25 bp, Saccharomyces pastorianus
atgctaaagcattctggtctaatat

SEQ ID NO: 67163 - DNA, 25 bp, Saccharomyces pastorianus
agaggaccgttttattcttctaatg

SEQ ID NO: 67164 - DNA, 25 bp, Saccharomyces pastorianus
catcgaatcttgaaaccgagcaatt

SEQ ID NO: 67165 - DNA, 25 bp, Saccharomyces pastorianus
agaggaagtgcgtgcttatgctaaa

SEQ ID NO: 67166 - DNA, 25 bp, Saccharomyces pastorianus
aatgcaacaagaggccttgcgccga

SEQ ID NO: 67167 - DNA, 25 bp, Saccharomyces pastorianus
tgaagttgaaacatcctccttcctc

SEQ ID NO: 67168 - DNA, 25 bp, Saccharomyces pastorianus
gagtttgcaaatgaggtcgccgata

SEQ ID NO: 67169 - DNA, 25 bp, Saccharomyces pastorianus
ggaattgtactcgatgatgctacta

SEQ ID NO: 67170 - DNA, 25 bp, Saccharomyces pastorianus
aggacacccgtagaattggccagaa

SEQ ID NO: 67171 - DNA, 25 bp, Saccharomyces pastorianus
tatcgggaaggcaggcgccttttct

SEQ ID NO: 67172 - DNA, 25 bp, Saccharomyces pastorianus
ataactctgcagcaaacgcggtcgc

SEQ ID NO: 67173 - DNA, 25 bp, Saccharomyces pastorianus
gaagccaaacttagtcgtagacttg

SEQ ID NO: 67174 - DNA, 25 bp, Saccharomyces pastorianus
ctccaccaggttctgcacaaataac

SEQ ID NO: 67175 - DNA, 25 bp, Saccharomyces pastorianus
tcgagttcagctgcgctaataccag

SEQ ID NO: 67176 - DNA, 25 bp, Saccharomyces pastorianus
taataccagtgattcctccaccagg

SEQ ID NO: 67177 - DNA, 25 bp, Saccharomyces pastorianus
cgccgatactgctgcattagatgta

SEQ ID NO: 67178 - DNA, 25 bp, Saccharomyces pastorianus
acatactccggatcgcatttggcaa

SEQ ID NO: 67179 - DNA, 25 bp, Saccharomyces pastorianus
gtagacttgatttgcccctcgagtt

SEQ ID NO: 67180 - DNA, 25 bp, Saccharomyces pastorianus
gcgccttttctctaactagatcgga

SEQ ID NO: 67181 - DNA, 25 bp, Saccharomyces pastorianus
gaatctgaaattttctctcttttcc

SEQ ID NO: 67182 - DNA, 25 bp, Saccharomyces pastorianus
aagcgtagcatgtagtgcgtggtcc

SEQ ID NO: 67183 - DNA, 25 bp, Saccharomyces pastorianus
gtccgatgaacctatcgcatcttat

SEQ ID NO: 67184 - DNA, 25 bp, Saccharomyces pastorianus
gaagtgccagagtcgaaatctttct

SEQ ID NO: 67185 - DNA, 25 bp, Saccharomyces pastorianus
gagtcgcgattcactaagcgtagca

SEQ ID NO: 67186 - DNA, 25 bp, Saccharomyces pastorianus
aacttgtagcgggagtcgcgattca

SEQ ID NO: 67187 - DNA, 25 bp, Saccharomyces pastorianus
gtgcgtggtccaactattatcgtgt

SEQ ID NO: 67188 - DNA, 25 bp, Saccharomyces pastorianus
tgggcgggcgttcaaaagcaaactt

SEQ ID NO: 67189 - DNA, 25 bp, Saccharomyces pastorianus
agagcgtctccacctggatatggaa

SEQ ID NO: 67190 - DNA, 25 bp, Saccharomyces pastorianus
aactattatcgtgtggacgcccctg

SEQ ID NO: 67191 - DNA, 25 bp, Saccharomyces pastorianus
aaaataggaccacctcagagcgtct

SEQ ID NO: 67192 - DNA, 25 bp, Saccharomyces pastorianus
tgaggttcagtgtccaaacgtggaa

SEQ ID NO: 67193 - DNA, 25 bp, Saccharomyces pastorianus
gtctcgtggtgtagtcattggcaac

SEQ ID NO: 67194 - DNA, 25 bp, Saccharomyces pastorianus
gccaaataagtttcccatctcagtg

SEQ ID NO: 67195 - DNA, 25 bp, Saccharomyces pastorianus
agctccgtgatcttccacgatatgt

SEQ ID NO: 67196 - DNA, 25 bp, Saccharomyces pastorianus
gaacagaatggtctcctgtctctga

SEQ ID NO: 67197 - DNA, 25 bp, Saccharomyces pastorianus
agacgtcttttgtcgagtccattgc

SEQ ID NO: 67198 - DNA, 25 bp, Saccharomyces pastorianus
atctcagtgccgtttagctggacgt

SEQ ID NO: 67199 - DNA, 25 bp, Saccharomyces pastorianus
gatgctaacgatgacggcctagaca

SEQ ID NO: 67200 - DNA, 25 bp, Saccharomyces pastorianus
gaacgaaaccgtctccgaatcgagt

SEQ ID NO: 67201 - DNA, 25 bp, Saccharomyces pastorianus
gctggacgtccgagtattctattgt

SEQ ID NO: 67202 - DNA, 25 bp, Saccharomyces pastorianus
ctacagcatccgcagtcgatttgga

SEQ ID NO: 67203 - DNA, 25 bp, Saccharomyces pastorianus
tatatcgtaattgcgtcatccgtcc

SEQ ID NO: 67204 - DNA, 25 bp, Saccharomyces pastorianus
gaggtcaatcctgatcatgttcttt

SEQ ID NO: 67205 - DNA, 25 bp, Saccharomyces pastorianus
gtgtattgttgatggaccccgtaga

SEQ ID NO: 67206 - DNA, 25 bp, Saccharomyces pastorianus
agacctcctacttacaccggtgaat

SEQ ID NO: 67207 - DNA, 25 bp, Saccharomyces pastorianus
aatgagactcgctgctactggtata

SEQ ID NO: 67208 - DNA, 25 bp, Saccharomyces pastorianus
aaatcatcggtgtgccaagtgacaa

SEQ ID NO: 67209 - DNA, 25 bp, Saccharomyces pastorianus
tagaaaacccctccaagttcttgag

SEQ ID NO: 67210 - DNA, 25 bp, Saccharomyces pastorianus
aaactgataacgctttgggctggtt

SEQ ID NO: 67211 - DNA, 25 bp, Saccharomyces pastorianus
ggacttgttatctgtattacaccca

SEQ ID NO: 67212 - DNA, 25 bp, Saccharomyces pastorianus
tcaaccaattttgttcctccgttat

SEQ ID NO: 67213 - DNA, 25 bp, Saccharomyces pastorianus
gcctacctcgtgaaatcttgggatt

SEQ ID NO: 67214 - DNA, 25 bp, Saccharomyces pastorianus
aaaatgggatgtttgcctacctcgt

SEQ ID NO: 67215 - DNA, 25 bp, Saccharomyces pastorianus
taaagagtcctgtcaccgtcaaaga

SEQ ID NO: 67216 - DNA, 25 bp, Saccharomyces pastorianus
tttgtaagagaactgcccgatccca

SEQ ID NO: 67217 - DNA, 25 bp, Saccharomyces pastorianus
aaccgcaacttacttgaagcactgt

SEQ ID NO: 67218 - DNA, 25 bp, Saccharomyces pastorianus
gttgattacttgatcacccataatg

SEQ ID NO: 67219 - DNA, 25 bp, Saccharomyces pastorianus
aaagcttccaaattcgactcagagg

SEQ ID NO: 67220 - DNA, 25 bp, Saccharomyces pastorianus
acctaacatcttatacttaccccat

SEQ ID NO: 67221 - DNA, 25 bp, Saccharomyces pastorianus
cccgatcccattttgtcaactgatt

SEQ ID NO: 67222 - DNA, 25 bp, Saccharomyces pastorianus
gattccactactatggtcgtgcaaa

SEQ ID NO: 67223 - DNA, 25 bp, Saccharomyces pastorianus
tgatatattccttgctgccttcata

SEQ ID NO: 67224 - DNA, 25 bp, Saccharomyces pastorianus
ggattagttgactcattcgcccaaa

SEQ ID NO: 67225 - DNA, 25 bp, Saccharomyces pastorianus
attggacatcttctttctcctacat

SEQ ID NO: 67226 - DNA, 25 bp, Saccharomyces pastorianus
tgaatcaccatttctggtcgacggc

SEQ ID NO: 67227 - DNA, 25 bp, Saccharomyces pastorianus
gatactgtccattttgtgggtacga

SEQ ID NO: 67228 - DNA, 25 bp, Saccharomyces pastorianus
gattggatgtaccattcagcgcaag

SEQ ID NO: 67229 - DNA, 25 bp, Saccharomyces pastorianus
ggattaggcggcacactattagttt

SEQ ID NO: 67230 - DNA, 25 bp, Saccharomyces pastorianus
gggccttggaaatttcagctgacta

SEQ ID NO: 67231 - DNA, 25 bp, Saccharomyces pastorianus
gaataccattgtgtcagctttcaac

SEQ ID NO: 67232 - DNA, 25 bp, Saccharomyces pastorianus
atttctggtcgacggccttgataag

SEQ ID NO: 67233 - DNA, 25 bp, Saccharomyces pastorianus
gtacgagtctcttggaggtaacgat

SEQ ID NO: 67234 - DNA, 25 bp, Saccharomyces pastorianus
tagattccaccttcccacaaaaggg

SEQ ID NO: 67235 - DNA, 25 bp, Saccharomyces pastorianus
ggtgctggttccatgatcgaatcat

SEQ ID NO: 67236 - DNA, 25 bp, Saccharomyces pastorianus
tgggtacgaacgtagattccacctt

SEQ ID NO: 67237 - DNA, 25 bp, Saccharomyces pastorianus
atcacttctacttcgatctttggaa

SEQ ID NO: 67238 - DNA, 25 bp, Saccharomyces pastorianus
atatggtcagggttgcaccgcaatt

SEQ ID NO: 67239 - DNA, 25 bp, Saccharomyces pastorianus
atgcatgacacccttgacttcaaaa

SEQ ID NO: 67240 - DNA, 25 bp, Saccharomyces pastorianus
agatcgtgttgcaattgcgctcgca

SEQ ID NO: 67241 - DNA, 25 bp, Saccharomyces pastorianus
gggaacccgatcgtagtgcactgct

SEQ ID NO: 67242 - DNA, 25 bp, Saccharomyces pastorianus
gaaagacttctacacggtcaccgat

SEQ ID NO: 67243 - DNA, 25 bp, Saccharomyces pastorianus
ggatcagttcctgttcatctatcac

SEQ ID NO: 67244 - DNA, 25 bp, Saccharomyces pastorianus
accgatatcaagttaacgccctcag

SEQ ID NO: 67245 - DNA, 25 bp, Saccharomyces pastorianus
attcacatagccttaattctcgcgg

SEQ ID NO: 67246 - DNA, 25 bp, Saccharomyces pastorianus
gtgacgcccttggtcgagtataaca

SEQ ID NO: 67247 - DNA, 25 bp, Saccharomyces pastorianus
gagtttccttgcgatctgcagatag

SEQ ID NO: 67248 - DNA, 25 bp, Saccharomyces pastorianus
ggacttgatgaaccctcttctgaga

SEQ ID NO: 67249 - DNA, 25 bp, Saccharomyces pastorianus
agatcacccttctcactgacgaaat

SEQ ID NO: 67250 - DNA, 25 bp, Saccharomyces pastorianus
tgccgtttactcttttactgttact

SEQ ID NO: 67251 - DNA, 25 bp, Saccharomyces pastorianus
agcttcactttagatgcggcagcct

SEQ ID NO: 67252 - DNA, 25 bp, Saccharomyces pastorianus
tttgttgtccaccattgccgtttac

SEQ ID NO: 67253 - DNA, 25 bp, Saccharomyces pastorianus
tggtctctaaacctttttgcactag

SEQ ID NO: 67254 - DNA, 25 bp, Saccharomyces pastorianus
gaagtttttcttgtctctcttaggg

SEQ ID NO: 67255 - DNA, 25 bp, Saccharomyces pastorianus
ttgcccttattgctactcatgtttt

SEQ ID NO: 67256 - DNA, 25 bp, Saccharomyces pastorianus
ctctcctccttagattttctagcga

SEQ ID NO: 67257 - DNA, 25 bp, Saccharomyces pastorianus
tttctagcgactgcttttggcttaa

SEQ ID NO: 67258 - DNA, 25 bp, Saccharomyces pastorianus
tttgcaggtcctccggtagatgaag

SEQ ID NO: 67259 - DNA, 25 bp, Saccharomyces pastorianus
aagacttaggtgttgagctcagctc

SEQ ID NO: 67260 - DNA, 25 bp, Saccharomyces pastorianus
tacagtaaccttgcaacggaagagc

SEQ ID NO: 67261 - DNA, 25 bp, Saccharomyces pastorianus
aagatagagaccatacagcaagagc

SEQ ID NO: 67262 - DNA, 25 bp, Saccharomyces pastorianus
aaatccactgactctcaaaaaactg

SEQ ID NO: 67263 - DNA, 25 bp, Saccharomyces pastorianus
gactgacgctcaacaaaaggctaaa

SEQ ID NO: 67264 - DNA, 25 bp, Saccharomyces pastorianus
tcaagcagaagcgtctcgatctcat

SEQ ID NO: 67265 - DNA, 25 bp, Saccharomyces pastorianus
gacttaatgcttttggttaccgatt

SEQ ID NO: 67266 - DNA, 25 bp, Saccharomyces pastorianus
tcaagacgagatacagagcactaag

SEQ ID NO: 67267 - DNA, 25 bp, Saccharomyces pastorianus
gaatcattggattcttacttgaaag

SEQ ID NO: 67268 - DNA, 25 bp, Saccharomyces pastorianus
gaagcaggagttgactgacgctcaa

SEQ ID NO: 67269 - DNA, 25 bp, Saccharomyces pastorianus
gtctcgatctcatgaaattgccaaa

SEQ ID NO: 67270 - DNA, 25 bp, Saccharomyces pastorianus
gacttgaaggcctaaatttctatga

SEQ ID NO: 67271 - DNA, 25 bp, Saccharomyces pastorianus
ctgaactatttgacagccgtcggat

SEQ ID NO: 67272 - DNA, 25 bp, Saccharomyces pastorianus
ataaatcgtggtatatcccgcaagg

SEQ ID NO: 67273 - DNA, 25 bp, Saccharomyces pastorianus
tatatcccgcaaggcgctagaatat

SEQ ID NO: 67274 - DNA, 25 bp, Saccharomyces pastorianus
gttcagatggtccaggattttcctg

SEQ ID NO: 67275 - DNA, 25 bp, Saccharomyces pastorianus
acagccgtcggattggttgacgata

SEQ ID NO: 67276 - DNA, 25 bp, Saccharomyces pastorianus
gtggctcctatcgagacttgttcag

SEQ ID NO: 67277 - DNA, 25 bp, Saccharomyces pastorianus
ctagaaatctatcaactgcccacgt

SEQ ID NO: 67278 - DNA, 25 bp, Saccharomyces pastorianus
tttcgcgatcatgcctaccataaat

SEQ ID NO: 67279 - DNA, 25 bp, Saccharomyces pastorianus
aagtgtggctgagcttcacgcatga

SEQ ID NO: 67280 - DNA, 25 bp, Saccharomyces pastorianus
attgcagcgtttccaatgttagccc

SEQ ID NO: 67281 - DNA, 25 bp, Saccharomyces pastorianus
gctagtggagaatcgcaccagcttc

SEQ ID NO: 67282 - DNA, 25 bp, Saccharomyces pastorianus
tccccatctttacctcaaattcaaa

SEQ ID NO: 67283 - DNA, 25 bp, Saccharomyces pastorianus
tacattgaccgccaagagctcttgt

SEQ ID NO: 67284 - DNA, 25 bp, Saccharomyces pastorianus
taacggaccgttgtcgtttctgaat

SEQ ID NO: 67285 - DNA, 25 bp, Saccharomyces pastorianus
gaggccaagggcatttttcagacat

SEQ ID NO: 67286 - DNA, 25 bp, Saccharomyces pastorianus
aagagctcttgtccgaactggcgtt

SEQ ID NO: 67287 - DNA, 25 bp, Saccharomyces pastorianus
gaactggcgttccaatgtcaatggt

SEQ ID NO: 67288 - DNA, 25 bp, Saccharomyces pastorianus
gcgaagcttcatccgctggagcaaa

SEQ ID NO: 67289 - DNA, 25 bp, Saccharomyces pastorianus
gggctgggcgataacttcaacgtat

SEQ ID NO: 67290 - DNA, 25 bp, Saccharomyces pastorianus
taggttgtacgctaacgcaggtgca

SEQ ID NO: 67291 - DNA, 25 bp, Saccharomyces pastorianus
aaaactcgatggatgtgctgaaccc

SEQ ID NO: 67292 - DNA, 25 bp, Saccharomyces pastorianus
ggaccagcgggaccaaccagaaatt

SEQ ID NO: 67293 - DNA, 25 bp, Saccharomyces pastorianus
gaaaataccaccctcaaagcaacaa

SEQ ID NO: 67294 - DNA, 25 bp, Saccharomyces pastorianus
gatagcgcccatgccgcaggaaaag

SEQ ID NO: 67295 - DNA, 25 bp, Saccharomyces pastorianus
agaggccgatgctggtgaccaacca

SEQ ID NO: 67296 - DNA, 25 bp, Saccharomyces pastorianus
taatgcaacatctaacccggtaaat

SEQ ID NO: 67297 - DNA, 25 bp, Saccharomyces pastorianus
ttcacctgccgaagtgggctcaagt

SEQ ID NO: 67298 - DNA, 25 bp, Saccharomyces pastorianus
gactccattaaatctgtcgtttcag

SEQ ID NO: 67299 - DNA, 25 bp, Saccharomyces pastorianus
aggctgttaggccatatccattaaa

SEQ ID NO: 67300 - DNA, 25 bp, Saccharomyces pastorianus
aaatgcatcagatagctcacagagc

SEQ ID NO: 67301 - DNA, 25 bp, Saccharomyces pastorianus
tgaccaaccagctgactaaccaaga

SEQ ID NO: 67302 - DNA, 25 bp, Saccharomyces pastorianus
ggcaagcaagtacttacatccatgg

SEQ ID NO: 67303 - DNA, 25 bp, Saccharomyces pastorianus
tttagcaatgccgttcagtccaaaa

SEQ ID NO: 67304 - DNA, 25 bp, Saccharomyces pastorianus
aggactggatcttcaaacggctatt

SEQ ID NO: 67305 - DNA, 25 bp, Saccharomyces pastorianus
aatactccaatgttaggctcctcaa

SEQ ID NO: 67306 - DNA, 25 bp, Saccharomyces pastorianus
ataggttcatctttcacctcgagat

SEQ ID NO: 67307 - DNA, 25 bp, Saccharomyces pastorianus
aatggctccgcatctaattatcgta

SEQ ID NO: 67308 - DNA, 25 bp, Saccharomyces pastorianus
tcgagatctcatgtgcgtcctataa

SEQ ID NO: 67309 - DNA, 25 bp, Saccharomyces pastorianus
acggttatggtaatgctgtctcaca

SEQ ID NO: 67310 - DNA, 25 bp, Saccharomyces pastorianus
attgccgacgacaatgcatcgactt

SEQ ID NO: 67311 - DNA, 25 bp, Saccharomyces pastorianus
agctacttcctgacacaactttgaa

SEQ ID NO: 67312 - DNA, 25 bp, Saccharomyces pastorianus
ggaattcactcaccactaacagata

SEQ ID NO: 67313 - DNA, 25 bp, Saccharomyces pastorianus
cttcaagctttatgccagtggattc

SEQ ID NO: 67314 - DNA, 25 bp, Saccharomyces pastorianus
attctgtgacgctctagaatacggt

SEQ ID NO: 67315 - DNA, 25 bp, Saccharomyces pastorianus
tcaaccaggtctatgtgaacgtttt

SEQ ID NO: 67316 - DNA, 25 bp, Saccharomyces pastorianus
accaggtctatgtgaacgttttgaa

SEQ ID NO: 67317 - DNA, 25 bp, Saccharomyces pastorianus
acgttttgaagtctttgttgctaca

SEQ ID NO: 67318 - DNA, 25 bp, Saccharomyces pastorianus
aactttcatcttcggtcacccacaa

SEQ ID NO: 67319 - DNA, 25 bp, Saccharomyces pastorianus
ttacactgaactgaatgatccattt

SEQ ID NO: 67320 - DNA, 25 bp, Saccharomyces pastorianus
aagagatttgtaacgcttacactga

SEQ ID NO: 67321 - DNA, 25 bp, Saccharomyces pastorianus
gacgaaacattctgtgacgctctag

SEQ ID NO: 67322 - DNA, 25 bp, Saccharomyces pastorianus
gaagctcaactagtcgacgaaacat

SEQ ID NO: 67323 - DNA, 25 bp, Saccharomyces pastorianus
ttcggtcacccacaaatgatgtctc

SEQ ID NO: 67324 - DNA, 25 bp, Saccharomyces pastorianus
gtaacgcttacactgaactgaatga

SEQ ID NO: 67325 - DNA, 25 bp, Saccharomyces pastorianus
gctaacctacacctcgatgaaacca

SEQ ID NO: 67326 - DNA, 25 bp, Saccharomyces pastorianus
aagtccgccactgaaggtgtcgcta

SEQ ID NO: 67327 - DNA, 25 bp, Saccharomyces pastorianus
atatttcgagactagatcccgtcaa

SEQ ID NO: 67328 - DNA, 25 bp, Saccharomyces pastorianus
gacttattagccgatctggatccat

SEQ ID NO: 67329 - DNA, 25 bp, Saccharomyces pastorianus
attagccgatctggatccatcgcaa

SEQ ID NO: 67330 - DNA, 25 bp, Saccharomyces pastorianus
aaaagacagacttattagccgatct

SEQ ID NO: 67331 - DNA, 25 bp, Saccharomyces pastorianus
gactagatcccgtcaaatcaaagaa

SEQ ID NO: 67332 - DNA, 25 bp, Saccharomyces pastorianus
ccacgtttccatttctaatcctgaa

SEQ ID NO: 67333 - DNA, 25 bp, Saccharomyces pastorianus
caagataacgttaagtccgccactg

SEQ ID NO: 67334 - DNA, 25 bp, Saccharomyces pastorianus
acacaaattccacgtttccatttct

SEQ ID NO: 67335 - DNA, 25 bp, Saccharomyces pastorianus
cactgaaggtgtcgctaacctacac

SEQ ID NO: 67336 - DNA, 25 bp, Saccharomyces pastorianus
agcacggccttacagaaaactcttt

SEQ ID NO: 67337 - DNA, 25 bp, Saccharomyces pastorianus
gaacttaaggatctgaacgtccaaa

SEQ ID NO: 67338 - DNA, 25 bp, Saccharomyces pastorianus
aacaccaaagccaagtcagaagatt

SEQ ID NO: 67339 - DNA, 25 bp, Saccharomyces pastorianus
gacgttaactactgaattatcttta

SEQ ID NO: 67340 - DNA, 25 bp, Saccharomyces pastorianus
attataccgcaaacttggattctat

SEQ ID NO: 67341 - DNA, 25 bp, Saccharomyces pastorianus
aaactacactccatgcaaaactttg

SEQ ID NO: 67342 - DNA, 25 bp, Saccharomyces pastorianus
atctactcaagctaagcacggcctt

SEQ ID NO: 67343 - DNA, 25 bp, Saccharomyces pastorianus
aattctgccggaacaagcatgaact

SEQ ID NO: 67344 - DNA, 25 bp, Saccharomyces pastorianus
cgggattattgctatttcatttgga

SEQ ID NO: 67345 - DNA, 25 bp, Saccharomyces pastorianus
gacgcactactcaaagaatctgaag

SEQ ID NO: 67346 - DNA, 25 bp, Saccharomyces pastorianus
aaggaatgcttttcgggattattgc

SEQ ID NO: 67347 - DNA, 25 bp, Saccharomyces pastorianus
gttagggatcaatccatctcgccag

SEQ ID NO: 67348 - DNA, 25 bp, Saccharomyces pastorianus
agggatcaatccatctcgccaggaa

SEQ ID NO: 67349 - DNA, 25 bp, Saccharomyces pastorianus
tccgcaaacttcaccgccgaagagg

SEQ ID NO: 67350 - DNA, 25 bp, Saccharomyces pastorianus
gatcaatccatctcgccaggaatga

SEQ ID NO: 67351 - DNA, 25 bp, Saccharomyces pastorianus
aatccatctcgccaggaatgacaaa

SEQ ID NO: 67352 - DNA, 25 bp, Saccharomyces pastorianus
cttcaccgccgaagagggctatggg

SEQ ID NO: 67353 - DNA, 25 bp, Saccharomyces pastorianus
ggaatgacaaagactccgcaaactt

SEQ ID NO: 67354 - DNA, 25 bp, Saccharomyces pastorianus
aacttcaccgccgaagagggctatg

SEQ ID NO: 67355 - DNA, 25 bp, Saccharomyces pastorianus
atgacaaagactccgcaaacttcac

SEQ ID NO: 67356 - DNA, 25 bp, Saccharomyces pastorianus
ttctccttacgttagggatcaatcc

SEQ ID NO: 67357 - DNA, 25 bp, Saccharomyces pastorianus
atctcgccaggaatgacaaagactc

SEQ ID NO: 67358 - DNA, 25 bp, Saccharomyces pastorianus
tccgcaaacttcaccgccgaagagg

SEQ ID NO: 67359 - DNA, 25 bp, Saccharomyces pastorianus
gatcaatccatctcgccaggaatga

SEQ ID NO: 67360 - DNA, 25 bp, Saccharomyces pastorianus
aatccatctcgccaggaatgacaaa

SEQ ID NO: 67361 - DNA, 25 bp, Saccharomyces pastorianus
aaagaagaagaaggcctcctccgca

SEQ ID NO: 67362 - DNA, 25 bp, Saccharomyces pastorianus
tctccttacgttagggatcaatcca

SEQ ID NO: 67363 - DNA, 25 bp, Saccharomyces pastorianus
tagggatcaatccatctcgccagga

SEQ ID NO: 67364 - DNA, 25 bp, Saccharomyces pastorianus
cttcaccgccgaagagggctatggg

SEQ ID NO: 67365 - DNA, 25 bp, Saccharomyces pastorianus
aacttcaccgccgaagagggctatg

SEQ ID NO: 67366 - DNA, 25 bp, Saccharomyces pastorianus
atgacaaagactccgcaaacttcac

SEQ ID NO: 67367 - DNA, 25 bp, Saccharomyces pastorianus
aactgcaacattctccttacgttag

SEQ ID NO: 67368 - DNA, 25 bp, Saccharomyces pastorianus
atctcgccaggaatgacaaagactc

SEQ ID NO: 67369 - DNA, 25 bp, Saccharomyces pastorianus
agagcgcctgtcaaattcatcgatg

SEQ ID NO: 67370 - DNA, 25 bp, Saccharomyces pastorianus
gcaacccaatattacggcggacatt

SEQ ID NO: 67371 - DNA, 25 bp, Saccharomyces pastorianus
tgccctgccagtctttcttgagaat

SEQ ID NO: 67372 - DNA, 25 bp, Saccharomyces pastorianus
ggccattcttggtggtatccttgca

SEQ ID NO: 67373 - DNA, 25 bp, Saccharomyces pastorianus
gataagctagccaagttgccgcata

SEQ ID NO: 67374 - DNA, 25 bp, Saccharomyces pastorianus
gaatgtttctccagacaccagagcg

SEQ ID NO: 67375 - DNA, 25 bp, Saccharomyces pastorianus
ttgccgcataacacttttgggtacg

SEQ ID NO: 67376 - DNA, 25 bp, Saccharomyces pastorianus
gaggaagaagcgtgcagcccttaaa

SEQ ID NO: 67377 - DNA, 25 bp, Saccharomyces pastorianus
tatccttgcacctttgcggctaaaa

SEQ ID NO: 67378 - DNA, 25 bp, Saccharomyces pastorianus
atgatcccatgcacgcgtatatctt

SEQ ID NO: 67379 - DNA, 25 bp, Saccharomyces pastorianus
aaacaatgctcagtgatccctcggg

SEQ ID NO: 67380 - DNA, 25 bp, Saccharomyces pastorianus
cgtaatctagtctgcttagcgggct

SEQ ID NO: 67381 - DNA, 25 bp, Saccharomyces pastorianus
aaaggtacccagacagttgactgta

SEQ ID NO: 67382 - DNA, 25 bp, Saccharomyces pastorianus
tgcttagcgggctgtgattacacaa

SEQ ID NO: 67383 - DNA, 25 bp, Saccharomyces pastorianus
ttcggctaagcaaaacgttcaaaca

SEQ ID NO: 67384 - DNA, 25 bp, Saccharomyces pastorianus
caaatatacttgtaggtcggtccga

SEQ ID NO: 67385 - DNA, 25 bp, Saccharomyces pastorianus
cctctcataaactgtcgtgccgaaa

SEQ ID NO: 67386 - DNA, 25 bp, Saccharomyces pastorianus
gaaaatcgtaaaacagcactctgct

SEQ ID NO: 67387 - DNA, 25 bp, Saccharomyces pastorianus
ggaaggtaggtctgatcactgcaat

SEQ ID NO: 67388 - DNA, 25 bp, Saccharomyces pastorianus
ggatgtattggctctgttgttgaaa

SEQ ID NO: 67389 - DNA, 25 bp, Saccharomyces pastorianus
tcaatatcagagagtgttttgcccc

SEQ ID NO: 67390 - DNA, 25 bp, Saccharomyces pastorianus
acaacattaaaccatatcccacagc

SEQ ID NO: 67391 - DNA, 25 bp, Saccharomyces pastorianus
gtgattttttccctatcgatgcaaa

SEQ ID NO: 67392 - DNA, 25 bp, Saccharomyces pastorianus
ggagggtacaaatctcccttcggca

SEQ ID NO: 67393 - DNA, 25 bp, Saccharomyces pastorianus
ggaaggtcaaatgtacacgtctgta

SEQ ID NO: 67394 - DNA, 25 bp, Saccharomyces pastorianus
gcaagccgccggttgagactagcaa

SEQ ID NO: 67395 - DNA, 25 bp, Saccharomyces pastorianus
agagctctgtagtaaatcccaccca

SEQ ID NO: 67396 - DNA, 25 bp, Saccharomyces pastorianus
cccttcggcactgatagctgtgatt

SEQ ID NO: 67397 - DNA, 25 bp, Saccharomyces pastorianus
ggagccgctgtgaaagccatttcca

SEQ ID NO: 67398 - DNA, 25 bp, Saccharomyces pastorianus
gaactccagagaggccggtctcgaa

SEQ ID NO: 67399 - DNA, 25 bp, Saccharomyces pastorianus
gacgggcggcaaaactcaatccgat

SEQ ID NO: 67400 - DNA, 25 bp, Saccharomyces pastorianus
gagcacagtgcaatttcatcgaagg

SEQ ID NO: 67401 - DNA, 25 bp, Saccharomyces pastorianus
ttcgaccatggcagacgagcacagt

SEQ ID NO: 67402 - DNA, 25 bp, Saccharomyces pastorianus
tctacggatgaatgtcgagctctta

SEQ ID NO: 67403 - DNA, 25 bp, Saccharomyces pastorianus
gagctcttatttctcttctaaacga

SEQ ID NO: 67404 - DNA, 25 bp, Saccharomyces pastorianus
aattgccttcgagctatgctttgaa

SEQ ID NO: 67405 - DNA, 25 bp, Saccharomyces pastorianus
gattgaaactcctgatctttattgg

SEQ ID NO: 67406 - DNA, 25 bp, Saccharomyces pastorianus
tttccagtgggctgtctagaagcac

SEQ ID NO: 67407 - DNA, 25 bp, Saccharomyces pastorianus
gataaggcagcgttttccagtgggc

SEQ ID NO: 67408 - DNA, 25 bp, Saccharomyces pastorianus
gaggtacttagacattggcccacga

SEQ ID NO: 67409 - DNA, 25 bp, Saccharomyces pastorianus
gaaattgaatctctactccgaactg

SEQ ID NO: 67410 - DNA, 25 bp, Saccharomyces pastorianus
caaagatactattctcctcagtgta

SEQ ID NO: 67411 - DNA, 25 bp, Saccharomyces pastorianus
aataggccggctctttttaatcaga

SEQ ID NO: 67412 - DNA, 25 bp, Saccharomyces pastorianus
gcactaatttggctgtcctggaaga

SEQ ID NO: 67413 - DNA, 25 bp, Saccharomyces pastorianus
ttgccgaacatgctagatccgtcta

SEQ ID NO: 67414 - DNA, 25 bp, Saccharomyces pastorianus
atttcgacgccgttgcattgtggag

SEQ ID NO: 67415 - DNA, 25 bp, Saccharomyces pastorianus
tgtgcttgaagccattgccgaacat

SEQ ID NO: 67416 - DNA, 25 bp, Saccharomyces pastorianus
ttccatgactcaaaggcgttcgatt

SEQ ID NO: 67417 - DNA, 25 bp, Saccharomyces pastorianus
actattattacctcttctgtatcgg

SEQ ID NO: 67418 - DNA, 25 bp, Saccharomyces pastorianus
tactacgcgtcgtgctatttggact

SEQ ID NO: 67419 - DNA, 25 bp, Saccharomyces pastorianus
gaccacgacaaggtttgcgtcctga

SEQ ID NO: 67420 - DNA, 25 bp, Saccharomyces pastorianus
acgtccccaaggtactgagcaatga

SEQ ID NO: 67421 - DNA, 25 bp, Saccharomyces pastorianus
gaaattcttcaatatccccatcacg

SEQ ID NO: 67422 - DNA, 25 bp, Saccharomyces pastorianus
ttgcgtcctgaacaaggccacagat

SEQ ID NO: 67423 - DNA, 25 bp, Saccharomyces pastorianus
ggataactgcgctattgtgcttgaa

SEQ ID NO: 67424 - DNA, 25 bp, Saccharomyces pastorianus
aactttgccagtttccaattcttca

SEQ ID NO: 67425 - DNA, 25 bp, Saccharomyces pastorianus
gccagtttccaattcttcagacatt

SEQ ID NO: 67426 - DNA, 25 bp, Saccharomyces pastorianus
gtttagatctttcttgttcagtcaa

SEQ ID NO: 67427 - DNA, 25 bp, Saccharomyces pastorianus
gcattaagctgttgtatgacgaatt

SEQ ID NO: 67428 - DNA, 25 bp, Saccharomyces pastorianus
ggtaatgctttttatagggcctcgt

SEQ ID NO: 67429 - DNA, 25 bp, Saccharomyces pastorianus
gcctcgtcgatttgtaactttgcca

SEQ ID NO: 67430 - DNA, 25 bp, Saccharomyces pastorianus
gatccatgctttgaagctagctgcg

SEQ ID NO: 67431 - DNA, 25 bp, Saccharomyces pastorianus
gtttcaagatctttccaatggtcaa

SEQ ID NO: 67432 - DNA, 25 bp, Saccharomyces pastorianus
aatcttggttcaactgtttgatctg

SEQ ID NO: 67433 - DNA, 25 bp, Saccharomyces pastorianus
attgttaatttctagcatgtctgat

SEQ ID NO: 67434 - DNA, 25 bp, Saccharomyces pastorianus
cttcagacattctttgatccatgct

SEQ ID NO: 67435 - DNA, 25 bp, Saccharomyces pastorianus
gccactttcacccatggaatattca

SEQ ID NO: 67436 - DNA, 25 bp, Saccharomyces pastorianus
acatattccaattcatctcctacag

SEQ ID NO: 67437 - DNA, 25 bp, Saccharomyces pastorianus
agacacgctcctttactatctaaga

SEQ ID NO: 67438 - DNA, 25 bp, Saccharomyces pastorianus
ggatcgccaaagagtgctccttctg

SEQ ID NO: 67439 - DNA, 25 bp, Saccharomyces pastorianus
ggtacgaggttctgcatactcttaa

SEQ ID NO: 67440 - DNA, 25 bp, Saccharomyces pastorianus
ggatcacacaccaagcataagcaat

SEQ ID NO: 67441 - DNA, 25 bp, Saccharomyces pastorianus
gaaatattcagcaccttccaacatg

SEQ ID NO: 67442 - DNA, 25 bp, Saccharomyces pastorianus
gagacagaacctgcctacatattcc

SEQ ID NO: 67443 - DNA, 25 bp, Saccharomyces pastorianus
agtgtaaattcagcttccgccatta

SEQ ID NO: 67444 - DNA, 25 bp, Saccharomyces pastorianus
acaactccaatatcgggcaaccggt

SEQ ID NO: 67445 - DNA, 25 bp, Saccharomyces pastorianus
agcaagaagcgttttcccacatagc

SEQ ID NO: 67446 - DNA, 25 bp, Saccharomyces pastorianus
gacatctagaaaaaggtctccgcac

SEQ ID NO: 67447 - DNA, 25 bp, Saccharomyces pastorianus
cactgtattcaaggctgttgataag

SEQ ID NO: 67448 - DNA, 25 bp, Saccharomyces pastorianus
atggctcttactccactgtattcaa

SEQ ID NO: 67449 - DNA, 25 bp, Saccharomyces pastorianus
actccactgtattcaaggctgttga

SEQ ID NO: 67450 - DNA, 25 bp, Saccharomyces pastorianus
ctcttactccactgtattcaaggct

SEQ ID NO: 67451 - DNA, 25 bp, Saccharomyces pastorianus
gctcttactccactgtattcaaggc

SEQ ID NO: 67452 - DNA, 25 bp, Saccharomyces pastorianus
cttactccactgtattcaaggctgt

SEQ ID NO: 67453 - DNA, 25 bp, Saccharomyces pastorianus
tactccactgtattcaaggctgttg

SEQ ID NO: 67454 - DNA, 25 bp, Saccharomyces pastorianus
ggctcttactccactgtattcaagg

SEQ ID NO: 67455 - DNA, 25 bp, Saccharomyces pastorianus
tggctcttactccactgtattcaag

SEQ ID NO: 67456 - DNA, 25 bp, Saccharomyces pastorianus
tccactgtattcaaggctgttgata

SEQ ID NO: 67457 - DNA, 25 bp, Saccharomyces pastorianus
gacatctagaaaaaggtctccgcac

SEQ ID NO: 67458 - DNA, 25 bp, Saccharomyces pastorianus
ctccactgtattcaaggctgttgat

SEQ ID NO: 67459 - DNA, 25 bp, Saccharomyces pastorianus
cactgtattcaaggctgttgataag

SEQ ID NO: 67460 - DNA, 25 bp, Saccharomyces pastorianus
atggctcttactccactgtattcaa

SEQ ID NO: 67461 - DNA, 25 bp, Saccharomyces pastorianus
taaagaggagctgggccatggctct

SEQ ID NO: 67462 - DNA, 25 bp, Saccharomyces pastorianus
gtctccgcacgatttcatttttaaa

SEQ ID NO: 67463 - DNA, 25 bp, Saccharomyces pastorianus
ctcttactccactgtattcaaggct

SEQ ID NO: 67464 - DNA, 25 bp, Saccharomyces pastorianus
cttactccactgtattcaaggctgt

SEQ ID NO: 67465 - DNA, 25 bp, Saccharomyces pastorianus
tactccactgtattcaaggctgttg

SEQ ID NO: 67466 - DNA, 25 bp, Saccharomyces pastorianus
aaaaggtctccgcacgatttcattt

SEQ ID NO: 67467 - DNA, 25 bp, Saccharomyces pastorianus
ggctcttactccactgtattcaagg

SEQ ID NO: 67468 - DNA, 25 bp, Saccharomyces pastorianus
agcagctttacttggcgctctggac

SEQ ID NO: 67469 - DNA, 25 bp, Saccharomyces pastorianus
gcgctctggacctttatatacgaaa

SEQ ID NO: 67470 - DNA, 25 bp, Saccharomyces pastorianus
gatggccagcacagcaagggtgaaa

SEQ ID NO: 67471 - DNA, 25 bp, Saccharomyces pastorianus
ctattgggtgtggtactagtataaa

SEQ ID NO: 67472 - DNA, 25 bp, Saccharomyces pastorianus
ggaaatgagtgctaagtacccgaca

SEQ ID NO: 67473 - DNA, 25 bp, Saccharomyces pastorianus
ccgatggagggagagcagctttact

SEQ ID NO: 67474 - DNA, 25 bp, Saccharomyces pastorianus
tgccgagaggcgttcgatcagctga

SEQ ID NO: 67475 - DNA, 25 bp, Saccharomyces pastorianus
tgctaagtacccgacaacgatgagt

SEQ ID NO: 67476 - DNA, 25 bp, Saccharomyces pastorianus
gggcccgagatatcgcatcttagta

SEQ ID NO: 67477 - DNA, 25 bp, Saccharomyces pastorianus
accaagggagcagtgatggccagca

SEQ ID NO: 67478 - DNA, 25 bp, Saccharomyces pastorianus
tagttggaatttgtgagccgatgga

SEQ ID NO: 67479 - DNA, 25 bp, Saccharomyces pastorianus
agtcatttctttatgtgattctaat

SEQ ID NO: 67480 - DNA, 25 bp, Saccharomyces pastorianus
gtgattctaatagacttatggtcaa

SEQ ID NO: 67481 - DNA, 25 bp, Saccharomyces pastorianus
ggaaacataattaccaatgcggaag

SEQ ID NO: 67482 - DNA, 25 bp, Saccharomyces pastorianus
gacttatggtcaaggatattactgt

SEQ ID NO: 67483 - DNA, 25 bp, Saccharomyces pastorianus
ttaccaatgcggaagctaccatcaa

SEQ ID NO: 67484 - DNA, 25 bp, Saccharomyces pastorianus
tcaattcgaaataaagggcttactt

SEQ ID NO: 67485 - DNA, 25 bp, Saccharomyces pastorianus
ggaattagagcaatgtcagtcaata

SEQ ID NO: 67486 - DNA, 25 bp, Saccharomyces pastorianus
gagggacggagaacaatcaacggta

SEQ ID NO: 67487 - DNA, 25 bp, Saccharomyces pastorianus
gcggaagctaccatcaaacttaatg

SEQ ID NO: 67488 - DNA, 25 bp, Saccharomyces pastorianus
atgaatttcgaaatattctctcaaa

SEQ ID NO: 67489 - DNA, 25 bp, Saccharomyces pastorianus
gggccgaaatcacctattatgaatt

SEQ ID NO: 67490 - DNA, 25 bp, Saccharomyces pastorianus
ttactttgtcttcggcgaacccact

SEQ ID NO: 67491 - DNA, 25 bp, Saccharomyces pastorianus
gacttacctagaacaggagacgcta

SEQ ID NO: 67492 - DNA, 25 bp, Saccharomyces pastorianus
aattacgacgaaaatctctcggaag

SEQ ID NO: 67493 - DNA, 25 bp, Saccharomyces pastorianus
cgagccacaattttgctgtaaagca

SEQ ID NO: 67494 - DNA, 25 bp, Saccharomyces pastorianus
ctctcggaagacaaagatctcgtat

SEQ ID NO: 67495 - DNA, 25 bp, Saccharomyces pastorianus
aagactcaagcatactctgcatgaa

SEQ ID NO: 67496 - DNA, 25 bp, Saccharomyces pastorianus
gaagatgagtcatttgttaatccta

SEQ ID NO: 67497 - DNA, 25 bp, Saccharomyces pastorianus
tgagattcaagagacgagccacaat

SEQ ID NO: 67498 - DNA, 25 bp, Saccharomyces pastorianus
gctttatttagagacaactgctgac

SEQ ID NO: 67499 - DNA, 25 bp, Saccharomyces pastorianus
gaacccactacacctgaactcagag

SEQ ID NO: 67500 - DNA, 25 bp, Saccharomyces pastorianus
ggagacgctagactatttcttaagg

SEQ ID NO: 67501 - DNA, 25 bp, Saccharomyces pastorianus
gcgtatgtatcagctgcaacaccac

SEQ ID NO: 67502 - DNA, 25 bp, Saccharomyces pastorianus
cttcatttttgttcgagatcagcgt

SEQ ID NO: 67503 - DNA, 25 bp, Saccharomyces pastorianus
gttattttgtatttcgttcgtcagc

SEQ ID NO: 67504 - DNA, 25 bp, Saccharomyces pastorianus
tcctcaggttcgttagctcgttgat

SEQ ID NO: 67505 - DNA, 25 bp, Saccharomyces pastorianus
gttagctcgttgatcagcacgttat

SEQ ID NO: 67506 - DNA, 25 bp, Saccharomyces pastorianus
tcttcccacaccaaagcttctttat

SEQ ID NO: 67507 - DNA, 25 bp, Saccharomyces pastorianus
gtatccatctgtacttcactttctt

SEQ ID NO: 67508 - DNA, 25 bp, Saccharomyces pastorianus
accgttcttgaccagttcttcattt

SEQ ID NO: 67509 - DNA, 25 bp, Saccharomyces pastorianus
gttcgtcagctttaccagcgatatt

SEQ ID NO: 67510 - DNA, 25 bp, Saccharomyces pastorianus
atgttaattcctccaccgttcttga

SEQ ID NO: 67511 - DNA, 25 bp, Saccharomyces pastorianus
gattgttcccgatcatgttaattcc

SEQ ID NO: 67512 - DNA, 25 bp, Saccharomyces pastorianus
gttgtaccgctctttataccgttct

SEQ ID NO: 67513 - DNA, 25 bp, Saccharomyces pastorianus
actcttgcctgtgtgcgattgcgat

SEQ ID NO: 67514 - DNA, 25 bp, Saccharomyces pastorianus
atcgcccttatctgttcagtttgtg

SEQ ID NO: 67515 - DNA, 25 bp, Saccharomyces pastorianus
ttataccgttcttctggatctcgtc

SEQ ID NO: 67516 - DNA, 25 bp, Saccharomyces pastorianus
acttgcccactaggagtttctcaat

SEQ ID NO: 67517 - DNA, 25 bp, Saccharomyces pastorianus
aatatcatgcatctctaggccgtgc

SEQ ID NO: 67518 - DNA, 25 bp, Saccharomyces pastorianus
catgtcctccatgggttgtagtcgt

SEQ ID NO: 67519 - DNA, 25 bp, Saccharomyces pastorianus
cagtttgtgctctcttgaattcatc

SEQ ID NO: 67520 - DNA, 25 bp, Saccharomyces pastorianus
gcgattgcgattgcgttgtaccgct

SEQ ID NO: 67521 - DNA, 25 bp, Saccharomyces pastorianus
ttgaattcatcgtacttgcccacta

SEQ ID NO: 67522 - DNA, 25 bp, Saccharomyces pastorianus
ggttgtagtcgtgcctatcacggca

SEQ ID NO: 67523 - DNA, 25 bp, Saccharomyces pastorianus
tacgagttgattgacctcaaggcaa

SEQ ID NO: 67524 - DNA, 25 bp, Saccharomyces pastorianus
gctaaggttcaagcctatacgtttg

SEQ ID NO: 67525 - DNA, 25 bp, Saccharomyces pastorianus
gaccaatgtcttgaggttcatacac

SEQ ID NO: 67526 - DNA, 25 bp, Saccharomyces pastorianus
agtcgatttcatttgcagctgttgc

SEQ ID NO: 67527 - DNA, 25 bp, Saccharomyces pastorianus
aatccagacaattccgctaaggttc

SEQ ID NO: 67528 - DNA, 25 bp, Saccharomyces pastorianus
ggactggagccaaagaccgaaccgt

SEQ ID NO: 67529 - DNA, 25 bp, Saccharomyces pastorianus
gttgaccactacattgagtgttcca

SEQ ID NO: 67530 - DNA, 25 bp, Saccharomyces pastorianus
aaacatatcaaagtagcggcgcaga

SEQ ID NO: 67531 - DNA, 25 bp, Saccharomyces pastorianus
cagctgttgcaggagaccaatgtct

SEQ ID NO: 67532 - DNA, 25 bp, Saccharomyces pastorianus
aaagggtattctctctcatagctca

SEQ ID NO: 67533 - DNA, 25 bp, Saccharomyces pastorianus
gtcaaggagccgttagtcaattttt

SEQ ID NO: 67534 - DNA, 25 bp, Saccharomyces pastorianus
acatgagcatcgtggtcgttgcact

SEQ ID NO: 67535 - DNA, 25 bp, Saccharomyces pastorianus
acgcggacgcggatgccatggaaat

SEQ ID NO: 67536 - DNA, 25 bp, Saccharomyces pastorianus
ggacaagttcaccagggaccacgag

SEQ ID NO: 67537 - DNA, 25 bp, Saccharomyces pastorianus
agggaacaggcatcggctgcgacaa

SEQ ID NO: 67538 - DNA, 25 bp, Saccharomyces pastorianus
ggcgccggcaacaaagtcacttaca

SEQ ID NO: 67539 - DNA, 25 bp, Saccharomyces pastorianus
aagtctttgccgtcaccacgaaaag

SEQ ID NO: 67540 - DNA, 25 bp, Saccharomyces pastorianus
aatcgacgacacagacgcggacaca

SEQ ID NO: 67541 - DNA, 25 bp, Saccharomyces pastorianus
atcatcgacgtatgctgctcaccaa

SEQ ID NO: 67542 - DNA, 25 bp, Saccharomyces pastorianus
tggacccttcaagccagtctaagca

SEQ ID NO: 67543 - DNA, 25 bp, Saccharomyces pastorianus
tttcagctactacgatttctccaag

SEQ ID NO: 67544 - DNA, 25 bp, Saccharomyces pastorianus
gctgtcgcaactgcttcaatcgatg

SEQ ID NO: 67545 - DNA, 25 bp, Saccharomyces pastorianus
ggtggtgaggaagcttctgattcaa

SEQ ID NO: 67546 - DNA, 25 bp, Saccharomyces pastorianus
taccccaggttcttttgatccagtt

SEQ ID NO: 67547 - DNA, 25 bp, Saccharomyces pastorianus
gcgtaagctccgatggcggccatta

SEQ ID NO: 67548 - DNA, 25 bp, Saccharomyces pastorianus
ttatcgacaaattaccccaggttct

SEQ ID NO: 67549 - DNA, 25 bp, Saccharomyces pastorianus
gtgatttatcaccacggcgtaagct

SEQ ID NO: 67550 - DNA, 25 bp, Saccharomyces pastorianus
tattaccattcaaatcctcttcggg

SEQ ID NO: 67551 - DNA, 25 bp, Saccharomyces pastorianus
aatgttgaagaaccacgcctcaggc

SEQ ID NO: 67552 - DNA, 25 bp, Saccharomyces pastorianus
ggtggccaatttagatccgtactag

SEQ ID NO: 67553 - DNA, 25 bp, Saccharomyces pastorianus
ggatatttcagactccagcgtgaat

SEQ ID NO: 67554 - DNA, 25 bp, Saccharomyces pastorianus
acgcctcaggcatcgccgatagaaa

SEQ ID NO: 67555 - DNA, 25 bp, Saccharomyces pastorianus
gcggccattacacggcagatgttta

SEQ ID NO: 67556 - DNA, 25 bp, Saccharomyces pastorianus
aatgggatggttgaagccgcccgct

SEQ ID NO: 67557 - DNA, 25 bp, Saccharomyces pastorianus
gtggtcgagctagacgtgcctgaat

SEQ ID NO: 67558 - DNA, 25 bp, Saccharomyces pastorianus
aattcctcaattgtcttcactttcg

SEQ ID NO: 67559 - DNA, 25 bp, Saccharomyces pastorianus
aatcttcagacatcatattccccaa

SEQ ID NO: 67560 - DNA, 25 bp, Saccharomyces pastorianus
cgctacatggctacttgacggattc

SEQ ID NO: 67561 - DNA, 25 bp, Saccharomyces pastorianus
aagttactgccggacgacctcataa

SEQ ID NO: 67562 - DNA, 25 bp, Saccharomyces pastorianus
aaaagagcggacttctctgcactgt

SEQ ID NO: 67563 - DNA, 25 bp, Saccharomyces pastorianus
gggacacagacttcaatgctcttga

SEQ ID NO: 67564 - DNA, 25 bp, Saccharomyces pastorianus
tgcctgaatccgctatactcgaaag

SEQ ID NO: 67565 - DNA, 25 bp, Saccharomyces pastorianus
gtcagagtctacattgggccgcaaa

SEQ ID NO: 67566 - DNA, 25 bp, Saccharomyces pastorianus
gggccgcaaagctgctacttatatt

SEQ ID NO: 67567 - DNA, 25 bp, Saccharomyces pastorianus
attcaatcatcgatcttccaaccaa

SEQ ID NO: 67568 - DNA, 25 bp, Saccharomyces pastorianus
gagcgatcctaatcatgataggcat

SEQ ID NO: 67569 - DNA, 25 bp, Saccharomyces pastorianus
ttccaaccaatcgaagagcatggca

SEQ ID NO: 67570 - DNA, 25 bp, Saccharomyces pastorianus
agagcatggcaaggtttttgggtct

SEQ ID NO: 67571 - DNA, 25 bp, Saccharomyces pastorianus
gtctgggtctgcaactgggactgat

SEQ ID NO: 67572 - DNA, 25 bp, Saccharomyces pastorianus
gggtctgcaactgggactgattcca

SEQ ID NO: 67573 - DNA, 25 bp, Saccharomyces pastorianus
atcgatcttccaaccaatcgaagag

SEQ ID NO: 67574 - DNA, 25 bp, Saccharomyces pastorianus
aaaagtgagcgatcctaatcatgat

SEQ ID NO: 67575 - DNA, 25 bp, Saccharomyces pastorianus
ttttgggtctgggtctgggtctgca

SEQ ID NO: 67576 - DNA, 25 bp, Saccharomyces pastorianus
taatggaaatgaatccaatctaggc

SEQ ID NO: 67577 - DNA, 25 bp, Saccharomyces pastorianus
ctgggactgattccagtacagaaaa

SEQ ID NO: 67578 - DNA, 25 bp, Saccharomyces pastorianus
aagccagtttagagctacttccaga

SEQ ID NO: 67579 - DNA, 25 bp, Saccharomyces pastorianus
atccactcctgtacctgagggaaat

SEQ ID NO: 67580 - DNA, 25 bp, Saccharomyces pastorianus
tgagatgagcttttccactgccagg

SEQ ID NO: 67581 - DNA, 25 bp, Saccharomyces pastorianus
gataatacgccaataccgccaagac

SEQ ID NO: 67582 - DNA, 25 bp, Saccharomyces pastorianus
atgaagaccgtatggcttccatcca

SEQ ID NO: 67583 - DNA, 25 bp, Saccharomyces pastorianus
gggatttgggacttttgacacttgt

SEQ ID NO: 67584 - DNA, 25 bp, Saccharomyces pastorianus
ccaaggccctacatttctatcaatg

SEQ ID NO: 67585 - DNA, 25 bp, Saccharomyces pastorianus
acggttaaaattgctgtccttgaca

SEQ ID NO: 67586 - DNA, 25 bp, Saccharomyces pastorianus
gctgggattcataaacatcgccaat

SEQ ID NO: 67587 - DNA, 25 bp, Saccharomyces pastorianus
ttgcgatagtagcacatccactcct

SEQ ID NO: 67588 - DNA, 25 bp, Saccharomyces pastorianus
actgcattgcccatacataacggtt

SEQ ID NO: 67589 - DNA, 25 bp, Saccharomyces pastorianus
attgaagtcccagttcttgcagctt

SEQ ID NO: 67590 - DNA, 25 bp, Saccharomyces pastorianus
aatcggcttggaacgtgaactccta

SEQ ID NO: 67591 - DNA, 25 bp, Saccharomyces pastorianus
gtgaactcctattaaccgaacgtct

SEQ ID NO: 67592 - DNA, 25 bp, Saccharomyces pastorianus
gaatgcacctgatccggatgaagac

SEQ ID NO: 67593 - DNA, 25 bp, Saccharomyces pastorianus
agtgttctgcaaccgaatgcacctg

SEQ ID NO: 67594 - DNA, 25 bp, Saccharomyces pastorianus
ggattggcacgatctacagtacgat

SEQ ID NO: 67595 - DNA, 25 bp, Saccharomyces pastorianus
cttgcagcttccattgtttgagtac

SEQ ID NO: 67596 - DNA, 25 bp, Saccharomyces pastorianus
aatatcgctcgtcatctgtgtttca

SEQ ID NO: 67597 - DNA, 25 bp, Saccharomyces pastorianus
ctgtgtttcagtctttgtgtggtgt

SEQ ID NO: 67598 - DNA, 25 bp, Saccharomyces pastorianus
gtacaactggctactcttacaaaac

SEQ ID NO: 67599 - DNA, 25 bp, Saccharomyces pastorianus
gtataccaagtcattcggcttcctt

SEQ ID NO: 67600 - DNA, 25 bp, Saccharomyces pastorianus
gccaggtttggccattggtagcaaa

SEQ ID NO: 67601 - DNA, 25 bp, Saccharomyces pastorianus
aaagattggctggtcgttgtcctgc

SEQ ID NO: 67602 - DNA, 25 bp, Saccharomyces pastorianus
aattcactattgttgcggtagccaa

SEQ ID NO: 67603 - DNA, 25 bp, Saccharomyces pastorianus
cgttgtcctgcctcaaatatgtaat

SEQ ID NO: 67604 - DNA, 25 bp, Saccharomyces pastorianus
tctatgggacaagatctggcgtacc

SEQ ID NO: 67605 - DNA, 25 bp, Saccharomyces pastorianus
aagacaacaaatttcctctatggga

SEQ ID NO: 67606 - DNA, 25 bp, Saccharomyces pastorianus
gataggttcgtcaacaacgttttgg

SEQ ID NO: 67607 - DNA, 25 bp, Saccharomyces pastorianus
acagttacacggatttgctaagagc

SEQ ID NO: 67608 - DNA, 25 bp, Saccharomyces pastorianus
ctggcgtaccagactatgtatggtt

SEQ ID NO: 67609 - DNA, 25 bp, Saccharomyces pastorianus
tggacttcatacatattacctcaat

SEQ ID NO: 67610 - DNA, 25 bp, Saccharomyces pastorianus
ggtagctaagttcccaattgaggca

SEQ ID NO: 67611 - DNA, 25 bp, Saccharomyces pastorianus
tcagaactcaactaacatcgcaaga

SEQ ID NO: 67612 - DNA, 25 bp, Saccharomyces pastorianus
atctagtttcggaattcagaactca

SEQ ID NO: 67613 - DNA, 25 bp, Saccharomyces pastorianus
gaaaagattcttctagcttattatg

SEQ ID NO: 67614 - DNA, 25 bp, Saccharomyces pastorianus
tggtacatctttgccatattttgtt

SEQ ID NO: 67615 - DNA, 25 bp, Saccharomyces pastorianus
tttgccatattttgtttacctactg

SEQ ID NO: 67616 - DNA, 25 bp, Saccharomyces pastorianus
ttgttttaagacacgtccccaactg

SEQ ID NO: 67617 - DNA, 25 bp, Saccharomyces pastorianus
gtgagattggtacatctttgccata

SEQ ID NO: 67618 - DNA, 25 bp, Saccharomyces pastorianus
tcttctagcttattatgattcgtat

SEQ ID NO: 67619 - DNA, 25 bp, Saccharomyces pastorianus
tgtttacctactggaaaatctagtt

SEQ ID NO: 67620 - DNA, 25 bp, Saccharomyces pastorianus
gacacgtccccaactgtgagattgg

SEQ ID NO: 67621 - DNA, 25 bp, Saccharomyces pastorianus
catcgcaagagtttgatttcatgtt

SEQ ID NO: 67622 - DNA, 25 bp, Saccharomyces pastorianus
agagcctatccaattgaacccatac

SEQ ID NO: 67623 - DNA, 25 bp, Saccharomyces pastorianus
gaccttatcggaaagcccatggatt

SEQ ID NO: 67624 - DNA, 25 bp, Saccharomyces pastorianus
aaggcttctgacactctgttccaaa

SEQ ID NO: 67625 - DNA, 25 bp, Saccharomyces pastorianus
ctttgaggccagattccattgaatt

SEQ ID NO: 67626 - DNA, 25 bp, Saccharomyces pastorianus
tgggtttcaaactaacgccaacaca

SEQ ID NO: 67627 - DNA, 25 bp, Saccharomyces pastorianus
gattcactcatcatcaaggcttctg

SEQ ID NO: 67628 - DNA, 25 bp, Saccharomyces pastorianus
aggaacgctgtttctgatcttgccc

SEQ ID NO: 67629 - DNA, 25 bp, Saccharomyces pastorianus
atttacctgcccaaaatatcgttga

SEQ ID NO: 67630 - DNA, 25 bp, Saccharomyces pastorianus
ataccagctgcaagtgaggattcac

SEQ ID NO: 67631 - DNA, 25 bp, Saccharomyces pastorianus
agcacaacgttaatcggtaccttag

SEQ ID NO: 67632 - DNA, 25 bp, Saccharomyces pastorianus
gatcttgcccaatctttatggcaga

SEQ ID NO: 67633 - DNA, 25 bp, Saccharomyces pastorianus
aaaagccagcatcccgtaattgcat

SEQ ID NO: 67634 - DNA, 25 bp, Saccharomyces pastorianus
ggcaaattactcaactcccaagcaa

SEQ ID NO: 67635 - DNA, 25 bp, Saccharomyces pastorianus
tctcttctgggcttgacactagtat

SEQ ID NO: 67636 - DNA, 25 bp, Saccharomyces pastorianus
tttaagatcaccagaacacccagtc

SEQ ID NO: 67637 - DNA, 25 bp, Saccharomyces pastorianus
acacccagtcgatgagttctctatt

SEQ ID NO: 67638 - DNA, 25 bp, Saccharomyces pastorianus
aggccacgcttctggagttattact

SEQ ID NO: 67639 - DNA, 25 bp, Saccharomyces pastorianus
taagcatgttattgcaggccacgct

SEQ ID NO: 67640 - DNA, 25 bp, Saccharomyces pastorianus
atagcatagccgtattcgtgggaac

SEQ ID NO: 67641 - DNA, 25 bp, Saccharomyces pastorianus
taatcagttttgctacacgccgcac

SEQ ID NO: 67642 - DNA, 25 bp, Saccharomyces pastorianus
gctgatgaatttttgcttgtctctt

SEQ ID NO: 67643 - DNA, 25 bp, Saccharomyces pastorianus
aagcgcctatatttttagtctccga

SEQ ID NO: 67644 - DNA, 25 bp, Saccharomyces pastorianus
aacctgagtgttattccggcttgtc

SEQ ID NO: 67645 - DNA, 25 bp, Saccharomyces pastorianus
ataccgtttcttgtggtctgctaat

SEQ ID NO: 67646 - DNA, 25 bp, Saccharomyces pastorianus
cttgtctagggtttgcgtacgtgat

SEQ ID NO: 67647 - DNA, 25 bp, Saccharomyces pastorianus
gaaagccgttacgtggatcgccatt

SEQ ID NO: 67648 - DNA, 25 bp, Saccharomyces pastorianus
gagtcgcctcgtttcaagaccggtt

SEQ ID NO: 67649 - DNA, 25 bp, Saccharomyces pastorianus
tattcattctctcagtctacttacg

SEQ ID NO: 67650 - DNA, 25 bp, Saccharomyces pastorianus
gtatgcatttttcaccacgtatttc

SEQ ID NO: 67651 - DNA, 25 bp, Saccharomyces pastorianus
acgtgatcttttgtgctatgggtgc

SEQ ID NO: 67652 - DNA, 25 bp, Saccharomyces pastorianus
ttggcatggcctactgtggagtcgc

SEQ ID NO: 67653 - DNA, 25 bp, Saccharomyces pastorianus
tgggatatttcctccaaggctaaat

SEQ ID NO: 67654 - DNA, 25 bp, Saccharomyces pastorianus
gtatttcagtgttgctgcgtcacca

SEQ ID NO: 67655 - DNA, 25 bp, Saccharomyces pastorianus
cgacgtcacgtcgaatattgcattc

SEQ ID NO: 67656 - DNA, 25 bp, Saccharomyces pastorianus
gttcattacgcaaccattcacactt

SEQ ID NO: 67657 - DNA, 25 bp, Saccharomyces pastorianus
ggagaacccatcaagctgccagaaa

SEQ ID NO: 67658 - DNA, 25 bp, Saccharomyces pastorianus
atatgctcatcacctgcgtaatgat

SEQ ID NO: 67659 - DNA, 25 bp, Saccharomyces pastorianus
tcgtttgttgattcgaactcgccat

SEQ ID NO: 67660 - DNA, 25 bp, Saccharomyces pastorianus
gactcaattgggtcatttggtacag

SEQ ID NO: 67661 - DNA, 25 bp, Saccharomyces pastorianus
gttgtacagtttagtcacgacgtca

SEQ ID NO: 67662 - DNA, 25 bp, Saccharomyces pastorianus
attcacacttgacagcagcactttc

SEQ ID NO: 67663 - DNA, 25 bp, Saccharomyces pastorianus
aatgattaccaagatcttctgcaag

SEQ ID NO: 67664 - DNA, 25 bp, Saccharomyces pastorianus
aagtctcttcatgaaatgtgcggca

SEQ ID NO: 67665 - DNA, 25 bp, Saccharomyces pastorianus
ggacgcagagcgaccttcaaaaatt

SEQ ID NO: 67666 - DNA, 25 bp, Saccharomyces pastorianus
tccttttcatccatttacaaaactt

SEQ ID NO: 67667 - DNA, 25 bp, Saccharomyces pastorianus
catggtacgacaatcacaataaggg

SEQ ID NO: 67668 - DNA, 25 bp, Saccharomyces pastorianus
atttgattccgcgatcacttcatgg

SEQ ID NO: 67669 - DNA, 25 bp, Saccharomyces pastorianus
aacagtatttgattccgcgatcact

SEQ ID NO: 67670 - DNA, 25 bp, Saccharomyces pastorianus
attccgcgatcacttcatggtacga

SEQ ID NO: 67671 - DNA, 25 bp, Saccharomyces pastorianus
gttttccaaacagtatttgattccg

SEQ ID NO: 67672 - DNA, 25 bp, Saccharomyces pastorianus
tcatccatttacaaaacttttttca

SEQ ID NO: 67673 - DNA, 25 bp, Saccharomyces pastorianus
gatcacttcatggtacgacaatcac

SEQ ID NO: 67674 - DNA, 25 bp, Saccharomyces pastorianus
ttatggaaggacgtaaaggctcgaa

SEQ ID NO: 67675 - DNA, 25 bp, Saccharomyces pastorianus
cgcgatcacttcatggtacgacaat

SEQ ID NO: 67676 - DNA, 25 bp, Saccharomyces pastorianus
ttgattccgcgatcacttcatggta

SEQ ID NO: 67677 - DNA, 25 bp, Saccharomyces pastorianus
tccttttcatccatttacaaaactt

SEQ ID NO: 67678 - DNA, 25 bp, Saccharomyces pastorianus
catggtacgacaatcacaataaggg

SEQ ID NO: 67679 - DNA, 25 bp, Saccharomyces pastorianus
atttgattccgcgatcacttcatgg

SEQ ID NO: 67680 - DNA, 25 bp, Saccharomyces pastorianus
aacagtatttgattccgcgatcact

SEQ ID NO: 67681 - DNA, 25 bp, Saccharomyces pastorianus
attccgcgatcacttcatggtacga

SEQ ID NO: 67682 - DNA, 25 bp, Saccharomyces pastorianus
tgttggtactatctttgctggtgcc

SEQ ID NO: 67683 - DNA, 25 bp, Saccharomyces pastorianus
tgctggtgcctttgttttccaaaca

SEQ ID NO: 67684 - DNA, 25 bp, Saccharomyces pastorianus
gatcacttcatggtacgacaatcac

SEQ ID NO: 67685 - DNA, 25 bp, Saccharomyces pastorianus
ttatggaaggacgtaaaggctcgaa

SEQ ID NO: 67686 - DNA, 25 bp, Saccharomyces pastorianus
tttccaaacagtatttgattccgcg

SEQ ID NO: 67687 - DNA, 25 bp, Saccharomyces pastorianus
cgcgatcacttcatggtacgacaat

SEQ ID NO: 67688 - DNA, 25 bp, Saccharomyces pastorianus
ttagaaaagcgtggcgaacccttag

SEQ ID NO: 67689 - DNA, 25 bp, Saccharomyces pastorianus
attaccgcctggaactaaattcaag

SEQ ID NO: 67690 - DNA, 25 bp, Saccharomyces pastorianus
gaaggccatctggaacagtacgcaa

SEQ ID NO: 67691 - DNA, 25 bp, Saccharomyces pastorianus
ttggtagatcattcgacatgtcctt

SEQ ID NO: 67692 - DNA, 25 bp, Saccharomyces pastorianus
agacaaattggcaagctgatcagca

SEQ ID NO: 67693 - DNA, 25 bp, Saccharomyces pastorianus
ccagataattgcatggtcaggttag

SEQ ID NO: 67694 - DNA, 25 bp, Saccharomyces pastorianus
acggattagctggtgtcatacattc

SEQ ID NO: 67695 - DNA, 25 bp, Saccharomyces pastorianus
gacatgtccttattaccgcctggaa

SEQ ID NO: 67696 - DNA, 25 bp, Saccharomyces pastorianus
gaaatgttatactccatgtcgaaga

SEQ ID NO: 67697 - DNA, 25 bp, Saccharomyces pastorianus
cagtggtagagtttccaaccaaact

SEQ ID NO: 67698 - DNA, 25 bp, Saccharomyces pastorianus
gttacgaagctgattattacggatt

SEQ ID NO: 67699 - DNA, 25 bp, Saccharomyces pastorianus
ttacctctaaagtccgtgtctgatg

SEQ ID NO: 67700 - DNA, 25 bp, Saccharomyces pastorianus
gtacaagtcagcacgacacacgcag

SEQ ID NO: 67701 - DNA, 25 bp, Saccharomyces pastorianus
gaaatttcgcacatgacacaccaag

SEQ ID NO: 67702 - DNA, 25 bp, Saccharomyces pastorianus
ggatgaccctggttctaatcaaggt

SEQ ID NO: 67703 - DNA, 25 bp, Saccharomyces pastorianus
actattctaccccaggtgcattatt

SEQ ID NO: 67704 - DNA, 25 bp, Saccharomyces pastorianus
cacaacttccattttacctctaaag

SEQ ID NO: 67705 - DNA, 25 bp, Saccharomyces pastorianus
attgtttcgataatgctgccggtga

SEQ ID NO: 67706 - DNA, 25 bp, Saccharomyces pastorianus
taagactttcttaggcgcccatggt

SEQ ID NO: 67707 - DNA, 25 bp, Saccharomyces pastorianus
gacgtcacagaaactatcgccaaat

SEQ ID NO: 67708 - DNA, 25 bp, Saccharomyces pastorianus
gttcccgaagaagagccgacgtcac

SEQ ID NO: 67709 - DNA, 25 bp, Saccharomyces pastorianus
gacgccatgaacgaggtattttcca

SEQ ID NO: 67710 - DNA, 25 bp, Saccharomyces pastorianus
tgtacatatacatccttttcgctcc

SEQ ID NO: 67711 - DNA, 25 bp, Saccharomyces pastorianus
atatacatccttttcgctccattat

SEQ ID NO: 67712 - DNA, 25 bp, Saccharomyces pastorianus
atccttttcgctccattatgtcaag

SEQ ID NO: 67713 - DNA, 25 bp, Saccharomyces pastorianus
ttcgctccattatgtcaaggtatgc

SEQ ID NO: 67714 - DNA, 25 bp, Saccharomyces pastorianus
gtatgcacggtgatggagaaaaata

SEQ ID NO: 67715 - DNA, 25 bp, Saccharomyces pastorianus
atgtcaaggtatgcacggtgatgga

SEQ ID NO: 67716 - DNA, 25 bp, Saccharomyces pastorianus
cttttcgctccattatgtcaaggta

SEQ ID NO: 67717 - DNA, 25 bp, Saccharomyces pastorianus
atacatccttttcgctccattatgt

SEQ ID NO: 67718 - DNA, 25 bp, Saccharomyces pastorianus
tacatatacatccttttcgctccat

SEQ ID NO: 67719 - DNA, 25 bp, Saccharomyces pastorianus
gtgatggagaaaaatatgtaccttt

SEQ ID NO: 67720 - DNA, 25 bp, Saccharomyces pastorianus
tccattatgtcaaggtatgcacggt

SEQ ID NO: 67721 - DNA, 25 bp, Saccharomyces pastorianus
gatgaagatccagacaccttgcacc

SEQ ID NO: 67722 - DNA, 25 bp, Saccharomyces pastorianus
acagtttatcgtcaagtgcatggga

SEQ ID NO: 67723 - DNA, 25 bp, Saccharomyces pastorianus
ttgcaccctgtttctacctttttca

SEQ ID NO: 67724 - DNA, 25 bp, Saccharomyces pastorianus
gttcatcatcatttctgtgctgtat

SEQ ID NO: 67725 - DNA, 25 bp, Saccharomyces pastorianus
tgttacctggcttccactgggctaa

SEQ ID NO: 67726 - DNA, 25 bp, Saccharomyces pastorianus
aatggattccccaaatcctgactac

SEQ ID NO: 67727 - DNA, 25 bp, Saccharomyces pastorianus
gcttactcatatttccgttcatcat

SEQ ID NO: 67728 - DNA, 25 bp, Saccharomyces pastorianus
ggatatctactacatgcttactcat

SEQ ID NO: 67729 - DNA, 25 bp, Saccharomyces pastorianus
gattttgttttgaccaacttcgcca

SEQ ID NO: 67730 - DNA, 25 bp, Saccharomyces pastorianus
gaggcacaaggttttgggctgttac

SEQ ID NO: 67731 - DNA, 25 bp, Saccharomyces pastorianus
cttcgccatggcttcgtctaataat

SEQ ID NO: 67732 - DNA, 25 bp, Saccharomyces pastorianus
gagagccttagttcgtcaatccaaa

SEQ ID NO: 67733 - DNA, 25 bp, Saccharomyces pastorianus
aaattcaagcgcgtattgtcgaaga

SEQ ID NO: 67734 - DNA, 25 bp, Saccharomyces pastorianus
gaagttgcagaatttgataccccat

SEQ ID NO: 67735 - DNA, 25 bp, Saccharomyces pastorianus
actagtcagaggtggcgcgattgcc

SEQ ID NO: 67736 - DNA, 25 bp, Saccharomyces pastorianus
aagctacatcttcagtggattatga

SEQ ID NO: 67737 - DNA, 25 bp, Saccharomyces pastorianus
tgagctatgggatgcactagtcaga

SEQ ID NO: 67738 - DNA, 25 bp, Saccharomyces pastorianus
gaaaactggccattattccacaaga

SEQ ID NO: 67739 - DNA, 25 bp, Saccharomyces pastorianus
gagaggcaattactagcactaacga

SEQ ID NO: 67740 - DNA, 25 bp, Saccharomyces pastorianus
gataccccatggacattattttctc

SEQ ID NO: 67741 - DNA, 25 bp, Saccharomyces pastorianus
tattccacaagatccggttttattt

SEQ ID NO: 67742 - DNA, 25 bp, Saccharomyces pastorianus
atgtattgctcataggctgaagact

SEQ ID NO: 67743 - DNA, 25 bp, Saccharomyces pastorianus
ggtttgtaatatctctttttgcctt

SEQ ID NO: 67744 - DNA, 25 bp, Saccharomyces pastorianus
gcagagtttgttggaagctccggaa

SEQ ID NO: 67745 - DNA, 25 bp, Saccharomyces pastorianus
gtatcttctttgctgggtttgtaat

SEQ ID NO: 67746 - DNA, 25 bp, Saccharomyces pastorianus
agacagcccggtaacatttttgcct

SEQ ID NO: 67747 - DNA, 25 bp, Saccharomyces pastorianus
gatatgatcattgggctgggccgtt

SEQ ID NO: 67748 - DNA, 25 bp, Saccharomyces pastorianus
catggccttatctttacccagtatt

SEQ ID NO: 67749 - DNA, 25 bp, Saccharomyces pastorianus
tctgggtttcagaatcgctgcaaat

SEQ ID NO: 67750 - DNA, 25 bp, Saccharomyces pastorianus
acctattgccattggtacgggtatt

SEQ ID NO: 67751 - DNA, 25 bp, Saccharomyces pastorianus
aaatggaaccttccgctgactttga

SEQ ID NO: 67752 - DNA, 25 bp, Saccharomyces pastorianus
attgcttcactggtcacatttctag

SEQ ID NO: 67753 - DNA, 25 bp, Saccharomyces pastorianus
gatgactcactgttcatttgaatgg

SEQ ID NO: 67754 - DNA, 25 bp, Saccharomyces pastorianus
aattacttatctgcacgacgggctc

SEQ ID NO: 67755 - DNA, 25 bp, Saccharomyces pastorianus
aaaaactggccattcgatgcacctt

SEQ ID NO: 67756 - DNA, 25 bp, Saccharomyces pastorianus
cacttttggtgtcttggcgattatc

SEQ ID NO: 67757 - DNA, 25 bp, Saccharomyces pastorianus
aaattcatttccttttccattgcga

SEQ ID NO: 67758 - DNA, 25 bp, Saccharomyces pastorianus
tactagtcggactcgggctatttgt

SEQ ID NO: 67759 - DNA, 25 bp, Saccharomyces pastorianus
atcattatacatgctggtggcccca

SEQ ID NO: 67760 - DNA, 25 bp, Saccharomyces pastorianus
ggtaaccagttctttttgctactag

SEQ ID NO: 67761 - DNA, 25 bp, Saccharomyces pastorianus
gatctcggcagcttccaatatttta

SEQ ID NO: 67762 - DNA, 25 bp, Saccharomyces pastorianus
tggcagacaccagcttgaacagagt

SEQ ID NO: 67763 - DNA, 25 bp, Saccharomyces pastorianus
gaatccttcaactatctcgtatcaa

SEQ ID NO: 67764 - DNA, 25 bp, Saccharomyces pastorianus
tttaccattacaaacttctgcccaa

SEQ ID NO: 67765 - DNA, 25 bp, Saccharomyces pastorianus
aaatttcctcgagcatagtttcaag

SEQ ID NO: 67766 - DNA, 25 bp, Saccharomyces pastorianus
gactaggtttcttgaggtaccgcaa

SEQ ID NO: 67767 - DNA, 25 bp, Saccharomyces pastorianus
ttgcgatatggattttcagcgctat

SEQ ID NO: 67768 - DNA, 25 bp, Saccharomyces pastorianus
gatcgggtatatttgcggttcccag

SEQ ID NO: 67769 - DNA, 25 bp, Saccharomyces pastorianus
agcatatcctttattgtcctagcgg

SEQ ID NO: 67770 - DNA, 25 bp, Saccharomyces pastorianus
taacgggctccattgtgtttggcaa

SEQ ID NO: 67771 - DNA, 25 bp, Saccharomyces pastorianus
tgcgtttgccggattataccttttc

SEQ ID NO: 67772 - DNA, 25 bp, Saccharomyces pastorianus
tgaccggttacgcattaacgggctc

SEQ ID NO: 67773 - DNA, 25 bp, Saccharomyces pastorianus
cggttcccagcgtgatcttgttgaa

SEQ ID NO: 67774 - DNA, 25 bp, Saccharomyces pastorianus
tagcggttctcattcacggtatctc

SEQ ID NO: 67775 - DNA, 25 bp, Saccharomyces pastorianus
catctaggtgtgttttccacggtta

SEQ ID NO: 67776 - DNA, 25 bp, Saccharomyces pastorianus
aagatcattgttgcgtgagcccaaa

SEQ ID NO: 67777 - DNA, 25 bp, Saccharomyces pastorianus
atccctcaggatcctgttttgttca

SEQ ID NO: 67778 - DNA, 25 bp, Saccharomyces pastorianus
atagtggagacctggagcttttgaa

SEQ ID NO: 67779 - DNA, 25 bp, Saccharomyces pastorianus
acaaggtacttgtcatggatgcagg

SEQ ID NO: 67780 - DNA, 25 bp, Saccharomyces pastorianus
caagtcaatttgatttccgcaggtg

SEQ ID NO: 67781 - DNA, 25 bp, Saccharomyces pastorianus
aattgcacatcgactgagatcagtt

SEQ ID NO: 67782 - DNA, 25 bp, Saccharomyces pastorianus
gatctagttactttacgtcgtgcca

SEQ ID NO: 67783 - DNA, 25 bp, Saccharomyces pastorianus
gaccatccctctaacctgttgaaaa

SEQ ID NO: 67784 - DNA, 25 bp, Saccharomyces pastorianus
tctgacaatttgatccagggcatta

SEQ ID NO: 67785 - DNA, 25 bp, Saccharomyces pastorianus
aggtcaaaacatttctcaaggcgaa

SEQ ID NO: 67786 - DNA, 25 bp, Saccharomyces pastorianus
atgaagctacttcctccgttgatta

SEQ ID NO: 67787 - DNA, 25 bp, Saccharomyces pastorianus
gagtgctgtagattcacacaccgcc

SEQ ID NO: 67788 - DNA, 25 bp, Saccharomyces pastorianus
tgatcttcaggaaagcacttcacaa

SEQ ID NO: 67789 - DNA, 25 bp, Saccharomyces pastorianus
gccttgctcactctttatgttatta

SEQ ID NO: 67790 - DNA, 25 bp, Saccharomyces pastorianus
aacggcgccataagtctagatgttt

SEQ ID NO: 67791 - DNA, 25 bp, Saccharomyces pastorianus
gaaacttccggtttttcgatgaatg

SEQ ID NO: 67792 - DNA, 25 bp, Saccharomyces pastorianus
gaagaaattgctcagatgccttatg

SEQ ID NO: 67793 - DNA, 25 bp, Saccharomyces pastorianus
gtgaacgattccaaaccccatatag

SEQ ID NO: 67794 - DNA, 25 bp, Saccharomyces pastorianus
agtcctggtggatacgatactgggt

SEQ ID NO: 67795 - DNA, 25 bp, Saccharomyces pastorianus
ttggtcacccacaacgtttcattaa

SEQ ID NO: 67796 - DNA, 25 bp, Saccharomyces pastorianus
gttggaaagctttaaccgccttgct

SEQ ID NO: 67797 - DNA, 25 bp, Saccharomyces pastorianus
cacaccgccgtatggatctacgaaa

SEQ ID NO: 67798 - DNA, 25 bp, Saccharomyces pastorianus
tttcgaagatgaaccaaatgcacat

SEQ ID NO: 67799 - DNA, 25 bp, Saccharomyces pastorianus
gatttcgaagatgaaccaaatgcac

SEQ ID NO: 67800 - DNA, 25 bp, Saccharomyces pastorianus
aaacacaaacgctgatcaagatatt

SEQ ID NO: 67801 - DNA, 25 bp, Saccharomyces pastorianus
gaaccaaatgcacatgcaaacacaa

SEQ ID NO: 67802 - DNA, 25 bp, Saccharomyces pastorianus
tgcaaacacaaacgctgatcaagat

SEQ ID NO: 67803 - DNA, 25 bp, Saccharomyces pastorianus
atgcaaacacaaacgctgatcaaga

SEQ ID NO: 67804 - DNA, 25 bp, Saccharomyces pastorianus
gaagatgaaccaaatgcacatgcaa

SEQ ID NO: 67805 - DNA, 25 bp, Saccharomyces pastorianus
gatatttttttcgacatcgattata

SEQ ID NO: 67806 - DNA, 25 bp, Saccharomyces pastorianus
gatgaaccaaatgcacatgcaaaca

SEQ ID NO: 67807 - DNA, 25 bp, Saccharomyces pastorianus
attgatttagcatccgatttcgaag

SEQ ID NO: 67808 - DNA, 25 bp, Saccharomyces pastorianus
acatgcaaacacaaacgctgatcaa

SEQ ID NO: 67809 - DNA, 25 bp, Saccharomyces pastorianus
agatgactttcacatttctccttgc

SEQ ID NO: 67810 - DNA, 25 bp, Saccharomyces pastorianus
gatgccagatgtttgctgcgtttac

SEQ ID NO: 67811 - DNA, 25 bp, Saccharomyces pastorianus
agacctaccagtacatcctatttgt

SEQ ID NO: 67812 - DNA, 25 bp, Saccharomyces pastorianus
aatcccgagtctttgtctaatttga

SEQ ID NO: 67813 - DNA, 25 bp, Saccharomyces pastorianus
tattcttaggcttactcgtctcaac

SEQ ID NO: 67814 - DNA, 25 bp, Saccharomyces pastorianus
gccgttttcgcattcttttggagac

SEQ ID NO: 67815 - DNA, 25 bp, Saccharomyces pastorianus
aactttcgcctatgttgggatggac

SEQ ID NO: 67816 - DNA, 25 bp, Saccharomyces pastorianus
tcccctggtggtatgtttgtttgca

SEQ ID NO: 67817 - DNA, 25 bp, Saccharomyces pastorianus
tatgcattgcattcctactccaaaa

SEQ ID NO: 67818 - DNA, 25 bp, Saccharomyces pastorianus
gttgatatcctttggctacggtata

SEQ ID NO: 67819 - DNA, 25 bp, Saccharomyces pastorianus
tagcgtagcccttcatatctacatg

SEQ ID NO: 67820 - DNA, 25 bp, Saccharomyces pastorianus
ggatcctctttaaccaaatcacaaa

SEQ ID NO: 67821 - DNA, 25 bp, Saccharomyces pastorianus
gccagttatcagttcttaatttagg

SEQ ID NO: 67822 - DNA, 25 bp, Saccharomyces pastorianus
ggatctgtcgcccttaatacggcat

SEQ ID NO: 67823 - DNA, 25 bp, Saccharomyces pastorianus
accacaattttctgcgagtgaaacg

SEQ ID NO: 67824 - DNA, 25 bp, Saccharomyces pastorianus
tgcccattatcttcaggatcctctt

SEQ ID NO: 67825 - DNA, 25 bp, Saccharomyces pastorianus
gagcgtccttaaaattacgttggca

SEQ ID NO: 67826 - DNA, 25 bp, Saccharomyces pastorianus
ttctctataagatccatgacctcct

SEQ ID NO: 67827 - DNA, 25 bp, Saccharomyces pastorianus
acatctagaatatactgccagttat

SEQ ID NO: 67828 - DNA, 25 bp, Saccharomyces pastorianus
ttacgttggcatcctgttgttccag

SEQ ID NO: 67829 - DNA, 25 bp, Saccharomyces pastorianus
atacggcatttctcatttctgtcat

SEQ ID NO: 67830 - DNA, 25 bp, Saccharomyces pastorianus
gaaacgatcaaagagagcgtcctta

SEQ ID NO: 67831 - DNA, 25 bp, Saccharomyces pastorianus
ggactgacctacttccataagtttt

SEQ ID NO: 67832 - DNA, 25 bp, Saccharomyces pastorianus
agatttttgtttcccataaaggcat

SEQ ID NO: 67833 - DNA, 25 bp, Saccharomyces pastorianus
gcatgggcactgattgcactgcttt

SEQ ID NO: 67834 - DNA, 25 bp, Saccharomyces pastorianus
ttgcgttggaagcactacacactgt

SEQ ID NO: 67835 - DNA, 25 bp, Saccharomyces pastorianus
acagattcttccgttcttggactga

SEQ ID NO: 67836 - DNA, 25 bp, Saccharomyces pastorianus
cactgctttttgctgaatacccgaa

SEQ ID NO: 67837 - DNA, 25 bp, Saccharomyces pastorianus
attcctgtgcaatcgaatacccaag

SEQ ID NO: 67838 - DNA, 25 bp, Saccharomyces pastorianus
ggtatttgcttcacctatgcaggta

SEQ ID NO: 67839 - DNA, 25 bp, Saccharomyces pastorianus
gaagactctctagtcgtccaaacag

SEQ ID NO: 67840 - DNA, 25 bp, Saccharomyces pastorianus
aaggttgtgatttcctggtgagcaa

SEQ ID NO: 67841 - DNA, 25 bp, Saccharomyces pastorianus
atacccatacgtggagtgcacagat

SEQ ID NO: 67842 - DNA, 25 bp, Saccharomyces pastorianus
caacggtgtgcaaacttgggactgt

SEQ ID NO: 67843 - DNA, 25 bp, Saccharomyces pastorianus
gcattgtttcatggcccacagggca

SEQ ID NO: 67844 - DNA, 25 bp, Saccharomyces pastorianus
ttatacggtttctgactgtactgca

SEQ ID NO: 67845 - DNA, 25 bp, Saccharomyces pastorianus
tttgtgcccttgttaccttaattga

SEQ ID NO: 67846 - DNA, 25 bp, Saccharomyces pastorianus
aattcttgtgtcgttctcagtttga

SEQ ID NO: 67847 - DNA, 25 bp, Saccharomyces pastorianus
ttttttactgctggtctggcagaaa

SEQ ID NO: 67848 - DNA, 25 bp, Saccharomyces pastorianus
gatggtgtagattcaaaagccttca

SEQ ID NO: 67849 - DNA, 25 bp, Saccharomyces pastorianus
gtttgacactgaatgcgttcctggt

SEQ ID NO: 67850 - DNA, 25 bp, Saccharomyces pastorianus
gcgttcctggtagttttagagacaa

SEQ ID NO: 67851 - DNA, 25 bp, Saccharomyces pastorianus
ttgggactgtgcatttgccattcaa

SEQ ID NO: 67852 - DNA, 25 bp, Saccharomyces pastorianus
tagcacctgttaatcaagcattttg

SEQ ID NO: 67853 - DNA, 25 bp, Saccharomyces pastorianus
taccttcacgtatattttggacttt

SEQ ID NO: 67854 - DNA, 25 bp, Saccharomyces pastorianus
gcttcttggtttcaagcctttcaaa

SEQ ID NO: 67855 - DNA, 25 bp, Saccharomyces pastorianus
agcccaaaccgcaagaccagtgaag

SEQ ID NO: 67856 - DNA, 25 bp, Saccharomyces pastorianus
gagaagaatgttaacccggtcactg

SEQ ID NO: 67857 - DNA, 25 bp, Saccharomyces pastorianus
gctattatgtgcttttggcttcttg

SEQ ID NO: 67858 - DNA, 25 bp, Saccharomyces pastorianus
tgccaagttttggaaccctatatag

SEQ ID NO: 67859 - DNA, 25 bp, Saccharomyces pastorianus
gatagacacacgttacagcagttgg

SEQ ID NO: 67860 - DNA, 25 bp, Saccharomyces pastorianus
ataggcccgtccacaataagattga

SEQ ID NO: 67861 - DNA, 25 bp, Saccharomyces pastorianus
ttacctcaagagcatgcgacgctgg

SEQ ID NO: 67862 - DNA, 25 bp, Saccharomyces pastorianus
aactgaccttgattgccggtatagc

SEQ ID NO: 67863 - DNA, 25 bp, Saccharomyces pastorianus
aaaatttccaaatcatcaagccggg

SEQ ID NO: 67864 - DNA, 25 bp, Saccharomyces pastorianus
gaaccatctggcgaagacggcaatc

SEQ ID NO: 67865 - DNA, 25 bp, Saccharomyces pastorianus
aagcttttcatcaacgccttatagt

SEQ ID NO: 67866 - DNA, 25 bp, Saccharomyces pastorianus
gaatatcctcggttgggtgagcact

SEQ ID NO: 67867 - DNA, 25 bp, Saccharomyces pastorianus
gtgaacccagagtgatgtccaagaa

SEQ ID NO: 67868 - DNA, 25 bp, Saccharomyces pastorianus
gaggtcattttctccaggtaacatt

SEQ ID NO: 67869 - DNA, 25 bp, Saccharomyces pastorianus
gagtattgccttccacagctttaaa

SEQ ID NO: 67870 - DNA, 25 bp, Saccharomyces pastorianus
agggacatcctttcgcagggcaaaa

SEQ ID NO: 67871 - DNA, 25 bp, Saccharomyces pastorianus
ttcgaatggtcatacctcttcaggt

SEQ ID NO: 67872 - DNA, 25 bp, Saccharomyces pastorianus
aagattctggtgtgaaccccgatga

SEQ ID NO: 67873 - DNA, 25 bp, Saccharomyces pastorianus
atagcactgatatcgcaaacaccat

SEQ ID NO: 67874 - DNA, 25 bp, Saccharomyces pastorianus
gcggatcatagttgtgccttgtcga

SEQ ID NO: 67875 - DNA, 25 bp, Saccharomyces pastorianus
tggagctcgtggtggtagttcattc

SEQ ID NO: 67876 - DNA, 25 bp, Saccharomyces pastorianus
tagctcattcagaggcggttcccgt

SEQ ID NO: 67877 - DNA, 25 bp, Saccharomyces pastorianus
gggtgatattgtttgtcgttccatc

SEQ ID NO: 67878 - DNA, 25 bp, Saccharomyces pastorianus
gtgtccaggctaccagcttcaaaga

SEQ ID NO: 67879 - DNA, 25 bp, Saccharomyces pastorianus
gggtgctttcgtacatccatgtgag

SEQ ID NO: 67880 - DNA, 25 bp, Saccharomyces pastorianus
gacaaattctacattgctgctgata

SEQ ID NO: 67881 - DNA, 25 bp, Saccharomyces pastorianus
agttcattcagaggcggatctcgcg

SEQ ID NO: 67882 - DNA, 25 bp, Saccharomyces pastorianus
gaaagattcttaccaaagccaaagg

SEQ ID NO: 67883 - DNA, 25 bp, Saccharomyces pastorianus
aagccaaaggtagcaggcccaccaa

SEQ ID NO: 67884 - DNA, 25 bp, Saccharomyces pastorianus
ggatctcgcggtggtagctcattca

SEQ ID NO: 67885 - DNA, 25 bp, Saccharomyces pastorianus
gttccatcaacaccaaggttccata

SEQ ID NO: 67886 - DNA, 25 bp, Saccharomyces pastorianus
gttggcgtattgcatctaaacaaat

SEQ ID NO: 67887 - DNA, 25 bp, Saccharomyces pastorianus
cttcccgaggaagttggcgtattgc

SEQ ID NO: 67888 - DNA, 25 bp, Saccharomyces pastorianus
accggagatgccttcccgaggaagt

SEQ ID NO: 67889 - DNA, 25 bp, Saccharomyces pastorianus
ggaagttggcgtattgcatctaaac

SEQ ID NO: 67890 - DNA, 25 bp, Saccharomyces pastorianus
gaagaagtagttcccttcgaaacat

SEQ ID NO: 67891 - DNA, 25 bp, Saccharomyces pastorianus
gtagttcccttcgaaacatttattg

SEQ ID NO: 67892 - DNA, 25 bp, Saccharomyces pastorianus
tttattgcaccggagatgccttccc

SEQ ID NO: 67893 - DNA, 25 bp, Saccharomyces pastorianus
gcatctaaacaaatagagctgctgt

SEQ ID NO: 67894 - DNA, 25 bp, Saccharomyces pastorianus
tgctcgaggagatcatgcttgggaa

SEQ ID NO: 67895 - DNA, 25 bp, Saccharomyces pastorianus
tcgaaacatttattgcaccggagat

SEQ ID NO: 67896 - DNA, 25 bp, Saccharomyces pastorianus
agagctgctgttgttgctcgatgta

SEQ ID NO: 67897 - DNA, 25 bp, Saccharomyces pastorianus
gaaaaaagtccaggtccgccagagc

SEQ ID NO: 67898 - DNA, 25 bp, Saccharomyces pastorianus
gggacaattacaccaatgacacgag

SEQ ID NO: 67899 - DNA, 25 bp, Saccharomyces pastorianus
gacagctgacgatgaccgtgaacat

SEQ ID NO: 67900 - DNA, 25 bp, Saccharomyces pastorianus
gctatggagctttgtcagcgacgtc

SEQ ID NO: 67901 - DNA, 25 bp, Saccharomyces pastorianus
gcacccaggaagtagctcagcagat

SEQ ID NO: 67902 - DNA, 25 bp, Saccharomyces pastorianus
tcagcgacgtcaaggcaggtttgtt

SEQ ID NO: 67903 - DNA, 25 bp, Saccharomyces pastorianus
cgattccacagtacgacatcacatt

SEQ ID NO: 67904 - DNA, 25 bp, Saccharomyces pastorianus
aagaagcttcctcacaaggctctgt

SEQ ID NO: 67905 - DNA, 25 bp, Saccharomyces pastorianus
agatctttctaaacagtctctctgg

SEQ ID NO: 67906 - DNA, 25 bp, Saccharomyces pastorianus
taaaccattggctttattcaaccag

SEQ ID NO: 67907 - DNA, 25 bp, Saccharomyces pastorianus
aaggctctgtctccagatcgctatg

SEQ ID NO: 67908 - DNA, 25 bp, Saccharomyces pastorianus
gaaagatcgaggtcacccttcaaaa

SEQ ID NO: 67909 - DNA, 25 bp, Saccharomyces pastorianus
taacataccctctgatactgaacat

SEQ ID NO: 67910 - DNA, 25 bp, Saccharomyces pastorianus
caaagcgtcgtcatcttgatttttt

SEQ ID NO: 67911 - DNA, 25 bp, Saccharomyces pastorianus
tacgccgctggctaatagcagtaat

SEQ ID NO: 67912 - DNA, 25 bp, Saccharomyces pastorianus
gattttggttatccatctctcgaga

SEQ ID NO: 67913 - DNA, 25 bp, Saccharomyces pastorianus
acgggtacgttaatcagcggccatt

SEQ ID NO: 67914 - DNA, 25 bp, Saccharomyces pastorianus
aagtcggtttttcacgttgcataca

SEQ ID NO: 67915 - DNA, 25 bp, Saccharomyces pastorianus
gaatcatggctctgacaagaacttg

SEQ ID NO: 67916 - DNA, 25 bp, Saccharomyces pastorianus
aagatccaattctaatacgccgctg

SEQ ID NO: 67917 - DNA, 25 bp, Saccharomyces pastorianus
gagattttactatgacttgaccaag

SEQ ID NO: 67918 - DNA, 25 bp, Saccharomyces pastorianus
agcggccattacacgtcattggtga

SEQ ID NO: 67919 - DNA, 25 bp, Saccharomyces pastorianus
gaatatagcctgaacgtggcccaag

SEQ ID NO: 67920 - DNA, 25 bp, Saccharomyces pastorianus
ttgttcccttcaaagacatccactg

SEQ ID NO: 67921 - DNA, 25 bp, Saccharomyces pastorianus
aagtagggttatgctacctgccctc

SEQ ID NO: 67922 - DNA, 25 bp, Saccharomyces pastorianus
agtagtggattctgtgcctatggct

SEQ ID NO: 67923 - DNA, 25 bp, Saccharomyces pastorianus
ggccttttccactacacttattgtt

SEQ ID NO: 67924 - DNA, 25 bp, Saccharomyces pastorianus
tgccctctggagtttgtactctaat

SEQ ID NO: 67925 - DNA, 25 bp, Saccharomyces pastorianus
ggtttgcatcgctcttttctaattg

SEQ ID NO: 67926 - DNA, 25 bp, Saccharomyces pastorianus
ttagcagccgtcttgtgcatgagtg

SEQ ID NO: 67927 - DNA, 25 bp, Saccharomyces pastorianus
agattacaacctgcgtttgtcacct

SEQ ID NO: 67928 - DNA, 25 bp, Saccharomyces pastorianus
taatcagtattgtcaccgccggtag

SEQ ID NO: 67929 - DNA, 25 bp, Saccharomyces pastorianus
tccgctgttttcatcgctgcattga

SEQ ID NO: 67930 - DNA, 25 bp, Saccharomyces pastorianus
catccaacctcttgttttttacaga

SEQ ID NO: 67931 - DNA, 25 bp, Saccharomyces pastorianus
gtagtttctttactttcatccttca

SEQ ID NO: 67932 - DNA, 25 bp, Saccharomyces pastorianus
tatttcctgcaataatccaccacgt

SEQ ID NO: 67933 - DNA, 25 bp, Saccharomyces pastorianus
acttcatctcgcaaagactttattt

SEQ ID NO: 67934 - DNA, 25 bp, Saccharomyces pastorianus
atccaccacgtgtgaaagattcctt

SEQ ID NO: 67935 - DNA, 25 bp, Saccharomyces pastorianus
actttcatccttcaattgcaaccta

SEQ ID NO: 67936 - DNA, 25 bp, Saccharomyces pastorianus
ggattttcatccaacctcttgtttt

SEQ ID NO: 67937 - DNA, 25 bp, Saccharomyces pastorianus
gcgagcttcgccactaatggatttt

SEQ ID NO: 67938 - DNA, 25 bp, Saccharomyces pastorianus
gaaagattccttagcgagcttcgcc

SEQ ID NO: 67939 - DNA, 25 bp, Saccharomyces pastorianus
gatgactccaatgatgtagtttctt

SEQ ID NO: 67940 - DNA, 25 bp, Saccharomyces pastorianus
aattgcaacctacttacttcatctc

SEQ ID NO: 67941 - DNA, 25 bp, Saccharomyces pastorianus
acaagagctttgtctctggctacaa

SEQ ID NO: 67942 - DNA, 25 bp, Saccharomyces pastorianus
agcaagctccgccaatattgacata

SEQ ID NO: 67943 - DNA, 25 bp, Saccharomyces pastorianus
ggttgcaaaccaatcaagctttcaa

SEQ ID NO: 67944 - DNA, 25 bp, Saccharomyces pastorianus
catagctacctattgttggaacatc

SEQ ID NO: 67945 - DNA, 25 bp, Saccharomyces pastorianus
ggaacatcggtgtcaactgtataat

SEQ ID NO: 67946 - DNA, 25 bp, Saccharomyces pastorianus
gatccagatggcattcttcagacag

SEQ ID NO: 67947 - DNA, 25 bp, Saccharomyces pastorianus
gtgatagccacgtagatgcattatt

SEQ ID NO: 67948 - DNA, 25 bp, Saccharomyces pastorianus
aaggaattgcttggtgtaaacactc

SEQ ID NO: 67949 - DNA, 25 bp, Saccharomyces pastorianus
gtaattgaaactgtcctaggtagga

SEQ ID NO: 67950 - DNA, 25 bp, Saccharomyces pastorianus
atgcattattggttgatatctcgtc

SEQ ID NO: 67951 - DNA, 25 bp, Saccharomyces pastorianus
aacagagttttaccgtgatagccac

SEQ ID NO: 67952 - DNA, 25 bp, Saccharomyces pastorianus
gagagtcacaaggttttgcgtattt

SEQ ID NO: 67953 - DNA, 25 bp, Saccharomyces pastorianus
ccgcatctttcctggcataatgaat

SEQ ID NO: 67954 - DNA, 25 bp, Saccharomyces pastorianus
aagtaccatgaagccgtacgacaag

SEQ ID NO: 67955 - DNA, 25 bp, Saccharomyces pastorianus
cgattctggcagtcgacaatttgaa

SEQ ID NO: 67956 - DNA, 25 bp, Saccharomyces pastorianus
agatcatactttctataggcctaaa

SEQ ID NO: 67957 - DNA, 25 bp, Saccharomyces pastorianus
tccgaatatggagtacctgtcgata

SEQ ID NO: 67958 - DNA, 25 bp, Saccharomyces pastorianus
agatcaacgatcaacgattctggca

SEQ ID NO: 67959 - DNA, 25 bp, Saccharomyces pastorianus
agtacctgtcgatataacactcagt

SEQ ID NO: 67960 - DNA, 25 bp, Saccharomyces pastorianus
gggtatacgactcaaggtcgcagat

SEQ ID NO: 67961 - DNA, 25 bp, Saccharomyces pastorianus
gatatcttaacagtattttccgaat

SEQ ID NO: 67962 - DNA, 25 bp, Saccharomyces pastorianus
ggtagggcccttaagatagatcata

SEQ ID NO: 67963 - DNA, 25 bp, Saccharomyces pastorianus
gctgttccaaccaccattgttacta

SEQ ID NO: 67964 - DNA, 25 bp, Saccharomyces pastorianus
aagtgcaacatctcaagccgtcgct

SEQ ID NO: 67965 - DNA, 25 bp, Saccharomyces pastorianus
tggtgtgtctccagtcgttacatca

SEQ ID NO: 67966 - DNA, 25 bp, Saccharomyces pastorianus
ccatctgtagctaccggttcaaacg

SEQ ID NO: 67967 - DNA, 25 bp, Saccharomyces pastorianus
gaaagcgaaaacactgcttccccat

SEQ ID NO: 67968 - DNA, 25 bp, Saccharomyces pastorianus
actctgttccttctgtttcaagtac

SEQ ID NO: 67969 - DNA, 25 bp, Saccharomyces pastorianus
ggttacatcaccaagtcagttccaa

SEQ ID NO: 67970 - DNA, 25 bp, Saccharomyces pastorianus
cgccggtacaaacgctgctggtgaa

SEQ ID NO: 67971 - DNA, 25 bp, Saccharomyces pastorianus
gaaattacatctacatgctctgcta

SEQ ID NO: 67972 - DNA, 25 bp, Saccharomyces pastorianus
agaactacgaaactgtcgccactgc

SEQ ID NO: 67973 - DNA, 25 bp, Saccharomyces pastorianus
gtacgtatcaaggtgctgcaagcat

SEQ ID NO: 67974 - DNA, 25 bp, Saccharomyces pastorianus
taagcacccgcattctaactttgta

SEQ ID NO: 67975 - DNA, 25 bp, Saccharomyces pastorianus
gacggatgggcaaccttcttggaaa

SEQ ID NO: 67976 - DNA, 25 bp, Saccharomyces pastorianus
ggccggcatacaacagttcctgaaa

SEQ ID NO: 67977 - DNA, 25 bp, Saccharomyces pastorianus
gagtcacactgcaaacttgtgccag

SEQ ID NO: 67978 - DNA, 25 bp, Saccharomyces pastorianus
actacaaacgcgcttggtccaagat

SEQ ID NO: 67979 - DNA, 25 bp, Saccharomyces pastorianus
ggtccctacgtgttccaagatgaag

SEQ ID NO: 67980 - DNA, 25 bp, Saccharomyces pastorianus
taacgtgactttgtgtctaccagaa

SEQ ID NO: 67981 - DNA, 25 bp, Saccharomyces pastorianus
gaccacactcggattgaatacgcca

SEQ ID NO: 67982 - DNA, 25 bp, Saccharomyces pastorianus
gaaacttcacaacatcgcatggccg

SEQ ID NO: 67983 - DNA, 25 bp, Saccharomyces pastorianus
gatgaacaccctagacatgttgtct

SEQ ID NO: 67984 - DNA, 25 bp, Saccharomyces pastorianus
aggctggcccgtttggtactttcat

SEQ ID NO: 67985 - DNA, 25 bp, Saccharomyces pastorianus
attcacctgaggcttggaacccttg

SEQ ID NO: 67986 - DNA, 25 bp, Saccharomyces pastorianus
acctgaggcttggaacccttggcgg

SEQ ID NO: 67987 - DNA, 25 bp, Saccharomyces pastorianus
cacctgaggcttggaacccttggcg

SEQ ID NO: 67988 - DNA, 25 bp, Saccharomyces pastorianus
ggcttggaacccttggcggtggtgg

SEQ ID NO: 67989 - DNA, 25 bp, Saccharomyces pastorianus
tgaggcttggaacccttggcggtgg

SEQ ID NO: 67990 - DNA, 25 bp, Saccharomyces pastorianus
gtggtgatctccacggtgccgtcgt

SEQ ID NO: 67991 - DNA, 25 bp, Saccharomyces pastorianus
cctgaggcttggaacccttggcggt

SEQ ID NO: 67992 - DNA, 25 bp, Saccharomyces pastorianus
tggtgatctccacggtgccgtcgtc

SEQ ID NO: 67993 - DNA, 25 bp, Saccharomyces pastorianus
tgattcacctgaggcttggaaccct

SEQ ID NO: 67994 - DNA, 25 bp, Saccharomyces pastorianus
atgattcacctgaggcttggaaccc

SEQ ID NO: 67995 - DNA, 25 bp, Saccharomyces pastorianus
tcacctgaggcttggaacccttggc

SEQ ID NO: 67996 - DNA, 25 bp, Saccharomyces pastorianus
ccaaagatgcatagttcaactgatt

SEQ ID NO: 67997 - DNA, 25 bp, Saccharomyces pastorianus
ctgattgaacatactatcgaaatga

SEQ ID NO: 67998 - DNA, 25 bp, Saccharomyces pastorianus
aagatgcatagttcaactgattgaa

SEQ ID NO: 67999 - DNA, 25 bp, Saccharomyces pastorianus
gatgcatagttcaactgattgaaca

SEQ ID NO: 68000 - DNA, 25 bp, Saccharomyces pastorianus
ttgaacatactatcgaaatgaagat

SEQ ID NO: 68001 - DNA, 25 bp, Saccharomyces pastorianus
aactgattgaacatactatcgaaat

SEQ ID NO: 68002 - DNA, 25 bp, Saccharomyces pastorianus
aaagatgcatagttcaactgattga

SEQ ID NO: 68003 - DNA, 25 bp, Saccharomyces pastorianus
aaccaaagatgcatagttcaactga

SEQ ID NO: 68004 - DNA, 25 bp, Saccharomyces pastorianus
tcaactgattgaacatactatcgaa

SEQ ID NO: 68005 - DNA, 25 bp, Saccharomyces pastorianus
accaaagatgcatagttcaactgat

SEQ ID NO: 68006 - DNA, 25 bp, Saccharomyces pastorianus
gattgaacatactatcgaaatgaag

SEQ ID NO: 68007 - DNA, 25 bp, Saccharomyces pastorianus
gacttgcacaagacctttatcgatt

SEQ ID NO: 68008 - DNA, 25 bp, Saccharomyces pastorianus
aaatcaaggctattccgagcgggaa

SEQ ID NO: 68009 - DNA, 25 bp, Saccharomyces pastorianus
ttttgacacgttgaggatccccatc

SEQ ID NO: 68010 - DNA, 25 bp, Saccharomyces pastorianus
ggatttgttcgttatggacgctcaa

SEQ ID NO: 68011 - DNA, 25 bp, Saccharomyces pastorianus
aaactgggaattcctcctgactgtg

SEQ ID NO: 68012 - DNA, 25 bp, Saccharomyces pastorianus
caaactttggactacttgcgtgctc

SEQ ID NO: 68013 - DNA, 25 bp, Saccharomyces pastorianus
ggaccctgtgaccatgaaacctata

SEQ ID NO: 68014 - DNA, 25 bp, Saccharomyces pastorianus
ttatccgaacacatgcgccgtgata

SEQ ID NO: 68015 - DNA, 25 bp, Saccharomyces pastorianus
gacgcaggtgctataatccatacgc

SEQ ID NO: 68016 - DNA, 25 bp, Saccharomyces pastorianus
aaatgctgtggtgtgctctttgatc

SEQ ID NO: 68017 - DNA, 25 bp, Saccharomyces pastorianus
cactccactgtttgtagcatgctat

SEQ ID NO: 68018 - DNA, 25 bp, Saccharomyces pastorianus
acctttctgagggttctgaacgtat

SEQ ID NO: 68019 - DNA, 25 bp, Saccharomyces pastorianus
gtgctggcgccatcggtagtaaatg

SEQ ID NO: 68020 - DNA, 25 bp, Saccharomyces pastorianus
ttgcaagcattagagcgccttttat

SEQ ID NO: 68021 - DNA, 25 bp, Saccharomyces pastorianus
ctttgatagaaaccggactcctgcc

SEQ ID NO: 68022 - DNA, 25 bp, Saccharomyces pastorianus
gctattcaaggcttggcccatcaat

SEQ ID NO: 68023 - DNA, 25 bp, Saccharomyces pastorianus
taccgttccgttgttgatatttcca

SEQ ID NO: 68024 - DNA, 25 bp, Saccharomyces pastorianus
gttgatatttccagccgatctatta

SEQ ID NO: 68025 - DNA, 25 bp, Saccharomyces pastorianus
agcgccttttattatctccgacgaa

SEQ ID NO: 68026 - DNA, 25 bp, Saccharomyces pastorianus
actcctgccgatttttgaattggat

SEQ ID NO: 68027 - DNA, 25 bp, Saccharomyces pastorianus
caatgcctcaatccttgcaacgaat

SEQ ID NO: 68028 - DNA, 25 bp, Saccharomyces pastorianus
gatgaaatgtcgtgtgctggcgcca

SEQ ID NO: 68029 - DNA, 25 bp, Saccharomyces pastorianus
ccgggctgcagggaattctaccaat

SEQ ID NO: 68030 - DNA, 25 bp, Saccharomyces pastorianus
tgttcatcaagtggacggtggattg

SEQ ID NO: 68031 - DNA, 25 bp, Saccharomyces pastorianus
tttacagatggaacagcttagacaa

SEQ ID NO: 68032 - DNA, 25 bp, Saccharomyces pastorianus
caagacagtaacaaccctattggtt

SEQ ID NO: 68033 - DNA, 25 bp, Saccharomyces pastorianus
aagcgaaattctggccgggctgcag

SEQ ID NO: 68034 - DNA, 25 bp, Saccharomyces pastorianus
caggtgtttgatattcttttctcat

SEQ ID NO: 68035 - DNA, 25 bp, Saccharomyces pastorianus
ggtcgtggacagtttacaagacagt

SEQ ID NO: 68036 - DNA, 25 bp, Saccharomyces pastorianus
tacctaggttctttggtcgtggaca

SEQ ID NO: 68037 - DNA, 25 bp, Saccharomyces pastorianus
gacttcgggacagccttatacggaa

SEQ ID NO: 68038 - DNA, 25 bp, Saccharomyces pastorianus
cagccttatacggaaacttacctag

SEQ ID NO: 68039 - DNA, 25 bp, Saccharomyces pastorianus
ttttctcattgacttcgggacagcc

SEQ ID NO: 68040 - DNA, 25 bp, Saccharomyces pastorianus
gatcaaaacgttcccgaaggtcgct

SEQ ID NO: 68041 - DNA, 25 bp, Saccharomyces pastorianus
ataagtccaggacgttggccttcgt

SEQ ID NO: 68042 - DNA, 25 bp, Saccharomyces pastorianus
gacgtgttgaagctgttgaccattt

SEQ ID NO: 68043 - DNA, 25 bp, Saccharomyces pastorianus
acgttttgctgcctcagatgtctaa

SEQ ID NO: 68044 - DNA, 25 bp, Saccharomyces pastorianus
aaaattccaactccaatgcgcttaa

SEQ ID NO: 68045 - DNA, 25 bp, Saccharomyces pastorianus
atcttgtctttgaatgctctctcca

SEQ ID NO: 68046 - DNA, 25 bp, Saccharomyces pastorianus
gtactacccgcgagaacagaatatt

SEQ ID NO: 68047 - DNA, 25 bp, Saccharomyces pastorianus
gagtttctcctgagctgcacgtttt

SEQ ID NO: 68048 - DNA, 25 bp, Saccharomyces pastorianus
gttgacgatgactttgcccaggaga

SEQ ID NO: 68049 - DNA, 25 bp, Saccharomyces pastorianus
tcagcgtgtgtgagaccatcttgtc

SEQ ID NO: 68050 - DNA, 25 bp, Saccharomyces pastorianus
tgcatacgtggtcgagctgaactca

SEQ ID NO: 68051 - DNA, 25 bp, Saccharomyces pastorianus
gcagcctccggaatgcttgacgagt

SEQ ID NO: 68052 - DNA, 25 bp, Saccharomyces pastorianus
tgaaagcggtgttcccttcctggga

SEQ ID NO: 68053 - DNA, 25 bp, Saccharomyces pastorianus
ggcaaggacgaaaccggccagcgtt

SEQ ID NO: 68054 - DNA, 25 bp, Saccharomyces pastorianus
ggacgagtcgctattaaaacctgag

SEQ ID NO: 68055 - DNA, 25 bp, Saccharomyces pastorianus
gagttttcccgtcatgtgatgggcc

SEQ ID NO: 68056 - DNA, 25 bp, Saccharomyces pastorianus
agtgttggagccatcgaggccgttc

SEQ ID NO: 68057 - DNA, 25 bp, Saccharomyces pastorianus
cacgtggccttgtttttgtgggcaa

SEQ ID NO: 68058 - DNA, 25 bp, Saccharomyces pastorianus
agaaggtatggtccttgccgccaaa

SEQ ID NO: 68059 - DNA, 25 bp, Saccharomyces pastorianus
attaatcctgcgttggtggacgaga

SEQ ID NO: 68060 - DNA, 25 bp, Saccharomyces pastorianus
tattcgagttgaaaggccaccctta

SEQ ID NO: 68061 - DNA, 25 bp, Saccharomyces pastorianus
gaagtacacgagagacaccgccatc

SEQ ID NO: 68062 - DNA, 25 bp, Saccharomyces pastorianus
agaatgcaggtcaacaagtacgtgt

SEQ ID NO: 68063 - DNA, 25 bp, Saccharomyces pastorianus
aacgatatcgtgtgcaatttctggg

SEQ ID NO: 68064 - DNA, 25 bp, Saccharomyces pastorianus
gatcgtgtgttcactgggcgcgagt

SEQ ID NO: 68065 - DNA, 25 bp, Saccharomyces pastorianus
acagcgtggcagtgcgcagaatgca

SEQ ID NO: 68066 - DNA, 25 bp, Saccharomyces pastorianus
cagagcgtggtgtcgcgtggacaga

SEQ ID NO: 68067 - DNA, 25 bp, Saccharomyces pastorianus
cgagtgtgatgagtgagtttgccca

SEQ ID NO: 68068 - DNA, 25 bp, Saccharomyces pastorianus
gagtcgtggctgtttttgaagatgt

SEQ ID NO: 68069 - DNA, 25 bp, Saccharomyces pastorianus
tgatgagtgagtttgcccagagcgt

SEQ ID NO: 68070 - DNA, 25 bp, Saccharomyces pastorianus
ggcagtgcgcagaatgcaggtcaac

SEQ ID NO: 68071 - DNA, 25 bp, Saccharomyces pastorianus
ttgaagatgtttgcgcaggacagcg

SEQ ID NO: 68072 - DNA, 25 bp, Saccharomyces pastorianus
acagagggtgtttgacgtgaacgat

SEQ ID NO: 68073 - DNA, 25 bp, Saccharomyces pastorianus
actttcaatgcatccaaactctctg

SEQ ID NO: 68074 - DNA, 25 bp, Saccharomyces pastorianus
aaactacacgagcttttcaattgca

SEQ ID NO: 68075 - DNA, 25 bp, Saccharomyces pastorianus
gaggtaccatggttcaaatcggcat

SEQ ID NO: 68076 - DNA, 25 bp, Saccharomyces pastorianus
gtttggtgccagtgacgtcgtcttt

SEQ ID NO: 68077 - DNA, 25 bp, Saccharomyces pastorianus
gagcttgtgttgagcctttatcggt

SEQ ID NO: 68078 - DNA, 25 bp, Saccharomyces pastorianus
attgtctttgagtgttccggagcag

SEQ ID NO: 68079 - DNA, 25 bp, Saccharomyces pastorianus
gagcaggccttgttgggttattaac

SEQ ID NO: 68080 - DNA, 25 bp, Saccharomyces pastorianus
aagctggctggagtccactttggaa

SEQ ID NO: 68081 - DNA, 25 bp, Saccharomyces pastorianus
attttggcgccactcatactttcaa

SEQ ID NO: 68082 - DNA, 25 bp, Saccharomyces pastorianus
gtttggtgattaccgcgacgcagta

SEQ ID NO: 68083 - DNA, 25 bp, Saccharomyces pastorianus
agatgcttgcattgacgctggtctc

SEQ ID NO: 68084 - DNA, 25 bp, Saccharomyces pastorianus
gatgcactacatttcaactgttatt

SEQ ID NO: 68085 - DNA, 25 bp, Saccharomyces pastorianus
tcaaagaagtctatgtggcttttgc

SEQ ID NO: 68086 - DNA, 25 bp, Saccharomyces pastorianus
actgattgcaaatggttctttgatc

SEQ ID NO: 68087 - DNA, 25 bp, Saccharomyces pastorianus
aacttctctagttctctatcttcaa

SEQ ID NO: 68088 - DNA, 25 bp, Saccharomyces pastorianus
gtggcttttgccattgaatgctgaa

SEQ ID NO: 68089 - DNA, 25 bp, Saccharomyces pastorianus
tctagttctctatcttcaaagaagt

SEQ ID NO: 68090 - DNA, 25 bp, Saccharomyces pastorianus
aaaaatgtaagagttgcaccaatga

SEQ ID NO: 68091 - DNA, 25 bp, Saccharomyces pastorianus
aagttggcgctaatggatgggacca

SEQ ID NO: 68092 - DNA, 25 bp, Saccharomyces pastorianus
ttttttgacggaactgattgcaaat

SEQ ID NO: 68093 - DNA, 25 bp, Saccharomyces pastorianus
ggaacacaagatgcactacatttca

SEQ ID NO: 68094 - DNA, 25 bp, Saccharomyces pastorianus
atttcaactgttattagcgagcaag

SEQ ID NO: 68095 - DNA, 25 bp, Saccharomyces pastorianus
gatgcactacatttcaactgttatt

SEQ ID NO: 68096 - DNA, 25 bp, Saccharomyces pastorianus
tcaaagaagtctatgtggcttttgc

SEQ ID NO: 68097 - DNA, 25 bp, Saccharomyces pastorianus
actgattgcaaatggttctttgatc

SEQ ID NO: 68098 - DNA, 25 bp, Saccharomyces pastorianus
aacttctctagttctctatcttcaa

SEQ ID NO: 68099 - DNA, 25 bp, Saccharomyces pastorianus
gtggcttttgccattgaatgctgaa

SEQ ID NO: 68100 - DNA, 25 bp, Saccharomyces pastorianus
tctagttctctatcttcaaagaagt

SEQ ID NO: 68101 - DNA, 25 bp, Saccharomyces pastorianus
aaaaatgtaagagttgcaccaatga

SEQ ID NO: 68102 - DNA, 25 bp, Saccharomyces pastorianus
aagttggcgctaatggatgggacca

SEQ ID NO: 68103 - DNA, 25 bp, Saccharomyces pastorianus
ttttttgacggaactgattgcaaat

SEQ ID NO: 68104 - DNA, 25 bp, Saccharomyces pastorianus
ggaacacaagatgcactacatttca

SEQ ID NO: 68105 - DNA, 25 bp, Saccharomyces pastorianus
atttcaactgttattagcgagcaag

SEQ ID NO: 68106 - DNA, 25 bp, Saccharomyces pastorianus
tttgtctattccgaagcagaaccga

SEQ ID NO: 68107 - DNA, 25 bp, Saccharomyces pastorianus
gaaagtaccctgaacattatgaaga

SEQ ID NO: 68108 - DNA, 25 bp, Saccharomyces pastorianus
aggtgaacactatggaatcagctcc

SEQ ID NO: 68109 - DNA, 25 bp, Saccharomyces pastorianus
tatggcacacggtccttgcggtgaa

SEQ ID NO: 68110 - DNA, 25 bp, Saccharomyces pastorianus
aggaagttcaacacgagggcgctta

SEQ ID NO: 68111 - DNA, 25 bp, Saccharomyces pastorianus
gcccttgtttgggaggtatggcaca

SEQ ID NO: 68112 - DNA, 25 bp, Saccharomyces pastorianus
aatcagccttttcatgctttgtcta

SEQ ID NO: 68113 - DNA, 25 bp, Saccharomyces pastorianus
gatcaattgggattgcccttgtttg

SEQ ID NO: 68114 - DNA, 25 bp, Saccharomyces pastorianus
atgggtgctaccgaagaggaagttc

SEQ ID NO: 68115 - DNA, 25 bp, Saccharomyces pastorianus
acgagggcgcttacaacccagatac

SEQ ID NO: 68116 - DNA, 25 bp, Saccharomyces pastorianus
gaatcagctcctaatgtctcaagtg

SEQ ID NO: 68117 - DNA, 25 bp, Saccharomyces pastorianus
aacaaggcgtttgatggcctcgtcc

SEQ ID NO: 68118 - DNA, 25 bp, Saccharomyces pastorianus
atggctggtgctttgtatttcataa

SEQ ID NO: 68119 - DNA, 25 bp, Saccharomyces pastorianus
atgcttcgcaatatagtcgctagaa

SEQ ID NO: 68120 - DNA, 25 bp, Saccharomyces pastorianus
ggaagcctctctttgcttcaaggaa

SEQ ID NO: 68121 - DNA, 25 bp, Saccharomyces pastorianus
tcgtcccctcaatttggtaaaagct

SEQ ID NO: 68122 - DNA, 25 bp, Saccharomyces pastorianus
tttcataacgcccaacaggaagcct

SEQ ID NO: 68123 - DNA, 25 bp, Saccharomyces pastorianus
agacacaggccgtcgattcaggtgg

SEQ ID NO: 68124 - DNA, 25 bp, Saccharomyces pastorianus
aaaccgctgaggaagaaatttcgag

SEQ ID NO: 68125 - DNA, 25 bp, Saccharomyces pastorianus
ctaagcaagagaagacagcaggttt

SEQ ID NO: 68126 - DNA, 25 bp, Saccharomyces pastorianus
gtcgctagaaatgcgtgcagacaca

SEQ ID NO: 68127 - DNA, 25 bp, Saccharomyces pastorianus
gaagagcaatcacctgacaacggaa

SEQ ID NO: 68128 - DNA, 25 bp, Saccharomyces pastorianus
ctctaccatcgttttcaccatatta

SEQ ID NO: 68129 - DNA, 25 bp, Saccharomyces pastorianus
atattaccgcagacgacctatactt

SEQ ID NO: 68130 - DNA, 25 bp, Saccharomyces pastorianus
agctatcactgtcgctgcagataca

SEQ ID NO: 68131 - DNA, 25 bp, Saccharomyces pastorianus
atgatcagcgcgtggtggacaaaca

SEQ ID NO: 68132 - DNA, 25 bp, Saccharomyces pastorianus
tggtcgctacgtatccagagctaca

SEQ ID NO: 68133 - DNA, 25 bp, Saccharomyces pastorianus
ccgtgaagtccgttctggctatgaa

SEQ ID NO: 68134 - DNA, 25 bp, Saccharomyces pastorianus
aagcattatggctcatcaccgtagc

SEQ ID NO: 68135 - DNA, 25 bp, Saccharomyces pastorianus
tattgacaatcatcttcgctttctc

SEQ ID NO: 68136 - DNA, 25 bp, Saccharomyces pastorianus
gttgggagctactataatcgccgtt

SEQ ID NO: 68137 - DNA, 25 bp, Saccharomyces pastorianus
gccctatacgcttgtgttggtttat

SEQ ID NO: 68138 - DNA, 25 bp, Saccharomyces pastorianus
aacgtgggcagctttcgtattagca

SEQ ID NO: 68139 - DNA, 25 bp, Saccharomyces pastorianus
tgaaagcgggccacctgttgccaaa

SEQ ID NO: 68140 - DNA, 25 bp, Saccharomyces pastorianus
ggacacagtgatcataacctcaggt

SEQ ID NO: 68141 - DNA, 25 bp, Saccharomyces pastorianus
gaaccgctacagttgatcgttttaa

SEQ ID NO: 68142 - DNA, 25 bp, Saccharomyces pastorianus
gatgcaccacagagacacgttcaga

SEQ ID NO: 68143 - DNA, 25 bp, Saccharomyces pastorianus
gttcagagtcatatacagcagcagc

SEQ ID NO: 68144 - DNA, 25 bp, Saccharomyces pastorianus
gatcatgttaagacagctctcccac

SEQ ID NO: 68145 - DNA, 25 bp, Saccharomyces pastorianus
ccaccgcctgaatttgactttagca

SEQ ID NO: 68146 - DNA, 25 bp, Saccharomyces pastorianus
aagtgggcgctatcacgattaacag

SEQ ID NO: 68147 - DNA, 25 bp, Saccharomyces pastorianus
aaatgtttctgatttcacctccagc

SEQ ID NO: 68148 - DNA, 25 bp, Saccharomyces pastorianus
ctgcatctcatgcttcggaggtgga

SEQ ID NO: 68149 - DNA, 25 bp, Saccharomyces pastorianus
tctcaacatgttatggctgcatctc

SEQ ID NO: 68150 - DNA, 25 bp, Saccharomyces pastorianus
acctcatgttttctttagttctcca

SEQ ID NO: 68151 - DNA, 25 bp, Saccharomyces pastorianus
aaaagggtcgcccactcaatgactg

SEQ ID NO: 68152 - DNA, 25 bp, Saccharomyces pastorianus
gaagcatcctccgatttacaactta

SEQ ID NO: 68153 - DNA, 25 bp, Saccharomyces pastorianus
atttggcccactgtcgaccgaagaa

SEQ ID NO: 68154 - DNA, 25 bp, Saccharomyces pastorianus
tgccattcaggcgtcatccaaagtg

SEQ ID NO: 68155 - DNA, 25 bp, Saccharomyces pastorianus
ttatggattctggtcacactgtaca

SEQ ID NO: 68156 - DNA, 25 bp, Saccharomyces pastorianus
tctgggctcccatacatgtgataaa

SEQ ID NO: 68157 - DNA, 25 bp, Saccharomyces pastorianus
gcagctagatatgctacctcatgtt

SEQ ID NO: 68158 - DNA, 25 bp, Saccharomyces pastorianus
gaaagatttatctcccttacttgcc

SEQ ID NO: 68159 - DNA, 25 bp, Saccharomyces pastorianus
atggattatcccagctatttggccc

SEQ ID NO: 68160 - DNA, 25 bp, Saccharomyces pastorianus
ggaaccaatgtactgctaccgatga

SEQ ID NO: 68161 - DNA, 25 bp, Saccharomyces pastorianus
ttattctcttacaccaacggaccga

SEQ ID NO: 68162 - DNA, 25 bp, Saccharomyces pastorianus
ttttcatgcatgacgagaccgctag

SEQ ID NO: 68163 - DNA, 25 bp, Saccharomyces pastorianus
tgtagcgtcacattgtgcgttcacg

SEQ ID NO: 68164 - DNA, 25 bp, Saccharomyces pastorianus
gagaccgctagaaattgttcctctt

SEQ ID NO: 68165 - DNA, 25 bp, Saccharomyces pastorianus
ttgcggccagttcggtaaccaagag

SEQ ID NO: 68166 - DNA, 25 bp, Saccharomyces pastorianus
agatcccgtttacaaattcttgaag

SEQ ID NO: 68167 - DNA, 25 bp, Saccharomyces pastorianus
ttccccatcttgcacaaggtttgtt

SEQ ID NO: 68168 - DNA, 25 bp, Saccharomyces pastorianus
gtgcgttcacgcctcagtataaaga

SEQ ID NO: 68169 - DNA, 25 bp, Saccharomyces pastorianus
agcggcctggagatcatagccttcc

SEQ ID NO: 68170 - DNA, 25 bp, Saccharomyces pastorianus
aatggcccaaagcaagatcccgttt

SEQ ID NO: 68171 - DNA, 25 bp, Saccharomyces pastorianus
cgagatggcaatcagttcccctttg

SEQ ID NO: 68172 - DNA, 25 bp, Saccharomyces pastorianus
tataggcgcccatttaagaagacag

SEQ ID NO: 68173 - DNA, 25 bp, Saccharomyces pastorianus
gatttgtggttcttattcctcggat

SEQ ID NO: 68174 - DNA, 25 bp, Saccharomyces pastorianus
gaacccgagttcaacgtcttcagta

SEQ ID NO: 68175 - DNA, 25 bp, Saccharomyces pastorianus
ttcggcgcagttcagtgtattgtct

SEQ ID NO: 68176 - DNA, 25 bp, Saccharomyces pastorianus
ggttctacccttggcaatttcaatc

SEQ ID NO: 68177 - DNA, 25 bp, Saccharomyces pastorianus
gatgaacaagacaccgccaatgaca

SEQ ID NO: 68178 - DNA, 25 bp, Saccharomyces pastorianus
aaataccaatacatcgctttcggcg

SEQ ID NO: 68179 - DNA, 25 bp, Saccharomyces pastorianus
agtgcttatggtacggtgggcttat

SEQ ID NO: 68180 - DNA, 25 bp, Saccharomyces pastorianus
tcgtccccaaaatcgtttataggcg

SEQ ID NO: 68181 - DNA, 25 bp, Saccharomyces pastorianus
ggactaccatacactttggatcgtg

SEQ ID NO: 68182 - DNA, 25 bp, Saccharomyces pastorianus
atgctgatgatgtacgtctcggttc

SEQ ID NO: 68183 - DNA, 25 bp, Saccharomyces pastorianus
tttctcaaactgatgcgccagacgt

SEQ ID NO: 68184 - DNA, 25 bp, Saccharomyces pastorianus
aaactcttgattttgatggcgacac

SEQ ID NO: 68185 - DNA, 25 bp, Saccharomyces pastorianus
ataggtttctgcgaatctgcaagaa

SEQ ID NO: 68186 - DNA, 25 bp, Saccharomyces pastorianus
gacagaccgtcattagatatacctt

SEQ ID NO: 68187 - DNA, 25 bp, Saccharomyces pastorianus
ttctcgggcgcaaatactctaactg

SEQ ID NO: 68188 - DNA, 25 bp, Saccharomyces pastorianus
tacctcctgccgtgaataaccaaat

SEQ ID NO: 68189 - DNA, 25 bp, Saccharomyces pastorianus
cggcgatcctttaaatatacctcct

SEQ ID NO: 68190 - DNA, 25 bp, Saccharomyces pastorianus
gggcactttcaatcatagtccttat

SEQ ID NO: 68191 - DNA, 25 bp, Saccharomyces pastorianus
gatggcgacactttcgatcataagg

SEQ ID NO: 68192 - DNA, 25 bp, Saccharomyces pastorianus
tggacatcctttttcaggtcacttc

SEQ ID NO: 68193 - DNA, 25 bp, Saccharomyces pastorianus
ggtcacttcaggatctgtatgggac

SEQ ID NO: 68194 - DNA, 25 bp, Saccharomyces pastorianus
ttcagcctcttgcaaggcttgcgaa

SEQ ID NO: 68195 - DNA, 25 bp, Saccharomyces pastorianus
gatgcatctatttccaatcctttca

SEQ ID NO: 68196 - DNA, 25 bp, Saccharomyces pastorianus
gcacaacaccgatagctttgccaaa

SEQ ID NO: 68197 - DNA, 25 bp, Saccharomyces pastorianus
gatctagagctctccaaagatgcat

SEQ ID NO: 68198 - DNA, 25 bp, Saccharomyces pastorianus
cattgccctcttctttgacttataa

SEQ ID NO: 68199 - DNA, 25 bp, Saccharomyces pastorianus
gtaccgagactcatacaattttctg

SEQ ID NO: 68200 - DNA, 25 bp, Saccharomyces pastorianus
gaggacgcactgaagccacagcaaa

SEQ ID NO: 68201 - DNA, 25 bp, Saccharomyces pastorianus
atggtaattgcgacggtgccgaagc

SEQ ID NO: 68202 - DNA, 25 bp, Saccharomyces pastorianus
gaggaagaatcgtttagaccgcaaa

SEQ ID NO: 68203 - DNA, 25 bp, Saccharomyces pastorianus
agagatgaacccactaatccttctt

SEQ ID NO: 68204 - DNA, 25 bp, Saccharomyces pastorianus
agatgctctatggttacgttccaga

SEQ ID NO: 68205 - DNA, 25 bp, Saccharomyces pastorianus
gatgatgctacatctttcagccagc

SEQ ID NO: 68206 - DNA, 25 bp, Saccharomyces pastorianus
ggacacatttatcttacatctatta

SEQ ID NO: 68207 - DNA, 25 bp, Saccharomyces pastorianus
tcccgggcaatcttcataaacctga

SEQ ID NO: 68208 - DNA, 25 bp, Saccharomyces pastorianus
gagatgtttataccaccatatcgaa

SEQ ID NO: 68209 - DNA, 25 bp, Saccharomyces pastorianus
ggaaaaatcccttgtacttagcaat

SEQ ID NO: 68210 - DNA, 25 bp, Saccharomyces pastorianus
aggaccgtagggatgtttacactat

SEQ ID NO: 68211 - DNA, 25 bp, Saccharomyces pastorianus
tgatttccgtcttcccatatacaag

SEQ ID NO: 68212 - DNA, 25 bp, Saccharomyces pastorianus
gaataccgaatgatttccgtcttcc

SEQ ID NO: 68213 - DNA, 25 bp, Saccharomyces pastorianus
tagtgaccacttactacggacgtga

SEQ ID NO: 68214 - DNA, 25 bp, Saccharomyces pastorianus
aatttccctaatctgtactaccact

SEQ ID NO: 68215 - DNA, 25 bp, Saccharomyces pastorianus
aaacgtcacttggttgaacagtcgt

SEQ ID NO: 68216 - DNA, 25 bp, Saccharomyces pastorianus
gcccctggatatggatccggcgcaa

SEQ ID NO: 68217 - DNA, 25 bp, Saccharomyces pastorianus
ggccaagagcttgagttcgaaagac

SEQ ID NO: 68218 - DNA, 25 bp, Saccharomyces pastorianus
agaggattgctggtattttagtatg

SEQ ID NO: 68219 - DNA, 25 bp, Saccharomyces pastorianus
gcgaagaaatacaaccccttctacg

SEQ ID NO: 68220 - DNA, 25 bp, Saccharomyces pastorianus
gaaagacaaaatcaggagggccaca

SEQ ID NO: 68221 - DNA, 25 bp, Saccharomyces pastorianus
gagggccacacaacaaaggcgaaga

SEQ ID NO: 68222 - DNA, 25 bp, Saccharomyces pastorianus
ttctctgagcccctggatatggatc

SEQ ID NO: 68223 - DNA, 25 bp, Saccharomyces pastorianus
ttctacgtaccatcgaaggtagtgc

SEQ ID NO: 68224 - DNA, 25 bp, Saccharomyces pastorianus
ggaaatggtcagtaaagcaggtgtc

SEQ ID NO: 68225 - DNA, 25 bp, Saccharomyces pastorianus
tccggcgcaaggtgaagacgtaatt

SEQ ID NO: 68226 - DNA, 25 bp, Saccharomyces pastorianus
agagtacatcgcattctctgagccc

SEQ ID NO: 68227 - DNA, 25 bp, Saccharomyces pastorianus
gctggtcccgttgattttttctatg

SEQ ID NO: 68228 - DNA, 25 bp, Saccharomyces pastorianus
gtagccatagcaagatcttctccaa

SEQ ID NO: 68229 - DNA, 25 bp, Saccharomyces pastorianus
tttttctatgatcacgttgacgtac

SEQ ID NO: 68230 - DNA, 25 bp, Saccharomyces pastorianus
agttttcaagatttcctgtcgatga

SEQ ID NO: 68231 - DNA, 25 bp, Saccharomyces pastorianus
ggacctgggcgatgacagttttcaa

SEQ ID NO: 68232 - DNA, 25 bp, Saccharomyces pastorianus
agattccaagctgtatggcgagcgg

SEQ ID NO: 68233 - DNA, 25 bp, Saccharomyces pastorianus
atggcaaatgacgtcaacccactgc

SEQ ID NO: 68234 - DNA, 25 bp, Saccharomyces pastorianus
aaaggctccggctagattccaagct

SEQ ID NO: 68235 - DNA, 25 bp, Saccharomyces pastorianus
gagcgtgaactgtttgagcacttaa

SEQ ID NO: 68236 - DNA, 25 bp, Saccharomyces pastorianus
gatgaacgcaaacctagacaaactg

SEQ ID NO: 68237 - DNA, 25 bp, Saccharomyces pastorianus
cccactgctcgccaagatgaacaaa

SEQ ID NO: 68238 - DNA, 25 bp, Saccharomyces pastorianus
gcgtcatgcctatttcaataccagg

SEQ ID NO: 68239 - DNA, 25 bp, Saccharomyces pastorianus
ttcgacgctaagagcgcttcgcatt

SEQ ID NO: 68240 - DNA, 25 bp, Saccharomyces pastorianus
tcgttgcccaacttactaggattga

SEQ ID NO: 68241 - DNA, 25 bp, Saccharomyces pastorianus
aggtttatcttgacccctgagaaga

SEQ ID NO: 68242 - DNA, 25 bp, Saccharomyces pastorianus
tgggcttgcgttttggttcgaacag

SEQ ID NO: 68243 - DNA, 25 bp, Saccharomyces pastorianus
aattcatggataaggccccgttcag

SEQ ID NO: 68244 - DNA, 25 bp, Saccharomyces pastorianus
ttaaggttgacgtatgacccgcaaa

SEQ ID NO: 68245 - DNA, 25 bp, Saccharomyces pastorianus
ggaactttcgcagtggtcgttaaca

SEQ ID NO: 68246 - DNA, 25 bp, Saccharomyces pastorianus
gacaatagagtgtgcttccagacaa

SEQ ID NO: 68247 - DNA, 25 bp, Saccharomyces pastorianus
ttaaatgacggagccaccgacttcg

SEQ ID NO: 68248 - DNA, 25 bp, Saccharomyces pastorianus
aaagggctcgctttggatgaagcaa

SEQ ID NO: 68249 - DNA, 25 bp, Saccharomyces pastorianus
gcgcttgtttctgcagagtcagcta

SEQ ID NO: 68250 - DNA, 25 bp, Saccharomyces pastorianus
gcaaacgctgcgcaagtgggaactc

SEQ ID NO: 68251 - DNA, 25 bp, Saccharomyces pastorianus
atcgactacgacagctggcggcgca

SEQ ID NO: 68252 - DNA, 25 bp, Saccharomyces pastorianus
gagacgaagctcagcgaagccgccg

SEQ ID NO: 68253 - DNA, 25 bp, Saccharomyces pastorianus
tcaggtccccgatcacgacgatgat

SEQ ID NO: 68254 - DNA, 25 bp, Saccharomyces pastorianus
gaagcgatttactcgcacagccgca

SEQ ID NO: 68255 - DNA, 25 bp, Saccharomyces pastorianus
gagaaggcgcgcagcccattgcgta

SEQ ID NO: 68256 - DNA, 25 bp, Saccharomyces pastorianus
acgaaatcgacgacgcggacctgat

SEQ ID NO: 68257 - DNA, 25 bp, Saccharomyces pastorianus
agggcaagttgttccgcaccaggga

SEQ ID NO: 68258 - DNA, 25 bp, Saccharomyces pastorianus
tcagctatcaagacgggatccaccc

SEQ ID NO: 68259 - DNA, 25 bp, Saccharomyces pastorianus
gcaccagggaaatggcgcgcttgtt

SEQ ID NO: 68260 - DNA, 25 bp, Saccharomyces pastorianus
tgtatgctttcttggtttatttcta

SEQ ID NO: 68261 - DNA, 25 bp, Saccharomyces pastorianus
gtatgctttcttggtttatttctac

SEQ ID NO: 68262 - DNA, 25 bp, Saccharomyces pastorianus
atttctacttcacctctaaaagaat

SEQ ID NO: 68263 - DNA, 25 bp, Saccharomyces pastorianus
acttcacctctaaaagaatactgtg

SEQ ID NO: 68264 - DNA, 25 bp, Saccharomyces pastorianus
tatttctacttcacctctaaaagaa

SEQ ID NO: 68265 - DNA, 25 bp, Saccharomyces pastorianus
gtgtatgctttcttggtttatttct

SEQ ID NO: 68266 - DNA, 25 bp, Saccharomyces pastorianus
tctacttcacctctaaaagaatact

SEQ ID NO: 68267 - DNA, 25 bp, Saccharomyces pastorianus
atgtgtatgctttcttggtttattt

SEQ ID NO: 68268 - DNA, 25 bp, Saccharomyces pastorianus
tgtgtatgctttcttggtttatttc

SEQ ID NO: 68269 - DNA, 25 bp, Saccharomyces pastorianus
tacttcacctctaaaagaatactgt

SEQ ID NO: 68270 - DNA, 25 bp, Saccharomyces pastorianus
tatgctttcttggtttatttctact

SEQ ID NO: 68271 - DNA, 25 bp, Saccharomyces pastorianus
atgttggatttgttagacccttcta

SEQ ID NO: 68272 - DNA, 25 bp, Saccharomyces pastorianus
gagtatctattctaccttaatcccc

SEQ ID NO: 68273 - DNA, 25 bp, Saccharomyces pastorianus
tatttgccctcacagcctaatgaaa

SEQ ID NO: 68274 - DNA, 25 bp, Saccharomyces pastorianus
atggctgcagaacaagactcgtact

SEQ ID NO: 68275 - DNA, 25 bp, Saccharomyces pastorianus
tgagctccatttcctaagtcctagt

SEQ ID NO: 68276 - DNA, 25 bp, Saccharomyces pastorianus
gatgctaagcaatatgtccaccgta

SEQ ID NO: 68277 - DNA, 25 bp, Saccharomyces pastorianus
gaacctagccaaatatcgcgtgcga

SEQ ID NO: 68278 - DNA, 25 bp, Saccharomyces pastorianus
gaagaaggtcgccttatttgccctc

SEQ ID NO: 68279 - DNA, 25 bp, Saccharomyces pastorianus
aagtcctagtttcacaccatttacg

SEQ ID NO: 68280 - DNA, 25 bp, Saccharomyces pastorianus
aagtgtttgctaagggcgcctttct

SEQ ID NO: 68281 - DNA, 25 bp, Saccharomyces pastorianus
ctcttgtttccaccggcatgaataa

SEQ ID NO: 68282 - DNA, 25 bp, Saccharomyces pastorianus
tctagaccccgaagcaatccgagag

SEQ ID NO: 68283 - DNA, 25 bp, Saccharomyces pastorianus
agcaatccgagagcttacgcagaaa

SEQ ID NO: 68284 - DNA, 25 bp, Saccharomyces pastorianus
tcagcttgtcgatctcgtggaggcc

SEQ ID NO: 68285 - DNA, 25 bp, Saccharomyces pastorianus
cgatctcgtggaggccggtctagac

SEQ ID NO: 68286 - DNA, 25 bp, Saccharomyces pastorianus
tgtcgatctcgtggaggccggtcta

SEQ ID NO: 68287 - DNA, 25 bp, Saccharomyces pastorianus
gtctagaccccgaagcaatccgaga

SEQ ID NO: 68288 - DNA, 25 bp, Saccharomyces pastorianus
aatccgagagcttacgcagaaatgg

SEQ ID NO: 68289 - DNA, 25 bp, Saccharomyces pastorianus
cttgtcgatctcgtggaggccggtc

SEQ ID NO: 68290 - DNA, 25 bp, Saccharomyces pastorianus
atcagcttgtcgatctcgtggaggc

SEQ ID NO: 68291 - DNA, 25 bp, Saccharomyces pastorianus
tccgagagcttacgcagaaatggag

SEQ ID NO: 68292 - DNA, 25 bp, Saccharomyces pastorianus
gcaatccgagagcttacgcagaaat

SEQ ID NO: 68293 - DNA, 25 bp, Saccharomyces pastorianus
ccaggaagtggaaccgttagtagat

SEQ ID NO: 68294 - DNA, 25 bp, Saccharomyces pastorianus
gaaattcattcagtatttggaacaa

SEQ ID NO: 68295 - DNA, 25 bp, Saccharomyces pastorianus
acaccagcagctgaaggatgctatg

SEQ ID NO: 68296 - DNA, 25 bp, Saccharomyces pastorianus
gaaaactcgaggtcggtttatactg

SEQ ID NO: 68297 - DNA, 25 bp, Saccharomyces pastorianus
cgaggtcggtttatactgaggaaat

SEQ ID NO: 68298 - DNA, 25 bp, Saccharomyces pastorianus
atgctatgagcgaacttggcgcggt

SEQ ID NO: 68299 - DNA, 25 bp, Saccharomyces pastorianus
cgccacggaatttgtccaggaagtg

SEQ ID NO: 68300 - DNA, 25 bp, Saccharomyces pastorianus
gaacttggcgcggttgctcccaagt

SEQ ID NO: 68301 - DNA, 25 bp, Saccharomyces pastorianus
agatttcccggatttacaccagcag

SEQ ID NO: 68302 - DNA, 25 bp, Saccharomyces pastorianus
actgttcttactcatcgtggtctac

SEQ ID NO: 68303 - DNA, 25 bp, Saccharomyces pastorianus
cgtggtctacattatttcctaaata

SEQ ID NO: 68304 - DNA, 25 bp, Saccharomyces pastorianus
gcgatgacttgctatccgtggacaa

SEQ ID NO: 68305 - DNA, 25 bp, Saccharomyces pastorianus
tataaacgactacgatacacaagga

SEQ ID NO: 68306 - DNA, 25 bp, Saccharomyces pastorianus
aagtgctttagctgatatcgaggga

SEQ ID NO: 68307 - DNA, 25 bp, Saccharomyces pastorianus
attttagcatcgttaaccgctcctg

SEQ ID NO: 68308 - DNA, 25 bp, Saccharomyces pastorianus
taaccgctcctgttcagtttgataa

SEQ ID NO: 68309 - DNA, 25 bp, Saccharomyces pastorianus
tcttgggtaaagacggcgatgactt

SEQ ID NO: 68310 - DNA, 25 bp, Saccharomyces pastorianus
attcaattgaagataccgacgccga

SEQ ID NO: 68311 - DNA, 25 bp, Saccharomyces pastorianus
gagtgtcggtttagatgagattcat

SEQ ID NO: 68312 - DNA, 25 bp, Saccharomyces pastorianus
gtgaaaacagtaactctatgtggag

SEQ ID NO: 68313 - DNA, 25 bp, Saccharomyces pastorianus
gataccgacgccgacattttagcat

SEQ ID NO: 68314 - DNA, 25 bp, Saccharomyces pastorianus
acagagtatggtagaagcagcagct

SEQ ID NO: 68315 - DNA, 25 bp, Saccharomyces pastorianus
aagaagcttctgaaactccgaccgg

SEQ ID NO: 68316 - DNA, 25 bp, Saccharomyces pastorianus
tggaagacgattcaccatcccatac

SEQ ID NO: 68317 - DNA, 25 bp, Saccharomyces pastorianus
gctgcggattggtacgaggtcccca

SEQ ID NO: 68318 - DNA, 25 bp, Saccharomyces pastorianus
gtcagcggacatgataccgccatta

SEQ ID NO: 68319 - DNA, 25 bp, Saccharomyces pastorianus
cagcaataatgctacccttaatggg

SEQ ID NO: 68320 - DNA, 25 bp, Saccharomyces pastorianus
cgttgccattaagcgtcagcggaca

SEQ ID NO: 68321 - DNA, 25 bp, Saccharomyces pastorianus
gagctcaaactccagacatcaaaaa

SEQ ID NO: 68322 - DNA, 25 bp, Saccharomyces pastorianus
gaagatgaatatatgctacccacaa

SEQ ID NO: 68323 - DNA, 25 bp, Saccharomyces pastorianus
gagtactaatggacatgctgcggat

SEQ ID NO: 68324 - DNA, 25 bp, Saccharomyces pastorianus
agaaaggcgcccattggctatcttg

SEQ ID NO: 68325 - DNA, 25 bp, Saccharomyces pastorianus
gaggtccccaaagttcctttatctg

SEQ ID NO: 68326 - DNA, 25 bp, Saccharomyces pastorianus
aacatctcccagtaagcaacagcca

SEQ ID NO: 68327 - DNA, 25 bp, Saccharomyces pastorianus
tctgagtgacgtatcggattccgac

SEQ ID NO: 68328 - DNA, 25 bp, Saccharomyces pastorianus
ggaactgaatcctctgattaccaag

SEQ ID NO: 68329 - DNA, 25 bp, Saccharomyces pastorianus
gaatttaaaacagtcaccgcctcct

SEQ ID NO: 68330 - DNA, 25 bp, Saccharomyces pastorianus
aataatacaactgccttttcctctc

SEQ ID NO: 68331 - DNA, 25 bp, Saccharomyces pastorianus
aaaatctactacaacatctcccagt

SEQ ID NO: 68332 - DNA, 25 bp, Saccharomyces pastorianus
cagtgatagtgagacgagttccgat

SEQ ID NO: 68333 - DNA, 25 bp, Saccharomyces pastorianus
ccgcctcctatgctagggacaacaa

SEQ ID NO: 68334 - DNA, 25 bp, Saccharomyces pastorianus
gattttgtcaaactaacagcccaga

SEQ ID NO: 68335 - DNA, 25 bp, Saccharomyces pastorianus
ttttcctctcgcgataacagcaata

SEQ ID NO: 68336 - DNA, 25 bp, Saccharomyces pastorianus
caaggccaaggcgatttagtctaat

SEQ ID NO: 68337 - DNA, 25 bp, Saccharomyces pastorianus
cttccgctcaaccagtagtagtgac

SEQ ID NO: 68338 - DNA, 25 bp, Saccharomyces pastorianus
atgatattcatatccttccgctcaa

SEQ ID NO: 68339 - DNA, 25 bp, Saccharomyces pastorianus
taaactcggacgaaaccgtcgctca

SEQ ID NO: 68340 - DNA, 25 bp, Saccharomyces pastorianus
gctgctgctaaagatcctaaactcg

SEQ ID NO: 68341 - DNA, 25 bp, Saccharomyces pastorianus
aaagctcaaacttcctgtgcgctga

SEQ ID NO: 68342 - DNA, 25 bp, Saccharomyces pastorianus
gtcacggcgccaaagccagtatagg

SEQ ID NO: 68343 - DNA, 25 bp, Saccharomyces pastorianus
acaaacgttgtctcgcaaagctcaa

SEQ ID NO: 68344 - DNA, 25 bp, Saccharomyces pastorianus
agatctatcagacttcggtttcgaa

SEQ ID NO: 68345 - DNA, 25 bp, Saccharomyces pastorianus
gtcgctcaaggtgtgcatacgcatg

SEQ ID NO: 68346 - DNA, 25 bp, Saccharomyces pastorianus
gtgacaagcagctgcaatgcgacga

SEQ ID NO: 68347 - DNA, 25 bp, Saccharomyces pastorianus
gtactcgccgtactcataatatcgt

SEQ ID NO: 68348 - DNA, 25 bp, Saccharomyces pastorianus
gcagccgatttccagcattagcaaa

SEQ ID NO: 68349 - DNA, 25 bp, Saccharomyces pastorianus
gaatcaccaactgcagccaggatga

SEQ ID NO: 68350 - DNA, 25 bp, Saccharomyces pastorianus
aactacaacatttcggctctagctc

SEQ ID NO: 68351 - DNA, 25 bp, Saccharomyces pastorianus
aaaaatcaacacaccgcagccgatt

SEQ ID NO: 68352 - DNA, 25 bp, Saccharomyces pastorianus
aagcggatgattcctcgccatgcaa

SEQ ID NO: 68353 - DNA, 25 bp, Saccharomyces pastorianus
ttgtcaccaccgaattcacacatca

SEQ ID NO: 68354 - DNA, 25 bp, Saccharomyces pastorianus
tgctggtgatctcgacggttcttca

SEQ ID NO: 68355 - DNA, 25 bp, Saccharomyces pastorianus
tgaatgtttcaagccctctcgataa

SEQ ID NO: 68356 - DNA, 25 bp, Saccharomyces pastorianus
aaggtgctaccatcaatcggtcaat

SEQ ID NO: 68357 - DNA, 25 bp, Saccharomyces pastorianus
gtcaatctcgacaacatcaccggtt

SEQ ID NO: 68358 - DNA, 25 bp, Saccharomyces pastorianus
acatcatcaacaagtcaccggcaga

SEQ ID NO: 68359 - DNA, 25 bp, Saccharomyces pastorianus
ggacttgggcaagatccctttcaaa

SEQ ID NO: 68360 - DNA, 25 bp, Saccharomyces pastorianus
actgcgggcattttttctgtgggtc

SEQ ID NO: 68361 - DNA, 25 bp, Saccharomyces pastorianus
gagaattacaagtcacctgtggtca

SEQ ID NO: 68362 - DNA, 25 bp, Saccharomyces pastorianus
aaaggcccggctagctaaacagatt

SEQ ID NO: 68363 - DNA, 25 bp, Saccharomyces pastorianus
ttcggccctcaggtccggatgagaa

SEQ ID NO: 68364 - DNA, 25 bp, Saccharomyces pastorianus
ggtaagtacactctgacggtcaacg

SEQ ID NO: 68365 - DNA, 25 bp, Saccharomyces pastorianus
ggacttccagcctgatgtttgtaaa

SEQ ID NO: 68366 - DNA, 25 bp, Saccharomyces pastorianus
ctgtggtcacaaactgcgggcattt

SEQ ID NO: 68367 - DNA, 25 bp, Saccharomyces pastorianus
atgagaagccggtcgctagcgatca

SEQ ID NO: 68368 - DNA, 25 bp, Saccharomyces pastorianus
gaccacggtgcttatggacttccag

SEQ ID NO: 68369 - DNA, 25 bp, Saccharomyces pastorianus
gatgacttcgttgacagtatcccct

SEQ ID NO: 68370 - DNA, 25 bp, Saccharomyces pastorianus
gtctgccttgagtggactgttcgca

SEQ ID NO: 68371 - DNA, 25 bp, Saccharomyces pastorianus
ctatgttgttttcagttcgagcttg

SEQ ID NO: 68372 - DNA, 25 bp, Saccharomyces pastorianus
gaaagtgaattggacgccgctaaat

SEQ ID NO: 68373 - DNA, 25 bp, Saccharomyces pastorianus
ttcgagcttgaacaaccacggtacg

SEQ ID NO: 68374 - DNA, 25 bp, Saccharomyces pastorianus
ctgttcgcacagttgattcatgagc

SEQ ID NO: 68375 - DNA, 25 bp, Saccharomyces pastorianus
gctaagctagttgccgatatcacaa

SEQ ID NO: 68376 - DNA, 25 bp, Saccharomyces pastorianus
acggtacggcaaatatcaggatctt

SEQ ID NO: 68377 - DNA, 25 bp, Saccharomyces pastorianus
gatgttggttcattcaaatcgacac

SEQ ID NO: 68378 - DNA, 25 bp, Saccharomyces pastorianus
aatcgacactatttgttgctcctgt

SEQ ID NO: 68379 - DNA, 25 bp, Saccharomyces pastorianus
acagcagcgatttatttaggtgact

SEQ ID NO: 68380 - DNA, 25 bp, Saccharomyces pastorianus
aacataccaccccttacttagagtg

SEQ ID NO: 68381 - DNA, 25 bp, Saccharomyces pastorianus
attaggtcgctgtttgtcgctgcat

SEQ ID NO: 68382 - DNA, 25 bp, Saccharomyces pastorianus
ggtctaatcacagccagtttttcca

SEQ ID NO: 68383 - DNA, 25 bp, Saccharomyces pastorianus
gaagctcctctttaacagggtcaca

SEQ ID NO: 68384 - DNA, 25 bp, Saccharomyces pastorianus
gaagggatcatcataccatagggtc

SEQ ID NO: 68385 - DNA, 25 bp, Saccharomyces pastorianus
gtcgctgcatgctgagttattacct

SEQ ID NO: 68386 - DNA, 25 bp, Saccharomyces pastorianus
aatagaaagatacagccgcgccaac

SEQ ID NO: 68387 - DNA, 25 bp, Saccharomyces pastorianus
gaagccatcgctaccagggacaaga

SEQ ID NO: 68388 - DNA, 25 bp, Saccharomyces pastorianus
gaaggtcctgtctttctggaaggga

SEQ ID NO: 68389 - DNA, 25 bp, Saccharomyces pastorianus
atcagagtgattcctttggcccgaa

SEQ ID NO: 68390 - DNA, 25 bp, Saccharomyces pastorianus
gtgaaggctcgtatactttcttaca

SEQ ID NO: 68391 - DNA, 25 bp, Saccharomyces pastorianus
tattaccgggacaatatcagcccca

SEQ ID NO: 68392 - DNA, 25 bp, Saccharomyces pastorianus
actgaatcaagtaagtgccaccatt

SEQ ID NO: 68393 - DNA, 25 bp, Saccharomyces pastorianus
agtgtataccatcggtttccttgat

SEQ ID NO: 68394 - DNA, 25 bp, Saccharomyces pastorianus
aaagctaacccagatgcggatattt

SEQ ID NO: 68395 - DNA, 25 bp, Saccharomyces pastorianus
taccaaatgacctcctacaactgat

SEQ ID NO: 68396 - DNA, 25 bp, Saccharomyces pastorianus
agaaatgtttctctggacaaccagg

SEQ ID NO: 68397 - DNA, 25 bp, Saccharomyces pastorianus
tagagaacccaaatgtcgctttatt

SEQ ID NO: 68398 - DNA, 25 bp, Saccharomyces pastorianus
attgcggatatagtcgaccctgata

SEQ ID NO: 68399 - DNA, 25 bp, Saccharomyces pastorianus
gaatccacgtactataggcggttat

SEQ ID NO: 68400 - DNA, 25 bp, Saccharomyces pastorianus
gtacgtccatgtagcgacatgttca

SEQ ID NO: 68401 - DNA, 25 bp, Saccharomyces pastorianus
tgcggatatttttattctgggcgaa

SEQ ID NO: 68402 - DNA, 25 bp, Saccharomyces pastorianus
gcattatatattcgtttcatcagca

SEQ ID NO: 68403 - DNA, 25 bp, Saccharomyces pastorianus
gcaacttcttggcagtaccatcgaa

SEQ ID NO: 68404 - DNA, 25 bp, Saccharomyces pastorianus
aagagactcccatgaagctgctggt

SEQ ID NO: 68405 - DNA, 25 bp, Saccharomyces pastorianus
atgccatgctccaaaatccttactt

SEQ ID NO: 68406 - DNA, 25 bp, Saccharomyces pastorianus
gacacttttttactgattctgggta

SEQ ID NO: 68407 - DNA, 25 bp, Saccharomyces pastorianus
atttgtgggcgtgtagtcggtctaa

SEQ ID NO: 68408 - DNA, 25 bp, Saccharomyces pastorianus
gccttcaaaggcttttcgccgagat

SEQ ID NO: 68409 - DNA, 25 bp, Saccharomyces pastorianus
aagctgctggtcgagttcatgccat

SEQ ID NO: 68410 - DNA, 25 bp, Saccharomyces pastorianus
cagaggaccaaacgcttgaagccat

SEQ ID NO: 68411 - DNA, 25 bp, Saccharomyces pastorianus
tgggtatcctttctattcgcaaaac

SEQ ID NO: 68412 - DNA, 25 bp, Saccharomyces pastorianus
attggaggcgcttgatgcagtttta

SEQ ID NO: 68413 - DNA, 25 bp, Saccharomyces pastorianus
acagcagctctgttgtagatctaca

SEQ ID NO: 68414 - DNA, 25 bp, Saccharomyces pastorianus
ggacgtggcaacaatggcggctact

SEQ ID NO: 68415 - DNA, 25 bp, Saccharomyces pastorianus
acgtacaacaatcgcggcggtcgtg

SEQ ID NO: 68416 - DNA, 25 bp, Saccharomyces pastorianus
gaggattcggtagaggtacgtacaa

SEQ ID NO: 68417 - DNA, 25 bp, Saccharomyces pastorianus
gcggtcgtggcggacgtggcaacaa

SEQ ID NO: 68418 - DNA, 25 bp, Saccharomyces pastorianus
ataacggtggtatgaacggagcttc

SEQ ID NO: 68419 - DNA, 25 bp, Saccharomyces pastorianus
gacgcggtaactatagcaataacgg

SEQ ID NO: 68420 - DNA, 25 bp, Saccharomyces pastorianus
cgtggcaacaatggcggctactcca

SEQ ID NO: 68421 - DNA, 25 bp, Saccharomyces pastorianus
aggtacgtacaacaatcgcggcggt

SEQ ID NO: 68422 - DNA, 25 bp, Saccharomyces pastorianus
gtaactatagcaataacggtggtat

SEQ ID NO: 68423 - DNA, 25 bp, Saccharomyces pastorianus
gtacgtacaacaatcgcggcggtcg

SEQ ID NO: 68424 - DNA, 25 bp, Saccharomyces pastorianus
acggtggtatgaacggagcttcaag

SEQ ID NO: 68425 - DNA, 25 bp, Saccharomyces pastorianus
aaataacagatatcgcggaggtgct

SEQ ID NO: 68426 - DNA, 25 bp, Saccharomyces pastorianus
gcttcagatttacaatccaccgata

SEQ ID NO: 68427 - DNA, 25 bp, Saccharomyces pastorianus
gggcacaacagcaacgacttttcaa

SEQ ID NO: 68428 - DNA, 25 bp, Saccharomyces pastorianus
aagattggtactccagcttcagatt

SEQ ID NO: 68429 - DNA, 25 bp, Saccharomyces pastorianus
aactcagagtcgacggcagatgcca

SEQ ID NO: 68430 - DNA, 25 bp, Saccharomyces pastorianus
aagtactcccttaagcaagattggt

SEQ ID NO: 68431 - DNA, 25 bp, Saccharomyces pastorianus
gataaaatccaatcggacgcctcag

SEQ ID NO: 68432 - DNA, 25 bp, Saccharomyces pastorianus
gcggaggtgctaacagcggcaatta

SEQ ID NO: 68433 - DNA, 25 bp, Saccharomyces pastorianus
ggacgcctcaggtggtaatggcata

SEQ ID NO: 68434 - DNA, 25 bp, Saccharomyces pastorianus
aaaacctttgagctattcggaagtg

SEQ ID NO: 68435 - DNA, 25 bp, Saccharomyces pastorianus
gaatcgcggtggtaattcttacaac

SEQ ID NO: 68436 - DNA, 25 bp, Saccharomyces pastorianus
gcactcaccgtgtttggcgacaaca

SEQ ID NO: 68437 - DNA, 25 bp, Saccharomyces pastorianus
gcgacaacacacgtgcgcggcggtt

SEQ ID NO: 68438 - DNA, 25 bp, Saccharomyces pastorianus
aaagcgccggtttgatatatgtctg

SEQ ID NO: 68439 - DNA, 25 bp, Saccharomyces pastorianus
ggctgctgacaaactcactgtgcga

SEQ ID NO: 68440 - DNA, 25 bp, Saccharomyces pastorianus
gaactacacgttgcacaaggccgac

SEQ ID NO: 68441 - DNA, 25 bp, Saccharomyces pastorianus
aaccggctgccgtggaaggcgaaca

SEQ ID NO: 68442 - DNA, 25 bp, Saccharomyces pastorianus
tgagtcgctcgagtttcagcgtgca

SEQ ID NO: 68443 - DNA, 25 bp, Saccharomyces pastorianus
gatctacctctacgaggtgcacgtg

SEQ ID NO: 68444 - DNA, 25 bp, Saccharomyces pastorianus
acactcgggtgcatgaactacacgt

SEQ ID NO: 68445 - DNA, 25 bp, Saccharomyces pastorianus
tgggcgcgtttgtctccttcatgta

SEQ ID NO: 68446 - DNA, 25 bp, Saccharomyces pastorianus
gcatgtgcgacgactttttcggcgt

SEQ ID NO: 68447 - DNA, 25 bp, Saccharomyces pastorianus
agaactgccggactcactgagagag

SEQ ID NO: 68448 - DNA, 25 bp, Saccharomyces pastorianus
acagacgaactaccggaaatcccat

SEQ ID NO: 68449 - DNA, 25 bp, Saccharomyces pastorianus
gatgaggaccagatcgatgacctta

SEQ ID NO: 68450 - DNA, 25 bp, Saccharomyces pastorianus
gatgaacgagtaactgatttcccaa

SEQ ID NO: 68451 - DNA, 25 bp, Saccharomyces pastorianus
aatttcagatcccagaactgccgga

SEQ ID NO: 68452 - DNA, 25 bp, Saccharomyces pastorianus
accttatgggtcagtttgtggagtc

SEQ ID NO: 68453 - DNA, 25 bp, Saccharomyces pastorianus
tcagcccctatacgcacaagaaatt

SEQ ID NO: 68454 - DNA, 25 bp, Saccharomyces pastorianus
gacgcaaacaaagacgatccgctta

SEQ ID NO: 68455 - DNA, 25 bp, Saccharomyces pastorianus
gatccgcttagaatacccacagtgt

SEQ ID NO: 68456 - DNA, 25 bp, Saccharomyces pastorianus
aagccttatttcgtgtagattacca

SEQ ID NO: 68457 - DNA, 25 bp, Saccharomyces pastorianus
gaaatcccatcctataactactatc

SEQ ID NO: 68458 - DNA, 25 bp, Saccharomyces pastorianus
gtgtcaccatcaatgatcacaaatg

SEQ ID NO: 68459 - DNA, 25 bp, Saccharomyces pastorianus
gtctctaaatctatgggctatttgg

SEQ ID NO: 68460 - DNA, 25 bp, Saccharomyces pastorianus
atgggctatttggaatacccttctt

SEQ ID NO: 68461 - DNA, 25 bp, Saccharomyces pastorianus
gctatttggaatacccttctttgac

SEQ ID NO: 68462 - DNA, 25 bp, Saccharomyces pastorianus
gatcacaaatgaccatgtctctaaa

SEQ ID NO: 68463 - DNA, 25 bp, Saccharomyces pastorianus
gaccatgtctctaaatctatgggct

SEQ ID NO: 68464 - DNA, 25 bp, Saccharomyces pastorianus
ggatgtgtcaccatcaatgatcaca

SEQ ID NO: 68465 - DNA, 25 bp, Saccharomyces pastorianus
atctatgggctatttggaataccct

SEQ ID NO: 68466 - DNA, 25 bp, Saccharomyces pastorianus
catgtctctaaatctatgggctatt

SEQ ID NO: 68467 - DNA, 25 bp, Saccharomyces pastorianus
aatgatcacaaatgaccatgtctct

SEQ ID NO: 68468 - DNA, 25 bp, Saccharomyces pastorianus
gggctatttggaatacccttctttg

SEQ ID NO: 68469 - DNA, 25 bp, Saccharomyces pastorianus
atggtgacttttttgtcaaacttat

SEQ ID NO: 68470 - DNA, 25 bp, Saccharomyces pastorianus
gaatcctggtgaagtatcgtttaaa

SEQ ID NO: 68471 - DNA, 25 bp, Saccharomyces pastorianus
aatagaatgcggaacaagagataac

SEQ ID NO: 68472 - DNA, 25 bp, Saccharomyces pastorianus
aaataaggctatgaatcctggtgaa

SEQ ID NO: 68473 - DNA, 25 bp, Saccharomyces pastorianus
attcgataatgtagaggccacactt

SEQ ID NO: 68474 - DNA, 25 bp, Saccharomyces pastorianus
tagaggccacacttaatgaggcaaa

SEQ ID NO: 68475 - DNA, 25 bp, Saccharomyces pastorianus
gagtctaatagacagaatcttattg

SEQ ID NO: 68476 - DNA, 25 bp, Saccharomyces pastorianus
gaagagcaaacaacatgacgacggc

SEQ ID NO: 68477 - DNA, 25 bp, Saccharomyces pastorianus
gtatcgtttaaatctctgaggcaat

SEQ ID NO: 68478 - DNA, 25 bp, Saccharomyces pastorianus
aacgagggtagaactattcgataat

SEQ ID NO: 68479 - DNA, 25 bp, Saccharomyces pastorianus
aaatctctgaggcaatgcaggaaaa

SEQ ID NO: 68480 - DNA, 25 bp, Saccharomyces pastorianus
gcggccatatttatctaaagctaca

SEQ ID NO: 68481 - DNA, 25 bp, Saccharomyces pastorianus
ctgataagtattcgagcggccatat

SEQ ID NO: 68482 - DNA, 25 bp, Saccharomyces pastorianus
gaaataaatgcctcaatgcgctatc

SEQ ID NO: 68483 - DNA, 25 bp, Saccharomyces pastorianus
gtttggtttcatgctgataagtatt

SEQ ID NO: 68484 - DNA, 25 bp, Saccharomyces pastorianus
gactgcttaccgctatgcaaatctg

SEQ ID NO: 68485 - DNA, 25 bp, Saccharomyces pastorianus
gtaccgcacgaagtatacatgactg

SEQ ID NO: 68486 - DNA, 25 bp, Saccharomyces pastorianus
aaaacaatcgatgatgtaccgcacg

SEQ ID NO: 68487 - DNA, 25 bp, Saccharomyces pastorianus
accgctatgcaaatctgaatctatt

SEQ ID NO: 68488 - DNA, 25 bp, Saccharomyces pastorianus
attcgagcggccatatttatctaaa

SEQ ID NO: 68489 - DNA, 25 bp, Saccharomyces pastorianus
aaatgcctcaatgcgctatcctaat

SEQ ID NO: 68490 - DNA, 25 bp, Saccharomyces pastorianus
gtatacatgactgcttaccgctatg

SEQ ID NO: 68491 - DNA, 25 bp, Saccharomyces pastorianus
aagcttctccacctttatcgaataa

SEQ ID NO: 68492 - DNA, 25 bp, Saccharomyces pastorianus
aagtgactcccaaaacgtagcgcat

SEQ ID NO: 68493 - DNA, 25 bp, Saccharomyces pastorianus
atcggctacacaaaccattccaatt

SEQ ID NO: 68494 - DNA, 25 bp, Saccharomyces pastorianus
aagactagcagagatccgccaagaa

SEQ ID NO: 68495 - DNA, 25 bp, Saccharomyces pastorianus
aggcgctatcttgcataatggtaat

SEQ ID NO: 68496 - DNA, 25 bp, Saccharomyces pastorianus
gtagagcatttttcacaagacctta

SEQ ID NO: 68497 - DNA, 25 bp, Saccharomyces pastorianus
ggtacaaattcgaagctctgctaat

SEQ ID NO: 68498 - DNA, 25 bp, Saccharomyces pastorianus
ggaatacagctatctcttttgatct

SEQ ID NO: 68499 - DNA, 25 bp, Saccharomyces pastorianus
aagaaattcctttatgtggcccaat

SEQ ID NO: 68500 - DNA, 25 bp, Saccharomyces pastorianus
gaatgtggctgatttaccgaagaaa

SEQ ID NO: 68501 - DNA, 25 bp, Saccharomyces pastorianus
cattccaattgcaccagaaccatta

SEQ ID NO: 68502 - DNA, 25 bp, Saccharomyces pastorianus
tcccacggttcctttactatagatg

SEQ ID NO: 68503 - DNA, 25 bp, Saccharomyces pastorianus
aaccccatggttaatatgcagcctt

SEQ ID NO: 68504 - DNA, 25 bp, Saccharomyces pastorianus
acaacagtttcatgtgccacagcag

SEQ ID NO: 68505 - DNA, 25 bp, Saccharomyces pastorianus
gacagactagccagcttggtccaaa

SEQ ID NO: 68506 - DNA, 25 bp, Saccharomyces pastorianus
ggacaatacggccatacgacagact

SEQ ID NO: 68507 - DNA, 25 bp, Saccharomyces pastorianus
actgccgcgcaaaaaacctctaaat

SEQ ID NO: 68508 - DNA, 25 bp, Saccharomyces pastorianus
tgctacttccggaatgcatgcgtac

SEQ ID NO: 68509 - DNA, 25 bp, Saccharomyces pastorianus
ttccctccatcgcatagtaacagta

SEQ ID NO: 68510 - DNA, 25 bp, Saccharomyces pastorianus
aagttctagcgcgactcctaatata

SEQ ID NO: 68511 - DNA, 25 bp, Saccharomyces pastorianus
ataatgatcctactgtcggtttccc

SEQ ID NO: 68512 - DNA, 25 bp, Saccharomyces pastorianus
gtataccgcccaataacaacaacgt

SEQ ID NO: 68513 - DNA, 25 bp, Saccharomyces pastorianus
aagctaatcgaaatgtgtcggaaag

SEQ ID NO: 68514 - DNA, 25 bp, Saccharomyces pastorianus
aataacgagattacagcgcagcaat

SEQ ID NO: 68515 - DNA, 25 bp, Saccharomyces pastorianus
cgccggtaattacgataagaccaag

SEQ ID NO: 68516 - DNA, 25 bp, Saccharomyces pastorianus
tacgcagttttcaaccttcaaggtc

SEQ ID NO: 68517 - DNA, 25 bp, Saccharomyces pastorianus
gcagttttcaaccttcaaggtcatt

SEQ ID NO: 68518 - DNA, 25 bp, Saccharomyces pastorianus
gcaaccgcaatcagaacctcaacct

SEQ ID NO: 68519 - DNA, 25 bp, Saccharomyces pastorianus
gaccaagaacaggaactttgcagtc

SEQ ID NO: 68520 - DNA, 25 bp, Saccharomyces pastorianus
aggaactttgcagtcgataatacaa

SEQ ID NO: 68521 - DNA, 25 bp, Saccharomyces pastorianus
gattacagcgcagcaatacgcagtt

SEQ ID NO: 68522 - DNA, 25 bp, Saccharomyces pastorianus
taatgatttacattcaccaccacca

SEQ ID NO: 68523 - DNA, 25 bp, Saccharomyces pastorianus
gcagcaatacgcagttttcaacctt

SEQ ID NO: 68524 - DNA, 25 bp, Saccharomyces pastorianus
gtgggccctagattcgtttggacaa

SEQ ID NO: 68525 - DNA, 25 bp, Saccharomyces pastorianus
gcatccacacgtcacgaacggtaga

SEQ ID NO: 68526 - DNA, 25 bp, Saccharomyces pastorianus
taactacgccaatggatgtcgtcaa

SEQ ID NO: 68527 - DNA, 25 bp, Saccharomyces pastorianus
tataatgttgctcctgtaccagatg

SEQ ID NO: 68528 - DNA, 25 bp, Saccharomyces pastorianus
cgtggcactttcgaactctatttta

SEQ ID NO: 68529 - DNA, 25 bp, Saccharomyces pastorianus
aaagcatattcggtgtcgcatccac

SEQ ID NO: 68530 - DNA, 25 bp, Saccharomyces pastorianus
gctactttggctagagacctaccgt

SEQ ID NO: 68531 - DNA, 25 bp, Saccharomyces pastorianus
gagcctacggacagtttaccaatct

SEQ ID NO: 68532 - DNA, 25 bp, Saccharomyces pastorianus
agacctaccgtttagtgcattacag

SEQ ID NO: 68533 - DNA, 25 bp, Saccharomyces pastorianus
gagggagcactaggcttcttcagcg

SEQ ID NO: 68534 - DNA, 25 bp, Saccharomyces pastorianus
gaggagttgtctatctccaacgaaa

SEQ ID NO: 68535 - DNA, 25 bp, Saccharomyces pastorianus
ggcatattaacgacactatcacaca

SEQ ID NO: 68536 - DNA, 25 bp, Saccharomyces pastorianus
ctatcacacacttaagtgcgggatt

SEQ ID NO: 68537 - DNA, 25 bp, Saccharomyces pastorianus
gcgatgcattcactagatacagtca

SEQ ID NO: 68538 - DNA, 25 bp, Saccharomyces pastorianus
ggctgccatgttaggctcgttccca

SEQ ID NO: 68539 - DNA, 25 bp, Saccharomyces pastorianus
ggaccatgatcgaagattggcatat

SEQ ID NO: 68540 - DNA, 25 bp, Saccharomyces pastorianus
attcggagggcggattaagccccat

SEQ ID NO: 68541 - DNA, 25 bp, Saccharomyces pastorianus
gtgcgggatttctgggtgattttat

SEQ ID NO: 68542 - DNA, 25 bp, Saccharomyces pastorianus
taagccccatatggcattgcgtcat

SEQ ID NO: 68543 - DNA, 25 bp, Saccharomyces pastorianus
attatacggtggatacatggctgcc

SEQ ID NO: 68544 - DNA, 25 bp, Saccharomyces pastorianus
aaactagacaacaaggtgcgccgaa

SEQ ID NO: 68545 - DNA, 25 bp, Saccharomyces pastorianus
gcattgcgtcatttctggtgggatt

SEQ ID NO: 68546 - DNA, 25 bp, Saccharomyces pastorianus
atgacgcctatatttgaactgacca

SEQ ID NO: 68547 - DNA, 25 bp, Saccharomyces pastorianus
aacggatttttggatcgtggctcaa

SEQ ID NO: 68548 - DNA, 25 bp, Saccharomyces pastorianus
attaaggctcggtcttatcgaagaa

SEQ ID NO: 68549 - DNA, 25 bp, Saccharomyces pastorianus
gtgtctatgtggtacaatgcgtcat

SEQ ID NO: 68550 - DNA, 25 bp, Saccharomyces pastorianus
gtgacaacgcttccaactattttat

SEQ ID NO: 68551 - DNA, 25 bp, Saccharomyces pastorianus
ggacgtcgttattgcatctgaacca

SEQ ID NO: 68552 - DNA, 25 bp, Saccharomyces pastorianus
gaggcagtgccattacctatgacgc

SEQ ID NO: 68553 - DNA, 25 bp, Saccharomyces pastorianus
aagaactcacatgcaaaccgccatt

SEQ ID NO: 68554 - DNA, 25 bp, Saccharomyces pastorianus
gctgttggtgacgaggtgctactct

SEQ ID NO: 68555 - DNA, 25 bp, Saccharomyces pastorianus
aggtgctactcttcaacggtgttat

SEQ ID NO: 68556 - DNA, 25 bp, Saccharomyces pastorianus
caaaatgcgggttcttgtttctaag

SEQ ID NO: 68557 - DNA, 25 bp, Saccharomyces pastorianus
atatcgggagatcttcttaggcaat

SEQ ID NO: 68558 - DNA, 25 bp, Saccharomyces pastorianus
gcaccttacctctctgctaggatag

SEQ ID NO: 68559 - DNA, 25 bp, Saccharomyces pastorianus
gaacaattccggtgtctcacaagat

SEQ ID NO: 68560 - DNA, 25 bp, Saccharomyces pastorianus
atttggatctaccactaatcctcca

SEQ ID NO: 68561 - DNA, 25 bp, Saccharomyces pastorianus
tagtgctgtttggaactgctcgttt

SEQ ID NO: 68562 - DNA, 25 bp, Saccharomyces pastorianus
taatcctccatttctgaccaagtac

SEQ ID NO: 68563 - DNA, 25 bp, Saccharomyces pastorianus
gttttcatccaagttatctgcgttt

SEQ ID NO: 68564 - DNA, 25 bp, Saccharomyces pastorianus
tacactagccgagttttcatccaag

SEQ ID NO: 68565 - DNA, 25 bp, Saccharomyces pastorianus
aggatagccctagttctcaggagat

SEQ ID NO: 68566 - DNA, 25 bp, Saccharomyces pastorianus
aagattcggccctagcgaacaaaca

SEQ ID NO: 68567 - DNA, 25 bp, Saccharomyces pastorianus
tgaatacttgattgggcgtgcaccc

SEQ ID NO: 68568 - DNA, 25 bp, Saccharomyces pastorianus
gggtcttgaataatcctggtgaaac

SEQ ID NO: 68569 - DNA, 25 bp, Saccharomyces pastorianus
atggcccatctgctgattttaaaga

SEQ ID NO: 68570 - DNA, 25 bp, Saccharomyces pastorianus
cattaggtcccgtttttgattcaga

SEQ ID NO: 68571 - DNA, 25 bp, Saccharomyces pastorianus
ggtgaactagcgacttacaactgta

SEQ ID NO: 68572 - DNA, 25 bp, Saccharomyces pastorianus
cagagctttggtatcgttatcggta

SEQ ID NO: 68573 - DNA, 25 bp, Saccharomyces pastorianus
ggaaatacactttcttaacctggca

SEQ ID NO: 68574 - DNA, 25 bp, Saccharomyces pastorianus
tccaccacctccagtactaagtaaa

SEQ ID NO: 68575 - DNA, 25 bp, Saccharomyces pastorianus
gaaatatccgggtcaagggtcttga

SEQ ID NO: 68576 - DNA, 25 bp, Saccharomyces pastorianus
gaaacaatttcttctccaacgacaa

SEQ ID NO: 68577 - DNA, 25 bp, Saccharomyces pastorianus
cgtactacatatatggcccatctgc

SEQ ID NO: 68578 - DNA, 25 bp, Saccharomyces pastorianus
ggcaattgcaccctagaaacatcag

SEQ ID NO: 68579 - DNA, 25 bp, Saccharomyces pastorianus
gtttcagtcccgatacgttagattt

SEQ ID NO: 68580 - DNA, 25 bp, Saccharomyces pastorianus
ggacatagacgattcatctttgttt

SEQ ID NO: 68581 - DNA, 25 bp, Saccharomyces pastorianus
tatttctttctcttccattagtcaa

SEQ ID NO: 68582 - DNA, 25 bp, Saccharomyces pastorianus
actatcttagagtccgtttcagtcc

SEQ ID NO: 68583 - DNA, 25 bp, Saccharomyces pastorianus
gtcgaagacacaaacctatccatga

SEQ ID NO: 68584 - DNA, 25 bp, Saccharomyces pastorianus
caacattatcaattcacccttcgag

SEQ ID NO: 68585 - DNA, 25 bp, Saccharomyces pastorianus
atctgatattcttttccaactgcta

SEQ ID NO: 68586 - DNA, 25 bp, Saccharomyces pastorianus
gtcaattctggctagttggagacta

SEQ ID NO: 68587 - DNA, 25 bp, Saccharomyces pastorianus
atacgtcgcataattgggagcttta

SEQ ID NO: 68588 - DNA, 25 bp, Saccharomyces pastorianus
aatcattacgtctgatacgtcgcat

SEQ ID NO: 68589 - DNA, 25 bp, Saccharomyces pastorianus
aacgagttcggtgagttgctgatga

SEQ ID NO: 68590 - DNA, 25 bp, Saccharomyces pastorianus
tggccaccatgatctccgacataga

SEQ ID NO: 68591 - DNA, 25 bp, Saccharomyces pastorianus
gacatagacaccactctagcagatg

SEQ ID NO: 68592 - DNA, 25 bp, Saccharomyces pastorianus
ggatagacaccacgacactttcgat

SEQ ID NO: 68593 - DNA, 25 bp, Saccharomyces pastorianus
atggaactcaaatcaagcaggcctt

SEQ ID NO: 68594 - DNA, 25 bp, Saccharomyces pastorianus
gcttactaccgcataaccatgagag

SEQ ID NO: 68595 - DNA, 25 bp, Saccharomyces pastorianus
ggacactactatataacccgatgaa

SEQ ID NO: 68596 - DNA, 25 bp, Saccharomyces pastorianus
gagaactcacagtcgccttgattat

SEQ ID NO: 68597 - DNA, 25 bp, Saccharomyces pastorianus
tttacttaagtccagcagtgcagtt

SEQ ID NO: 68598 - DNA, 25 bp, Saccharomyces pastorianus
tgaaagttcttcgtgcttactaccg

SEQ ID NO: 68599 - DNA, 25 bp, Saccharomyces pastorianus
gttcacactaacgactacctcaata

SEQ ID NO: 68600 - DNA, 25 bp, Saccharomyces pastorianus
ttatcctgggtgtgtggcttctgca

SEQ ID NO: 68601 - DNA, 25 bp, Saccharomyces pastorianus
tgagggaaataggacgccctttgca

SEQ ID NO: 68602 - DNA, 25 bp, Saccharomyces pastorianus
gacgacagcgaggagttcgtacctt

SEQ ID NO: 68603 - DNA, 25 bp, Saccharomyces pastorianus
gaggttcattcatcggcgaatccac

SEQ ID NO: 68604 - DNA, 25 bp, Saccharomyces pastorianus
gcgaatccaccgatacttcaatttt

SEQ ID NO: 68605 - DNA, 25 bp, Saccharomyces pastorianus
atatcctagcgaaacatatgttctt

SEQ ID NO: 68606 - DNA, 25 bp, Saccharomyces pastorianus
gccctttgcagatccacagatgaga

SEQ ID NO: 68607 - DNA, 25 bp, Saccharomyces pastorianus
agattgctgtctttgatttcactgg

SEQ ID NO: 68608 - DNA, 25 bp, Saccharomyces pastorianus
atctgatgggtgtaacgggtgctta

SEQ ID NO: 68609 - DNA, 25 bp, Saccharomyces pastorianus
aagagtatctggtagccaagcaaag

SEQ ID NO: 68610 - DNA, 25 bp, Saccharomyces pastorianus
gatacttttcagtgtcaaaactcag

SEQ ID NO: 68611 - DNA, 25 bp, Saccharomyces pastorianus
gttcgtaccttttagtgcataccta

SEQ ID NO: 68612 - DNA, 25 bp, Saccharomyces pastorianus
atggcgatagcatggctttcacctt

SEQ ID NO: 68613 - DNA, 25 bp, Saccharomyces pastorianus
ggtctcgtccaaatctgctatagta

SEQ ID NO: 68614 - DNA, 25 bp, Saccharomyces pastorianus
acggcatgacgaacggtgtcaccat

SEQ ID NO: 68615 - DNA, 25 bp, Saccharomyces pastorianus
ggcatcgtacgcaagttgttggtta

SEQ ID NO: 68616 - DNA, 25 bp, Saccharomyces pastorianus
tatccaaccatcaagcttggtctcg

SEQ ID NO: 68617 - DNA, 25 bp, Saccharomyces pastorianus
gctttcacctttgataacgaccact

SEQ ID NO: 68618 - DNA, 25 bp, Saccharomyces pastorianus
ggtgaacttagcactcacggcttaa

SEQ ID NO: 68619 - DNA, 25 bp, Saccharomyces pastorianus
gaccacttgaccctcgaaaatgatc

SEQ ID NO: 68620 - DNA, 25 bp, Saccharomyces pastorianus
ttacgatcatcaactggcaagactt

SEQ ID NO: 68621 - DNA, 25 bp, Saccharomyces pastorianus
gtatcatgtcttgggcatcgtacgc

SEQ ID NO: 68622 - DNA, 25 bp, Saccharomyces pastorianus
tctccgtcagattacttcctggtag

SEQ ID NO: 68623 - DNA, 25 bp, Saccharomyces pastorianus
atctctgcattacttatttcactgg

SEQ ID NO: 68624 - DNA, 25 bp, Saccharomyces pastorianus
tttcactggtgggacaagctttcat

SEQ ID NO: 68625 - DNA, 25 bp, Saccharomyces pastorianus
tccagcattccagcaattttttcca

SEQ ID NO: 68626 - DNA, 25 bp, Saccharomyces pastorianus
tttttccacctacattgatccagag

SEQ ID NO: 68627 - DNA, 25 bp, Saccharomyces pastorianus
gtggcgggaagttattttgctccaa

SEQ ID NO: 68628 - DNA, 25 bp, Saccharomyces pastorianus
agcatttatggtcgcgtctatatta

SEQ ID NO: 68629 - DNA, 25 bp, Saccharomyces pastorianus
atatctttttgacgtccagcattcc

SEQ ID NO: 68630 - DNA, 25 bp, Saccharomyces pastorianus
cacccattgtgttagctgctcttta

SEQ ID NO: 68631 - DNA, 25 bp, Saccharomyces pastorianus
ccgcccacgaactctggtatatttt

SEQ ID NO: 68632 - DNA, 25 bp, Saccharomyces pastorianus
aaactaggacttccaatcgcggttg

SEQ ID NO: 68633 - DNA, 25 bp, Saccharomyces pastorianus
gttgatgcctttaattggagccata

SEQ ID NO: 68634 - DNA, 25 bp, Saccharomyces pastorianus
ggtactacaataggctcgaacagtg

SEQ ID NO: 68635 - DNA, 25 bp, Saccharomyces pastorianus
tgtcccgtattcgaagaacgtcttt

SEQ ID NO: 68636 - DNA, 25 bp, Saccharomyces pastorianus
gcatcactgacgttatgcgtttcat

SEQ ID NO: 68637 - DNA, 25 bp, Saccharomyces pastorianus
gcgtttcatgtgttatacttctaag

SEQ ID NO: 68638 - DNA, 25 bp, Saccharomyces pastorianus
aagcaactgtacatttcgggtccga

SEQ ID NO: 68639 - DNA, 25 bp, Saccharomyces pastorianus
gatttaatccaattactcccgattg

SEQ ID NO: 68640 - DNA, 25 bp, Saccharomyces pastorianus
atatcacccgtacctaatttgtgca

SEQ ID NO: 68641 - DNA, 25 bp, Saccharomyces pastorianus
tatcctttcaggactgcatcactga

SEQ ID NO: 68642 - DNA, 25 bp, Saccharomyces pastorianus
ggaatttctgttatcctttcaggac

SEQ ID NO: 68643 - DNA, 25 bp, Saccharomyces pastorianus
aagctcagacgtcttttctattata

SEQ ID NO: 68644 - DNA, 25 bp, Saccharomyces pastorianus
ataggttgaaaagctgtcccgtatt

SEQ ID NO: 68645 - DNA, 25 bp, Saccharomyces pastorianus
gtatttccctcttacaaacggcaat

SEQ ID NO: 68646 - DNA, 25 bp, Saccharomyces pastorianus
gccatccagatttcacaagaccatt

SEQ ID NO: 68647 - DNA, 25 bp, Saccharomyces pastorianus
taccttcacacgtacctcaaatttt

SEQ ID NO: 68648 - DNA, 25 bp, Saccharomyces pastorianus
acctgttagggttctgcgatgatgt

SEQ ID NO: 68649 - DNA, 25 bp, Saccharomyces pastorianus
agtggctccagtctctgaaatcgta

SEQ ID NO: 68650 - DNA, 25 bp, Saccharomyces pastorianus
gatgtagccagtctagtagccaaga

SEQ ID NO: 68651 - DNA, 25 bp, Saccharomyces pastorianus
aatctagaattaccactgtgtccgt

SEQ ID NO: 68652 - DNA, 25 bp, Saccharomyces pastorianus
ctgtgtccgtactgctaccagaaga

SEQ ID NO: 68653 - DNA, 25 bp, Saccharomyces pastorianus
tgacattctttggtgaagccctgcc

SEQ ID NO: 68654 - DNA, 25 bp, Saccharomyces pastorianus
gtgcaatgccatggttcatttgcca

SEQ ID NO: 68655 - DNA, 25 bp, Saccharomyces pastorianus
acttggaatcgtacgcaggcattga

SEQ ID NO: 68656 - DNA, 25 bp, Saccharomyces pastorianus
gattctgttgacgtttccattaagg

SEQ ID NO: 68657 - DNA, 25 bp, Saccharomyces pastorianus
tcatgacttctgctgctgattcgga

SEQ ID NO: 68658 - DNA, 25 bp, Saccharomyces pastorianus
gatgcttctttcttgtgatattccc

SEQ ID NO: 68659 - DNA, 25 bp, Saccharomyces pastorianus
gatattcccaagtcggtcgttgatc

SEQ ID NO: 68660 - DNA, 25 bp, Saccharomyces pastorianus
gatctgtctactttggtctattcat

SEQ ID NO: 68661 - DNA, 25 bp, Saccharomyces pastorianus
taattttcaagggtatcggcggcaa

SEQ ID NO: 68662 - DNA, 25 bp, Saccharomyces pastorianus
ggctgtctgacgttgctgtaatttt

SEQ ID NO: 68663 - DNA, 25 bp, Saccharomyces pastorianus
ggtcgttgatcacaccaatggttct

SEQ ID NO: 68664 - DNA, 25 bp, Saccharomyces pastorianus
gatcatactcgatcgggctgtctga

SEQ ID NO: 68665 - DNA, 25 bp, Saccharomyces pastorianus
aggattctcctgttgatttgttcat

SEQ ID NO: 68666 - DNA, 25 bp, Saccharomyces pastorianus
agaacgaggctccattcatgacttc

SEQ ID NO: 68667 - DNA, 25 bp, Saccharomyces pastorianus
gaatccccaatattccaccaaatat

SEQ ID NO: 68668 - DNA, 25 bp, Saccharomyces pastorianus
aagattgcagcaacagcaggcccaa

SEQ ID NO: 68669 - DNA, 25 bp, Saccharomyces pastorianus
gaacaacgtagcttattgcaggaag

SEQ ID NO: 68670 - DNA, 25 bp, Saccharomyces pastorianus
aacggcatcccgcaaaatggcaata

SEQ ID NO: 68671 - DNA, 25 bp, Saccharomyces pastorianus
ggaggtctacaagattcatcagcaa

SEQ ID NO: 68672 - DNA, 25 bp, Saccharomyces pastorianus
tcagcagcggaaacgccaacggcat

SEQ ID NO: 68673 - DNA, 25 bp, Saccharomyces pastorianus
aagcccaggcccaagcgaatagtaa

SEQ ID NO: 68674 - DNA, 25 bp, Saccharomyces pastorianus
agcagatgcaggctcctaacacaaa

SEQ ID NO: 68675 - DNA, 25 bp, Saccharomyces pastorianus
tgcgctggcccaacaaaagctattg

SEQ ID NO: 68676 - DNA, 25 bp, Saccharomyces pastorianus
aacacttggcagcaagtcactgcgc

SEQ ID NO: 68677 - DNA, 25 bp, Saccharomyces pastorianus
gatgaaagtggctcccattcctaaa

SEQ ID NO: 68678 - DNA, 25 bp, Saccharomyces pastorianus
tactgcctcacctgaagactaacaa

SEQ ID NO: 68679 - DNA, 25 bp, Saccharomyces pastorianus
gatgatcctgtctttactactgcaa

SEQ ID NO: 68680 - DNA, 25 bp, Saccharomyces pastorianus
tactcccactggactattccatgtt

SEQ ID NO: 68681 - DNA, 25 bp, Saccharomyces pastorianus
taacccgttgcctttcatcaaaact

SEQ ID NO: 68682 - DNA, 25 bp, Saccharomyces pastorianus
aaaggatgtcgataccgaactctta

SEQ ID NO: 68683 - DNA, 25 bp, Saccharomyces pastorianus
gaatcgctcactcctggcgggaatg

SEQ ID NO: 68684 - DNA, 25 bp, Saccharomyces pastorianus
agaggtgagcaattccagctgatca

SEQ ID NO: 68685 - DNA, 25 bp, Saccharomyces pastorianus
ggtcctgcccactattgcaaaatat

SEQ ID NO: 68686 - DNA, 25 bp, Saccharomyces pastorianus
tactctttatacactaacccgttgc

SEQ ID NO: 68687 - DNA, 25 bp, Saccharomyces pastorianus
gatcaaattagtactgcctcacctg

SEQ ID NO: 68688 - DNA, 25 bp, Saccharomyces pastorianus
tattccatgttaggcgaggtcctgc

SEQ ID NO: 68689 - DNA, 25 bp, Saccharomyces pastorianus
gaccgaacatcgtcttgtatggcga

SEQ ID NO: 68690 - DNA, 25 bp, Saccharomyces pastorianus
agatcccggacttcttcaagacgca

SEQ ID NO: 68691 - DNA, 25 bp, Saccharomyces pastorianus
tgtatggcgagaaccacccgtcggg

SEQ ID NO: 68692 - DNA, 25 bp, Saccharomyces pastorianus
gaaggctcaaaaggacccgatcaac

SEQ ID NO: 68693 - DNA, 25 bp, Saccharomyces pastorianus
taagcaggacaatccacgaccgtgg

SEQ ID NO: 68694 - DNA, 25 bp, Saccharomyces pastorianus
aatccggacctcttgatcattatgg

SEQ ID NO: 68695 - DNA, 25 bp, Saccharomyces pastorianus
agattcattcggactgcgaccggtg

SEQ ID NO: 68696 - DNA, 25 bp, Saccharomyces pastorianus
gtcgatggcgtgaaacaactggtta

SEQ ID NO: 68697 - DNA, 25 bp, Saccharomyces pastorianus
gagctgatcacgcagggcctgaacc

SEQ ID NO: 68698 - DNA, 25 bp, Saccharomyces pastorianus
aggaaactactgtctccggagaact

SEQ ID NO: 68699 - DNA, 25 bp, Saccharomyces pastorianus
ggcatcatcgactaccagattcatt

SEQ ID NO: 68700 - DNA, 25 bp, Saccharomyces pastorianus
tctgtttctctttctgaaccggtat

SEQ ID NO: 68701 - DNA, 25 bp, Saccharomyces pastorianus
gaacgcgtatcaatttaggccccaa

SEQ ID NO: 68702 - DNA, 25 bp, Saccharomyces pastorianus
gtagggaccttgtgtgacgatgctc

SEQ ID NO: 68703 - DNA, 25 bp, Saccharomyces pastorianus
gctcgataacggatcagtctgccag

SEQ ID NO: 68704 - DNA, 25 bp, Saccharomyces pastorianus
ggtggccgtccaaaatctaattcct

SEQ ID NO: 68705 - DNA, 25 bp, Saccharomyces pastorianus
cggcttcttattttccttcaaacag

SEQ ID NO: 68706 - DNA, 25 bp, Saccharomyces pastorianus
gacgatgctccgaacttttctggct

SEQ ID NO: 68707 - DNA, 25 bp, Saccharomyces pastorianus
aagaagcacgtcgtgtctctgtttc

SEQ ID NO: 68708 - DNA, 25 bp, Saccharomyces pastorianus
gcactactatgaactctcttactga

SEQ ID NO: 68709 - DNA, 25 bp, Saccharomyces pastorianus
tacagcatctacgttcgccaactta

SEQ ID NO: 68710 - DNA, 25 bp, Saccharomyces pastorianus
atctaattcctccatctttaccaag

SEQ ID NO: 68711 - DNA, 25 bp, Saccharomyces pastorianus
taaacttctggtacgcactatgcac

SEQ ID NO: 68712 - DNA, 25 bp, Saccharomyces pastorianus
gatttccggccgtttatttaatgcg

SEQ ID NO: 68713 - DNA, 25 bp, Saccharomyces pastorianus
tgttgaccgacgagttctggaccaa

SEQ ID NO: 68714 - DNA, 25 bp, Saccharomyces pastorianus
agcataaccgttcccttagacaaag

SEQ ID NO: 68715 - DNA, 25 bp, Saccharomyces pastorianus
agagaggcgtctcttccacaggagc

SEQ ID NO: 68716 - DNA, 25 bp, Saccharomyces pastorianus
agacaggaactagatccgctgccga

SEQ ID NO: 68717 - DNA, 25 bp, Saccharomyces pastorianus
atgggatatgcctgtccaacgatat

SEQ ID NO: 68718 - DNA, 25 bp, Saccharomyces pastorianus
acaccacgcgcctttgaacagagag

SEQ ID NO: 68719 - DNA, 25 bp, Saccharomyces pastorianus
accaatccgagttttccactatgtt

SEQ ID NO: 68720 - DNA, 25 bp, Saccharomyces pastorianus
aagacttgtcgatgggcacggcgat

SEQ ID NO: 68721 - DNA, 25 bp, Saccharomyces pastorianus
gaccactgtaccttcacagggtgat

SEQ ID NO: 68722 - DNA, 25 bp, Saccharomyces pastorianus
actgactgcacgatatcatggcggc

SEQ ID NO: 68723 - DNA, 25 bp, Saccharomyces pastorianus
aaatggcttcttcacggacggagtc

SEQ ID NO: 68724 - DNA, 25 bp, Saccharomyces pastorianus
tcttggttcatattcggtctcttta

SEQ ID NO: 68725 - DNA, 25 bp, Saccharomyces pastorianus
gacagcccatgcgaatacgagtact

SEQ ID NO: 68726 - DNA, 25 bp, Saccharomyces pastorianus
gtgagcaccattctttcgacaaggg

SEQ ID NO: 68727 - DNA, 25 bp, Saccharomyces pastorianus
gaaacggtctccatttttcaaagcg

SEQ ID NO: 68728 - DNA, 25 bp, Saccharomyces pastorianus
ttcggtctctttatagcttgcttac

SEQ ID NO: 68729 - DNA, 25 bp, Saccharomyces pastorianus
gcttgcttactgctttctattacat

SEQ ID NO: 68730 - DNA, 25 bp, Saccharomyces pastorianus
atgggtttgtattcgcaagtcctcg

SEQ ID NO: 68731 - DNA, 25 bp, Saccharomyces pastorianus
tttgcatggcgttttcttggttcat

SEQ ID NO: 68732 - DNA, 25 bp, Saccharomyces pastorianus
gaatcagaagcacctctagccaata

SEQ ID NO: 68733 - DNA, 25 bp, Saccharomyces pastorianus
gatcgatgtttggaatatgccccaa

SEQ ID NO: 68734 - DNA, 25 bp, Saccharomyces pastorianus
cagtgaattcatccccattattagt

SEQ ID NO: 68735 - DNA, 25 bp, Saccharomyces pastorianus
agaacaggcgtttttgtcacgctag

SEQ ID NO: 68736 - DNA, 25 bp, Saccharomyces pastorianus
gataagaacagtgatctccgccttg

SEQ ID NO: 68737 - DNA, 25 bp, Saccharomyces pastorianus
gctaagcattctttcgtcgacaaca

SEQ ID NO: 68738 - DNA, 25 bp, Saccharomyces pastorianus
atgatggtaacactactgccaccac

SEQ ID NO: 68739 - DNA, 25 bp, Saccharomyces pastorianus
ttaaccctcaaaaattcgtcgcaag

SEQ ID NO: 68740 - DNA, 25 bp, Saccharomyces pastorianus
gatctccgccttgacacagtgaatt

SEQ ID NO: 68741 - DNA, 25 bp, Saccharomyces pastorianus
attattagttcattgctcagccgga

SEQ ID NO: 68742 - DNA, 25 bp, Saccharomyces pastorianus
gttggattcttgtggcgtggatata

SEQ ID NO: 68743 - DNA, 25 bp, Saccharomyces pastorianus
gtcacgctagatttcttgctaagca

SEQ ID NO: 68744 - DNA, 25 bp, Saccharomyces pastorianus
atttggacgaccctagcatacgacg

SEQ ID NO: 68745 - DNA, 25 bp, Saccharomyces pastorianus
atgacctcccctgttatatcagaaa

SEQ ID NO: 68746 - DNA, 25 bp, Saccharomyces pastorianus
ctcaaatgcccgcatatagaggtga

SEQ ID NO: 68747 - DNA, 25 bp, Saccharomyces pastorianus
tgtccaacctttctcaaaactcggt

SEQ ID NO: 68748 - DNA, 25 bp, Saccharomyces pastorianus
gacgaccctagcatacgacgtaaca

SEQ ID NO: 68749 - DNA, 25 bp, Saccharomyces pastorianus
gtgcacagatttggacgaccctagc

SEQ ID NO: 68750 - DNA, 25 bp, Saccharomyces pastorianus
aaactcggtcaaaccgtgcacagat

SEQ ID NO: 68751 - DNA, 25 bp, Saccharomyces pastorianus
gtgaaactataaacttgtccaacct

SEQ ID NO: 68752 - DNA, 25 bp, Saccharomyces pastorianus
gaacaagcaagaacgcctgctcaaa

SEQ ID NO: 68753 - DNA, 25 bp, Saccharomyces pastorianus
gcctgctcaaatgcccgcatataga

SEQ ID NO: 68754 - DNA, 25 bp, Saccharomyces pastorianus
aaccatttacaggtcgaacaagcaa

SEQ ID NO: 68755 - DNA, 25 bp, Saccharomyces pastorianus
aagtctttcgaatcgctgaagcgac

SEQ ID NO: 68756 - DNA, 25 bp, Saccharomyces pastorianus
agtttcagatcttgggctcgcggta

SEQ ID NO: 68757 - DNA, 25 bp, Saccharomyces pastorianus
tgcacgggacctctgatgataatgt

SEQ ID NO: 68758 - DNA, 25 bp, Saccharomyces pastorianus
aagcgactctttgttatgcacggga

SEQ ID NO: 68759 - DNA, 25 bp, Saccharomyces pastorianus
gacatgcatatttttcccgattcag

SEQ ID NO: 68760 - DNA, 25 bp, Saccharomyces pastorianus
gtatgactccatctacaccgaaagg

SEQ ID NO: 68761 - DNA, 25 bp, Saccharomyces pastorianus
aatacacaatggctgttgcaccagt

SEQ ID NO: 68762 - DNA, 25 bp, Saccharomyces pastorianus
tcgtacggtggctttgttagtttga

SEQ ID NO: 68763 - DNA, 25 bp, Saccharomyces pastorianus
gtctgttgcttcaggattggatgca

SEQ ID NO: 68764 - DNA, 25 bp, Saccharomyces pastorianus
tatcagacaccacaacgctcaaaag

SEQ ID NO: 68765 - DNA, 25 bp, Saccharomyces pastorianus
gggattggccaattatgacatgcat

SEQ ID NO: 68766 - DNA, 25 bp, Saccharomyces pastorianus
gtaaagcatatgacagaccctgata

SEQ ID NO: 68767 - DNA, 25 bp, Saccharomyces pastorianus
gaggcccaattaactagaacggatg

SEQ ID NO: 68768 - DNA, 25 bp, Saccharomyces pastorianus
gaaaggtccctcgaagatttattga

SEQ ID NO: 68769 - DNA, 25 bp, Saccharomyces pastorianus
gagcataacctacaaaatccgaata

SEQ ID NO: 68770 - DNA, 25 bp, Saccharomyces pastorianus
atccatgcctaaaaagccgcttatc

SEQ ID NO: 68771 - DNA, 25 bp, Saccharomyces pastorianus
aaagccgcttatctctacacgaaaa

SEQ ID NO: 68772 - DNA, 25 bp, Saccharomyces pastorianus
ttactttgtcggaaccattggcgga

SEQ ID NO: 68773 - DNA, 25 bp, Saccharomyces pastorianus
gtttcagatgcacaaacttctggta

SEQ ID NO: 68774 - DNA, 25 bp, Saccharomyces pastorianus
gcggatttgttaggagaggcccaat

SEQ ID NO: 68775 - DNA, 25 bp, Saccharomyces pastorianus
aaacaagcgattgttccgaagcaat

SEQ ID NO: 68776 - DNA, 25 bp, Saccharomyces pastorianus
tgctactttggcaatgaaactcacc

SEQ ID NO: 68777 - DNA, 25 bp, Saccharomyces pastorianus
gattatgttcatcgcatcttgcacg

SEQ ID NO: 68778 - DNA, 25 bp, Saccharomyces pastorianus
tcttttaccatctctgaacagtgct

SEQ ID NO: 68779 - DNA, 25 bp, Saccharomyces pastorianus
gatcagccaagaaatctctctggga

SEQ ID NO: 68780 - DNA, 25 bp, Saccharomyces pastorianus
ggttgatcgattagttcctgtttat

SEQ ID NO: 68781 - DNA, 25 bp, Saccharomyces pastorianus
atggctcggcgcactatgtatagat

SEQ ID NO: 68782 - DNA, 25 bp, Saccharomyces pastorianus
tactggttccagctttctatgataa

SEQ ID NO: 68783 - DNA, 25 bp, Saccharomyces pastorianus
gaatgctgacttgcttcttttacca

SEQ ID NO: 68784 - DNA, 25 bp, Saccharomyces pastorianus
acaatttttaaatggctcggcgcac

SEQ ID NO: 68785 - DNA, 25 bp, Saccharomyces pastorianus
ggtatcaggatacggccgtccatta

SEQ ID NO: 68786 - DNA, 25 bp, Saccharomyces pastorianus
aaaaggccagcacgattatgttcat

SEQ ID NO: 68787 - DNA, 25 bp, Saccharomyces pastorianus
gccgtccattaacccaagcagaaat

SEQ ID NO: 68788 - DNA, 25 bp, Saccharomyces pastorianus
tcagctctcacaaaaatcgtctcat

SEQ ID NO: 68789 - DNA, 25 bp, Saccharomyces pastorianus
gaaaaagtcagctctcacaaaaatc

SEQ ID NO: 68790 - DNA, 25 bp, Saccharomyces pastorianus
ctcacaaaaatcgtctcataccgga

SEQ ID NO: 68791 - DNA, 25 bp, Saccharomyces pastorianus
cgaaaaagtcagctctcacaaaaat

SEQ ID NO: 68792 - DNA, 25 bp, Saccharomyces pastorianus
aagtcagctctcacaaaaatcgtct

SEQ ID NO: 68793 - DNA, 25 bp, Saccharomyces pastorianus
gcgaaaaagtcagctctcacaaaaa

SEQ ID NO: 68794 - DNA, 25 bp, Saccharomyces pastorianus
ggcgaaaaagtcagctctcacaaaa

SEQ ID NO: 68795 - DNA, 25 bp, Saccharomyces pastorianus
tctcacaaaaatcgtctcataccgg

SEQ ID NO: 68796 - DNA, 25 bp, Saccharomyces pastorianus
aaaagtcagctctcacaaaaatcgt

SEQ ID NO: 68797 - DNA, 25 bp, Saccharomyces pastorianus
tcacaaaaatcgtctcataccggaa

SEQ ID NO: 68798 - DNA, 25 bp, Saccharomyces pastorianus
gtcagctctcacaaaaatcgtctca

SEQ ID NO: 68799 - DNA, 25 bp, Saccharomyces pastorianus
gtaataaccgctaaggacgattcca

SEQ ID NO: 68800 - DNA, 25 bp, Saccharomyces pastorianus
gtaagcaaccttcgttcaaagtcca

SEQ ID NO: 68801 - DNA, 25 bp, Saccharomyces pastorianus
gaccttgtgatcgatatacttccag

SEQ ID NO: 68802 - DNA, 25 bp, Saccharomyces pastorianus
agaagtgtttctggcggcacgagca

SEQ ID NO: 68803 - DNA, 25 bp, Saccharomyces pastorianus
aaaagttacctcaccggcacctatg

SEQ ID NO: 68804 - DNA, 25 bp, Saccharomyces pastorianus
gttgactgttggtagctcacgtgac

SEQ ID NO: 68805 - DNA, 25 bp, Saccharomyces pastorianus
atagcatgcttgattcctctactgc

SEQ ID NO: 68806 - DNA, 25 bp, Saccharomyces pastorianus
tttcacgaacgtggctagcaacgaa

SEQ ID NO: 68807 - DNA, 25 bp, Saccharomyces pastorianus
tatacttccagacagttgtgcaggg

SEQ ID NO: 68808 - DNA, 25 bp, Saccharomyces pastorianus
actgccgatgcattttccaagatga

SEQ ID NO: 68809 - DNA, 25 bp, Saccharomyces pastorianus
gtagcgtatttcatagaccttgtga

SEQ ID NO: 68810 - DNA, 25 bp, Saccharomyces pastorianus
tatcgtatcggaacacatcgggcgt

SEQ ID NO: 68811 - DNA, 25 bp, Saccharomyces pastorianus
tgtgcatttgccaagattcgctcgc

SEQ ID NO: 68812 - DNA, 25 bp, Saccharomyces pastorianus
gcgggcgtcccgaaattagagtatg

SEQ ID NO: 68813 - DNA, 25 bp, Saccharomyces pastorianus
gattcgctcgcctgctagaaaaata

SEQ ID NO: 68814 - DNA, 25 bp, Saccharomyces pastorianus
ccagctggccgtttgactttcaaaa

SEQ ID NO: 68815 - DNA, 25 bp, Saccharomyces pastorianus
agggctcaccttagaaatcttctca

SEQ ID NO: 68816 - DNA, 25 bp, Saccharomyces pastorianus
aaggctttgtgctgtcatatttcga

SEQ ID NO: 68817 - DNA, 25 bp, Saccharomyces pastorianus
gaatttcttgtatcattgtcccatg

SEQ ID NO: 68818 - DNA, 25 bp, Saccharomyces pastorianus
atatttcgaagcacgatctgcctcc

SEQ ID NO: 68819 - DNA, 25 bp, Saccharomyces pastorianus
aaatattctccattggacccagctg

SEQ ID NO: 68820 - DNA, 25 bp, Saccharomyces pastorianus
tctgcctcctgctcaagtagtatat

SEQ ID NO: 68821 - DNA, 25 bp, Saccharomyces pastorianus
tcattgctaccataccgacagatac

SEQ ID NO: 68822 - DNA, 25 bp, Saccharomyces pastorianus
ctctttgaaatcagcttcgtccttg

SEQ ID NO: 68823 - DNA, 25 bp, Saccharomyces pastorianus
gtggtcatcatcacctaacgaagat

SEQ ID NO: 68824 - DNA, 25 bp, Saccharomyces pastorianus
ttcgtccttggcctgttattactac

SEQ ID NO: 68825 - DNA, 25 bp, Saccharomyces pastorianus
gacccggcggttggcgacaataata

SEQ ID NO: 68826 - DNA, 25 bp, Saccharomyces pastorianus
aagattcatctgtgctggtcaccag

SEQ ID NO: 68827 - DNA, 25 bp, Saccharomyces pastorianus
tacagccggctttggacatcattgc

SEQ ID NO: 68828 - DNA, 25 bp, Saccharomyces pastorianus
atcggaatctggtttcctacagccg

SEQ ID NO: 68829 - DNA, 25 bp, Saccharomyces pastorianus
ggtcaccagccatctatatatttta

SEQ ID NO: 68830 - DNA, 25 bp, Saccharomyces pastorianus
gggataccgctattggatactaatg

SEQ ID NO: 68831 - DNA, 25 bp, Saccharomyces pastorianus
agagttcgtgatatgacccggcggt

SEQ ID NO: 68832 - DNA, 25 bp, Saccharomyces pastorianus
gaagacctggttgccacagttgata

SEQ ID NO: 68833 - DNA, 25 bp, Saccharomyces pastorianus
ggttgtttcctcgatggacgctgct

SEQ ID NO: 68834 - DNA, 25 bp, Saccharomyces pastorianus
tccgccatttcacctacagagatga

SEQ ID NO: 68835 - DNA, 25 bp, Saccharomyces pastorianus
attttgagccagttttctccagcta

SEQ ID NO: 68836 - DNA, 25 bp, Saccharomyces pastorianus
tgaggagcccctatggatattaaat

SEQ ID NO: 68837 - DNA, 25 bp, Saccharomyces pastorianus
tcaaagtttgggatctccgtgcggt

SEQ ID NO: 68838 - DNA, 25 bp, Saccharomyces pastorianus
gtctctagaatcgaattttccgcca

SEQ ID NO: 68839 - DNA, 25 bp, Saccharomyces pastorianus
aaatcatgttgctttgccgtatcgc

SEQ ID NO: 68840 - DNA, 25 bp, Saccharomyces pastorianus
gacgctgctgttggtccgaattcca

SEQ ID NO: 68841 - DNA, 25 bp, Saccharomyces pastorianus
ggagttccaaggtacgatagccgat

SEQ ID NO: 68842 - DNA, 25 bp, Saccharomyces pastorianus
atcgccctttgttgataccttattc

SEQ ID NO: 68843 - DNA, 25 bp, Saccharomyces pastorianus
gaaaggccaacggtctagatgattt

SEQ ID NO: 68844 - DNA, 25 bp, Saccharomyces pastorianus
attactggagaacccttgtcaatta

SEQ ID NO: 68845 - DNA, 25 bp, Saccharomyces pastorianus
gaatacctctgctgacgatggaaag

SEQ ID NO: 68846 - DNA, 25 bp, Saccharomyces pastorianus
acttctggcgtaaacctgactggta

SEQ ID NO: 68847 - DNA, 25 bp, Saccharomyces pastorianus
ttaaacgcaaagacgctggaccaaa

SEQ ID NO: 68848 - DNA, 25 bp, Saccharomyces pastorianus
aatgctacttcggtaatcccaaaca

SEQ ID NO: 68849 - DNA, 25 bp, Saccharomyces pastorianus
aattgtcgaaacttcagcaccacct

SEQ ID NO: 68850 - DNA, 25 bp, Saccharomyces pastorianus
gaacacgctatactacgacgagaaa

SEQ ID NO: 68851 - DNA, 25 bp, Saccharomyces pastorianus
gtcaataccgaaaattctccaccac

SEQ ID NO: 68852 - DNA, 25 bp, Saccharomyces pastorianus
ggagggcctaaaccagcaagtacaa

SEQ ID NO: 68853 - DNA, 25 bp, Saccharomyces pastorianus
tcgggccccatcaataatactgtac

SEQ ID NO: 68854 - DNA, 25 bp, Saccharomyces pastorianus
aatttgttggcggttgtgatgttat

SEQ ID NO: 68855 - DNA, 25 bp, Saccharomyces pastorianus
gaattttcagagtggcctactatac

SEQ ID NO: 68856 - DNA, 25 bp, Saccharomyces pastorianus
tactccagaatttccaaaatgtggg

SEQ ID NO: 68857 - DNA, 25 bp, Saccharomyces pastorianus
tgatccagttaaatttgcggcttat

SEQ ID NO: 68858 - DNA, 25 bp, Saccharomyces pastorianus
ttataaggtcatgctcacccatctt

SEQ ID NO: 68859 - DNA, 25 bp, Saccharomyces pastorianus
cctactataccccagctgtatgtaa

SEQ ID NO: 68860 - DNA, 25 bp, Saccharomyces pastorianus
ggaaaccaaggtgttgatccagtta

SEQ ID NO: 68861 - DNA, 25 bp, Saccharomyces pastorianus
tgccccagtggttctcttcatgaaa

SEQ ID NO: 68862 - DNA, 25 bp, Saccharomyces pastorianus
aagacgctattgaatctgccccagt

SEQ ID NO: 68863 - DNA, 25 bp, Saccharomyces pastorianus
gtatggcacgttcaggtgaattagc

SEQ ID NO: 68864 - DNA, 25 bp, Saccharomyces pastorianus
acccttcttcgtcatcaaactcgaa

SEQ ID NO: 68865 - DNA, 25 bp, Saccharomyces pastorianus
tgaacactgggaaaaactttcaccg

SEQ ID NO: 68866 - DNA, 25 bp, Saccharomyces pastorianus
gcacacatttcattacttccaaaag

SEQ ID NO: 68867 - DNA, 25 bp, Saccharomyces pastorianus
tcaccgaccatttcaaaacaacttg

SEQ ID NO: 68868 - DNA, 25 bp, Saccharomyces pastorianus
gaaaacactgctcgcatatttgccc

SEQ ID NO: 68869 - DNA, 25 bp, Saccharomyces pastorianus
acggagatactgttctcggaagcaa

SEQ ID NO: 68870 - DNA, 25 bp, Saccharomyces pastorianus
gtggtataaattcatttcacgatgg

SEQ ID NO: 68871 - DNA, 25 bp, Saccharomyces pastorianus
aacggtgttgacattaaggctttca

SEQ ID NO: 68872 - DNA, 25 bp, Saccharomyces pastorianus
gctcgcatatttgcccgattttaaa

SEQ ID NO: 68873 - DNA, 25 bp, Saccharomyces pastorianus
acaacttgtatgctgtttagtcgat

SEQ ID NO: 68874 - DNA, 25 bp, Saccharomyces pastorianus
gaataacctctgagcttagcttgaa

SEQ ID NO: 68875 - DNA, 25 bp, Saccharomyces pastorianus
aggctttcaaaagtgggcacacatt

SEQ ID NO: 68876 - DNA, 25 bp, Saccharomyces pastorianus
atatcccactatactcatcaacaat

SEQ ID NO: 68877 - DNA, 25 bp, Saccharomyces pastorianus
aaagtcttcgtaggcttatatgaac

SEQ ID NO: 68878 - DNA, 25 bp, Saccharomyces pastorianus
gaatcaacttttctaagggaagatc

SEQ ID NO: 68879 - DNA, 25 bp, Saccharomyces pastorianus
aggcttatatgaacgcgttggttta

SEQ ID NO: 68880 - DNA, 25 bp, Saccharomyces pastorianus
ttttattccgtgcaaagatttcagc

SEQ ID NO: 68881 - DNA, 25 bp, Saccharomyces pastorianus
gaagatcagtttccaaagcttaatg

SEQ ID NO: 68882 - DNA, 25 bp, Saccharomyces pastorianus
gaatccctactggacgtgcagaagt

SEQ ID NO: 68883 - DNA, 25 bp, Saccharomyces pastorianus
ataggcggttcttcaaacaagttag

SEQ ID NO: 68884 - DNA, 25 bp, Saccharomyces pastorianus
atatcttgaagaatccctactggac

SEQ ID NO: 68885 - DNA, 25 bp, Saccharomyces pastorianus
ggcattgaaatctgtaaaaccttta

SEQ ID NO: 68886 - DNA, 25 bp, Saccharomyces pastorianus
cgaagattatcacacgaaggttata

SEQ ID NO: 68887 - DNA, 25 bp, Saccharomyces pastorianus
agtgactggaaagccatgtcctata

SEQ ID NO: 68888 - DNA, 25 bp, Saccharomyces pastorianus
gaaggtgtcactttgatgccacctg

SEQ ID NO: 68889 - DNA, 25 bp, Saccharomyces pastorianus
acttgcctgaccttgtactgtatta

SEQ ID NO: 68890 - DNA, 25 bp, Saccharomyces pastorianus
gaaatcgtaccacaaaaccgttgat

SEQ ID NO: 68891 - DNA, 25 bp, Saccharomyces pastorianus
atttgaggaagtccccttcagacct

SEQ ID NO: 68892 - DNA, 25 bp, Saccharomyces pastorianus
ggagcgttgtgttttgctacttgcc

SEQ ID NO: 68893 - DNA, 25 bp, Saccharomyces pastorianus
ggtttctcgctatgcgcttgaaaga

SEQ ID NO: 68894 - DNA, 25 bp, Saccharomyces pastorianus
acggcctgtggtttcaaaacctcat

SEQ ID NO: 68895 - DNA, 25 bp, Saccharomyces pastorianus
tactgtattacacaccgccgatgaa

SEQ ID NO: 68896 - DNA, 25 bp, Saccharomyces pastorianus
tctggagcaagactctttgttcccc

SEQ ID NO: 68897 - DNA, 25 bp, Saccharomyces pastorianus
taccaaaagttcatctatccgttag

SEQ ID NO: 68898 - DNA, 25 bp, Saccharomyces pastorianus
gactccttttcggagacctggtcta

SEQ ID NO: 68899 - DNA, 25 bp, Saccharomyces pastorianus
atattccctcaacatgttttcaagt

SEQ ID NO: 68900 - DNA, 25 bp, Saccharomyces pastorianus
agaccaggaacctcttgtcatcgta

SEQ ID NO: 68901 - DNA, 25 bp, Saccharomyces pastorianus
agtgcgatgcgtgcgacgaactgat

SEQ ID NO: 68902 - DNA, 25 bp, Saccharomyces pastorianus
taacaagcggcctacggatttggta

SEQ ID NO: 68903 - DNA, 25 bp, Saccharomyces pastorianus
cttgtcatcgtagttggcacttcgc

SEQ ID NO: 68904 - DNA, 25 bp, Saccharomyces pastorianus
gaatctttattctgacgcgtttgca

SEQ ID NO: 68905 - DNA, 25 bp, Saccharomyces pastorianus
taagctgagcgaagaccctatcaag

SEQ ID NO: 68906 - DNA, 25 bp, Saccharomyces pastorianus
gacgcgtttgcagaacaactcgttg

SEQ ID NO: 68907 - DNA, 25 bp, Saccharomyces pastorianus
gatactccgggctcaaactgtaatc

SEQ ID NO: 68908 - DNA, 25 bp, Saccharomyces pastorianus
aattgtcttctttggcgaggacctg

SEQ ID NO: 68909 - DNA, 25 bp, Saccharomyces pastorianus
accatcgggattgtcgtttgctaca

SEQ ID NO: 68910 - DNA, 25 bp, Saccharomyces pastorianus
gcacttctacctaaacaccgacgaa

SEQ ID NO: 68911 - DNA, 25 bp, Saccharomyces pastorianus
ttgctacatgaacttggtcttccct

SEQ ID NO: 68912 - DNA, 25 bp, Saccharomyces pastorianus
aagacatcgtcgctgcccaaaagga

SEQ ID NO: 68913 - DNA, 25 bp, Saccharomyces pastorianus
ttggtcttccctcaacaattggctc

SEQ ID NO: 68914 - DNA, 25 bp, Saccharomyces pastorianus
ttctcatgagcaccatcgggattgt

SEQ ID NO: 68915 - DNA, 25 bp, Saccharomyces pastorianus
tcctgcaatcaagcttctcatgagc

SEQ ID NO: 68916 - DNA, 25 bp, Saccharomyces pastorianus
gtcgctgcccaaaaggagactaagt

SEQ ID NO: 68917 - DNA, 25 bp, Saccharomyces pastorianus
ctggttttccctgattcagagtttg

SEQ ID NO: 68918 - DNA, 25 bp, Saccharomyces pastorianus
gggattgtcgtttgctacatgaact

SEQ ID NO: 68919 - DNA, 25 bp, Saccharomyces pastorianus
gattcagagtttgcacttctaccta

SEQ ID NO: 68920 - DNA, 25 bp, Saccharomyces pastorianus
gattcaaaaggtggacttcaaagca

SEQ ID NO: 68921 - DNA, 25 bp, Saccharomyces pastorianus
caaaaggtggacttcaaagcacaaa

SEQ ID NO: 68922 - DNA, 25 bp, Saccharomyces pastorianus
aaggtggacttcaaagcacaaagat

SEQ ID NO: 68923 - DNA, 25 bp, Saccharomyces pastorianus
atgtggtcagaaataacttggagaa

SEQ ID NO: 68924 - DNA, 25 bp, Saccharomyces pastorianus
aggtggacttcaaagcacaaagata

SEQ ID NO: 68925 - DNA, 25 bp, Saccharomyces pastorianus
gaaagattcaaaaggtggacttcaa

SEQ ID NO: 68926 - DNA, 25 bp, Saccharomyces pastorianus
aaaggtggacttcaaagcacaaaga

SEQ ID NO: 68927 - DNA, 25 bp, Saccharomyces pastorianus
aagattcaaaaggtggacttcaaag

SEQ ID NO: 68928 - DNA, 25 bp, Saccharomyces pastorianus
attcaaaaggtggacttcaaagcac

SEQ ID NO: 68929 - DNA, 25 bp, Saccharomyces pastorianus
ttcaaaaggtggacttcaaagcaca

SEQ ID NO: 68930 - DNA, 25 bp, Saccharomyces pastorianus
aaaaggtggacttcaaagcacaaag

SEQ ID NO: 68931 - DNA, 25 bp, Saccharomyces pastorianus
gttacgtcctatggaatttcgagca

SEQ ID NO: 68932 - DNA, 25 bp, Saccharomyces pastorianus
ttctgaagatcctccccagttgcag

SEQ ID NO: 68933 - DNA, 25 bp, Saccharomyces pastorianus
ccgttacgtcctatggaatttcgag

SEQ ID NO: 68934 - DNA, 25 bp, Saccharomyces pastorianus
gaagatcctccccagttgcagtact

SEQ ID NO: 68935 - DNA, 25 bp, Saccharomyces pastorianus
agtaacctttttgcatggaaacaca

SEQ ID NO: 68936 - DNA, 25 bp, Saccharomyces pastorianus
acctttttgcatggaaacacaaatg

SEQ ID NO: 68937 - DNA, 25 bp, Saccharomyces pastorianus
ctccccagttgcagtactgcaaagt

SEQ ID NO: 68938 - DNA, 25 bp, Saccharomyces pastorianus
aagatcctccccagttgcagtactg

SEQ ID NO: 68939 - DNA, 25 bp, Saccharomyces pastorianus
atcctccccagttgcagtactgcaa

SEQ ID NO: 68940 - DNA, 25 bp, Saccharomyces pastorianus
atggaaacacaaatgctcccacccc

SEQ ID NO: 68941 - DNA, 25 bp, Saccharomyces pastorianus
tgcagtactgcaaagtaaccttttt

SEQ ID NO: 68942 - DNA, 25 bp, Saccharomyces pastorianus
tttctgttttggtagccacttcgtt

SEQ ID NO: 68943 - DNA, 25 bp, Saccharomyces pastorianus
ttgatagttttgatagccacctctg

SEQ ID NO: 68944 - DNA, 25 bp, Saccharomyces pastorianus
ttggtagccacttcgttggccacct

SEQ ID NO: 68945 - DNA, 25 bp, Saccharomyces pastorianus
gatagccacctctgttgttttggta

SEQ ID NO: 68946 - DNA, 25 bp, Saccharomyces pastorianus
gccacctctgttgttttggtagtta

SEQ ID NO: 68947 - DNA, 25 bp, Saccharomyces pastorianus
aaattcgacattggaaggaggttga

SEQ ID NO: 68948 - DNA, 25 bp, Saccharomyces pastorianus
atagttttgatagccacctctgttg

SEQ ID NO: 68949 - DNA, 25 bp, Saccharomyces pastorianus
gagaattggttggaggacctatctt

SEQ ID NO: 68950 - DNA, 25 bp, Saccharomyces pastorianus
gacatatcactctaaaattcgacat

SEQ ID NO: 68951 - DNA, 25 bp, Saccharomyces pastorianus
gttggaggacctatcttgagaatca

SEQ ID NO: 68952 - DNA, 25 bp, Saccharomyces pastorianus
ggacctatcttgagaatcattttga

SEQ ID NO: 68953 - DNA, 25 bp, Saccharomyces pastorianus
agacaagggccttatcagccgttgg

SEQ ID NO: 68954 - DNA, 25 bp, Saccharomyces pastorianus
gatcttccaggaatttctgcgggat

SEQ ID NO: 68955 - DNA, 25 bp, Saccharomyces pastorianus
aaagttccactacttagcgcagata

SEQ ID NO: 68956 - DNA, 25 bp, Saccharomyces pastorianus
gttggcgggcattactcgcagcaac

SEQ ID NO: 68957 - DNA, 25 bp, Saccharomyces pastorianus
ttcgtgtcgcagctattgttctatt

SEQ ID NO: 68958 - DNA, 25 bp, Saccharomyces pastorianus
gaacgatccggatttctaccagatt

SEQ ID NO: 68959 - DNA, 25 bp, Saccharomyces pastorianus
ggacgcgctgctgaggatcgaacac

SEQ ID NO: 68960 - DNA, 25 bp, Saccharomyces pastorianus
gatccgcgctactacgtggtgggta

SEQ ID NO: 68961 - DNA, 25 bp, Saccharomyces pastorianus
agggtcaaggagtacgtgccgtcaa

SEQ ID NO: 68962 - DNA, 25 bp, Saccharomyces pastorianus
ttctaccagattagcgatgccgcgg

SEQ ID NO: 68963 - DNA, 25 bp, Saccharomyces pastorianus
gctgacctgctggagccaacaaagt

SEQ ID NO: 68964 - DNA, 25 bp, Saccharomyces pastorianus
acaacggagctagttacattagacg

SEQ ID NO: 68965 - DNA, 25 bp, Saccharomyces pastorianus
tggatcccgttgtgacctcagtaga

SEQ ID NO: 68966 - DNA, 25 bp, Saccharomyces pastorianus
aggttgcagaacttgtcactacaga

SEQ ID NO: 68967 - DNA, 25 bp, Saccharomyces pastorianus
agatgtggcaactgagctggagaca

SEQ ID NO: 68968 - DNA, 25 bp, Saccharomyces pastorianus
gacactggatgagctgacgccggtt

SEQ ID NO: 68969 - DNA, 25 bp, Saccharomyces pastorianus
aagtgacagtagagcttgaagcaga

SEQ ID NO: 68970 - DNA, 25 bp, Saccharomyces pastorianus
ggcaacggagctagttacattggat

SEQ ID NO: 68971 - DNA, 25 bp, Saccharomyces pastorianus
gaagcagagctggtcacgtcagaag

SEQ ID NO: 68972 - DNA, 25 bp, Saccharomyces pastorianus
agaactaatggttgtgaccggagta

SEQ ID NO: 68973 - DNA, 25 bp, Saccharomyces pastorianus
ttgtgacctcagtagatgggacact

SEQ ID NO: 68974 - DNA, 25 bp, Saccharomyces pastorianus
attgaactaatgatcgtggctggag

SEQ ID NO: 68975 - DNA, 25 bp, Saccharomyces pastorianus
gataggtgggtaccccaaatgctcc

SEQ ID NO: 68976 - DNA, 25 bp, Saccharomyces pastorianus
tggccttttaccgtctgttgatgaa

SEQ ID NO: 68977 - DNA, 25 bp, Saccharomyces pastorianus
gacatagcttctctggtcgttcgag

SEQ ID NO: 68978 - DNA, 25 bp, Saccharomyces pastorianus
gtcggtgccgacatagcttctctgg

SEQ ID NO: 68979 - DNA, 25 bp, Saccharomyces pastorianus
caacgagcgagataggtgggtaccc

SEQ ID NO: 68980 - DNA, 25 bp, Saccharomyces pastorianus
gatcatctatgtattcactttttta

SEQ ID NO: 68981 - DNA, 25 bp, Saccharomyces pastorianus
tctggtcgttcgagttggcctttta

SEQ ID NO: 68982 - DNA, 25 bp, Saccharomyces pastorianus
gtcagtattgacgtcgatctcattg

SEQ ID NO: 68983 - DNA, 25 bp, Saccharomyces pastorianus
tacgcgtaatacaaatttctcaaac

SEQ ID NO: 68984 - DNA, 25 bp, Saccharomyces pastorianus
acgtcgatctcattgtcggtgccga

SEQ ID NO: 68985 - DNA, 25 bp, Saccharomyces pastorianus
accccaaatgctccgtcagtattga

SEQ ID NO: 68986 - DNA, 25 bp, Saccharomyces pastorianus
gaatccatcaggactttcgccaaaa

SEQ ID NO: 68987 - DNA, 25 bp, Saccharomyces pastorianus
aaatgctcaaactagacggtcttcc

SEQ ID NO: 68988 - DNA, 25 bp, Saccharomyces pastorianus
gttgggtcacaaatcctcggtggaa

SEQ ID NO: 68989 - DNA, 25 bp, Saccharomyces pastorianus
gcttcaaccgcgatgtttagtgact

SEQ ID NO: 68990 - DNA, 25 bp, Saccharomyces pastorianus
aatctggctgcgttgcatgacaagg

SEQ ID NO: 68991 - DNA, 25 bp, Saccharomyces pastorianus
gcagcacactgtagcctcgaagact

SEQ ID NO: 68992 - DNA, 25 bp, Saccharomyces pastorianus
atgctcgacataagcttcatcgcca

SEQ ID NO: 68993 - DNA, 25 bp, Saccharomyces pastorianus
aatgtgcgatggcaggcttctcata

SEQ ID NO: 68994 - DNA, 25 bp, Saccharomyces pastorianus
aggcttctcatagcaatctggctgc

SEQ ID NO: 68995 - DNA, 25 bp, Saccharomyces pastorianus
ttcgccaaaacaccctttcaatatg

SEQ ID NO: 68996 - DNA, 25 bp, Saccharomyces pastorianus
aagttatcccagactacacttctgc

SEQ ID NO: 68997 - DNA, 25 bp, Saccharomyces pastorianus
gaatcacgtctaactgatactataa

SEQ ID NO: 68998 - DNA, 25 bp, Saccharomyces pastorianus
gagagctctttgatgatttccaaga

SEQ ID NO: 68999 - DNA, 25 bp, Saccharomyces pastorianus
gaacgaggctcttgacctggtttcc

SEQ ID NO: 69000 - DNA, 25 bp, Saccharomyces pastorianus
gtacaaataccggaacgaggctctt

SEQ ID NO: 69001 - DNA, 25 bp, Saccharomyces pastorianus
agccttctatctttggagagctctt

SEQ ID NO: 69002 - DNA, 25 bp, Saccharomyces pastorianus
aatggaaagccttctatctttggag

SEQ ID NO: 69003 - DNA, 25 bp, Saccharomyces pastorianus
gataaagagaatgccgaatcgttcg

SEQ ID NO: 69004 - DNA, 25 bp, Saccharomyces pastorianus
gaatcgttcgaatcacgtctaactg

SEQ ID NO: 69005 - DNA, 25 bp, Saccharomyces pastorianus
tgaacttacaacaggatttcgataa

SEQ ID NO: 69006 - DNA, 25 bp, Saccharomyces pastorianus
caaacgttgccaaattacaagagtt

SEQ ID NO: 69007 - DNA, 25 bp, Saccharomyces pastorianus
tgtaaggagagattggtcgccagaa

SEQ ID NO: 69008 - DNA, 25 bp, Saccharomyces pastorianus
atgacggctttggaaacacagaacc

SEQ ID NO: 69009 - DNA, 25 bp, Saccharomyces pastorianus
attgaaaacccattcgccgatgata

SEQ ID NO: 69010 - DNA, 25 bp, Saccharomyces pastorianus
gaacgctcataaagccaattcctca

SEQ ID NO: 69011 - DNA, 25 bp, Saccharomyces pastorianus
tcctcaagagacgactttacatttg

SEQ ID NO: 69012 - DNA, 25 bp, Saccharomyces pastorianus
ataaagccaattcctcaagagacga

SEQ ID NO: 69013 - DNA, 25 bp, Saccharomyces pastorianus
gccgatgatactaggaacgctcata

SEQ ID NO: 69014 - DNA, 25 bp, Saccharomyces pastorianus
tggaaacacagaaccgtttattgaa

SEQ ID NO: 69015 - DNA, 25 bp, Saccharomyces pastorianus
gtttattgaaaacccattcgccgat

SEQ ID NO: 69016 - DNA, 25 bp, Saccharomyces pastorianus
ttcgccgatgatactaggaacgctc

SEQ ID NO: 69017 - DNA, 25 bp, Saccharomyces pastorianus
aacccattcgccgatgatactagga

SEQ ID NO: 69018 - DNA, 25 bp, Saccharomyces pastorianus
ggatttgaaaatgacggctttggaa

SEQ ID NO: 69019 - DNA, 25 bp, Saccharomyces pastorianus
agagttccattgctcatcagcacca

SEQ ID NO: 69020 - DNA, 25 bp, Saccharomyces pastorianus
tgaccctgtccgttggacccaaacg

SEQ ID NO: 69021 - DNA, 25 bp, Saccharomyces pastorianus
gtccaaccaggcacctgctgcaggg

SEQ ID NO: 69022 - DNA, 25 bp, Saccharomyces pastorianus
cggccagagttccattgctcatcag

SEQ ID NO: 69023 - DNA, 25 bp, Saccharomyces pastorianus
acgtgtgtcgaccacgaccgttgtg

SEQ ID NO: 69024 - DNA, 25 bp, Saccharomyces pastorianus
gcacgctatcttcgacactttactc

SEQ ID NO: 69025 - DNA, 25 bp, Saccharomyces pastorianus
aggacggacctctgcggcgtgtcca

SEQ ID NO: 69026 - DNA, 25 bp, Saccharomyces pastorianus
tttactctcacctgccaggacggac

SEQ ID NO: 69027 - DNA, 25 bp, Saccharomyces pastorianus
tcgatgggcgtccaaccaggcacct

SEQ ID NO: 69028 - DNA, 25 bp, Saccharomyces pastorianus
aaacgcatacacacagctcatcact

SEQ ID NO: 69029 - DNA, 25 bp, Saccharomyces pastorianus
acgaccgttgtgtcccagccgcatg

SEQ ID NO: 69030 - DNA, 25 bp, Saccharomyces pastorianus
accactgtttcttcaaagtcttaca

SEQ ID NO: 69031 - DNA, 25 bp, Saccharomyces pastorianus
tcactgtgatgacaacggctgcaat

SEQ ID NO: 69032 - DNA, 25 bp, Saccharomyces pastorianus
gaccgtcacttctgaggctcctaag

SEQ ID NO: 69033 - DNA, 25 bp, Saccharomyces pastorianus
ggctgcaatgttaagaccgtcactt

SEQ ID NO: 69034 - DNA, 25 bp, Saccharomyces pastorianus
aaggaaacttcagtcaccactgcca

SEQ ID NO: 69035 - DNA, 25 bp, Saccharomyces pastorianus
actgtaacgacaacggctgtaccgt

SEQ ID NO: 69036 - DNA, 25 bp, Saccharomyces pastorianus
actgtcacccactgtaacgacaacg

SEQ ID NO: 69037 - DNA, 25 bp, Saccharomyces pastorianus
actggtgtcactgcaaccactgttt

SEQ ID NO: 69038 - DNA, 25 bp, Saccharomyces pastorianus
ccactaccattgctccaaaatcata

SEQ ID NO: 69039 - DNA, 25 bp, Saccharomyces pastorianus
taccatcactgtcactcactgtgat

SEQ ID NO: 69040 - DNA, 25 bp, Saccharomyces pastorianus
aaagtcttacactaccatcactgtc

SEQ ID NO: 69041 - DNA, 25 bp, Saccharomyces pastorianus
ataggccaccggcatcatctggcca

SEQ ID NO: 69042 - DNA, 25 bp, Saccharomyces pastorianus
caccgtgggtaagattactgctcta

SEQ ID NO: 69043 - DNA, 25 bp, Saccharomyces pastorianus
atctggccatgctttcacaaacgcg

SEQ ID NO: 69044 - DNA, 25 bp, Saccharomyces pastorianus
gattactgctctattgaccagttta

SEQ ID NO: 69045 - DNA, 25 bp, Saccharomyces pastorianus
atgtccgttctctgcagcaccatag

SEQ ID NO: 69046 - DNA, 25 bp, Saccharomyces pastorianus
ctggccagctttaaaggcgccttta

SEQ ID NO: 69047 - DNA, 25 bp, Saccharomyces pastorianus
ctttgctgcgctggccagctttaaa

SEQ ID NO: 69048 - DNA, 25 bp, Saccharomyces pastorianus
aaggcgcctttagatcattcaatga

SEQ ID NO: 69049 - DNA, 25 bp, Saccharomyces pastorianus
agcaccataggttgtcgactctttg

SEQ ID NO: 69050 - DNA, 25 bp, Saccharomyces pastorianus
ataggttgtcgactctttgctgcgc

SEQ ID NO: 69051 - DNA, 25 bp, Saccharomyces pastorianus
acaaacgcgccaacgccaagtgtaa

SEQ ID NO: 69052 - DNA, 25 bp, Saccharomyces pastorianus
aaaccaccaattctaacgcaactgc

SEQ ID NO: 69053 - DNA, 25 bp, Saccharomyces pastorianus
aactgcgctaatggctattggtaac

SEQ ID NO: 69054 - DNA, 25 bp, Saccharomyces pastorianus
ggtaacaactcatactcccaaaagg

SEQ ID NO: 69055 - DNA, 25 bp, Saccharomyces pastorianus
tgggagctccacgtcaaatttgaat

SEQ ID NO: 69056 - DNA, 25 bp, Saccharomyces pastorianus
cggttactaatgaccaactcgctaa

SEQ ID NO: 69057 - DNA, 25 bp, Saccharomyces pastorianus
gaattccagtcccaatgttaaagtg

SEQ ID NO: 69058 - DNA, 25 bp, Saccharomyces pastorianus
tcgagtttgctgatgggagctccac

SEQ ID NO: 69059 - DNA, 25 bp, Saccharomyces pastorianus
aattcatccgaattgtccactccta

SEQ ID NO: 69060 - DNA, 25 bp, Saccharomyces pastorianus
gacggtagcggtaacggcacttccg

SEQ ID NO: 69061 - DNA, 25 bp, Saccharomyces pastorianus
aattctatcattaacgtgtcactgc

SEQ ID NO: 69062 - DNA, 25 bp, Saccharomyces pastorianus
gaccaactcgctaattttcgaccgg

SEQ ID NO: 69063 - DNA, 25 bp, Saccharomyces pastorianus
atgttgtcacgctggtcgacttgaa

SEQ ID NO: 69064 - DNA, 25 bp, Saccharomyces pastorianus
tgccggaattgcctgatgacataat

SEQ ID NO: 69065 - DNA, 25 bp, Saccharomyces pastorianus
gccgtatatcaatcttgctccggat

SEQ ID NO: 69066 - DNA, 25 bp, Saccharomyces pastorianus
gattacagatacatgcccgatccgg

SEQ ID NO: 69067 - DNA, 25 bp, Saccharomyces pastorianus
gaatttgctcgcgtggaactgaaaa

SEQ ID NO: 69068 - DNA, 25 bp, Saccharomyces pastorianus
ggttcgtcatttgcacatatcttcc

SEQ ID NO: 69069 - DNA, 25 bp, Saccharomyces pastorianus
ggacaggctcttccacagtgaagtt

SEQ ID NO: 69070 - DNA, 25 bp, Saccharomyces pastorianus
aacgtcccactcatcgagttggtga

SEQ ID NO: 69071 - DNA, 25 bp, Saccharomyces pastorianus
ggtgaccaacccagattttagtgat

SEQ ID NO: 69072 - DNA, 25 bp, Saccharomyces pastorianus
gggcgaaaccgattcactgctggag

SEQ ID NO: 69073 - DNA, 25 bp, Saccharomyces pastorianus
ttatcagtggcgtggcggcatcaat

SEQ ID NO: 69074 - DNA, 25 bp, Saccharomyces pastorianus
aatgaatgacgtggacgtggtcaat

SEQ ID NO: 69075 - DNA, 25 bp, Saccharomyces pastorianus
ggttgatttgcctctacattgaaag

SEQ ID NO: 69076 - DNA, 25 bp, Saccharomyces pastorianus
ggtcgataccaatagtaacttcaac

SEQ ID NO: 69077 - DNA, 25 bp, Saccharomyces pastorianus
tgttggaaatgaatgacgtggacgt

SEQ ID NO: 69078 - DNA, 25 bp, Saccharomyces pastorianus
aattccctggaatggttgatttgcc

SEQ ID NO: 69079 - DNA, 25 bp, Saccharomyces pastorianus
gatttgcctctacattgaaagaata

SEQ ID NO: 69080 - DNA, 25 bp, Saccharomyces pastorianus
gacgtggtcaatgggaatatcctta

SEQ ID NO: 69081 - DNA, 25 bp, Saccharomyces pastorianus
gaatatccttaattccctggaatgg

SEQ ID NO: 69082 - DNA, 25 bp, Saccharomyces pastorianus
gaatggttgatttgcctctacattg

SEQ ID NO: 69083 - DNA, 25 bp, Saccharomyces pastorianus
ctggaatggttgatttgcctctaca

SEQ ID NO: 69084 - DNA, 25 bp, Saccharomyces pastorianus
tccctggaatggttgatttgcctct

SEQ ID NO: 69085 - DNA, 25 bp, Saccharomyces pastorianus
ctgtggctcagaatctcgtttggaa

SEQ ID NO: 69086 - DNA, 25 bp, Saccharomyces pastorianus
ctttttgtggtgttctgataggcga

SEQ ID NO: 69087 - DNA, 25 bp, Saccharomyces pastorianus
gcaccacccaagttatccatattca

SEQ ID NO: 69088 - DNA, 25 bp, Saccharomyces pastorianus
ggcgaaggacctttcttaacattgt

SEQ ID NO: 69089 - DNA, 25 bp, Saccharomyces pastorianus
gattggttccggatggacttctacc

SEQ ID NO: 69090 - DNA, 25 bp, Saccharomyces pastorianus
ttttgttttgcttatccttcttgtc

SEQ ID NO: 69091 - DNA, 25 bp, Saccharomyces pastorianus
tcgactgtccagcacctttttgtgg

SEQ ID NO: 69092 - DNA, 25 bp, Saccharomyces pastorianus
atttggctttatctccgtcgactgt

SEQ ID NO: 69093 - DNA, 25 bp, Saccharomyces pastorianus
gatttccttcgttcaagattggttc

SEQ ID NO: 69094 - DNA, 25 bp, Saccharomyces pastorianus
ttgatttgcaaaccctgtggctcag

SEQ ID NO: 69095 - DNA, 25 bp, Saccharomyces pastorianus
atattcaatagctgcccatttggct

SEQ ID NO: 69096 - DNA, 25 bp, Saccharomyces pastorianus
ggaaaccactgctaggcctggaatt

SEQ ID NO: 69097 - DNA, 25 bp, Saccharomyces pastorianus
ttgatggatttcaccaagcagttgg

SEQ ID NO: 69098 - DNA, 25 bp, Saccharomyces pastorianus
attcacgcagtgtatcaacttctgg

SEQ ID NO: 69099 - DNA, 25 bp, Saccharomyces pastorianus
caatggtcctgaaactgtcttagag

SEQ ID NO: 69100 - DNA, 25 bp, Saccharomyces pastorianus
aactttactgtaatcttccctgaag

SEQ ID NO: 69101 - DNA, 25 bp, Saccharomyces pastorianus
tgcccatgacacaattcgaactagt

SEQ ID NO: 69102 - DNA, 25 bp, Saccharomyces pastorianus
aaagtctttaccgatcttacgtgct

SEQ ID NO: 69103 - DNA, 25 bp, Saccharomyces pastorianus
ccgatcttacgtgctttgatttaaa

SEQ ID NO: 69104 - DNA, 25 bp, Saccharomyces pastorianus
ttccctgaagacatcaatggtcctg

SEQ ID NO: 69105 - DNA, 25 bp, Saccharomyces pastorianus
tatggatagacaggcacaacgaaat

SEQ ID NO: 69106 - DNA, 25 bp, Saccharomyces pastorianus
gaatacccaatacaagaagcgacta

SEQ ID NO: 69107 - DNA, 25 bp, Saccharomyces pastorianus
gtcactactagttggcaagagcccg

SEQ ID NO: 69108 - DNA, 25 bp, Saccharomyces pastorianus
ggatgaagaaactactgaccagcta

SEQ ID NO: 69109 - DNA, 25 bp, Saccharomyces pastorianus
acacagttgatgacggctggtcccg

SEQ ID NO: 69110 - DNA, 25 bp, Saccharomyces pastorianus
gaccagctaactccctttattagag

SEQ ID NO: 69111 - DNA, 25 bp, Saccharomyces pastorianus
agacgtctcgctgatgaagatcccg

SEQ ID NO: 69112 - DNA, 25 bp, Saccharomyces pastorianus
gacaagcgatgccaggagactcatt

SEQ ID NO: 69113 - DNA, 25 bp, Saccharomyces pastorianus
ccgaggaagttttgcccgaattgat

SEQ ID NO: 69114 - DNA, 25 bp, Saccharomyces pastorianus
caccgatacgataccgtttgaccta

SEQ ID NO: 69115 - DNA, 25 bp, Saccharomyces pastorianus
tgcgagttgtgctatgatccattca

SEQ ID NO: 69116 - DNA, 25 bp, Saccharomyces pastorianus
gaaaagtgctgtttggtcactacta

SEQ ID NO: 69117 - DNA, 25 bp, Saccharomyces pastorianus
gaaggattttttgacggcgacgaga

SEQ ID NO: 69118 - DNA, 25 bp, Saccharomyces pastorianus
gaccgatagcttgcgttatgtcttt

SEQ ID NO: 69119 - DNA, 25 bp, Saccharomyces pastorianus
aatccgttttggcatggtccgtcat

SEQ ID NO: 69120 - DNA, 25 bp, Saccharomyces pastorianus
atatccttccctatatcatcacgga

SEQ ID NO: 69121 - DNA, 25 bp, Saccharomyces pastorianus
ggtcgtttggcattaggttccttga

SEQ ID NO: 69122 - DNA, 25 bp, Saccharomyces pastorianus
cattcttgtggctgtcgaccgatag

SEQ ID NO: 69123 - DNA, 25 bp, Saccharomyces pastorianus
tttggacatccacactagcttatat

SEQ ID NO: 69124 - DNA, 25 bp, Saccharomyces pastorianus
aacttggaccctttgcaaatccgag

SEQ ID NO: 69125 - DNA, 25 bp, Saccharomyces pastorianus
gttgtaaaatccattatcgccccat

SEQ ID NO: 69126 - DNA, 25 bp, Saccharomyces pastorianus
ttatgatcttctgggttgcgtgtct

SEQ ID NO: 69127 - DNA, 25 bp, Saccharomyces pastorianus
ttgctactttgattctaaacgcccc

SEQ ID NO: 69128 - DNA, 25 bp, Saccharomyces pastorianus
acgccccagacttcacgagatttag

SEQ ID NO: 69129 - DNA, 25 bp, Saccharomyces pastorianus
aatctacggtattgatgcgaacgcc

SEQ ID NO: 69130 - DNA, 25 bp, Saccharomyces pastorianus
gtttatactgtatgtccggctttga

SEQ ID NO: 69131 - DNA, 25 bp, Saccharomyces pastorianus
gggcttttatggtgttgacaacatc

SEQ ID NO: 69132 - DNA, 25 bp, Saccharomyces pastorianus
tctggctgtgcgttcattgatgtat

SEQ ID NO: 69133 - DNA, 25 bp, Saccharomyces pastorianus
gaatcattccccaattttgacgaca

SEQ ID NO: 69134 - DNA, 25 bp, Saccharomyces pastorianus
gtctagttcgtaatgctactggtga

SEQ ID NO: 69135 - DNA, 25 bp, Saccharomyces pastorianus
tgcgaacgccaaggttgctccaaaa

SEQ ID NO: 69136 - DNA, 25 bp, Saccharomyces pastorianus
ggaaaacttattcttacctgtatgg

SEQ ID NO: 69137 - DNA, 25 bp, Saccharomyces pastorianus
gcaaggaagatacccatgagctatt

SEQ ID NO: 69138 - DNA, 25 bp, Saccharomyces pastorianus
aatgactgttttaagctctggctgt

SEQ ID NO: 69139 - DNA, 25 bp, Saccharomyces pastorianus
gacgacatccgtccgaagaacattg

SEQ ID NO: 69140 - DNA, 25 bp, Saccharomyces pastorianus
gatggtgactttcgtactgaacaac

SEQ ID NO: 69141 - DNA, 25 bp, Saccharomyces pastorianus
tcatgatgggccagctgtttaccaa

SEQ ID NO: 69142 - DNA, 25 bp, Saccharomyces pastorianus
gaggactaccaggagacgcactata

SEQ ID NO: 69143 - DNA, 25 bp, Saccharomyces pastorianus
gcagagatgccattcgtttgtccac

SEQ ID NO: 69144 - DNA, 25 bp, Saccharomyces pastorianus
ggcatcactgcctttttggagttta

SEQ ID NO: 69145 - DNA, 25 bp, Saccharomyces pastorianus
gtccaaggtgttgcagactgcggtc

SEQ ID NO: 69146 - DNA, 25 bp, Saccharomyces pastorianus
gtttgtccacgttgaggatctcaga

SEQ ID NO: 69147 - DNA, 25 bp, Saccharomyces pastorianus
aaaggagccacgttcctcatgatgg

SEQ ID NO: 69148 - DNA, 25 bp, Saccharomyces pastorianus
ggaacagtactgtttttcagcagag

SEQ ID NO: 69149 - DNA, 25 bp, Saccharomyces pastorianus
ggatctcagactctggtaacggtat

SEQ ID NO: 69150 - DNA, 25 bp, Saccharomyces pastorianus
gtcgccaagaattttcggcatcact

SEQ ID NO: 69151 - DNA, 25 bp, Saccharomyces pastorianus
gactcattcgatcaccttattagcg

SEQ ID NO: 69152 - DNA, 25 bp, Saccharomyces pastorianus
tacgggtcgctactgacacggttat

SEQ ID NO: 69153 - DNA, 25 bp, Saccharomyces pastorianus
tatgctttactgtccaactacgggt

SEQ ID NO: 69154 - DNA, 25 bp, Saccharomyces pastorianus
aggtatcgctatactggcgtttgca

SEQ ID NO: 69155 - DNA, 25 bp, Saccharomyces pastorianus
tacccgatgggaattgtcactgcag

SEQ ID NO: 69156 - DNA, 25 bp, Saccharomyces pastorianus
aagaatccctgcgattgtttctggc

SEQ ID NO: 69157 - DNA, 25 bp, Saccharomyces pastorianus
ttttagttgtttacgctgttcagca

SEQ ID NO: 69158 - DNA, 25 bp, Saccharomyces pastorianus
tcgtctgctgtcatctcataatcaa

SEQ ID NO: 69159 - DNA, 25 bp, Saccharomyces pastorianus
attagcgtgttactactgggactat

SEQ ID NO: 69160 - DNA, 25 bp, Saccharomyces pastorianus
gaccaccgggtgtattgtcaatttt

SEQ ID NO: 69161 - DNA, 25 bp, Saccharomyces pastorianus
acggttattattcgcacccatcgaa

SEQ ID NO: 69162 - DNA, 25 bp, Saccharomyces pastorianus
ttgtacgggttcagccaaacgggca

SEQ ID NO: 69163 - DNA, 25 bp, Saccharomyces pastorianus
gggcataaccgatccagaatatcta

SEQ ID NO: 69164 - DNA, 25 bp, Saccharomyces pastorianus
aagacttgggccgagtaccagttgg

SEQ ID NO: 69165 - DNA, 25 bp, Saccharomyces pastorianus
gagtagcattcaattcttcttcttt

SEQ ID NO: 69166 - DNA, 25 bp, Saccharomyces pastorianus
ggctgtgatattaccgatcccgaga

SEQ ID NO: 69167 - DNA, 25 bp, Saccharomyces pastorianus
cgattttctctacgtggctgattaa

SEQ ID NO: 69168 - DNA, 25 bp, Saccharomyces pastorianus
tagaagacttaactccttctgcggg

SEQ ID NO: 69169 - DNA, 25 bp, Saccharomyces pastorianus
tgctattgacttttcaggtgccttt

SEQ ID NO: 69170 - DNA, 25 bp, Saccharomyces pastorianus
gctcgcttttccctatgttatatga

SEQ ID NO: 69171 - DNA, 25 bp, Saccharomyces pastorianus
gtatctgtgccagaatactctgaag

SEQ ID NO: 69172 - DNA, 25 bp, Saccharomyces pastorianus
aacgcttttgttactgatggtggaa

SEQ ID NO: 69173 - DNA, 25 bp, Saccharomyces pastorianus
tgcgttgccggcacgcagtgaagaa

SEQ ID NO: 69174 - DNA, 25 bp, Saccharomyces pastorianus
tttgacatcgaggataaagcttctg

SEQ ID NO: 69175 - DNA, 25 bp, Saccharomyces pastorianus
cagcgatattccagatgcgttgccg

SEQ ID NO: 69176 - DNA, 25 bp, Saccharomyces pastorianus
taaagcttctgtggctcccgaacaa

SEQ ID NO: 69177 - DNA, 25 bp, Saccharomyces pastorianus
tcatatacggatcaggctgccgcca

SEQ ID NO: 69178 - DNA, 25 bp, Saccharomyces pastorianus
gccagcgatattccagatgcgttgc

SEQ ID NO: 69179 - DNA, 25 bp, Saccharomyces pastorianus
gatattccagatgcgttgccggcac

SEQ ID NO: 69180 - DNA, 25 bp, Saccharomyces pastorianus
aggataaagcttctgtggctcccga

SEQ ID NO: 69181 - DNA, 25 bp, Saccharomyces pastorianus
ggctcccgaacaagaacacacgtca

SEQ ID NO: 69182 - DNA, 25 bp, Saccharomyces pastorianus
agcttctgtggctcccgaacaagaa

SEQ ID NO: 69183 - DNA, 25 bp, Saccharomyces pastorianus
acggatcaggctgccgccagcgata

SEQ ID NO: 69184 - DNA, 25 bp, Saccharomyces pastorianus
aagatttgccatccttcagtgacaa

SEQ ID NO: 69185 - DNA, 25 bp, Saccharomyces pastorianus
gccttcctcgtcatctgaatttgaa

SEQ ID NO: 69186 - DNA, 25 bp, Saccharomyces pastorianus
aaggaccgtggaatcttggcagaga

SEQ ID NO: 69187 - DNA, 25 bp, Saccharomyces pastorianus
atagcgacaactccctctctaatat

SEQ ID NO: 69188 - DNA, 25 bp, Saccharomyces pastorianus
ccaccttccaccataaatcagagat

SEQ ID NO: 69189 - DNA, 25 bp, Saccharomyces pastorianus
gatttctttggcttcaacatccgtt

SEQ ID NO: 69190 - DNA, 25 bp, Saccharomyces pastorianus
tcagatggcatttcgttggtcaata

SEQ ID NO: 69191 - DNA, 25 bp, Saccharomyces pastorianus
tttagtcttgtctttaacctctcca

SEQ ID NO: 69192 - DNA, 25 bp, Saccharomyces pastorianus
atagtcacgtattccgccttgatcg

SEQ ID NO: 69193 - DNA, 25 bp, Saccharomyces pastorianus
actattccctgatttcgatagcgcc

SEQ ID NO: 69194 - DNA, 25 bp, Saccharomyces pastorianus
tacatctcctgtgtcatagtcacgt

SEQ ID NO: 69195 - DNA, 25 bp, Saccharomyces pastorianus
aaacgtcgtgcgtctccagggcggt

SEQ ID NO: 69196 - DNA, 25 bp, Saccharomyces pastorianus
ctgcgccagcaagaaaaacgtcgtg

SEQ ID NO: 69197 - DNA, 25 bp, Saccharomyces pastorianus
cgtgcgtctccagggcggtcttgca

SEQ ID NO: 69198 - DNA, 25 bp, Saccharomyces pastorianus
atgggcgattggaagggcagcgaca

SEQ ID NO: 69199 - DNA, 25 bp, Saccharomyces pastorianus
aaaacgtcgtgcgtctccagggcgg

SEQ ID NO: 69200 - DNA, 25 bp, Saccharomyces pastorianus
acgtcgtgcgtctccagggcggtct

SEQ ID NO: 69201 - DNA, 25 bp, Saccharomyces pastorianus
aagggcagcgacagctggcctgcgc

SEQ ID NO: 69202 - DNA, 25 bp, Saccharomyces pastorianus
gaaaaacgtcgtgcgtctccagggc

SEQ ID NO: 69203 - DNA, 25 bp, Saccharomyces pastorianus
gcaagaaaaacgtcgtgcgtctcca

SEQ ID NO: 69204 - DNA, 25 bp, Saccharomyces pastorianus
aagaaaaacgtcgtgcgtctccagg

SEQ ID NO: 69205 - DNA, 25 bp, Saccharomyces pastorianus
tggcctgcgccagcaagaaaaacgt

SEQ ID NO: 69206 - DNA, 25 bp, Saccharomyces pastorianus
accagccgtcgttgacgaatgctat

SEQ ID NO: 69207 - DNA, 25 bp, Saccharomyces pastorianus
gaatttcgtgttccaagtcgtcaac

SEQ ID NO: 69208 - DNA, 25 bp, Saccharomyces pastorianus
aaccctgaagttgtggagctgatgt

SEQ ID NO: 69209 - DNA, 25 bp, Saccharomyces pastorianus
gacagctgctttaatttccaaatcg

SEQ ID NO: 69210 - DNA, 25 bp, Saccharomyces pastorianus
gggactacaattatctcatgaccag

SEQ ID NO: 69211 - DNA, 25 bp, Saccharomyces pastorianus
gtgccgctatattatctggttcaac

SEQ ID NO: 69212 - DNA, 25 bp, Saccharomyces pastorianus
ctgtattggctggtgattttctctt

SEQ ID NO: 69213 - DNA, 25 bp, Saccharomyces pastorianus
ggcaacgctgctttcactaacaaga

SEQ ID NO: 69214 - DNA, 25 bp, Saccharomyces pastorianus
gaatacatccatcgatccagacaca

SEQ ID NO: 69215 - DNA, 25 bp, Saccharomyces pastorianus
agaggaaggccaaccggcaacgctg

SEQ ID NO: 69216 - DNA, 25 bp, Saccharomyces pastorianus
ccaaatcgtgtagatgtgccgctat

SEQ ID NO: 69217 - DNA, 25 bp, Saccharomyces pastorianus
ggcgagaaggccgagtactcccgtc

SEQ ID NO: 69218 - DNA, 25 bp, Saccharomyces pastorianus
acgattattatggtggtgccgccgg

SEQ ID NO: 69219 - DNA, 25 bp, Saccharomyces pastorianus
tgctaacgattattatggtggtgcc

SEQ ID NO: 69220 - DNA, 25 bp, Saccharomyces pastorianus
ctaacgattattatggtggtgccgc

SEQ ID NO: 69221 - DNA, 25 bp, Saccharomyces pastorianus
gtctgctaacgattattatggtggt

SEQ ID NO: 69222 - DNA, 25 bp, Saccharomyces pastorianus
attattatggtggtgccgccggcga

SEQ ID NO: 69223 - DNA, 25 bp, Saccharomyces pastorianus
cgattattatggtggtgccgccggc

SEQ ID NO: 69224 - DNA, 25 bp, Saccharomyces pastorianus
gagaaggccgagtactcccgtccct

SEQ ID NO: 69225 - DNA, 25 bp, Saccharomyces pastorianus
tattatggtggtgccgccggcgaga

SEQ ID NO: 69226 - DNA, 25 bp, Saccharomyces pastorianus
aacgattattatggtggtgccgccg

SEQ ID NO: 69227 - DNA, 25 bp, Saccharomyces pastorianus
gcgagaaggccgagtactcccgtcc

SEQ ID NO: 69228 - DNA, 25 bp, Saccharomyces pastorianus
aagtccgacattgcgcagggcgaga

SEQ ID NO: 69229 - DNA, 25 bp, Saccharomyces pastorianus
taagtcctcaattttctctgcatct

SEQ ID NO: 69230 - DNA, 25 bp, Saccharomyces pastorianus
ggaggtacctgcagaattcttccac

SEQ ID NO: 69231 - DNA, 25 bp, Saccharomyces pastorianus
aaaggttcatttcggtggcatacac

SEQ ID NO: 69232 - DNA, 25 bp, Saccharomyces pastorianus
tataagagaatctgcccttggcggg

SEQ ID NO: 69233 - DNA, 25 bp, Saccharomyces pastorianus
gaatctaccgccaagcttttggagt

SEQ ID NO: 69234 - DNA, 25 bp, Saccharomyces pastorianus
acactagtcattggtactcctttct

SEQ ID NO: 69235 - DNA, 25 bp, Saccharomyces pastorianus
gtttcatgaaacagcgctagtcccc

SEQ ID NO: 69236 - DNA, 25 bp, Saccharomyces pastorianus
gaaccatccggttccacgatgataa

SEQ ID NO: 69237 - DNA, 25 bp, Saccharomyces pastorianus
gataaaggccgcttgaatctaccgc

SEQ ID NO: 69238 - DNA, 25 bp, Saccharomyces pastorianus
gatactttattcgatgctttggcac

SEQ ID NO: 69239 - DNA, 25 bp, Saccharomyces pastorianus
gacgggcggtacaggtactgctact

SEQ ID NO: 69240 - DNA, 25 bp, Saccharomyces pastorianus
gtatactaaacccagacgaatgcgt

SEQ ID NO: 69241 - DNA, 25 bp, Saccharomyces pastorianus
caagagaagcatacgcctgcgacgg

SEQ ID NO: 69242 - DNA, 25 bp, Saccharomyces pastorianus
ataatttggaggacgcatgctctaa

SEQ ID NO: 69243 - DNA, 25 bp, Saccharomyces pastorianus
ttcatatggcgagctgtcgaacgtt

SEQ ID NO: 69244 - DNA, 25 bp, Saccharomyces pastorianus
gtcgaacgtttttctattggccaga

SEQ ID NO: 69245 - DNA, 25 bp, Saccharomyces pastorianus
agtcggccatggattgttttctgca

SEQ ID NO: 69246 - DNA, 25 bp, Saccharomyces pastorianus
acgaatgcgttgacttggtgctaaa

SEQ ID NO: 69247 - DNA, 25 bp, Saccharomyces pastorianus
tgttcatttgggacccgattttttg

SEQ ID NO: 69248 - DNA, 25 bp, Saccharomyces pastorianus
atgtgcaaacacctgatagcggagg

SEQ ID NO: 69249 - DNA, 25 bp, Saccharomyces pastorianus
ggtactgctactattgacgataact

SEQ ID NO: 69250 - DNA, 25 bp, Saccharomyces pastorianus
aacgatgaagctgatggctccgctg

SEQ ID NO: 69251 - DNA, 25 bp, Saccharomyces pastorianus
tggagaaaccatcctttttggacca

SEQ ID NO: 69252 - DNA, 25 bp, Saccharomyces pastorianus
gtgctacaggattttcaaccaagga

SEQ ID NO: 69253 - DNA, 25 bp, Saccharomyces pastorianus
agagccgccggcaggttacgtacca

SEQ ID NO: 69254 - DNA, 25 bp, Saccharomyces pastorianus
tattggtcgtggtgctacaggattt

SEQ ID NO: 69255 - DNA, 25 bp, Saccharomyces pastorianus
gaagctactgattttacgagacgga

SEQ ID NO: 69256 - DNA, 25 bp, Saccharomyces pastorianus
ggatgaacattccagaagctactga

SEQ ID NO: 69257 - DNA, 25 bp, Saccharomyces pastorianus
tttttggaccaagagccgccggcag

SEQ ID NO: 69258 - DNA, 25 bp, Saccharomyces pastorianus
gataccgcgaagacatcagctctaa

SEQ ID NO: 69259 - DNA, 25 bp, Saccharomyces pastorianus
ggctccgctgtgaaaacgcaatttg

SEQ ID NO: 69260 - DNA, 25 bp, Saccharomyces pastorianus
gaaagataccaaaacgataccgcga

SEQ ID NO: 69261 - DNA, 25 bp, Saccharomyces pastorianus
agcaactcttccaatgactaacgta

SEQ ID NO: 69262 - DNA, 25 bp, Saccharomyces pastorianus
ggaagatacgatgcagaatccattg

SEQ ID NO: 69263 - DNA, 25 bp, Saccharomyces pastorianus
gatagcattcttagagacccagttg

SEQ ID NO: 69264 - DNA, 25 bp, Saccharomyces pastorianus
gttcctttcaatcatgtagcaactc

SEQ ID NO: 69265 - DNA, 25 bp, Saccharomyces pastorianus
gacccagttggctatgaagatacct

SEQ ID NO: 69266 - DNA, 25 bp, Saccharomyces pastorianus
aacagcaatgagacgaattcgaaca

SEQ ID NO: 69267 - DNA, 25 bp, Saccharomyces pastorianus
ttgagttgcctgcttcattagaagt

SEQ ID NO: 69268 - DNA, 25 bp, Saccharomyces pastorianus
tagaaagctatcatcatcacttcat

SEQ ID NO: 69269 - DNA, 25 bp, Saccharomyces pastorianus
aagatgttggcctatggcaggtcaa

SEQ ID NO: 69270 - DNA, 25 bp, Saccharomyces pastorianus
actcaaatcgagctacagttgtcta

SEQ ID NO: 69271 - DNA, 25 bp, Saccharomyces pastorianus
tataccccaagcttttgagttgcct

SEQ ID NO: 69272 - DNA, 25 bp, Saccharomyces pastorianus
tgtagtatttttggcaccgttgcgt

SEQ ID NO: 69273 - DNA, 25 bp, Saccharomyces pastorianus
ttctgtcatttcagtgtccaactcc

SEQ ID NO: 69274 - DNA, 25 bp, Saccharomyces pastorianus
tgtcgcagcctcgtccaaggaagag

SEQ ID NO: 69275 - DNA, 25 bp, Saccharomyces pastorianus
gaatccaagaaagtcgacccctgtg

SEQ ID NO: 69276 - DNA, 25 bp, Saccharomyces pastorianus
aggtgcatttgctggtgactcttcg

SEQ ID NO: 69277 - DNA, 25 bp, Saccharomyces pastorianus
ggtcgtgtttacatggctagcagcc

SEQ ID NO: 69278 - DNA, 25 bp, Saccharomyces pastorianus
agattaatgtgctctttggcccagc

SEQ ID NO: 69279 - DNA, 25 bp, Saccharomyces pastorianus
cgcctatttttcgtttggtggtatg

SEQ ID NO: 69280 - DNA, 25 bp, Saccharomyces pastorianus
ggctagcagccatcgcaggtttgag

SEQ ID NO: 69281 - DNA, 25 bp, Saccharomyces pastorianus
atataccgtatcctcattatctacc

SEQ ID NO: 69282 - DNA, 25 bp, Saccharomyces pastorianus
gactcttcggcttccaggttcaaaa

SEQ ID NO: 69283 - DNA, 25 bp, Saccharomyces pastorianus
ttgtaggcacagtcaagaacccatt

SEQ ID NO: 69284 - DNA, 25 bp, Saccharomyces pastorianus
ttgtacgacgtcaacaactcaattg

SEQ ID NO: 69285 - DNA, 25 bp, Saccharomyces pastorianus
tgatttcgtcgccaagggtgttaat

SEQ ID NO: 69286 - DNA, 25 bp, Saccharomyces pastorianus
ttggctcatgccgtggtcaatgcaa

SEQ ID NO: 69287 - DNA, 25 bp, Saccharomyces pastorianus
aataacctggtcaagcaaatcgaaa

SEQ ID NO: 69288 - DNA, 25 bp, Saccharomyces pastorianus
gccttaaaatctcacggaggtgctc

SEQ ID NO: 69289 - DNA, 25 bp, Saccharomyces pastorianus
ccaaggacacccatgaacctggtta

SEQ ID NO: 69290 - DNA, 25 bp, Saccharomyces pastorianus
cttagtcgctacagtaagagcctta

SEQ ID NO: 69291 - DNA, 25 bp, Saccharomyces pastorianus
aaaggtgcattagacttggctcatg

SEQ ID NO: 69292 - DNA, 25 bp, Saccharomyces pastorianus
attgaacgcgggagcatctcatgcc

SEQ ID NO: 69293 - DNA, 25 bp, Saccharomyces pastorianus
taagccaggacaaccattaccaaag

SEQ ID NO: 69294 - DNA, 25 bp, Saccharomyces pastorianus
aaatacaacaataccttgtggaatc

SEQ ID NO: 69295 - DNA, 25 bp, Saccharomyces pastorianus
agtcaaatacaacaataccttgtgg

SEQ ID NO: 69296 - DNA, 25 bp, Saccharomyces pastorianus
gtcaaatacaacaataccttgtgga

SEQ ID NO: 69297 - DNA, 25 bp, Saccharomyces pastorianus
gcacaactaaaaagtcaaatacaac

SEQ ID NO: 69298 - DNA, 25 bp, Saccharomyces pastorianus
caaatacaacaataccttgtggaat

SEQ ID NO: 69299 - DNA, 25 bp, Saccharomyces pastorianus
aatacaacaataccttgtggaatca

SEQ ID NO: 69300 - DNA, 25 bp, Saccharomyces pastorianus
aaaagtcaaatacaacaataccttg

SEQ ID NO: 69301 - DNA, 25 bp, Saccharomyces pastorianus
aagtcaaatacaacaataccttgtg

SEQ ID NO: 69302 - DNA, 25 bp, Saccharomyces pastorianus
aaagtcaaatacaacaataccttgt

SEQ ID NO: 69303 - DNA, 25 bp, Saccharomyces pastorianus
tcaaatacaacaataccttgtggaa

SEQ ID NO: 69304 - DNA, 25 bp, Saccharomyces pastorianus
taaaaagtcaaatacaacaatacct

SEQ ID NO: 69305 - DNA, 25 bp, Saccharomyces pastorianus
ggctttgcttgttaaccctgaacta

SEQ ID NO: 69306 - DNA, 25 bp, Saccharomyces pastorianus
gcagaaactcttggcgacggtgatc

SEQ ID NO: 69307 - DNA, 25 bp, Saccharomyces pastorianus
gactgcggaaacatggctctccata

SEQ ID NO: 69308 - DNA, 25 bp, Saccharomyces pastorianus
cagaactctacgaaagggctttgct

SEQ ID NO: 69309 - DNA, 25 bp, Saccharomyces pastorianus
taccctgggccattgttatctgatg

SEQ ID NO: 69310 - DNA, 25 bp, Saccharomyces pastorianus
tgatcgggctgcaatggcgtatgat

SEQ ID NO: 69311 - DNA, 25 bp, Saccharomyces pastorianus
gagacatgtttcaaagggccgcaga

SEQ ID NO: 69312 - DNA, 25 bp, Saccharomyces pastorianus
tgccactttacaattcaatccctct

SEQ ID NO: 69313 - DNA, 25 bp, Saccharomyces pastorianus
tctccatagcttccttggcagaaac

SEQ ID NO: 69314 - DNA, 25 bp, Saccharomyces pastorianus
aactatcggacgtatgggctaccct

SEQ ID NO: 69315 - DNA, 25 bp, Saccharomyces pastorianus
aatgcctaccaacaagcgctatatc

SEQ ID NO: 69316 - DNA, 25 bp, Saccharomyces pastorianus
gccatatcgaatcaaacctctgcag

SEQ ID NO: 69317 - DNA, 25 bp, Saccharomyces pastorianus
aaatactgcttcttctatcgaggag

SEQ ID NO: 69318 - DNA, 25 bp, Saccharomyces pastorianus
agccagctaatgtacaaccgacttt

SEQ ID NO: 69319 - DNA, 25 bp, Saccharomyces pastorianus
tcctcccatggaatcgtctaacgtg

SEQ ID NO: 69320 - DNA, 25 bp, Saccharomyces pastorianus
gaattcaacgcctgagacgactaac

SEQ ID NO: 69321 - DNA, 25 bp, Saccharomyces pastorianus
taactccgagcattgaaccacgatc

SEQ ID NO: 69322 - DNA, 25 bp, Saccharomyces pastorianus
aggcaagttcaatcccttcaacaat

SEQ ID NO: 69323 - DNA, 25 bp, Saccharomyces pastorianus
aaacagaccctacagctgctgtgga

SEQ ID NO: 69324 - DNA, 25 bp, Saccharomyces pastorianus
atccatgctcaagaactctcacaag

SEQ ID NO: 69325 - DNA, 25 bp, Saccharomyces pastorianus
aagatgaatctctcgctacaacggc

SEQ ID NO: 69326 - DNA, 25 bp, Saccharomyces pastorianus
tagccctaccgaggaaactccagta

SEQ ID NO: 69327 - DNA, 25 bp, Saccharomyces pastorianus
gaactgcagcctgctgttgttgtac

SEQ ID NO: 69328 - DNA, 25 bp, Saccharomyces pastorianus
ggaactgcagcctgctgttgttgta

SEQ ID NO: 69329 - DNA, 25 bp, Saccharomyces pastorianus
actgcagcctgctgttgttgtacct

SEQ ID NO: 69330 - DNA, 25 bp, Saccharomyces pastorianus
ttgaggaactgcagcctgctgttgt

SEQ ID NO: 69331 - DNA, 25 bp, Saccharomyces pastorianus
tgcagcctgctgttgttgtacctgt

SEQ ID NO: 69332 - DNA, 25 bp, Saccharomyces pastorianus
gcagcctgctgttgttgtacctgtt

SEQ ID NO: 69333 - DNA, 25 bp, Saccharomyces pastorianus
tccagcggctgttgaggaactgcag

SEQ ID NO: 69334 - DNA, 25 bp, Saccharomyces pastorianus
agcctgctgttgttgtacctgttgc

SEQ ID NO: 69335 - DNA, 25 bp, Saccharomyces pastorianus
agcggctgttgaggaactgcagcct

SEQ ID NO: 69336 - DNA, 25 bp, Saccharomyces pastorianus
aactgcagcctgctgttgttgtacc

SEQ ID NO: 69337 - DNA, 25 bp, Saccharomyces pastorianus
gtccagcggctgttgaggaactgca

SEQ ID NO: 69338 - DNA, 25 bp, Saccharomyces pastorianus
gaactgcagcctgctgttgttgtac

SEQ ID NO: 69339 - DNA, 25 bp, Saccharomyces pastorianus
tcaccgcccggattcattttttctt

SEQ ID NO: 69340 - DNA, 25 bp, Saccharomyces pastorianus
actgcagcctgctgttgttgtacct

SEQ ID NO: 69341 - DNA, 25 bp, Saccharomyces pastorianus
ttgaggaactgcagcctgctgttgt

SEQ ID NO: 69342 - DNA, 25 bp, Saccharomyces pastorianus
tgcagcctgctgttgttgtacctgt

SEQ ID NO: 69343 - DNA, 25 bp, Saccharomyces pastorianus
gctgctgagcgggttgttccattat

SEQ ID NO: 69344 - DNA, 25 bp, Saccharomyces pastorianus
gcagcctgctgttgttgtacctgtt

SEQ ID NO: 69345 - DNA, 25 bp, Saccharomyces pastorianus
tccagcggctgttgaggaactgcag

SEQ ID NO: 69346 - DNA, 25 bp, Saccharomyces pastorianus
tccattattgtttgttcaccgcccg

SEQ ID NO: 69347 - DNA, 25 bp, Saccharomyces pastorianus
agcctgctgttgttgtacctgttgc

SEQ ID NO: 69348 - DNA, 25 bp, Saccharomyces pastorianus
gtccagcggctgttgaggaactgca

SEQ ID NO: 69349 - DNA, 25 bp, Saccharomyces pastorianus
tccaaacttggaattctaggtagat

SEQ ID NO: 69350 - DNA, 25 bp, Saccharomyces pastorianus
ctttttgtatactagcgtgctttgt

SEQ ID NO: 69351 - DNA, 25 bp, Saccharomyces pastorianus
caaacttggaattctaggtagatct

SEQ ID NO: 69352 - DNA, 25 bp, Saccharomyces pastorianus
ttgtatactagcgtgctttgtggag

SEQ ID NO: 69353 - DNA, 25 bp, Saccharomyces pastorianus
tggctttttgtatactagcgtgctt

SEQ ID NO: 69354 - DNA, 25 bp, Saccharomyces pastorianus
ttttgtatactagcgtgctttgtgg

SEQ ID NO: 69355 - DNA, 25 bp, Saccharomyces pastorianus
ggctttttgtatactagcgtgcttt

SEQ ID NO: 69356 - DNA, 25 bp, Saccharomyces pastorianus
gacattaagcggcaattccaaactt

SEQ ID NO: 69357 - DNA, 25 bp, Saccharomyces pastorianus
gctttttgtatactagcgtgctttg

SEQ ID NO: 69358 - DNA, 25 bp, Saccharomyces pastorianus
atggctttttgtatactagcgtgct

SEQ ID NO: 69359 - DNA, 25 bp, Saccharomyces pastorianus
ctagcgtgctttgtggagacattaa

SEQ ID NO: 69360 - DNA, 25 bp, Saccharomyces pastorianus
gaaacaggagcgcagcctatgcaaa

SEQ ID NO: 69361 - DNA, 25 bp, Saccharomyces pastorianus
gcaaacttccacacacaaacttcca

SEQ ID NO: 69362 - DNA, 25 bp, Saccharomyces pastorianus
gcagtatttcctatggagctcggaa

SEQ ID NO: 69363 - DNA, 25 bp, Saccharomyces pastorianus
gtatttcctatggagctcggaaaca

SEQ ID NO: 69364 - DNA, 25 bp, Saccharomyces pastorianus
aacaggagcgcagcctatgcaaaca

SEQ ID NO: 69365 - DNA, 25 bp, Saccharomyces pastorianus
gaagaagaggaacgcccgcaaactt

SEQ ID NO: 69366 - DNA, 25 bp, Saccharomyces pastorianus
acacgcaattgcagtatttcctatg

SEQ ID NO: 69367 - DNA, 25 bp, Saccharomyces pastorianus
attgcagtatttcctatggagctcg

SEQ ID NO: 69368 - DNA, 25 bp, Saccharomyces pastorianus
gcaattgcagtatttcctatggagc

SEQ ID NO: 69369 - DNA, 25 bp, Saccharomyces pastorianus
gctcggaaacaggagcgcagcctat

SEQ ID NO: 69370 - DNA, 25 bp, Saccharomyces pastorianus
cttccacacacgcaattgcagtatt

SEQ ID NO: 69371 - DNA, 25 bp, Saccharomyces pastorianus
ctaccccatttttggctacgtacag

SEQ ID NO: 69372 - DNA, 25 bp, Saccharomyces pastorianus
agtcttgaccatgggttcattcggt

SEQ ID NO: 69373 - DNA, 25 bp, Saccharomyces pastorianus
gaatctaactacgaatccatcaagg

SEQ ID NO: 69374 - DNA, 25 bp, Saccharomyces pastorianus
caggccaccgtggtttagtcttgac

SEQ ID NO: 69375 - DNA, 25 bp, Saccharomyces pastorianus
gtgtgcggaattaccaattaccgtt

SEQ ID NO: 69376 - DNA, 25 bp, Saccharomyces pastorianus
ggctacgtacagtggttctaaatct

SEQ ID NO: 69377 - DNA, 25 bp, Saccharomyces pastorianus
agttaacaacgtcggccaatcacat

SEQ ID NO: 69378 - DNA, 25 bp, Saccharomyces pastorianus
ttggtctaactccttagccggtgag

SEQ ID NO: 69379 - DNA, 25 bp, Saccharomyces pastorianus
actatcaacaacactgccacattat

SEQ ID NO: 69380 - DNA, 25 bp, Saccharomyces pastorianus
attcggtggattgattcctacccca

SEQ ID NO: 69381 - DNA, 25 bp, Saccharomyces pastorianus
atttggttactagttccatgtctaa

SEQ ID NO: 69382 - DNA, 25 bp, Saccharomyces pastorianus
acaagatgcacaccaactcgttttt

SEQ ID NO: 69383 - DNA, 25 bp, Saccharomyces pastorianus
agaagtgcgttgacttgcacccaga

SEQ ID NO: 69384 - DNA, 25 bp, Saccharomyces pastorianus
gactacacctatattctatggacgg

SEQ ID NO: 69385 - DNA, 25 bp, Saccharomyces pastorianus
tgtacctagacacccatttttctta

SEQ ID NO: 69386 - DNA, 25 bp, Saccharomyces pastorianus
ggtatgttccgtatatgaccatcat

SEQ ID NO: 69387 - DNA, 25 bp, Saccharomyces pastorianus
tagattctttgttgactgtgccggc

SEQ ID NO: 69388 - DNA, 25 bp, Saccharomyces pastorianus
aaagatggtcgaacacagccggtga

SEQ ID NO: 69389 - DNA, 25 bp, Saccharomyces pastorianus
gttctttcgcattacggtggtatct

SEQ ID NO: 69390 - DNA, 25 bp, Saccharomyces pastorianus
actgtgccggcattccttaggaaaa

SEQ ID NO: 69391 - DNA, 25 bp, Saccharomyces pastorianus
aactcgtttttctccatatctaaag

SEQ ID NO: 69392 - DNA, 25 bp, Saccharomyces pastorianus
taggaaaacctctcccacgggtgtg

SEQ ID NO: 69393 - DNA, 25 bp, Saccharomyces pastorianus
tattttgccgcaagactgtcacaga

SEQ ID NO: 69394 - DNA, 25 bp, Saccharomyces pastorianus
gacatggatcacctcctggatggaa

SEQ ID NO: 69395 - DNA, 25 bp, Saccharomyces pastorianus
gcgactacaaacacgtctgttcttg

SEQ ID NO: 69396 - DNA, 25 bp, Saccharomyces pastorianus
gacgcgcctatagattctacgaaga

SEQ ID NO: 69397 - DNA, 25 bp, Saccharomyces pastorianus
atttgctcgatcaaggttccacatc

SEQ ID NO: 69398 - DNA, 25 bp, Saccharomyces pastorianus
agcaatggtttggttcggtcacaga

SEQ ID NO: 69399 - DNA, 25 bp, Saccharomyces pastorianus
acccgcttttcgctaatgacatgga

SEQ ID NO: 69400 - DNA, 25 bp, Saccharomyces pastorianus
tttgccccatttgataacgacacca

SEQ ID NO: 69401 - DNA, 25 bp, Saccharomyces pastorianus
gaaatctcgtttccaatgacctgat

SEQ ID NO: 69402 - DNA, 25 bp, Saccharomyces pastorianus
accatattcccgtatgatccagtga

SEQ ID NO: 69403 - DNA, 25 bp, Saccharomyces pastorianus
tggaaaaccgatacactttgcccca

SEQ ID NO: 69404 - DNA, 25 bp, Saccharomyces pastorianus
agagccagtacctttaccagaagat

SEQ ID NO: 69405 - DNA, 25 bp, Saccharomyces pastorianus
gagtattctgattttgcatccgatg

SEQ ID NO: 69406 - DNA, 25 bp, Saccharomyces pastorianus
agaagatgctgaacctgtgtttgag

SEQ ID NO: 69407 - DNA, 25 bp, Saccharomyces pastorianus
gaagaactggcttcgttgggtaacg

SEQ ID NO: 69408 - DNA, 25 bp, Saccharomyces pastorianus
gaaacgtttggcttgaatccggttg

SEQ ID NO: 69409 - DNA, 25 bp, Saccharomyces pastorianus
aacactgacgaaaacatggatcttg

SEQ ID NO: 69410 - DNA, 25 bp, Saccharomyces pastorianus
aaatgcgctagctacgactgaagat

SEQ ID NO: 69411 - DNA, 25 bp, Saccharomyces pastorianus
acactcttcgtgctaaacttgatga

SEQ ID NO: 69412 - DNA, 25 bp, Saccharomyces pastorianus
atgacgacggtgaagattctaccaa

SEQ ID NO: 69413 - DNA, 25 bp, Saccharomyces pastorianus
ggcaaaatacgtcgccaaatatgaa

SEQ ID NO: 69414 - DNA, 25 bp, Saccharomyces pastorianus
gaatccggttgaactgaacaatcta

SEQ ID NO: 69415 - DNA, 25 bp, Saccharomyces pastorianus
gtattccggttctgaaacgatcgat

SEQ ID NO: 69416 - DNA, 25 bp, Saccharomyces pastorianus
taagaatgatctaccgggccctgag

SEQ ID NO: 69417 - DNA, 25 bp, Saccharomyces pastorianus
gacattgggcactctacctatactt

SEQ ID NO: 69418 - DNA, 25 bp, Saccharomyces pastorianus
gaaggtactctctgctaacaccaat

SEQ ID NO: 69419 - DNA, 25 bp, Saccharomyces pastorianus
tacctatacttgctccattctggat

SEQ ID NO: 69420 - DNA, 25 bp, Saccharomyces pastorianus
gtaccgcttacgacaaacactttgg

SEQ ID NO: 69421 - DNA, 25 bp, Saccharomyces pastorianus
ctcacagctgactcgcgaagaatta

SEQ ID NO: 69422 - DNA, 25 bp, Saccharomyces pastorianus
tgatattgacgtttcctcacagctg

SEQ ID NO: 69423 - DNA, 25 bp, Saccharomyces pastorianus
gtaaaccattgtcttccactttgaa

SEQ ID NO: 69424 - DNA, 25 bp, Saccharomyces pastorianus
gatcgatttctgatgcctttggtaa

SEQ ID NO: 69425 - DNA, 25 bp, Saccharomyces pastorianus
gtgcaatcacggaacatttcgctga

SEQ ID NO: 69426 - DNA, 25 bp, Saccharomyces pastorianus
gtggtctctccatatattgcagaat

SEQ ID NO: 69427 - DNA, 25 bp, Saccharomyces pastorianus
gaaaactctgtatctggcttttggg

SEQ ID NO: 69428 - DNA, 25 bp, Saccharomyces pastorianus
aacctcgaccatcgactggtgcgaa

SEQ ID NO: 69429 - DNA, 25 bp, Saccharomyces pastorianus
ccatcgactggtgcgaagagaacta

SEQ ID NO: 69430 - DNA, 25 bp, Saccharomyces pastorianus
cactctcacaaacagtgtgtttata

SEQ ID NO: 69431 - DNA, 25 bp, Saccharomyces pastorianus
gagaactatgtggtctctccatata

SEQ ID NO: 69432 - DNA, 25 bp, Saccharomyces pastorianus
gaatggtcaaacactctcacaaaca

SEQ ID NO: 69433 - DNA, 25 bp, Saccharomyces pastorianus
gttgggattatccagaaaactctgt

SEQ ID NO: 69434 - DNA, 25 bp, Saccharomyces pastorianus
gggaagatttcgttgggattatcca

SEQ ID NO: 69435 - DNA, 25 bp, Saccharomyces pastorianus
gtgtttatactttcagccgtatata

SEQ ID NO: 69436 - DNA, 25 bp, Saccharomyces pastorianus
gggcgaaacaacctcgaccatcgac

SEQ ID NO: 69437 - DNA, 25 bp, Saccharomyces pastorianus
ttatcagcttggtctaaattgcaaa

SEQ ID NO: 69438 - DNA, 25 bp, Saccharomyces pastorianus
atcagcttggtctaaattgcaaaaa

SEQ ID NO: 69439 - DNA, 25 bp, Saccharomyces pastorianus
gaattatcagcttggtctaaattgc

SEQ ID NO: 69440 - DNA, 25 bp, Saccharomyces pastorianus
tatcagcttggtctaaattgcaaaa

SEQ ID NO: 69441 - DNA, 25 bp, Saccharomyces pastorianus
actgaattatcagcttggtctaaat

SEQ ID NO: 69442 - DNA, 25 bp, Saccharomyces pastorianus
tcagcttggtctaaattgcaaaaaa

SEQ ID NO: 69443 - DNA, 25 bp, Saccharomyces pastorianus
aattatcagcttggtctaaattgca

SEQ ID NO: 69444 - DNA, 25 bp, Saccharomyces pastorianus
attatcagcttggtctaaattgcaa

SEQ ID NO: 69445 - DNA, 25 bp, Saccharomyces pastorianus
ccactgaattatcagcttggtctaa

SEQ ID NO: 69446 - DNA, 25 bp, Saccharomyces pastorianus
gccactgaattatcagcttggtcta

SEQ ID NO: 69447 - DNA, 25 bp, Saccharomyces pastorianus
ctgaattatcagcttggtctaaatt

SEQ ID NO: 69448 - DNA, 25 bp, Saccharomyces pastorianus
tggctatggtatgcaatcacaactg

SEQ ID NO: 69449 - DNA, 25 bp, Saccharomyces pastorianus
gtttacgaactatccacgactcatt

SEQ ID NO: 69450 - DNA, 25 bp, Saccharomyces pastorianus
gtgttcaagtcaatcgccagttacg

SEQ ID NO: 69451 - DNA, 25 bp, Saccharomyces pastorianus
taagatttaccaccccttcattata

SEQ ID NO: 69452 - DNA, 25 bp, Saccharomyces pastorianus
cgactcattcactacagacgctaag

SEQ ID NO: 69453 - DNA, 25 bp, Saccharomyces pastorianus
gatgttctcaagatatgtcccttcc

SEQ ID NO: 69454 - DNA, 25 bp, Saccharomyces pastorianus
agctttgttgcaggttctacttatt

SEQ ID NO: 69455 - DNA, 25 bp, Saccharomyces pastorianus
gctgtccatgaatgctgtttacgaa

SEQ ID NO: 69456 - DNA, 25 bp, Saccharomyces pastorianus
gatctttcaaggcaacgcgtttcca

SEQ ID NO: 69457 - DNA, 25 bp, Saccharomyces pastorianus
agactactatgtttggttcccgaga

SEQ ID NO: 69458 - DNA, 25 bp, Saccharomyces pastorianus
gttcccgagaacgttgcatttgact

SEQ ID NO: 69459 - DNA, 25 bp, Saccharomyces pastorianus
cactcattgatcctctttacactga

SEQ ID NO: 69460 - DNA, 25 bp, Saccharomyces pastorianus
atcgttgtgccacctgttcagcgac

SEQ ID NO: 69461 - DNA, 25 bp, Saccharomyces pastorianus
tacactgatcgccatctgacttctt

SEQ ID NO: 69462 - DNA, 25 bp, Saccharomyces pastorianus
gtcatcgtccttaccatttgtagtt

SEQ ID NO: 69463 - DNA, 25 bp, Saccharomyces pastorianus
ttttttccagcatctgcactatacc

SEQ ID NO: 69464 - DNA, 25 bp, Saccharomyces pastorianus
tttcttttggcaccactcattgatc

SEQ ID NO: 69465 - DNA, 25 bp, Saccharomyces pastorianus
atctgcactatacctgaaactcttc

SEQ ID NO: 69466 - DNA, 25 bp, Saccharomyces pastorianus
gacctcagatctctttcttttggca

SEQ ID NO: 69467 - DNA, 25 bp, Saccharomyces pastorianus
atgacacagtcgtcatcgtccttac

SEQ ID NO: 69468 - DNA, 25 bp, Saccharomyces pastorianus
gacttcttgtcatcgttattcttgt

SEQ ID NO: 69469 - DNA, 25 bp, Saccharomyces pastorianus
tgaaactcttccatcgttgtgccac

SEQ ID NO: 69470 - DNA, 25 bp, Saccharomyces pastorianus
acgttttactgcgaacctagttcat

SEQ ID NO: 69471 - DNA, 25 bp, Saccharomyces pastorianus
cagttctctgttgcccaggtatgaa

SEQ ID NO: 69472 - DNA, 25 bp, Saccharomyces pastorianus
agatgatcctccattatattcgatg

SEQ ID NO: 69473 - DNA, 25 bp, Saccharomyces pastorianus
atgaaacctctttgacagtagcaca

SEQ ID NO: 69474 - DNA, 25 bp, Saccharomyces pastorianus
caaggatatattgccggaaccctat

SEQ ID NO: 69475 - DNA, 25 bp, Saccharomyces pastorianus
tgacgacgttgttattccaaactac

SEQ ID NO: 69476 - DNA, 25 bp, Saccharomyces pastorianus
tatcccaattatgttgctctcaaag

SEQ ID NO: 69477 - DNA, 25 bp, Saccharomyces pastorianus
attaattgagatcggcacgcctttc

SEQ ID NO: 69478 - DNA, 25 bp, Saccharomyces pastorianus
gtatacgggttttgctttgacgacg

SEQ ID NO: 69479 - DNA, 25 bp, Saccharomyces pastorianus
acgcctttccaaatgatcctgtcga

SEQ ID NO: 69480 - DNA, 25 bp, Saccharomyces pastorianus
aactacaccgaaggtctaccgagct

SEQ ID NO: 69481 - DNA, 25 bp, Saccharomyces pastorianus
cctatggatattttgctgccgattc

SEQ ID NO: 69482 - DNA, 25 bp, Saccharomyces pastorianus
taagtaatgatatggccgccttgca

SEQ ID NO: 69483 - DNA, 25 bp, Saccharomyces pastorianus
ttgcaattccattccgacgaacatg

SEQ ID NO: 69484 - DNA, 25 bp, Saccharomyces pastorianus
aggctacgataatgttttcccactt

SEQ ID NO: 69485 - DNA, 25 bp, Saccharomyces pastorianus
gagtgaaaccagatctttttgcaaa

SEQ ID NO: 69486 - DNA, 25 bp, Saccharomyces pastorianus
gtaacagtgatacctgcatgacaca

SEQ ID NO: 69487 - DNA, 25 bp, Saccharomyces pastorianus
gattatgcgagtcattaggctacga

SEQ ID NO: 69488 - DNA, 25 bp, Saccharomyces pastorianus
atctggtagtatttccatcatcaag

SEQ ID NO: 69489 - DNA, 25 bp, Saccharomyces pastorianus
tacgcagcctgtcggcaatgagtta

SEQ ID NO: 69490 - DNA, 25 bp, Saccharomyces pastorianus
gagatattatcttacttcccaacca

SEQ ID NO: 69491 - DNA, 25 bp, Saccharomyces pastorianus
aatactcagcgtgcattttccatat

SEQ ID NO: 69492 - DNA, 25 bp, Saccharomyces pastorianus
aaagggtcgcggcactaatccaggt

SEQ ID NO: 69493 - DNA, 25 bp, Saccharomyces pastorianus
aaatcgcctattaccttcttcatag

SEQ ID NO: 69494 - DNA, 25 bp, Saccharomyces pastorianus
aggaccatttgcttttctccatgga

SEQ ID NO: 69495 - DNA, 25 bp, Saccharomyces pastorianus
ggaagcaactgcttgcgtctccaga

SEQ ID NO: 69496 - DNA, 25 bp, Saccharomyces pastorianus
tttggcgaccgttcgtaacctcaat

SEQ ID NO: 69497 - DNA, 25 bp, Saccharomyces pastorianus
acccttttggtagtcgcaaactctg

SEQ ID NO: 69498 - DNA, 25 bp, Saccharomyces pastorianus
aaactctgcttggaggtttctcgcc

SEQ ID NO: 69499 - DNA, 25 bp, Saccharomyces pastorianus
tgcgtctccagagaatgtctcctga

SEQ ID NO: 69500 - DNA, 25 bp, Saccharomyces pastorianus
gacgcaaaccaggatacccttttgg

SEQ ID NO: 69501 - DNA, 25 bp, Saccharomyces pastorianus
atagcaacgtcgacttccaaagggt

SEQ ID NO: 69502 - DNA, 25 bp, Saccharomyces pastorianus
tacaggctgggtgctgacgcaaacc

SEQ ID NO: 69503 - DNA, 25 bp, Saccharomyces pastorianus
gcctcatttagcagtgtcggtatca

SEQ ID NO: 69504 - DNA, 25 bp, Saccharomyces pastorianus
gttctcgtactttggagtccctcat

SEQ ID NO: 69505 - DNA, 25 bp, Saccharomyces pastorianus
tccagagtggacctgatcttcttgt

SEQ ID NO: 69506 - DNA, 25 bp, Saccharomyces pastorianus
tttaacctctccacttgtaacttgg

SEQ ID NO: 69507 - DNA, 25 bp, Saccharomyces pastorianus
gttagtctttgacttttctgtctca

SEQ ID NO: 69508 - DNA, 25 bp, Saccharomyces pastorianus
gatcttcttgttgtccaggtcttgt

SEQ ID NO: 69509 - DNA, 25 bp, Saccharomyces pastorianus
acttggttcttttcctctcagcagt

SEQ ID NO: 69510 - DNA, 25 bp, Saccharomyces pastorianus
aggtcttgtttgcttgcctcattta

SEQ ID NO: 69511 - DNA, 25 bp, Saccharomyces pastorianus
tttcactgcttttgtttaacctctc

SEQ ID NO: 69512 - DNA, 25 bp, Saccharomyces pastorianus
tttctgtctcaatctgttctcgtac

SEQ ID NO: 69513 - DNA, 25 bp, Saccharomyces pastorianus
tcagcagtgctgattggcctctttt

SEQ ID NO: 69514 - DNA, 25 bp, Saccharomyces pastorianus
tgaagacacacaccagggccgtaca

SEQ ID NO: 69515 - DNA, 25 bp, Saccharomyces pastorianus
ttggacacaactcgtccttagaaaa

SEQ ID NO: 69516 - DNA, 25 bp, Saccharomyces pastorianus
acaccagggccgtacacgttatctt

SEQ ID NO: 69517 - DNA, 25 bp, Saccharomyces pastorianus
gggcccaagttagccaattgccaat

SEQ ID NO: 69518 - DNA, 25 bp, Saccharomyces pastorianus
gcatcagggatgattttctcccagg

SEQ ID NO: 69519 - DNA, 25 bp, Saccharomyces pastorianus
attgccaatctgtgacaaatgcatc

SEQ ID NO: 69520 - DNA, 25 bp, Saccharomyces pastorianus
aaatgaagacacacaccagggccgt

SEQ ID NO: 69521 - DNA, 25 bp, Saccharomyces pastorianus
agttagccaattgccaatctgtgac

SEQ ID NO: 69522 - DNA, 25 bp, Saccharomyces pastorianus
gccaattgccaatctgtgacaaatg

SEQ ID NO: 69523 - DNA, 25 bp, Saccharomyces pastorianus
gcccaagttagccaattgccaatct

SEQ ID NO: 69524 - DNA, 25 bp, Saccharomyces pastorianus
gacacaactcgtccttagaaaaagt

SEQ ID NO: 69525 - DNA, 25 bp, Saccharomyces pastorianus
tcaatacttgtttggtaatgatgta

SEQ ID NO: 69526 - DNA, 25 bp, Saccharomyces pastorianus
atgatgtatggaatactccgtacta

SEQ ID NO: 69527 - DNA, 25 bp, Saccharomyces pastorianus
ctatttttactgtgataaggattgt

SEQ ID NO: 69528 - DNA, 25 bp, Saccharomyces pastorianus
cgtactatttttactgtgataagga

SEQ ID NO: 69529 - DNA, 25 bp, Saccharomyces pastorianus
acttgtttggtaatgatgtatggaa

SEQ ID NO: 69530 - DNA, 25 bp, Saccharomyces pastorianus
gtactatttttactgtgataaggat

SEQ ID NO: 69531 - DNA, 25 bp, Saccharomyces pastorianus
gatgtatggaatactccgtactatt

SEQ ID NO: 69532 - DNA, 25 bp, Saccharomyces pastorianus
atgtatggaatactccgtactattt

SEQ ID NO: 69533 - DNA, 25 bp, Saccharomyces pastorianus
tgatgtatggaatactccgtactat

SEQ ID NO: 69534 - DNA, 25 bp, Saccharomyces pastorianus
ttactgtgataaggattgtaacgat

SEQ ID NO: 69535 - DNA, 25 bp, Saccharomyces pastorianus
aatgatgtatggaatactccgtact

SEQ ID NO: 69536 - DNA, 25 bp, Saccharomyces pastorianus
gaaaattattcgctgccactgtcgc

SEQ ID NO: 69537 - DNA, 25 bp, Saccharomyces pastorianus
ataccgctaccgtcgctaagaagta

SEQ ID NO: 69538 - DNA, 25 bp, Saccharomyces pastorianus
cattggtggtggtgataccgctacc

SEQ ID NO: 69539 - DNA, 25 bp, Saccharomyces pastorianus
aagtccttgttggacgaagtcgtca

SEQ ID NO: 69540 - DNA, 25 bp, Saccharomyces pastorianus
tcgctgccactgtcgcaaaggctaa

SEQ ID NO: 69541 - DNA, 25 bp, Saccharomyces pastorianus
aagtcgtcttaccagtcgatttcgt

SEQ ID NO: 69542 - DNA, 25 bp, Saccharomyces pastorianus
acttctggtaacactgtcatcattg

SEQ ID NO: 69543 - DNA, 25 bp, Saccharomyces pastorianus
ctctttcctcacttctagactaaaa

SEQ ID NO: 69544 - DNA, 25 bp, Saccharomyces pastorianus
aagaaattctttcctcacttcacgc

SEQ ID NO: 69545 - DNA, 25 bp, Saccharomyces pastorianus
gtcgtcaagagttccacttctggta

SEQ ID NO: 69546 - DNA, 25 bp, Saccharomyces pastorianus
aagttcgccgctggtaccaagtcct

SEQ ID NO: 69547 - DNA, 25 bp, Saccharomyces pastorianus
gaaatagctccctcaaagaattgtg

SEQ ID NO: 69548 - DNA, 25 bp, Saccharomyces pastorianus
gatgggtctactacttcttcaaaaa

SEQ ID NO: 69549 - DNA, 25 bp, Saccharomyces pastorianus
actacccgcggctctgaaagagtta

SEQ ID NO: 69550 - DNA, 25 bp, Saccharomyces pastorianus
gaattgtgcaaatactacccgcggc

SEQ ID NO: 69551 - DNA, 25 bp, Saccharomyces pastorianus
tagaaacagtcagggccaaggccaa

SEQ ID NO: 69552 - DNA, 25 bp, Saccharomyces pastorianus
agggagctttgcagtccatgtggac

SEQ ID NO: 69553 - DNA, 25 bp, Saccharomyces pastorianus
ttcagtggcgaagtggtcctgcaca

SEQ ID NO: 69554 - DNA, 25 bp, Saccharomyces pastorianus
aaataaggacattggcggctggaaa

SEQ ID NO: 69555 - DNA, 25 bp, Saccharomyces pastorianus
gtccatgtggactcgcgtatggtaa

SEQ ID NO: 69556 - DNA, 25 bp, Saccharomyces pastorianus
tgttcctcacatgaaatagctccct

SEQ ID NO: 69557 - DNA, 25 bp, Saccharomyces pastorianus
gacaaactgttcttccaaacggtga

SEQ ID NO: 69558 - DNA, 25 bp, Saccharomyces pastorianus
atgtgtatgcgtatctccacacggt

SEQ ID NO: 69559 - DNA, 25 bp, Saccharomyces pastorianus
tccgctttggctttgtatgtgtcca

SEQ ID NO: 69560 - DNA, 25 bp, Saccharomyces pastorianus
ttttttctatgttgctgtctcgttc

SEQ ID NO: 69561 - DNA, 25 bp, Saccharomyces pastorianus
ggtccgattggtctcgtctaagaaa

SEQ ID NO: 69562 - DNA, 25 bp, Saccharomyces pastorianus
cagccgctaactaccagggtgggat

SEQ ID NO: 69563 - DNA, 25 bp, Saccharomyces pastorianus
ggattctattccaaagtctcaccat

SEQ ID NO: 69564 - DNA, 25 bp, Saccharomyces pastorianus
atgactttaagttccgtaatcggcg

SEQ ID NO: 69565 - DNA, 25 bp, Saccharomyces pastorianus
tattttcacccatacggtccgattg

SEQ ID NO: 69566 - DNA, 25 bp, Saccharomyces pastorianus
taaggaattccctaaccgcgatgga

SEQ ID NO: 69567 - DNA, 25 bp, Saccharomyces pastorianus
tcgttctccctgtctattattttca

SEQ ID NO: 69568 - DNA, 25 bp, Saccharomyces pastorianus
tcggaatctcttacttgtttggcct

SEQ ID NO: 69569 - DNA, 25 bp, Saccharomyces pastorianus
gcagtttctgggacaccgattcaag

SEQ ID NO: 69570 - DNA, 25 bp, Saccharomyces pastorianus
acctctgtttccacatcacggatga

SEQ ID NO: 69571 - DNA, 25 bp, Saccharomyces pastorianus
ccatcgaatgcactttccaggaatt

SEQ ID NO: 69572 - DNA, 25 bp, Saccharomyces pastorianus
aagacacgcacaactggcgcagttt

SEQ ID NO: 69573 - DNA, 25 bp, Saccharomyces pastorianus
gagccctggcggaattaacgctgat

SEQ ID NO: 69574 - DNA, 25 bp, Saccharomyces pastorianus
aattgcagatctggtgtcccatcga

SEQ ID NO: 69575 - DNA, 25 bp, Saccharomyces pastorianus
ggatccgcaacgtgtgctgcaattg

SEQ ID NO: 69576 - DNA, 25 bp, Saccharomyces pastorianus
acaagaaccacacgctgtacagctg

SEQ ID NO: 69577 - DNA, 25 bp, Saccharomyces pastorianus
gacgtcgagttcactgacatcttcc

SEQ ID NO: 69578 - DNA, 25 bp, Saccharomyces pastorianus
tacagagccaggacctcgacggaag

SEQ ID NO: 69579 - DNA, 25 bp, Saccharomyces pastorianus
gcgtactttttcaaccgcacaagcg

SEQ ID NO: 69580 - DNA, 25 bp, Saccharomyces pastorianus
tacttcgaccagtacactacgtttt

SEQ ID NO: 69581 - DNA, 25 bp, Saccharomyces pastorianus
ggaagagtacatcccggacctgaac

SEQ ID NO: 69582 - DNA, 25 bp, Saccharomyces pastorianus
gtacgcccaggtaaacaccctagcg

SEQ ID NO: 69583 - DNA, 25 bp, Saccharomyces pastorianus
ggcattcggcagactcggcgagtct

SEQ ID NO: 69584 - DNA, 25 bp, Saccharomyces pastorianus
tagcgacgcccacgcagttcgagca

SEQ ID NO: 69585 - DNA, 25 bp, Saccharomyces pastorianus
aaagaaacaagcaccacctcgccga

SEQ ID NO: 69586 - DNA, 25 bp, Saccharomyces pastorianus
gcggcaaaacacagcccagaaccgg

SEQ ID NO: 69587 - DNA, 25 bp, Saccharomyces pastorianus
tgcgcgaatgcgtaccgatcccgta

SEQ ID NO: 69588 - DNA, 25 bp, Saccharomyces pastorianus
gcaccacccctcagggaagagtaca

SEQ ID NO: 69589 - DNA, 25 bp, Saccharomyces pastorianus
agtcgttctaccagcgggcattcgg

SEQ ID NO: 69590 - DNA, 25 bp, Saccharomyces pastorianus
agttcgagcatctgcagtcgttcta

SEQ ID NO: 69591 - DNA, 25 bp, Saccharomyces pastorianus
ggttgttcgaactctctagcattaa

SEQ ID NO: 69592 - DNA, 25 bp, Saccharomyces pastorianus
tttatgcctgcagtttggacaatta

SEQ ID NO: 69593 - DNA, 25 bp, Saccharomyces pastorianus
attcattgccttaccaatcggtacc

SEQ ID NO: 69594 - DNA, 25 bp, Saccharomyces pastorianus
ccaccgccggtggtttatactattg

SEQ ID NO: 69595 - DNA, 25 bp, Saccharomyces pastorianus
aattctgcctagctggttttatgcc

SEQ ID NO: 69596 - DNA, 25 bp, Saccharomyces pastorianus
gctgccgtcaccttgaccaaagatg

SEQ ID NO: 69597 - DNA, 25 bp, Saccharomyces pastorianus
gtttccaacgtgtttatcattgtct

SEQ ID NO: 69598 - DNA, 25 bp, Saccharomyces pastorianus
ggaataacggctggcaattctgcct

SEQ ID NO: 69599 - DNA, 25 bp, Saccharomyces pastorianus
gggcattgctcgtttacaaacactg

SEQ ID NO: 69600 - DNA, 25 bp, Saccharomyces pastorianus
tatttgtacatgtattgcctccggg

SEQ ID NO: 69601 - DNA, 25 bp, Saccharomyces pastorianus
cagctggtgtgtgttcaatcaatta

SEQ ID NO: 69602 - DNA, 25 bp, Saccharomyces pastorianus
tcatcttcaggtgttgtttcgccaa

SEQ ID NO: 69603 - DNA, 25 bp, Saccharomyces pastorianus
atgtgctgcagcaaactggcttgta

SEQ ID NO: 69604 - DNA, 25 bp, Saccharomyces pastorianus
aagaatagtctcattgctgcacaaa

SEQ ID NO: 69605 - DNA, 25 bp, Saccharomyces pastorianus
tatatcgtggacactggctctcata

SEQ ID NO: 69606 - DNA, 25 bp, Saccharomyces pastorianus
tatccattgggcgtgaggtctaagt

SEQ ID NO: 69607 - DNA, 25 bp, Saccharomyces pastorianus
gtcgcaattgttggttgttccttaa

SEQ ID NO: 69608 - DNA, 25 bp, Saccharomyces pastorianus
gatgaccaaacaccaaggactctag

SEQ ID NO: 69609 - DNA, 25 bp, Saccharomyces pastorianus
tggctctcatacatcgtcattaggc

SEQ ID NO: 69610 - DNA, 25 bp, Saccharomyces pastorianus
attcatagcttctttttctgccact

SEQ ID NO: 69611 - DNA, 25 bp, Saccharomyces pastorianus
tgtcgtttgggtcatctctgcagaa

SEQ ID NO: 69612 - DNA, 25 bp, Saccharomyces pastorianus
aagtgtaccgctatatgtgctgcag

SEQ ID NO: 69613 - DNA, 25 bp, Saccharomyces pastorianus
tcacattgtctcttttccagtttag

SEQ ID NO: 69614 - DNA, 25 bp, Saccharomyces pastorianus
ttccagtttagcacgttctaaggct

SEQ ID NO: 69615 - DNA, 25 bp, Saccharomyces pastorianus
atgtgcttgtatttggagtgttcaa

SEQ ID NO: 69616 - DNA, 25 bp, Saccharomyces pastorianus
gtttagcacgttctaaggcttctct

SEQ ID NO: 69617 - DNA, 25 bp, Saccharomyces pastorianus
tttcacattgtctcttttccagttt

SEQ ID NO: 69618 - DNA, 25 bp, Saccharomyces pastorianus
cttttccagtttagcacgttctaag

SEQ ID NO: 69619 - DNA, 25 bp, Saccharomyces pastorianus
agcacgttctaaggcttctcttttt

SEQ ID NO: 69620 - DNA, 25 bp, Saccharomyces pastorianus
aacctgatatgtttctatgtgcttg

SEQ ID NO: 69621 - DNA, 25 bp, Saccharomyces pastorianus
gatttttcacattgtctcttttcca

SEQ ID NO: 69622 - DNA, 25 bp, Saccharomyces pastorianus
gttcaaatttgttgatttttcacat

SEQ ID NO: 69623 - DNA, 25 bp, Saccharomyces pastorianus
atgtttctatgtgcttgtatttgga

SEQ ID NO: 69624 - DNA, 25 bp, Saccharomyces pastorianus
aaacgcagggctaaacagtatcaag

SEQ ID NO: 69625 - DNA, 25 bp, Saccharomyces pastorianus
agaagttatcccaacgactttagct

SEQ ID NO: 69626 - DNA, 25 bp, Saccharomyces pastorianus
gcaagaccaaccgtttccgttgtca

SEQ ID NO: 69627 - DNA, 25 bp, Saccharomyces pastorianus
gatagttaagctgaccggcataaga

SEQ ID NO: 69628 - DNA, 25 bp, Saccharomyces pastorianus
gtggtgccaacaacatgattatcga

SEQ ID NO: 69629 - DNA, 25 bp, Saccharomyces pastorianus
tttccgttgtcatccgtggtgccaa

SEQ ID NO: 69630 - DNA, 25 bp, Saccharomyces pastorianus
gcattatgtgttatccgttgtttgg

SEQ ID NO: 69631 - DNA, 25 bp, Saccharomyces pastorianus
gagccatggaaggtgtacaagcatt

SEQ ID NO: 69632 - DNA, 25 bp, Saccharomyces pastorianus
acagaacgttctttgcatgatgcat

SEQ ID NO: 69633 - DNA, 25 bp, Saccharomyces pastorianus
aaagaaagaggtttgatcgccggtg

SEQ ID NO: 69634 - DNA, 25 bp, Saccharomyces pastorianus
gagtttgcctctgcattagaagtta

SEQ ID NO: 69635 - DNA, 25 bp, Saccharomyces pastorianus
attagcgacgaggacgacggcgaca

SEQ ID NO: 69636 - DNA, 25 bp, Saccharomyces pastorianus
agaacttgcggccaatcgctgaaaa

SEQ ID NO: 69637 - DNA, 25 bp, Saccharomyces pastorianus
gacgacgaagtcatgcagcgccata

SEQ ID NO: 69638 - DNA, 25 bp, Saccharomyces pastorianus
aaatcaggttatccccaagctaagc

SEQ ID NO: 69639 - DNA, 25 bp, Saccharomyces pastorianus
tgactaccaacgacactaccaaaga

SEQ ID NO: 69640 - DNA, 25 bp, Saccharomyces pastorianus
tcaagggttacgaagccaagctgtc

SEQ ID NO: 69641 - DNA, 25 bp, Saccharomyces pastorianus
tgattacggttctgttccccaagtg

SEQ ID NO: 69642 - DNA, 25 bp, Saccharomyces pastorianus
cgtcctcagggacattatcgacatt

SEQ ID NO: 69643 - DNA, 25 bp, Saccharomyces pastorianus
caagtgcacgctccgattatcgaaa

SEQ ID NO: 69644 - DNA, 25 bp, Saccharomyces pastorianus
agccggagactgacgcagacttcaa

SEQ ID NO: 69645 - DNA, 25 bp, Saccharomyces pastorianus
gggcatatcaagcaactgactacca

SEQ ID NO: 69646 - DNA, 25 bp, Saccharomyces pastorianus
gagcccatcaactggtcatggaagg

SEQ ID NO: 69647 - DNA, 25 bp, Saccharomyces pastorianus
gaaggttatgcctggactcatcaac

SEQ ID NO: 69648 - DNA, 25 bp, Saccharomyces pastorianus
aacaaaacgtagtcaccatctttag

SEQ ID NO: 69649 - DNA, 25 bp, Saccharomyces pastorianus
tagcaagagcccatcaactggtcat

SEQ ID NO: 69650 - DNA, 25 bp, Saccharomyces pastorianus
ggttatgcctggactcatcaacaaa

SEQ ID NO: 69651 - DNA, 25 bp, Saccharomyces pastorianus
catctttagtgctcccaattactgt

SEQ ID NO: 69652 - DNA, 25 bp, Saccharomyces pastorianus
tcatggaaggttatgcctggactca

SEQ ID NO: 69653 - DNA, 25 bp, Saccharomyces pastorianus
tagtgctcccaattactgttataga

SEQ ID NO: 69654 - DNA, 25 bp, Saccharomyces pastorianus
tagtcaccatctttagtgctcccaa

SEQ ID NO: 69655 - DNA, 25 bp, Saccharomyces pastorianus
actaatagcaagagcccatcaactg

SEQ ID NO: 69656 - DNA, 25 bp, Saccharomyces pastorianus
gcctggactcatcaacaaaacgtag

SEQ ID NO: 69657 - DNA, 25 bp, Saccharomyces pastorianus
gaacaatttgccaattctttctttg

SEQ ID NO: 69658 - DNA, 25 bp, Saccharomyces pastorianus
acttggccagagtgcgcgaagtctt

SEQ ID NO: 69659 - DNA, 25 bp, Saccharomyces pastorianus
gtattcccacggtaagactgaacta

SEQ ID NO: 69660 - DNA, 25 bp, Saccharomyces pastorianus
acggtaagactgaactacttggcca

SEQ ID NO: 69661 - DNA, 25 bp, Saccharomyces pastorianus
gtgcgcgaagtcttgagttgtcaat

SEQ ID NO: 69662 - DNA, 25 bp, Saccharomyces pastorianus
caactgattgattcaaccctaagag

SEQ ID NO: 69663 - DNA, 25 bp, Saccharomyces pastorianus
cgaagtcttgagttgtcaattcagg

SEQ ID NO: 69664 - DNA, 25 bp, Saccharomyces pastorianus
gaactacttggccagagtgcgcgaa

SEQ ID NO: 69665 - DNA, 25 bp, Saccharomyces pastorianus
ttccaacgtcaagaatttccaactg

SEQ ID NO: 69666 - DNA, 25 bp, Saccharomyces pastorianus
gcggattacctttccaacgtcaaga

SEQ ID NO: 69667 - DNA, 25 bp, Saccharomyces pastorianus
atttccaactgattgattcaaccct

SEQ ID NO: 69668 - DNA, 25 bp, Saccharomyces pastorianus
tttcccacaaaagccgtcatcagat

SEQ ID NO: 69669 - DNA, 25 bp, Saccharomyces pastorianus
gaaggaactggctcactggaactag

SEQ ID NO: 69670 - DNA, 25 bp, Saccharomyces pastorianus
aatgtcactaccaggaccagtcttg

SEQ ID NO: 69671 - DNA, 25 bp, Saccharomyces pastorianus
aataggtccttaacatccacttcac

SEQ ID NO: 69672 - DNA, 25 bp, Saccharomyces pastorianus
ctgcaggcccagctatcagagttaa

SEQ ID NO: 69673 - DNA, 25 bp, Saccharomyces pastorianus
agtcttgaggcccttttccactgat

SEQ ID NO: 69674 - DNA, 25 bp, Saccharomyces pastorianus
aagttccaagacttcctcatactgc

SEQ ID NO: 69675 - DNA, 25 bp, Saccharomyces pastorianus
tactgaacgttctcaataggtcctt

SEQ ID NO: 69676 - DNA, 25 bp, Saccharomyces pastorianus
gtgataacccatccaccaaaggagt

SEQ ID NO: 69677 - DNA, 25 bp, Saccharomyces pastorianus
actgatgcccgattggaggctggac

SEQ ID NO: 69678 - DNA, 25 bp, Saccharomyces pastorianus
aaccggtgagaatccaggtctttca

SEQ ID NO: 69679 - DNA, 25 bp, Saccharomyces pastorianus
tgaatgctactttcggtaacgccgt

SEQ ID NO: 69680 - DNA, 25 bp, Saccharomyces pastorianus
aaacgatgtcgtccttgcttgccat

SEQ ID NO: 69681 - DNA, 25 bp, Saccharomyces pastorianus
gggacatttccaattagctcataca

SEQ ID NO: 69682 - DNA, 25 bp, Saccharomyces pastorianus
ggcaatcattccattagcagctatt

SEQ ID NO: 69683 - DNA, 25 bp, Saccharomyces pastorianus
aagcatcccctttgaattttctatt

SEQ ID NO: 69684 - DNA, 25 bp, Saccharomyces pastorianus
aatctgctactggtccttgggttct

SEQ ID NO: 69685 - DNA, 25 bp, Saccharomyces pastorianus
agattcaaccagactgctgctcaaa

SEQ ID NO: 69686 - DNA, 25 bp, Saccharomyces pastorianus
tgattgtttctgtcattgccctgaa

SEQ ID NO: 69687 - DNA, 25 bp, Saccharomyces pastorianus
tgtgcatctttactgattcctgctg

SEQ ID NO: 69688 - DNA, 25 bp, Saccharomyces pastorianus
gggtagtcttttatccaatctgcta

SEQ ID NO: 69689 - DNA, 25 bp, Saccharomyces pastorianus
gttcagagctactttaccacatggt

SEQ ID NO: 69690 - DNA, 25 bp, Saccharomyces pastorianus
gaacctcagagcagacatttgtttg

SEQ ID NO: 69691 - DNA, 25 bp, Saccharomyces pastorianus
aggttcactatacgtacattctggt

SEQ ID NO: 69692 - DNA, 25 bp, Saccharomyces pastorianus
gtttagcactgctttgtcttttttg

SEQ ID NO: 69693 - DNA, 25 bp, Saccharomyces pastorianus
gaaattatccaaagtccttctgatg

SEQ ID NO: 69694 - DNA, 25 bp, Saccharomyces pastorianus
gaagtttacgaatgctctttggaaa

SEQ ID NO: 69695 - DNA, 25 bp, Saccharomyces pastorianus
gagttgctctcatcaaagccatttt

SEQ ID NO: 69696 - DNA, 25 bp, Saccharomyces pastorianus
gcatcagtggttatcccaaccgata

SEQ ID NO: 69697 - DNA, 25 bp, Saccharomyces pastorianus
aatgacgtcgaggtgtttgcatcag

SEQ ID NO: 69698 - DNA, 25 bp, Saccharomyces pastorianus
agattccggcaggagagttgctctc

SEQ ID NO: 69699 - DNA, 25 bp, Saccharomyces pastorianus
aagccattttgccacccggtgtaag

SEQ ID NO: 69700 - DNA, 25 bp, Saccharomyces pastorianus
cagccgatggcggtgaagtcacctt

SEQ ID NO: 69701 - DNA, 25 bp, Saccharomyces pastorianus
gaaaaagattcatcgctgctagtga

SEQ ID NO: 69702 - DNA, 25 bp, Saccharomyces pastorianus
atagggcttggcctgaggtttcttc

SEQ ID NO: 69703 - DNA, 25 bp, Saccharomyces pastorianus
gagaggagtctaccattgccataga

SEQ ID NO: 69704 - DNA, 25 bp, Saccharomyces pastorianus
cagagcaccagagcttttattcggg

SEQ ID NO: 69705 - DNA, 25 bp, Saccharomyces pastorianus
tactattttcaccagatggccaaat

SEQ ID NO: 69706 - DNA, 25 bp, Saccharomyces pastorianus
gagtttctccctaccgatttagaag

SEQ ID NO: 69707 - DNA, 25 bp, Saccharomyces pastorianus
agtcacatttagagccttgggcacg

SEQ ID NO: 69708 - DNA, 25 bp, Saccharomyces pastorianus
tggtctagcaagagccatacctgcc

SEQ ID NO: 69709 - DNA, 25 bp, Saccharomyces pastorianus
tatgcgttggattttatgtgcggaa

SEQ ID NO: 69710 - DNA, 25 bp, Saccharomyces pastorianus
gaggtttcttcctttacgtcataca

SEQ ID NO: 69711 - DNA, 25 bp, Saccharomyces pastorianus
atacctgccccacatgaaatcttaa

SEQ ID NO: 69712 - DNA, 25 bp, Saccharomyces pastorianus
tcctccaatggacctttgtagcgat

SEQ ID NO: 69713 - DNA, 25 bp, Saccharomyces pastorianus
gacctttgtagcgataattccatta

SEQ ID NO: 69714 - DNA, 25 bp, Saccharomyces pastorianus
taaaagtcacatcagcgacctgcct

SEQ ID NO: 69715 - DNA, 25 bp, Saccharomyces pastorianus
ttccattatgattggctgggcgggt

SEQ ID NO: 69716 - DNA, 25 bp, Saccharomyces pastorianus
tttataaatcaagaccccgaggaca

SEQ ID NO: 69717 - DNA, 25 bp, Saccharomyces pastorianus
agcgacctgcctgaatgtgaaatac

SEQ ID NO: 69718 - DNA, 25 bp, Saccharomyces pastorianus
ggagtcaatattcgaccatgtcatt

SEQ ID NO: 69719 - DNA, 25 bp, Saccharomyces pastorianus
atttgggaaacgctaggcttggcta

SEQ ID NO: 69720 - DNA, 25 bp, Saccharomyces pastorianus
ggatatcgctgtgggagactcatta

SEQ ID NO: 69721 - DNA, 25 bp, Saccharomyces pastorianus
accaatttttactatcctccaatgg

SEQ ID NO: 69722 - DNA, 25 bp, Saccharomyces pastorianus
aaagctaaaaatgcccagtccattg

SEQ ID NO: 69723 - DNA, 25 bp, Saccharomyces pastorianus
tgctaaaacgcgatttgggccaatg

SEQ ID NO: 69724 - DNA, 25 bp, Saccharomyces pastorianus
agctacgcgcaggaaatattgtcaa

SEQ ID NO: 69725 - DNA, 25 bp, Saccharomyces pastorianus
aacggtggcctttatcgtgccataa

SEQ ID NO: 69726 - DNA, 25 bp, Saccharomyces pastorianus
tgaactggcaaccaaagccgtcaga

SEQ ID NO: 69727 - DNA, 25 bp, Saccharomyces pastorianus
aatcaaggtactctgcctgcatttg

SEQ ID NO: 69728 - DNA, 25 bp, Saccharomyces pastorianus
ggatttgccattaagcacgggtttg

SEQ ID NO: 69729 - DNA, 25 bp, Saccharomyces pastorianus
ggcagaccctgtattcattggattt

SEQ ID NO: 69730 - DNA, 25 bp, Saccharomyces pastorianus
gaagagcaccagtattttggcttga

SEQ ID NO: 69731 - DNA, 25 bp, Saccharomyces pastorianus
gcctgcatttgatctgactggtgaa

SEQ ID NO: 69732 - DNA, 25 bp, Saccharomyces pastorianus
aaatcccagcctatgacagtactac

SEQ ID NO: 69733 - DNA, 25 bp, Saccharomyces pastorianus
aagaaggtctgctcaagctacgcgc

SEQ ID NO: 69734 - DNA, 25 bp, Saccharomyces pastorianus
tcgaaacagtgccactcgataagtt

SEQ ID NO: 69735 - DNA, 25 bp, Saccharomyces pastorianus
gagcagtttatatttgatgttttcg

SEQ ID NO: 69736 - DNA, 25 bp, Saccharomyces pastorianus
acagtgccactcgataagtttggtt

SEQ ID NO: 69737 - DNA, 25 bp, Saccharomyces pastorianus
gttttcgaaacagtgccactcgata

SEQ ID NO: 69738 - DNA, 25 bp, Saccharomyces pastorianus
tgttttcgaaacagtgccactcgat

SEQ ID NO: 69739 - DNA, 25 bp, Saccharomyces pastorianus
gatgttttcgaaacagtgccactcg

SEQ ID NO: 69740 - DNA, 25 bp, Saccharomyces pastorianus
gaaacagtgccactcgataagtttg

SEQ ID NO: 69741 - DNA, 25 bp, Saccharomyces pastorianus
tttcgaaacagtgccactcgataag

SEQ ID NO: 69742 - DNA, 25 bp, Saccharomyces pastorianus
aacagtgccactcgataagtttggt

SEQ ID NO: 69743 - DNA, 25 bp, Saccharomyces pastorianus
gcagtttatatttgatgttttcgaa

SEQ ID NO: 69744 - DNA, 25 bp, Saccharomyces pastorianus
agtgccactcgataagtttggttgt

SEQ ID NO: 69745 - DNA, 25 bp, Saccharomyces pastorianus
ttttttgcaaagacaggatcatcga

SEQ ID NO: 69746 - DNA, 25 bp, Saccharomyces pastorianus
gtcttgctcaactgctttatttttt

SEQ ID NO: 69747 - DNA, 25 bp, Saccharomyces pastorianus
atattccagtcagccatggtcttgc

SEQ ID NO: 69748 - DNA, 25 bp, Saccharomyces pastorianus
caccttcaatggatgctttctttcc

SEQ ID NO: 69749 - DNA, 25 bp, Saccharomyces pastorianus
gggacagggtccaccttcaatggat

SEQ ID NO: 69750 - DNA, 25 bp, Saccharomyces pastorianus
catggtcttgctcaactgctttatt

SEQ ID NO: 69751 - DNA, 25 bp, Saccharomyces pastorianus
ttctttccatattccagtcagccat

SEQ ID NO: 69752 - DNA, 25 bp, Saccharomyces pastorianus
agtcagccatggtcttgctcaactg

SEQ ID NO: 69753 - DNA, 25 bp, Saccharomyces pastorianus
tgctttctttccatattccagtcag

SEQ ID NO: 69754 - DNA, 25 bp, Saccharomyces pastorianus
ggatgctttctttccatattccagt

SEQ ID NO: 69755 - DNA, 25 bp, Saccharomyces pastorianus
agggtccaccttcaatggatgcttt

SEQ ID NO: 69756 - DNA, 25 bp, Saccharomyces pastorianus
tacttattaggttttgccctccact

SEQ ID NO: 69757 - DNA, 25 bp, Saccharomyces pastorianus
tttatgcctctgaatggacaagcgg

SEQ ID NO: 69758 - DNA, 25 bp, Saccharomyces pastorianus
ggtatcttagcgtttggtcatgcat

SEQ ID NO: 69759 - DNA, 25 bp, Saccharomyces pastorianus
ggtctgtcacaggttttatctgcat

SEQ ID NO: 69760 - DNA, 25 bp, Saccharomyces pastorianus
gcattagaccttatttcgacttacc

SEQ ID NO: 69761 - DNA, 25 bp, Saccharomyces pastorianus
aattcatttccagtgcaggcgacag

SEQ ID NO: 69762 - DNA, 25 bp, Saccharomyces pastorianus
atcactctcctttaatttatgcctc

SEQ ID NO: 69763 - DNA, 25 bp, Saccharomyces pastorianus
gattacataccagcctactattttg

SEQ ID NO: 69764 - DNA, 25 bp, Saccharomyces pastorianus
aacgctgtattatggtggtctgtca

SEQ ID NO: 69765 - DNA, 25 bp, Saccharomyces pastorianus
cactacgttcccttctactttatga

SEQ ID NO: 69766 - DNA, 25 bp, Saccharomyces pastorianus
gttacgtggtattgacttctggaat

SEQ ID NO: 69767 - DNA, 25 bp, Saccharomyces pastorianus
aaggcggattcggaagttgtcctca

SEQ ID NO: 69768 - DNA, 25 bp, Saccharomyces pastorianus
agtctggctatcttaaggtctgcaa

SEQ ID NO: 69769 - DNA, 25 bp, Saccharomyces pastorianus
gagagttcgtacacttgtgccccaa

SEQ ID NO: 69770 - DNA, 25 bp, Saccharomyces pastorianus
tgtagtgtccgccaactgcaagaag

SEQ ID NO: 69771 - DNA, 25 bp, Saccharomyces pastorianus
catactatactgttgccaggcggaa

SEQ ID NO: 69772 - DNA, 25 bp, Saccharomyces pastorianus
gtaagcacgctcttcgggagtacat

SEQ ID NO: 69773 - DNA, 25 bp, Saccharomyces pastorianus
gtattcccaacagtcaagtcgagtc

SEQ ID NO: 69774 - DNA, 25 bp, Saccharomyces pastorianus
gtttacggtctacccatagagagca

SEQ ID NO: 69775 - DNA, 25 bp, Saccharomyces pastorianus
gtcgagtcgtctgaacttactgata

SEQ ID NO: 69776 - DNA, 25 bp, Saccharomyces pastorianus
ttactgatatcaaccccgtttacgg

SEQ ID NO: 69777 - DNA, 25 bp, Saccharomyces pastorianus
gggtacaccttctgtgctacagcaa

SEQ ID NO: 69778 - DNA, 25 bp, Saccharomyces pastorianus
gggtccacatgggtgtccgaagtac

SEQ ID NO: 69779 - DNA, 25 bp, Saccharomyces pastorianus
gaacttcacgccgtggtctctgagc

SEQ ID NO: 69780 - DNA, 25 bp, Saccharomyces pastorianus
agacctccaagaacgtgaacttcac

SEQ ID NO: 69781 - DNA, 25 bp, Saccharomyces pastorianus
atgaacgcatgctgggcggccaaga

SEQ ID NO: 69782 - DNA, 25 bp, Saccharomyces pastorianus
gagcgtcttcctgatcaggtcacgg

SEQ ID NO: 69783 - DNA, 25 bp, Saccharomyces pastorianus
gatcagaaccatttcctggtcgttg

SEQ ID NO: 69784 - DNA, 25 bp, Saccharomyces pastorianus
tggtctctgagcgtcttcctgatca

SEQ ID NO: 69785 - DNA, 25 bp, Saccharomyces pastorianus
tggtcgttgcccagctccttcgaaa

SEQ ID NO: 69786 - DNA, 25 bp, Saccharomyces pastorianus
gtgtccgaagtaccgaagatcagaa

SEQ ID NO: 69787 - DNA, 25 bp, Saccharomyces pastorianus
ctgatcaggtcacggccctccgggt

SEQ ID NO: 69788 - DNA, 25 bp, Saccharomyces pastorianus
gcggccaagacctccaagaacgtga

SEQ ID NO: 69789 - DNA, 25 bp, Saccharomyces pastorianus
agccgcctatttacttgccgaaaag

SEQ ID NO: 69790 - DNA, 25 bp, Saccharomyces pastorianus
aaaacgctctgattttcaatggtaa

SEQ ID NO: 69791 - DNA, 25 bp, Saccharomyces pastorianus
gggtatctctaacctttgacaatga

SEQ ID NO: 69792 - DNA, 25 bp, Saccharomyces pastorianus
agtcttcaagaatccggcgttataa

SEQ ID NO: 69793 - DNA, 25 bp, Saccharomyces pastorianus
actcgaagacttttgggtatctcta

SEQ ID NO: 69794 - DNA, 25 bp, Saccharomyces pastorianus
gtttcctacagttagttcagtggca

SEQ ID NO: 69795 - DNA, 25 bp, Saccharomyces pastorianus
aaatggcaagtaaagccgcctattt

SEQ ID NO: 69796 - DNA, 25 bp, Saccharomyces pastorianus
taattcacatttgatgatggtcccc

SEQ ID NO: 69797 - DNA, 25 bp, Saccharomyces pastorianus
ggcgttataagatcgttaccgtata

SEQ ID NO: 69798 - DNA, 25 bp, Saccharomyces pastorianus
ctgttgtgccttttcaacgtatgga

SEQ ID NO: 69799 - DNA, 25 bp, Saccharomyces pastorianus
gactctagcccaagtcttcaagaat

SEQ ID NO: 69800 - DNA, 25 bp, Saccharomyces pastorianus
cttgatcaacttcttttgtttgttt

SEQ ID NO: 69801 - DNA, 25 bp, Saccharomyces pastorianus
ggatagccttcacttaactcatgta

SEQ ID NO: 69802 - DNA, 25 bp, Saccharomyces pastorianus
ggccacgacacgtcagcgtcggtcg

SEQ ID NO: 69803 - DNA, 25 bp, Saccharomyces pastorianus
actgcgcccgctttatatacaaaat

SEQ ID NO: 69804 - DNA, 25 bp, Saccharomyces pastorianus
tcacttaactcatgtatttggacag

SEQ ID NO: 69805 - DNA, 25 bp, Saccharomyces pastorianus
gtgtcactgtacacgggccacgaca

SEQ ID NO: 69806 - DNA, 25 bp, Saccharomyces pastorianus
gaggtctttcttgatcaacttcttt

SEQ ID NO: 69807 - DNA, 25 bp, Saccharomyces pastorianus
gcagagcccaagagcgtctttggat

SEQ ID NO: 69808 - DNA, 25 bp, Saccharomyces pastorianus
atccattccgaaagaaagcgcccga

SEQ ID NO: 69809 - DNA, 25 bp, Saccharomyces pastorianus
tcttttcgctcgtttttcgccactg

SEQ ID NO: 69810 - DNA, 25 bp, Saccharomyces pastorianus
agagcgtctttggatagccttcact

SEQ ID NO: 69811 - DNA, 25 bp, Saccharomyces pastorianus
cagagcccgatgatgtgcaagcgaa

SEQ ID NO: 69812 - DNA, 25 bp, Saccharomyces pastorianus
gacagtgatggcgtacaggtagcta

SEQ ID NO: 69813 - DNA, 25 bp, Saccharomyces pastorianus
gtaacagcactgataaagggaccct

SEQ ID NO: 69814 - DNA, 25 bp, Saccharomyces pastorianus
ggcagctaaagtacctcgtcaacag

SEQ ID NO: 69815 - DNA, 25 bp, Saccharomyces pastorianus
agctaatgaatctgaagaggaccca

SEQ ID NO: 69816 - DNA, 25 bp, Saccharomyces pastorianus
gatgaccttttagatgaagatccca

SEQ ID NO: 69817 - DNA, 25 bp, Saccharomyces pastorianus
gtacctcgtcaacagatggagcaag

SEQ ID NO: 69818 - DNA, 25 bp, Saccharomyces pastorianus
aactgattagtgctctagaagaggc

SEQ ID NO: 69819 - DNA, 25 bp, Saccharomyces pastorianus
gcaagcgaagggttctgtgtacaac

SEQ ID NO: 69820 - DNA, 25 bp, Saccharomyces pastorianus
gatgaagatcccactaaactggatg

SEQ ID NO: 69821 - DNA, 25 bp, Saccharomyces pastorianus
taaactggatgaagcagagcccgat

SEQ ID NO: 69822 - DNA, 25 bp, Saccharomyces pastorianus
gtacccaattacagtcgaatatcca

SEQ ID NO: 69823 - DNA, 25 bp, Saccharomyces pastorianus
ggcgggtggtgtgtacccaattaca

SEQ ID NO: 69824 - DNA, 25 bp, Saccharomyces pastorianus
gtcgaatatccaaatgaatatcctt

SEQ ID NO: 69825 - DNA, 25 bp, Saccharomyces pastorianus
gagcctgcatggagatcattttcaa

SEQ ID NO: 69826 - DNA, 25 bp, Saccharomyces pastorianus
gacccgccatcacgttaaaacaaat

SEQ ID NO: 69827 - DNA, 25 bp, Saccharomyces pastorianus
ttggagacccgccatcacgttaaaa

SEQ ID NO: 69828 - DNA, 25 bp, Saccharomyces pastorianus
tccaagtggcacaatatgtttaagt

SEQ ID NO: 69829 - DNA, 25 bp, Saccharomyces pastorianus
atttccagccggattttatcatcca

SEQ ID NO: 69830 - DNA, 25 bp, Saccharomyces pastorianus
tccaaacgtgtatccaagtggcaca

SEQ ID NO: 69831 - DNA, 25 bp, Saccharomyces pastorianus
gatcaagattggagacccgccatca

SEQ ID NO: 69832 - DNA, 25 bp, Saccharomyces pastorianus
ggtgtgtacccaattacagtcgaat

SEQ ID NO: 69833 - DNA, 25 bp, Saccharomyces pastorianus
gacggttcgttggatgtaatactac

SEQ ID NO: 69834 - DNA, 25 bp, Saccharomyces pastorianus
aggacgaatctcataccatcgcgaa

SEQ ID NO: 69835 - DNA, 25 bp, Saccharomyces pastorianus
gatagtagcagagacgataacgacg

SEQ ID NO: 69836 - DNA, 25 bp, Saccharomyces pastorianus
ggagctagctcagaaactaacactt

SEQ ID NO: 69837 - DNA, 25 bp, Saccharomyces pastorianus
gactctaacttatttacaacagcgt

SEQ ID NO: 69838 - DNA, 25 bp, Saccharomyces pastorianus
gaatgcggacttcgagactctaact

SEQ ID NO: 69839 - DNA, 25 bp, Saccharomyces pastorianus
atcgcgaacagtgcagacggtgacg

SEQ ID NO: 69840 - DNA, 25 bp, Saccharomyces pastorianus
atatcggagaagtggacggttcgtt

SEQ ID NO: 69841 - DNA, 25 bp, Saccharomyces pastorianus
ggccagcatatataatgatctccat

SEQ ID NO: 69842 - DNA, 25 bp, Saccharomyces pastorianus
acggtgacgagagtaatctcctgga

SEQ ID NO: 69843 - DNA, 25 bp, Saccharomyces pastorianus
aatgatctccatgaagaacacgata

SEQ ID NO: 69844 - DNA, 25 bp, Saccharomyces pastorianus
tgaccattccacacatgaatcacgc

SEQ ID NO: 69845 - DNA, 25 bp, Saccharomyces pastorianus
gatagtggagaacctttgcctaaga

SEQ ID NO: 69846 - DNA, 25 bp, Saccharomyces pastorianus
gcgggcttctcgatggcatccaata

SEQ ID NO: 69847 - DNA, 25 bp, Saccharomyces pastorianus
ctgcagtcgggcaagtagcatcaat

SEQ ID NO: 69848 - DNA, 25 bp, Saccharomyces pastorianus
gaaacagcccgatgaggtcgtagat

SEQ ID NO: 69849 - DNA, 25 bp, Saccharomyces pastorianus
tacagtaagctctacccaggatcaa

SEQ ID NO: 69850 - DNA, 25 bp, Saccharomyces pastorianus
agtgacatggatcccacagcagtgt

SEQ ID NO: 69851 - DNA, 25 bp, Saccharomyces pastorianus
tgaatcacgctgtatcgaagaatag

SEQ ID NO: 69852 - DNA, 25 bp, Saccharomyces pastorianus
gagaatacgctcaggctgcagtcgg

SEQ ID NO: 69853 - DNA, 25 bp, Saccharomyces pastorianus
ggcatccaataaggctgacaatcga

SEQ ID NO: 69854 - DNA, 25 bp, Saccharomyces pastorianus
ttaaaagtgccactggcgggcttct

SEQ ID NO: 69855 - DNA, 25 bp, Saccharomyces pastorianus
gagtacggttgcttgactataacac

SEQ ID NO: 69856 - DNA, 25 bp, Saccharomyces pastorianus
ggtcccagatactttattattgttt

SEQ ID NO: 69857 - DNA, 25 bp, Saccharomyces pastorianus
taatctcggccaaaacttgcatgaa

SEQ ID NO: 69858 - DNA, 25 bp, Saccharomyces pastorianus
ttcaccatatctctggtagagccag

SEQ ID NO: 69859 - DNA, 25 bp, Saccharomyces pastorianus
taatgcctgcaaaccaagatttaga

SEQ ID NO: 69860 - DNA, 25 bp, Saccharomyces pastorianus
gattctcccagacaaggcggttaca

SEQ ID NO: 69861 - DNA, 25 bp, Saccharomyces pastorianus
gttatcttaaatcgccattgttacg

SEQ ID NO: 69862 - DNA, 25 bp, Saccharomyces pastorianus
ttctattttcgccatttacatcagt

SEQ ID NO: 69863 - DNA, 25 bp, Saccharomyces pastorianus
tgctatttgccacccaaaccatatt

SEQ ID NO: 69864 - DNA, 25 bp, Saccharomyces pastorianus
gactataacactactaagccggcta

SEQ ID NO: 69865 - DNA, 25 bp, Saccharomyces pastorianus
tagtagtggcacttttaatctcggc

SEQ ID NO: 69866 - DNA, 25 bp, Saccharomyces pastorianus
aaagcgcaggtcacaaattcagaag

SEQ ID NO: 69867 - DNA, 25 bp, Saccharomyces pastorianus
tgagaccattaagctgtctcgtcga

SEQ ID NO: 69868 - DNA, 25 bp, Saccharomyces pastorianus
tctgagagccatattcatttatcca

SEQ ID NO: 69869 - DNA, 25 bp, Saccharomyces pastorianus
tgtggtttatccaacgcttttttga

SEQ ID NO: 69870 - DNA, 25 bp, Saccharomyces pastorianus
aaatggcagtgatagatctcttcag

SEQ ID NO: 69871 - DNA, 25 bp, Saccharomyces pastorianus
atatcgatacttgtgtgagaccatt

SEQ ID NO: 69872 - DNA, 25 bp, Saccharomyces pastorianus
gatctcttcagacaaactcacggga

SEQ ID NO: 69873 - DNA, 25 bp, Saccharomyces pastorianus
attgcgatttggctttttcccatca

SEQ ID NO: 69874 - DNA, 25 bp, Saccharomyces pastorianus
ttcactttgattttcacgacaactg

SEQ ID NO: 69875 - DNA, 25 bp, Saccharomyces pastorianus
ggagatattctacaagcaccacaaa

SEQ ID NO: 69876 - DNA, 25 bp, Saccharomyces pastorianus
ggaaattttgaacctttgctatagt

SEQ ID NO: 69877 - DNA, 25 bp, Saccharomyces pastorianus
gacaatgctgcgctgtacaaggata

SEQ ID NO: 69878 - DNA, 25 bp, Saccharomyces pastorianus
aaatcgtgcacgttacgagaccctg

SEQ ID NO: 69879 - DNA, 25 bp, Saccharomyces pastorianus
aatcctgctgtctctatattggcga

SEQ ID NO: 69880 - DNA, 25 bp, Saccharomyces pastorianus
taataaccatcgatccggagtccgg

SEQ ID NO: 69881 - DNA, 25 bp, Saccharomyces pastorianus
tctagcaaaatacgtgggcctccct

SEQ ID NO: 69882 - DNA, 25 bp, Saccharomyces pastorianus
gacattgcaattccggtcactacaa

SEQ ID NO: 69883 - DNA, 25 bp, Saccharomyces pastorianus
aaagctttgcgtccatgtgctcgaa

SEQ ID NO: 69884 - DNA, 25 bp, Saccharomyces pastorianus
atagaactagcctcaacgcaacgtg

SEQ ID NO: 69885 - DNA, 25 bp, Saccharomyces pastorianus
agaacttcctcaagcattatctgcc

SEQ ID NO: 69886 - DNA, 25 bp, Saccharomyces pastorianus
ggacaccatcaaggctctacaggat

SEQ ID NO: 69887 - DNA, 25 bp, Saccharomyces pastorianus
gaaagtcggcttgtctatgccgcaa

SEQ ID NO: 69888 - DNA, 25 bp, Saccharomyces pastorianus
gataccagccaatcattctttacca

SEQ ID NO: 69889 - DNA, 25 bp, Saccharomyces pastorianus
aactcgcccgatatagggtcaattt

SEQ ID NO: 69890 - DNA, 25 bp, Saccharomyces pastorianus
actcgcccgatatagggtcaatttc

SEQ ID NO: 69891 - DNA, 25 bp, Saccharomyces pastorianus
accaactcgcccgatatagggtcaa

SEQ ID NO: 69892 - DNA, 25 bp, Saccharomyces pastorianus
ccaactcgcccgatatagggtcaat

SEQ ID NO: 69893 - DNA, 25 bp, Saccharomyces pastorianus
gggacggataccagccaatcattct

SEQ ID NO: 69894 - DNA, 25 bp, Saccharomyces pastorianus
cccgatatagggtcaatttcacaag

SEQ ID NO: 69895 - DNA, 25 bp, Saccharomyces pastorianus
cgatatagggtcaatttcacaagag

SEQ ID NO: 69896 - DNA, 25 bp, Saccharomyces pastorianus
atatagggtcaatttcacaagaggg

SEQ ID NO: 69897 - DNA, 25 bp, Saccharomyces pastorianus
tcgcccgatatagggtcaatttcac

SEQ ID NO: 69898 - DNA, 25 bp, Saccharomyces pastorianus
caactcgcccgatatagggtcaatt

SEQ ID NO: 69899 - DNA, 25 bp, Saccharomyces pastorianus
gttcaaatggccagaggttaagttt

SEQ ID NO: 69900 - DNA, 25 bp, Saccharomyces pastorianus
aatgacggtgaccttgaaaggcttt

SEQ ID NO: 69901 - DNA, 25 bp, Saccharomyces pastorianus
cttctctttctaccggcgttcaaat

SEQ ID NO: 69902 - DNA, 25 bp, Saccharomyces pastorianus
ccagttaccggaaccaatgacggtg

SEQ ID NO: 69903 - DNA, 25 bp, Saccharomyces pastorianus
tttctaccggcgttcaaatggccag

SEQ ID NO: 69904 - DNA, 25 bp, Saccharomyces pastorianus
gaagaagaacttctctttctaccgg

SEQ ID NO: 69905 - DNA, 25 bp, Saccharomyces pastorianus
ggttaagtttaatctatcagcagca

SEQ ID NO: 69906 - DNA, 25 bp, Saccharomyces pastorianus
gtttaatctatcagcagcagcagac

SEQ ID NO: 69907 - DNA, 25 bp, Saccharomyces pastorianus
gaagaacttctctttctaccggcgt

SEQ ID NO: 69908 - DNA, 25 bp, Saccharomyces pastorianus
cggaaccaatgacggtgaccttgaa

SEQ ID NO: 69909 - DNA, 25 bp, Saccharomyces pastorianus
accggcgttcaaatggccagaggtt

SEQ ID NO: 69910 - DNA, 25 bp, Saccharomyces pastorianus
tagatgttggcacggcagcagttcc

SEQ ID NO: 69911 - DNA, 25 bp, Saccharomyces pastorianus
ttcatctacttcagagtttcccttc

SEQ ID NO: 69912 - DNA, 25 bp, Saccharomyces pastorianus
atgggctgctggagtcccactcttt

SEQ ID NO: 69913 - DNA, 25 bp, Saccharomyces pastorianus
cccttgacgatctaccagctatatt

SEQ ID NO: 69914 - DNA, 25 bp, Saccharomyces pastorianus
gtctctattgccagaaagttcgcat

SEQ ID NO: 69915 - DNA, 25 bp, Saccharomyces pastorianus
gctatattatccctaccaacactaa

SEQ ID NO: 69916 - DNA, 25 bp, Saccharomyces pastorianus
tcccactctttgctttatttcgtta

SEQ ID NO: 69917 - DNA, 25 bp, Saccharomyces pastorianus
gaaagttcgcattctgtgctataaa

SEQ ID NO: 69918 - DNA, 25 bp, Saccharomyces pastorianus
tcttcctttgtctctattgccagaa

SEQ ID NO: 69919 - DNA, 25 bp, Saccharomyces pastorianus
agagtttcccttctttgtggtagat

SEQ ID NO: 69920 - DNA, 25 bp, Saccharomyces pastorianus
atttcgttaatctcttcatctactt

SEQ ID NO: 69921 - DNA, 25 bp, Saccharomyces pastorianus
gtaggaattgcgaattttcatgctt

SEQ ID NO: 69922 - DNA, 25 bp, Saccharomyces pastorianus
gtctctagggaacacaagcctttta

SEQ ID NO: 69923 - DNA, 25 bp, Saccharomyces pastorianus
gcttcgtagcccaatctgaaataga

SEQ ID NO: 69924 - DNA, 25 bp, Saccharomyces pastorianus
atcactaacgttttcaggcgtcaac

SEQ ID NO: 69925 - DNA, 25 bp, Saccharomyces pastorianus
atgggatttctctggaggcgtattc

SEQ ID NO: 69926 - DNA, 25 bp, Saccharomyces pastorianus
atgacaccgtttagctggaccgcat

SEQ ID NO: 69927 - DNA, 25 bp, Saccharomyces pastorianus
gaggcgtattcagtagtatgtcaca

SEQ ID NO: 69928 - DNA, 25 bp, Saccharomyces pastorianus
gaattttcatgcttcgtagcccaat

SEQ ID NO: 69929 - DNA, 25 bp, Saccharomyces pastorianus
gtatgtcacagtctctagggaacac

SEQ ID NO: 69930 - DNA, 25 bp, Saccharomyces pastorianus
gtcaacccaccagccaatatgaatt

SEQ ID NO: 69931 - DNA, 25 bp, Saccharomyces pastorianus
tggaccgcatcactaacgttttcag

SEQ ID NO: 69932 - DNA, 25 bp, Saccharomyces pastorianus
aggccaaatctgcttcgttagctac

SEQ ID NO: 69933 - DNA, 25 bp, Saccharomyces pastorianus
tcctcatgtttatctttacgacctg

SEQ ID NO: 69934 - DNA, 25 bp, Saccharomyces pastorianus
attatacggccccacagacagggac

SEQ ID NO: 69935 - DNA, 25 bp, Saccharomyces pastorianus
attcctcatatgtgtaacgactcca

SEQ ID NO: 69936 - DNA, 25 bp, Saccharomyces pastorianus
atatgcattacaactccgtgcctta

SEQ ID NO: 69937 - DNA, 25 bp, Saccharomyces pastorianus
cacattgtccaaccttttacacaac

SEQ ID NO: 69938 - DNA, 25 bp, Saccharomyces pastorianus
gaaaattcttacaagcgcgtagcaa

SEQ ID NO: 69939 - DNA, 25 bp, Saccharomyces pastorianus
taccccgttttgaaactgggctcat

SEQ ID NO: 69940 - DNA, 25 bp, Saccharomyces pastorianus
tacgacctgtggcaaacttgggctc

SEQ ID NO: 69941 - DNA, 25 bp, Saccharomyces pastorianus
tattccagtatcatgctgacacttt

SEQ ID NO: 69942 - DNA, 25 bp, Saccharomyces pastorianus
gatacagacatcttatccagagcta

SEQ ID NO: 69943 - DNA, 25 bp, Saccharomyces pastorianus
caacgtctggagatactgctgtgaa

SEQ ID NO: 69944 - DNA, 25 bp, Saccharomyces pastorianus
gactgtcaccagacatgaccactgt

SEQ ID NO: 69945 - DNA, 25 bp, Saccharomyces pastorianus
tactgctgtgaagtgttcgattact

SEQ ID NO: 69946 - DNA, 25 bp, Saccharomyces pastorianus
tgaccactgtggatgaaatacggac

SEQ ID NO: 69947 - DNA, 25 bp, Saccharomyces pastorianus
gagggaaccacgaaactcgtcaaat

SEQ ID NO: 69948 - DNA, 25 bp, Saccharomyces pastorianus
gtagcgcaagtcgatacacccgtta

SEQ ID NO: 69949 - DNA, 25 bp, Saccharomyces pastorianus
gagtcactttgatcagagggaacca

SEQ ID NO: 69950 - DNA, 25 bp, Saccharomyces pastorianus
acatacatggtcaattgcacgatct

SEQ ID NO: 69951 - DNA, 25 bp, Saccharomyces pastorianus
acacgaaggtgctatgtgcgatcta

SEQ ID NO: 69952 - DNA, 25 bp, Saccharomyces pastorianus
gagtgaccccgaagatgttgataca

SEQ ID NO: 69953 - DNA, 25 bp, Saccharomyces pastorianus
gtgcgatctattatggagtgacccc

SEQ ID NO: 69954 - DNA, 25 bp, Saccharomyces pastorianus
ttggcctcgaccactttggctcaat

SEQ ID NO: 69955 - DNA, 25 bp, Saccharomyces pastorianus
attgaaaagccaaccactacctcaa

SEQ ID NO: 69956 - DNA, 25 bp, Saccharomyces pastorianus
aggtccaagcaacaccactagtact

SEQ ID NO: 69957 - DNA, 25 bp, Saccharomyces pastorianus
actgctatcccaacagatgctccaa

SEQ ID NO: 69958 - DNA, 25 bp, Saccharomyces pastorianus
actttaccgtcgtcactgaatacac

SEQ ID NO: 69959 - DNA, 25 bp, Saccharomyces pastorianus
tacctcaaccactgagtacactgtt

SEQ ID NO: 69960 - DNA, 25 bp, Saccharomyces pastorianus
tgccacctcagacgctgataacggt

SEQ ID NO: 69961 - DNA, 25 bp, Saccharomyces pastorianus
attctccactgttttgttatctgcc

SEQ ID NO: 69962 - DNA, 25 bp, Saccharomyces pastorianus
tgcttcttccactagttcttctagt

SEQ ID NO: 69963 - DNA, 25 bp, Saccharomyces pastorianus
ttggctcaattctctaacagcaccg

SEQ ID NO: 69964 - DNA, 25 bp, Saccharomyces pastorianus
gataacggtactaccactgctatcc

SEQ ID NO: 69965 - DNA, 25 bp, Saccharomyces pastorianus
taatccaaacgaccccttagctaat

SEQ ID NO: 69966 - DNA, 25 bp, Saccharomyces pastorianus
gattgggccgtatatgcctcgatgt

SEQ ID NO: 69967 - DNA, 25 bp, Saccharomyces pastorianus
agatcagaaccgtgctattgtccat

SEQ ID NO: 69968 - DNA, 25 bp, Saccharomyces pastorianus
caaaagtgcgttttttgaccaagat

SEQ ID NO: 69969 - DNA, 25 bp, Saccharomyces pastorianus
gaccccttagctaatgatgtcgctg

SEQ ID NO: 69970 - DNA, 25 bp, Saccharomyces pastorianus
gctattgtccatccaggcattgttg

SEQ ID NO: 69971 - DNA, 25 bp, Saccharomyces pastorianus
ggcattgttggccagtcctaatcca

SEQ ID NO: 69972 - DNA, 25 bp, Saccharomyces pastorianus
tatgcctcgatgtgcttaagactaa

SEQ ID NO: 69973 - DNA, 25 bp, Saccharomyces pastorianus
gatgtcgctgaagactggatcaaga

SEQ ID NO: 69974 - DNA, 25 bp, Saccharomyces pastorianus
aggcgccaaagccaaggcacgcgaa

SEQ ID NO: 69975 - DNA, 25 bp, Saccharomyces pastorianus
tccgaatatcgatagattgggccgt

SEQ ID NO: 69976 - DNA, 25 bp, Saccharomyces pastorianus
aataccgccacagcgcaagaaacaa

SEQ ID NO: 69977 - DNA, 25 bp, Saccharomyces pastorianus
cgccaggcccgtgcggcgtacgttc

SEQ ID NO: 69978 - DNA, 25 bp, Saccharomyces pastorianus
tcacaataccgccacagcgcaagaa

SEQ ID NO: 69979 - DNA, 25 bp, Saccharomyces pastorianus
aagcaactccgtatcacaataccgc

SEQ ID NO: 69980 - DNA, 25 bp, Saccharomyces pastorianus
gccacagcgcaagaaacaacgagat

SEQ ID NO: 69981 - DNA, 25 bp, Saccharomyces pastorianus
tataaagcaactccgtatcacaata

SEQ ID NO: 69982 - DNA, 25 bp, Saccharomyces pastorianus
aaagcaactccgtatcacaataccg

SEQ ID NO: 69983 - DNA, 25 bp, Saccharomyces pastorianus
accgccacagcgcaagaaacaacga

SEQ ID NO: 69984 - DNA, 25 bp, Saccharomyces pastorianus
agcgcaagaaacaacgagatatatt

SEQ ID NO: 69985 - DNA, 25 bp, Saccharomyces pastorianus
gaagtgggccaccaagcccctttgc

SEQ ID NO: 69986 - DNA, 25 bp, Saccharomyces pastorianus
ggaagtgggccaccaagcccctttg

SEQ ID NO: 69987 - DNA, 25 bp, Saccharomyces pastorianus
aagcaactccgtatcacaataccgc

SEQ ID NO: 69988 - DNA, 25 bp, Saccharomyces pastorianus
aataccgccacagcgcaagaaacaa

SEQ ID NO: 69989 - DNA, 25 bp, Saccharomyces pastorianus
cgccaggcccgtgcggcgtacgttc

SEQ ID NO: 69990 - DNA, 25 bp, Saccharomyces pastorianus
tcacaataccgccacagcgcaagaa

SEQ ID NO: 69991 - DNA, 25 bp, Saccharomyces pastorianus
gccacagcgcaagaaacaacgagat

SEQ ID NO: 69992 - DNA, 25 bp, Saccharomyces pastorianus
cttgaagcacaaaacgccatccctt

SEQ ID NO: 69993 - DNA, 25 bp, Saccharomyces pastorianus
tataaagcaactccgtatcacaata

SEQ ID NO: 69994 - DNA, 25 bp, Saccharomyces pastorianus
accgccacagcgcaagaaacaacga

SEQ ID NO: 69995 - DNA, 25 bp, Saccharomyces pastorianus
agcgcaagaaacaacgagatatatt

SEQ ID NO: 69996 - DNA, 25 bp, Saccharomyces pastorianus
gagatatatttccttgaagcacaaa

SEQ ID NO: 69997 - DNA, 25 bp, Saccharomyces pastorianus
ggaagtgggccaccaagcccctttg

SEQ ID NO: 69998 - DNA, 25 bp, Saccharomyces pastorianus
gaaggccactaactcaaacggtaat

SEQ ID NO: 69999 - DNA, 25 bp, Saccharomyces pastorianus
aatactgtcgtattgtgtgacgcca

SEQ ID NO: 70000 - DNA, 25 bp, Saccharomyces pastorianus
gggaccatattttgaaggccactaa

SEQ ID NO: 70001 - DNA, 25 bp, Saccharomyces pastorianus
gttgcacgtgaatgtaatactgtcg

SEQ ID NO: 70002 - DNA, 25 bp, Saccharomyces pastorianus
aactggcggttccaagacttgtcaa

SEQ ID NO: 70003 - DNA, 25 bp, Saccharomyces pastorianus
tatctttcaattggctactttggct

SEQ ID NO: 70004 - DNA, 25 bp, Saccharomyces pastorianus
aacatgaattgaaccctgaagactc

SEQ ID NO: 70005 - DNA, 25 bp, Saccharomyces pastorianus
gatgttaggaactcttacactctta

SEQ ID NO: 70006 - DNA, 25 bp, Saccharomyces pastorianus
gttggattcactcccaacatgaatt

SEQ ID NO: 70007 - DNA, 25 bp, Saccharomyces pastorianus
gtgtgacgccagtgtaagtacaacc

SEQ ID NO: 70008 - DNA, 25 bp, Saccharomyces pastorianus
ttacctggtcatgaattgcctttac

SEQ ID NO: 70009 - DNA, 25 bp, Saccharomyces pastorianus
gattcgtaccataccaagactgctc

SEQ ID NO: 70010 - DNA, 25 bp, Saccharomyces pastorianus
aattacgttgggtgtccacattgat

SEQ ID NO: 70011 - DNA, 25 bp, Saccharomyces pastorianus
tgactcgcttggaacagcactacaa

SEQ ID NO: 70012 - DNA, 25 bp, Saccharomyces pastorianus
acttccgaagtttctcataccatgg

SEQ ID NO: 70013 - DNA, 25 bp, Saccharomyces pastorianus
attgctattccaactaccatcgata

SEQ ID NO: 70014 - DNA, 25 bp, Saccharomyces pastorianus
gatattgaccaaatttccggcggat

SEQ ID NO: 70015 - DNA, 25 bp, Saccharomyces pastorianus
cacattttcatcttccgtaactggt

SEQ ID NO: 70016 - DNA, 25 bp, Saccharomyces pastorianus
gaatgtactacaggactcggtcttg

SEQ ID NO: 70017 - DNA, 25 bp, Saccharomyces pastorianus
gggcaaatcgcacaaactgctctga

SEQ ID NO: 70018 - DNA, 25 bp, Saccharomyces pastorianus
gacagattcctttgtgctgactcgc

SEQ ID NO: 70019 - DNA, 25 bp, Saccharomyces pastorianus
agactgctcagcgtcaactatctgt

SEQ ID NO: 70020 - DNA, 25 bp, Saccharomyces pastorianus
cataactttgttgatccaccttcgg

SEQ ID NO: 70021 - DNA, 25 bp, Saccharomyces pastorianus
gaaatcgatctggactactccgaga

SEQ ID NO: 70022 - DNA, 25 bp, Saccharomyces pastorianus
taatttaggatctcataccctgcct

SEQ ID NO: 70023 - DNA, 25 bp, Saccharomyces pastorianus
tccaccttcggctctagaaatcgat

SEQ ID NO: 70024 - DNA, 25 bp, Saccharomyces pastorianus
aagttcacgatgctttacactttgg

SEQ ID NO: 70025 - DNA, 25 bp, Saccharomyces pastorianus
gattgttatctatactcgggaacta

SEQ ID NO: 70026 - DNA, 25 bp, Saccharomyces pastorianus
gtcaactacgggttttgccaaggag

SEQ ID NO: 70027 - DNA, 25 bp, Saccharomyces pastorianus
aagacgtgctatttccagcaatccc

SEQ ID NO: 70028 - DNA, 25 bp, Saccharomyces pastorianus
gtttcattgctttcataggtcaact

SEQ ID NO: 70029 - DNA, 25 bp, Saccharomyces pastorianus
ataccctgcctcgagtttatggaga

SEQ ID NO: 70030 - DNA, 25 bp, Saccharomyces pastorianus
atcgatggtcttcatggcaaggtca

SEQ ID NO: 70031 - DNA, 25 bp, Saccharomyces pastorianus
gatcttggcgtctgagttgttttta

SEQ ID NO: 70032 - DNA, 25 bp, Saccharomyces pastorianus
aagcgatacgtggacttctacacct

SEQ ID NO: 70033 - DNA, 25 bp, Saccharomyces pastorianus
gagagtcgatcctagagttaaacat

SEQ ID NO: 70034 - DNA, 25 bp, Saccharomyces pastorianus
ggtacgttcatatgagacgcgttgt

SEQ ID NO: 70035 - DNA, 25 bp, Saccharomyces pastorianus
gggccttgctcacaaataatggttt

SEQ ID NO: 70036 - DNA, 25 bp, Saccharomyces pastorianus
tcaagcgtcgtggaaccggtacgtt

SEQ ID NO: 70037 - DNA, 25 bp, Saccharomyces pastorianus
aagagctgacatcttcaagcgtcgt

SEQ ID NO: 70038 - DNA, 25 bp, Saccharomyces pastorianus
cttactttaggttgatagcggccaa

SEQ ID NO: 70039 - DNA, 25 bp, Saccharomyces pastorianus
aaaattgctctcaaacgcagcgcca

SEQ ID NO: 70040 - DNA, 25 bp, Saccharomyces pastorianus
gagagctttggccacatatgaaaat

SEQ ID NO: 70041 - DNA, 25 bp, Saccharomyces pastorianus
cttctacaccttacgctattcaata

SEQ ID NO: 70042 - DNA, 25 bp, Saccharomyces pastorianus
gtccttcttagtgagctttgcagca

SEQ ID NO: 70043 - DNA, 25 bp, Saccharomyces pastorianus
acagcatactctgctttggtgacgc

SEQ ID NO: 70044 - DNA, 25 bp, Saccharomyces pastorianus
gaacggtaacgaatttgagcttctt

SEQ ID NO: 70045 - DNA, 25 bp, Saccharomyces pastorianus
gcttgcattcaagtccttcttagtg

SEQ ID NO: 70046 - DNA, 25 bp, Saccharomyces pastorianus
tcctttagttcgtcggcccttgtgg

SEQ ID NO: 70047 - DNA, 25 bp, Saccharomyces pastorianus
gcagcaggcttgaaatccaaatcct

SEQ ID NO: 70048 - DNA, 25 bp, Saccharomyces pastorianus
ttgagcttctttttagttcctcctt

SEQ ID NO: 70049 - DNA, 25 bp, Saccharomyces pastorianus
atgtttgcgtttatgatgttattga

SEQ ID NO: 70050 - DNA, 25 bp, Saccharomyces pastorianus
ttagtgagctttgcagcaggcttga

SEQ ID NO: 70051 - DNA, 25 bp, Saccharomyces pastorianus
gctttggtgacgcttgcattcaagt

SEQ ID NO: 70052 - DNA, 25 bp, Saccharomyces pastorianus
gggatagcgcctcttacagcatact

SEQ ID NO: 70053 - DNA, 25 bp, Saccharomyces pastorianus
catcagtggacttattgcgctatat

SEQ ID NO: 70054 - DNA, 25 bp, Saccharomyces pastorianus
tattacagagcgaaccatcagtgga

SEQ ID NO: 70055 - DNA, 25 bp, Saccharomyces pastorianus
gcttataggttacttgctcgcgcat

SEQ ID NO: 70056 - DNA, 25 bp, Saccharomyces pastorianus
acttgctcgcgcatatagagtttat

SEQ ID NO: 70057 - DNA, 25 bp, Saccharomyces pastorianus
caggatggtttttatcgttgcttat

SEQ ID NO: 70058 - DNA, 25 bp, Saccharomyces pastorianus
aagttttgggctgcgaagcttacca

SEQ ID NO: 70059 - DNA, 25 bp, Saccharomyces pastorianus
gactgttcaggtttttactttggcg

SEQ ID NO: 70060 - DNA, 25 bp, Saccharomyces pastorianus
gactacgctattcttttgccagtaa

SEQ ID NO: 70061 - DNA, 25 bp, Saccharomyces pastorianus
caacgccgtatgtggatttcctcaa

SEQ ID NO: 70062 - DNA, 25 bp, Saccharomyces pastorianus
gaagttccatgcgatttagacgatt

SEQ ID NO: 70063 - DNA, 25 bp, Saccharomyces pastorianus
tttggcgtttgtgcccacatgtgaa

SEQ ID NO: 70064 - DNA, 25 bp, Saccharomyces pastorianus
aaacatcgagcccatgatagccttg

SEQ ID NO: 70065 - DNA, 25 bp, Saccharomyces pastorianus
gggcgctggcgctagtaaatagtca

SEQ ID NO: 70066 - DNA, 25 bp, Saccharomyces pastorianus
gaggttcccgtaccctacagcggat

SEQ ID NO: 70067 - DNA, 25 bp, Saccharomyces pastorianus
atagccttgccgctagatcgaccag

SEQ ID NO: 70068 - DNA, 25 bp, Saccharomyces pastorianus
agttgttgagacagctgccttgcaa

SEQ ID NO: 70069 - DNA, 25 bp, Saccharomyces pastorianus
ccgactggaaaccatttcttttcag

SEQ ID NO: 70070 - DNA, 25 bp, Saccharomyces pastorianus
aaaaggaccctccactggcatttga

SEQ ID NO: 70071 - DNA, 25 bp, Saccharomyces pastorianus
gatcgaccagtactagtccataact

SEQ ID NO: 70072 - DNA, 25 bp, Saccharomyces pastorianus
actggcatttgacctattggtacac

SEQ ID NO: 70073 - DNA, 25 bp, Saccharomyces pastorianus
cttgcaaggcaatcgctaagctgtg

SEQ ID NO: 70074 - DNA, 25 bp, Saccharomyces pastorianus
ataactatctatgtgctgcattcaa

SEQ ID NO: 70075 - DNA, 25 bp, Saccharomyces pastorianus
cgctaggtctagtgtggcaattaat

SEQ ID NO: 70076 - DNA, 25 bp, Saccharomyces pastorianus
gtaataagttgttgacgctaggtct

SEQ ID NO: 70077 - DNA, 25 bp, Saccharomyces pastorianus
gatcacggtttatcaaacgcacatt

SEQ ID NO: 70078 - DNA, 25 bp, Saccharomyces pastorianus
agaaaacaccaactacgctgtcgac

SEQ ID NO: 70079 - DNA, 25 bp, Saccharomyces pastorianus
aaacgcacatttcctattggatgtt

SEQ ID NO: 70080 - DNA, 25 bp, Saccharomyces pastorianus
tgtcaataaaagacccgcctcgggc

SEQ ID NO: 70081 - DNA, 25 bp, Saccharomyces pastorianus
aatgggctcaggaccaagtcacgaa

SEQ ID NO: 70082 - DNA, 25 bp, Saccharomyces pastorianus
actacgctgtcgacttaggcagatc

SEQ ID NO: 70083 - DNA, 25 bp, Saccharomyces pastorianus
gcctcgggcactgaaatatccagat

SEQ ID NO: 70084 - DNA, 25 bp, Saccharomyces pastorianus
gcgcagaaacatttccatcactatg

SEQ ID NO: 70085 - DNA, 25 bp, Saccharomyces pastorianus
tttgaacggaattgcaccaggctat

SEQ ID NO: 70086 - DNA, 25 bp, Saccharomyces pastorianus
aacttctctaaagacgtttctgatg

SEQ ID NO: 70087 - DNA, 25 bp, Saccharomyces pastorianus
catcctgaattataccgtctactgg

SEQ ID NO: 70088 - DNA, 25 bp, Saccharomyces pastorianus
cagttggatcctacgttgtgttcta

SEQ ID NO: 70089 - DNA, 25 bp, Saccharomyces pastorianus
tatttgaccccaagttctttggtcg

SEQ ID NO: 70090 - DNA, 25 bp, Saccharomyces pastorianus
ttctttggtcgcagggaaccctaag

SEQ ID NO: 70091 - DNA, 25 bp, Saccharomyces pastorianus
gtagctcacctgtttaacactcatc

SEQ ID NO: 70092 - DNA, 25 bp, Saccharomyces pastorianus
gttaaatctggcctttgtagctcac

SEQ ID NO: 70093 - DNA, 25 bp, Saccharomyces pastorianus
aaatcttattgcgttggttcaacta

SEQ ID NO: 70094 - DNA, 25 bp, Saccharomyces pastorianus
aatttttgagattgcctccagagca

SEQ ID NO: 70095 - DNA, 25 bp, Saccharomyces pastorianus
gttgtgttctaaggcgcctttgcaa

SEQ ID NO: 70096 - DNA, 25 bp, Saccharomyces pastorianus
ttgcaaactaccgacccactggaaa

SEQ ID NO: 70097 - DNA, 25 bp, Saccharomyces pastorianus
atggttcttccgtcccaactgtcac

SEQ ID NO: 70098 - DNA, 25 bp, Saccharomyces pastorianus
tttgccggtgctgccgctttgttgt

SEQ ID NO: 70099 - DNA, 25 bp, Saccharomyces pastorianus
tgtcagagccttgccagctgctggt

SEQ ID NO: 70100 - DNA, 25 bp, Saccharomyces pastorianus
aaacatggttcttccgtcccaactg

SEQ ID NO: 70101 - DNA, 25 bp, Saccharomyces pastorianus
cagcaccaactgaaaatccaaccaa

SEQ ID NO: 70102 - DNA, 25 bp, Saccharomyces pastorianus
tccaggtccagcaccaactgaaaat

SEQ ID NO: 70103 - DNA, 25 bp, Saccharomyces pastorianus
acaccggtgctgctgtcagagcctt

SEQ ID NO: 70104 - DNA, 25 bp, Saccharomyces pastorianus
tgctggtgctttgtttgccggtgct

SEQ ID NO: 70105 - DNA, 25 bp, Saccharomyces pastorianus
ggtgctgctgtcagagccttgccag

SEQ ID NO: 70106 - DNA, 25 bp, Saccharomyces pastorianus
tccaaccaaacatggttcttccgtc

SEQ ID NO: 70107 - DNA, 25 bp, Saccharomyces pastorianus
tggtgctttgtttgccggtgctgcc

SEQ ID NO: 70108 - DNA, 25 bp, Saccharomyces pastorianus
atctcagcagagacttatattccaa

SEQ ID NO: 70109 - DNA, 25 bp, Saccharomyces pastorianus
atgtgaaagtttacgtaatcgccaa

SEQ ID NO: 70110 - DNA, 25 bp, Saccharomyces pastorianus
attccaaggaaagcaaatgtatgtg

SEQ ID NO: 70111 - DNA, 25 bp, Saccharomyces pastorianus
gaaagaatcggaccttgtgtatcac

SEQ ID NO: 70112 - DNA, 25 bp, Saccharomyces pastorianus
cgtaatcgccaattacatttcttct

SEQ ID NO: 70113 - DNA, 25 bp, Saccharomyces pastorianus
agaatcggaccttgtgtatcacatc

SEQ ID NO: 70114 - DNA, 25 bp, Saccharomyces pastorianus
atcggaccttgtgtatcacatcaag

SEQ ID NO: 70115 - DNA, 25 bp, Saccharomyces pastorianus
tgtcgaattgaaagaatcggacctt

SEQ ID NO: 70116 - DNA, 25 bp, Saccharomyces pastorianus
gtgaaagtttacgtaatcgccaatt

SEQ ID NO: 70117 - DNA, 25 bp, Saccharomyces pastorianus
ggaccttgtgtatcacatcaaggaa

SEQ ID NO: 70118 - DNA, 25 bp, Saccharomyces pastorianus
agcagagacttatattccaaggaaa

SEQ ID NO: 70119 - DNA, 25 bp, Saccharomyces pastorianus
aagaatcggaccttgtgtatcacat

SEQ ID NO: 70120 - DNA, 25 bp, Saccharomyces pastorianus
atctcagcagagacttatattccaa

SEQ ID NO: 70121 - DNA, 25 bp, Saccharomyces pastorianus
ggaagggattccaccatctcagcag

SEQ ID NO: 70122 - DNA, 25 bp, Saccharomyces pastorianus
attccaaggaaagcaaatgtatgtg

SEQ ID NO: 70123 - DNA, 25 bp, Saccharomyces pastorianus
cgttgactggcaaagaaatttctgt

SEQ ID NO: 70124 - DNA, 25 bp, Saccharomyces pastorianus
cgtaatcgccaattacatttcttct

SEQ ID NO: 70125 - DNA, 25 bp, Saccharomyces pastorianus
ggaccttgtgtatcacatcaaggaa

SEQ ID NO: 70126 - DNA, 25 bp, Saccharomyces pastorianus
atcggaccttgtgtatcacatcaag

SEQ ID NO: 70127 - DNA, 25 bp, Saccharomyces pastorianus
tgtcgaattgaaagaatcggacctt

SEQ ID NO: 70128 - DNA, 25 bp, Saccharomyces pastorianus
gtgaaagtttacgtaatcgccaatt

SEQ ID NO: 70129 - DNA, 25 bp, Saccharomyces pastorianus
agcagagacttatattccaaggaaa

SEQ ID NO: 70130 - DNA, 25 bp, Saccharomyces pastorianus
attattccaagatttttctgtcctt

SEQ ID NO: 70131 - DNA, 25 bp, Saccharomyces pastorianus
tgtccttttgttcgattctcttagt

SEQ ID NO: 70132 - DNA, 25 bp, Saccharomyces pastorianus
taatatctctaaatcagttttcaaa

SEQ ID NO: 70133 - DNA, 25 bp, Saccharomyces pastorianus
cttccaaatcccagttgaggtcttt

SEQ ID NO: 70134 - DNA, 25 bp, Saccharomyces pastorianus
gattctcttagttgcttacactcca

SEQ ID NO: 70135 - DNA, 25 bp, Saccharomyces pastorianus
tgcttacactccatatccaaactag

SEQ ID NO: 70136 - DNA, 25 bp, Saccharomyces pastorianus
caaagtttccttgtcattattccaa

SEQ ID NO: 70137 - DNA, 25 bp, Saccharomyces pastorianus
gttaacttagcttccaaatcccagt

SEQ ID NO: 70138 - DNA, 25 bp, Saccharomyces pastorianus
catttttggttaacgataatatctc

SEQ ID NO: 70139 - DNA, 25 bp, Saccharomyces pastorianus
atcccagttgaggtctttggttgag

SEQ ID NO: 70140 - DNA, 25 bp, Saccharomyces pastorianus
gatttttctgtccttttgttcgatt

SEQ ID NO: 70141 - DNA, 25 bp, Saccharomyces pastorianus
caagaagcaccacgacagaccaggt

SEQ ID NO: 70142 - DNA, 25 bp, Saccharomyces pastorianus
tcaagaagcaccacgacagaccagg

SEQ ID NO: 70143 - DNA, 25 bp, Saccharomyces pastorianus
cttcaagaagcaccacgacagacca

SEQ ID NO: 70144 - DNA, 25 bp, Saccharomyces pastorianus
ttcaagaagcaccacgacagaccag

SEQ ID NO: 70145 - DNA, 25 bp, Saccharomyces pastorianus
gaagcaccacgacagaccaggtttg

SEQ ID NO: 70146 - DNA, 25 bp, Saccharomyces pastorianus
aagaagcaccacgacagaccaggtt

SEQ ID NO: 70147 - DNA, 25 bp, Saccharomyces pastorianus
aagcaccacgacagaccaggtttgt

SEQ ID NO: 70148 - DNA, 25 bp, Saccharomyces pastorianus
agaagcaccacgacagaccaggttt

SEQ ID NO: 70149 - DNA, 25 bp, Saccharomyces pastorianus
gaggatacgactgacgattacgaca

SEQ ID NO: 70150 - DNA, 25 bp, Saccharomyces pastorianus
gatacgactgacgattacgacaaga

SEQ ID NO: 70151 - DNA, 25 bp, Saccharomyces pastorianus
caaatgctgggaaagacgaggatac

SEQ ID NO: 70152 - DNA, 25 bp, Saccharomyces pastorianus
atgcaagataagttagacggatact

SEQ ID NO: 70153 - DNA, 25 bp, Saccharomyces pastorianus
ggatactatgcgaatgtactttcaa

SEQ ID NO: 70154 - DNA, 25 bp, Saccharomyces pastorianus
tgacgattacgacaagaccagtgat

SEQ ID NO: 70155 - DNA, 25 bp, Saccharomyces pastorianus
ttacgacaagaccagtgatgaagaa

SEQ ID NO: 70156 - DNA, 25 bp, Saccharomyces pastorianus
gacggatactatgcgaatgtacttt

SEQ ID NO: 70157 - DNA, 25 bp, Saccharomyces pastorianus
agacgaggatacgactgacgattac

SEQ ID NO: 70158 - DNA, 25 bp, Saccharomyces pastorianus
gcgaatgtactttcaaatgctggga

SEQ ID NO: 70159 - DNA, 25 bp, Saccharomyces pastorianus
aaatctagaggagatactggcggaa

SEQ ID NO: 70160 - DNA, 25 bp, Saccharomyces pastorianus
gttggtctccaacacggactgcaga

SEQ ID NO: 70161 - DNA, 25 bp, Saccharomyces pastorianus
gccgtgggcgattggatctgcattt

SEQ ID NO: 70162 - DNA, 25 bp, Saccharomyces pastorianus
tttgggcccaggttggtctccaaca

SEQ ID NO: 70163 - DNA, 25 bp, Saccharomyces pastorianus
agaccctcggcagaggtgacgttca

SEQ ID NO: 70164 - DNA, 25 bp, Saccharomyces pastorianus
atcaccggtaatctcgtcctgggcg

SEQ ID NO: 70165 - DNA, 25 bp, Saccharomyces pastorianus
gtgacgttcaccttcaacgcggcat

SEQ ID NO: 70166 - DNA, 25 bp, Saccharomyces pastorianus
ttggtcaacttaatattgcccgccc

SEQ ID NO: 70167 - DNA, 25 bp, Saccharomyces pastorianus
actcggccttgggattcagcaattg

SEQ ID NO: 70168 - DNA, 25 bp, Saccharomyces pastorianus
tacaagcatcttcagcgtacccttt

SEQ ID NO: 70169 - DNA, 25 bp, Saccharomyces pastorianus
gaaccggtgcgcctgtctgagcaac

SEQ ID NO: 70170 - DNA, 25 bp, Saccharomyces pastorianus
gcatttcggttagcagcactttacc

SEQ ID NO: 70171 - DNA, 25 bp, Saccharomyces pastorianus
aggacgagttggacgacgcccagca

SEQ ID NO: 70172 - DNA, 25 bp, Saccharomyces pastorianus
tatcgaaggcatctgggactcctac

SEQ ID NO: 70173 - DNA, 25 bp, Saccharomyces pastorianus
gaccctaagtcttgtaccatcttga

SEQ ID NO: 70174 - DNA, 25 bp, Saccharomyces pastorianus
aaacataggtgactcgtgcgacccc

SEQ ID NO: 70175 - DNA, 25 bp, Saccharomyces pastorianus
gaggccatgcttgtgatcccaaaga

SEQ ID NO: 70176 - DNA, 25 bp, Saccharomyces pastorianus
gagagccgtggcaaacgtcctcaag

SEQ ID NO: 70177 - DNA, 25 bp, Saccharomyces pastorianus
cattggatgtccttgccatggtgga

SEQ ID NO: 70178 - DNA, 25 bp, Saccharomyces pastorianus
agaactccgtcgaggatttgtcgcc

SEQ ID NO: 70179 - DNA, 25 bp, Saccharomyces pastorianus
agaccggtatcgaagcctttgcgga

SEQ ID NO: 70180 - DNA, 25 bp, Saccharomyces pastorianus
tgcattctacatcgcactggcaaga

SEQ ID NO: 70181 - DNA, 25 bp, Saccharomyces pastorianus
tgatcaaaggttccactcactacgc

SEQ ID NO: 70182 - DNA, 25 bp, Saccharomyces pastorianus
cgatgacccatgaacattctgccat

SEQ ID NO: 70183 - DNA, 25 bp, Saccharomyces pastorianus
gtcactctctagcatttccagacat

SEQ ID NO: 70184 - DNA, 25 bp, Saccharomyces pastorianus
actcatattgctatccgaacggctt

SEQ ID NO: 70185 - DNA, 25 bp, Saccharomyces pastorianus
atgctcatcatactgggcagctgct

SEQ ID NO: 70186 - DNA, 25 bp, Saccharomyces pastorianus
tgctgtggctgcttgtacatcttca

SEQ ID NO: 70187 - DNA, 25 bp, Saccharomyces pastorianus
tctgccatggcatctttatgctcat

SEQ ID NO: 70188 - DNA, 25 bp, Saccharomyces pastorianus
agctgctccaaacctgtcatttgga

SEQ ID NO: 70189 - DNA, 25 bp, Saccharomyces pastorianus
tcattcattgttcaaacagccccga

SEQ ID NO: 70190 - DNA, 25 bp, Saccharomyces pastorianus
gggcatcttaaatatctggtcactc

SEQ ID NO: 70191 - DNA, 25 bp, Saccharomyces pastorianus
aacaatctcttcgatgacccatgaa

SEQ ID NO: 70192 - DNA, 25 bp, Saccharomyces pastorianus
gaacggctttacttgtgtttgctgt

SEQ ID NO: 70193 - DNA, 25 bp, Saccharomyces pastorianus
gaaagcgacgagacctctccaatga

SEQ ID NO: 70194 - DNA, 25 bp, Saccharomyces pastorianus
aaccgctgcttacgttggtactaat

SEQ ID NO: 70195 - DNA, 25 bp, Saccharomyces pastorianus
attcctccgcttctacaatgaactt

SEQ ID NO: 70196 - DNA, 25 bp, Saccharomyces pastorianus
acgatcatttattttcggtctctga

SEQ ID NO: 70197 - DNA, 25 bp, Saccharomyces pastorianus
aacttggattacagattgcccgaat

SEQ ID NO: 70198 - DNA, 25 bp, Saccharomyces pastorianus
gtctgcttcaagttatgccgtatcg

SEQ ID NO: 70199 - DNA, 25 bp, Saccharomyces pastorianus
accttgactccacttttgatgcgaa

SEQ ID NO: 70200 - DNA, 25 bp, Saccharomyces pastorianus
gtaaattgatcatccccggtttgaa

SEQ ID NO: 70201 - DNA, 25 bp, Saccharomyces pastorianus
agaaaggcaaatcccagcgcactgg

SEQ ID NO: 70202 - DNA, 25 bp, Saccharomyces pastorianus
aatacgttgaactgcgccgccaata

SEQ ID NO: 70203 - DNA, 25 bp, Saccharomyces pastorianus
agagcctcctttagtgctcagtctg

SEQ ID NO: 70204 - DNA, 25 bp, Saccharomyces pastorianus
gcaatcacctcaattatgtattcca

SEQ ID NO: 70205 - DNA, 25 bp, Saccharomyces pastorianus
ggtcttgaaatgcaatcacctcaat

SEQ ID NO: 70206 - DNA, 25 bp, Saccharomyces pastorianus
tggtcttgaaatgcaatcacctcaa

SEQ ID NO: 70207 - DNA, 25 bp, Saccharomyces pastorianus
tatgtattccacacagaatcaaaag

SEQ ID NO: 70208 - DNA, 25 bp, Saccharomyces pastorianus
actggtcttgaaatgcaatcacctc

SEQ ID NO: 70209 - DNA, 25 bp, Saccharomyces pastorianus
cactggtcttgaaatgcaatcacct

SEQ ID NO: 70210 - DNA, 25 bp, Saccharomyces pastorianus
tcttgaaatgcaatcacctcaatta

SEQ ID NO: 70211 - DNA, 25 bp, Saccharomyces pastorianus
ctggtcttgaaatgcaatcacctca

SEQ ID NO: 70212 - DNA, 25 bp, Saccharomyces pastorianus
gtcttgaaatgcaatcacctcaatt

SEQ ID NO: 70213 - DNA, 25 bp, Saccharomyces pastorianus
gggtgatccaaacaattatcaacga

SEQ ID NO: 70214 - DNA, 25 bp, Saccharomyces pastorianus
ccactggtcttgaaatgcaatcacc

SEQ ID NO: 70215 - DNA, 25 bp, Saccharomyces pastorianus
aaattgagaaaccaactgtctttga

SEQ ID NO: 70216 - DNA, 25 bp, Saccharomyces pastorianus
aatgtttaccattgatttgccgaat

SEQ ID NO: 70217 - DNA, 25 bp, Saccharomyces pastorianus
tgcgaggatgtcacctacaaaatca

SEQ ID NO: 70218 - DNA, 25 bp, Saccharomyces pastorianus
gaaagactcaaatgcgacttctcga

SEQ ID NO: 70219 - DNA, 25 bp, Saccharomyces pastorianus
gtttctcggataggatcggcaatat

SEQ ID NO: 70220 - DNA, 25 bp, Saccharomyces pastorianus
aatatcgccacatttaatttaccaa

SEQ ID NO: 70221 - DNA, 25 bp, Saccharomyces pastorianus
tataccaggtttttgcgaggatgtc

SEQ ID NO: 70222 - DNA, 25 bp, Saccharomyces pastorianus
aacattttctcattttataccaggt

SEQ ID NO: 70223 - DNA, 25 bp, Saccharomyces pastorianus
ggaaagtttccggttatcattagat

SEQ ID NO: 70224 - DNA, 25 bp, Saccharomyces pastorianus
ttcttggcttctttagtttctcgga

SEQ ID NO: 70225 - DNA, 25 bp, Saccharomyces pastorianus
gaatcactgtcaaacttcttggctt

SEQ ID NO: 70226 - DNA, 25 bp, Saccharomyces pastorianus
atatgcaagtccactgagcctcaat

SEQ ID NO: 70227 - DNA, 25 bp, Saccharomyces pastorianus
ctatatagtaaaggcttcggcacca

SEQ ID NO: 70228 - DNA, 25 bp, Saccharomyces pastorianus
atgctgaatgagtttccctatctag

SEQ ID NO: 70229 - DNA, 25 bp, Saccharomyces pastorianus
tcgacttcgcgctactggaatacaa

SEQ ID NO: 70230 - DNA, 25 bp, Saccharomyces pastorianus
gaaaactactatatcgacttcgcgc

SEQ ID NO: 70231 - DNA, 25 bp, Saccharomyces pastorianus
aaatatactgctttgattcacgatg

SEQ ID NO: 70232 - DNA, 25 bp, Saccharomyces pastorianus
ctagggaatgtttctatgtctcata

SEQ ID NO: 70233 - DNA, 25 bp, Saccharomyces pastorianus
gatgtacttattcttctatgctgaa

SEQ ID NO: 70234 - DNA, 25 bp, Saccharomyces pastorianus
aaggcttcggcaccaatatgcaagt

SEQ ID NO: 70235 - DNA, 25 bp, Saccharomyces pastorianus
tcgagataccctaaaagtttggcat

SEQ ID NO: 70236 - DNA, 25 bp, Saccharomyces pastorianus
gcatattgggagaagttactgaact

SEQ ID NO: 70237 - DNA, 25 bp, Saccharomyces pastorianus
aggacagtatcccatagcatctaat

SEQ ID NO: 70238 - DNA, 25 bp, Saccharomyces pastorianus
ccatagcatctaatgagggacaaag

SEQ ID NO: 70239 - DNA, 25 bp, Saccharomyces pastorianus
ggaagctcaatagtcctgaggcgtt

SEQ ID NO: 70240 - DNA, 25 bp, Saccharomyces pastorianus
gaacaacttatgaagggcagcctac

SEQ ID NO: 70241 - DNA, 25 bp, Saccharomyces pastorianus
gggagtagcgtatcatcatagtaaa

SEQ ID NO: 70242 - DNA, 25 bp, Saccharomyces pastorianus
gaggcgtttcaatcgtttgacatct

SEQ ID NO: 70243 - DNA, 25 bp, Saccharomyces pastorianus
aaaggaccactttcacaaggacagt

SEQ ID NO: 70244 - DNA, 25 bp, Saccharomyces pastorianus
caactagaaaggatgtggaacaact

SEQ ID NO: 70245 - DNA, 25 bp, Saccharomyces pastorianus
gtttcaatcgtttgacatctggaaa

SEQ ID NO: 70246 - DNA, 25 bp, Saccharomyces pastorianus
gtagcgtatcatcatagtaaaccaa

SEQ ID NO: 70247 - DNA, 25 bp, Saccharomyces pastorianus
tagtcctgaggcgtttcaatcgttt

SEQ ID NO: 70248 - DNA, 25 bp, Saccharomyces pastorianus
gtatgcttagtaaaccttgtcttgt

SEQ ID NO: 70249 - DNA, 25 bp, Saccharomyces pastorianus
gtcatttagtatctcgcagtcgaac

SEQ ID NO: 70250 - DNA, 25 bp, Saccharomyces pastorianus
gcggttgtagtatccttgtcattta

SEQ ID NO: 70251 - DNA, 25 bp, Saccharomyces pastorianus
gcagtcgaacccacaatcttctatt

SEQ ID NO: 70252 - DNA, 25 bp, Saccharomyces pastorianus
ccttgtcttgtagttgcggttgtag

SEQ ID NO: 70253 - DNA, 25 bp, Saccharomyces pastorianus
gtagtcaccccattatcgtatgcca

SEQ ID NO: 70254 - DNA, 25 bp, Saccharomyces pastorianus
gatagaatcagtagtcaccccatta

SEQ ID NO: 70255 - DNA, 25 bp, Saccharomyces pastorianus
gaaacgcaggatccacaggtcattc

SEQ ID NO: 70256 - DNA, 25 bp, Saccharomyces pastorianus
acaggtcattccttgtatgcttagt

SEQ ID NO: 70257 - DNA, 25 bp, Saccharomyces pastorianus
caatcttctattgtttccttgatag

SEQ ID NO: 70258 - DNA, 25 bp, Saccharomyces pastorianus
gctaaagctcgtagctgcgtggtaa

SEQ ID NO: 70259 - DNA, 25 bp, Saccharomyces pastorianus
gcaatctcaaaactcgaaacctcaa

SEQ ID NO: 70260 - DNA, 25 bp, Saccharomyces pastorianus
tggaccacgatttgggtgcctatac

SEQ ID NO: 70261 - DNA, 25 bp, Saccharomyces pastorianus
gataaccaagacgtcaaagcaaagc

SEQ ID NO: 70262 - DNA, 25 bp, Saccharomyces pastorianus
taatttgagtaaaacggtgccgaat

SEQ ID NO: 70263 - DNA, 25 bp, Saccharomyces pastorianus
agacatgctgcaaagatgagactca

SEQ ID NO: 70264 - DNA, 25 bp, Saccharomyces pastorianus
aagtgttgcatcacgaatacgttca

SEQ ID NO: 70265 - DNA, 25 bp, Saccharomyces pastorianus
tttcctcattaatcttggaccacga

SEQ ID NO: 70266 - DNA, 25 bp, Saccharomyces pastorianus
ggtgccgaatttacatcgaaaagat

SEQ ID NO: 70267 - DNA, 25 bp, Saccharomyces pastorianus
gaattgggaccaagactaaccttga

SEQ ID NO: 70268 - DNA, 25 bp, Saccharomyces pastorianus
aagaaggctgtcaaagatgctaaga

SEQ ID NO: 70269 - DNA, 25 bp, Saccharomyces pastorianus
gatgacatttcctcattaatcttgg

SEQ ID NO: 70270 - DNA, 25 bp, Saccharomyces pastorianus
tcggcaacaactttgcagcccgcgt

SEQ ID NO: 70271 - DNA, 25 bp, Saccharomyces pastorianus
ggaacggcattgaagcttatactct

SEQ ID NO: 70272 - DNA, 25 bp, Saccharomyces pastorianus
acaagaaagcatacgtccttccctt

SEQ ID NO: 70273 - DNA, 25 bp, Saccharomyces pastorianus
attcattctcacgtctgatggcggc

SEQ ID NO: 70274 - DNA, 25 bp, Saccharomyces pastorianus
tgctggactatggtaggctggcata

SEQ ID NO: 70275 - DNA, 25 bp, Saccharomyces pastorianus
agcttatactctaacggtcttcggc

SEQ ID NO: 70276 - DNA, 25 bp, Saccharomyces pastorianus
tctgatggcggcttcctcctctggg

SEQ ID NO: 70277 - DNA, 25 bp, Saccharomyces pastorianus
tttactcgctccaaaacggcacaat

SEQ ID NO: 70278 - DNA, 25 bp, Saccharomyces pastorianus
ctgcctctgatcatttcggcaacaa

SEQ ID NO: 70279 - DNA, 25 bp, Saccharomyces pastorianus
ccgcgtccagcaacggcttgatgtt

SEQ ID NO: 70280 - DNA, 25 bp, Saccharomyces pastorianus
ggtaggctggcatacgacgtcacaa

SEQ ID NO: 70281 - DNA, 25 bp, Saccharomyces pastorianus
accaccgactatttcagcaagcttt

SEQ ID NO: 70282 - DNA, 25 bp, Saccharomyces pastorianus
aggacaatggccacagggcccttat

SEQ ID NO: 70283 - DNA, 25 bp, Saccharomyces pastorianus
agaaggtgacttcaccaccgactat

SEQ ID NO: 70284 - DNA, 25 bp, Saccharomyces pastorianus
gtacatgagattagacggtgccaca

SEQ ID NO: 70285 - DNA, 25 bp, Saccharomyces pastorianus
gcaagctttccgtaagggacctact

SEQ ID NO: 70286 - DNA, 25 bp, Saccharomyces pastorianus
tacccgggaacgctccaaatgagga

SEQ ID NO: 70287 - DNA, 25 bp, Saccharomyces pastorianus
ggtgcagacaccgttatcttttacg

SEQ ID NO: 70288 - DNA, 25 bp, Saccharomyces pastorianus
gggcccttattttcactcaaatgac

SEQ ID NO: 70289 - DNA, 25 bp, Saccharomyces pastorianus
ggtcagacccgggatgtgcatattt

SEQ ID NO: 70290 - DNA, 25 bp, Saccharomyces pastorianus
gagagatttaacactgattccagga

SEQ ID NO: 70291 - DNA, 25 bp, Saccharomyces pastorianus
gactacagtgtttattctatccagt

SEQ ID NO: 70292 - DNA, 25 bp, Saccharomyces pastorianus
gaatctttacgacatgccttgcgtt

SEQ ID NO: 70293 - DNA, 25 bp, Saccharomyces pastorianus
gtaagtttgcgttctttatctacga

SEQ ID NO: 70294 - DNA, 25 bp, Saccharomyces pastorianus
aaaagaactgtttgaaggctacgca

SEQ ID NO: 70295 - DNA, 25 bp, Saccharomyces pastorianus
atgccttgcgttccaaagatctttc

SEQ ID NO: 70296 - DNA, 25 bp, Saccharomyces pastorianus
caagggtctttagcccagatggtca

SEQ ID NO: 70297 - DNA, 25 bp, Saccharomyces pastorianus
tgaacgattgatgccatattccagc

SEQ ID NO: 70298 - DNA, 25 bp, Saccharomyces pastorianus
gtataaacatatgggcagcgcatcc

SEQ ID NO: 70299 - DNA, 25 bp, Saccharomyces pastorianus
atatgccggagttatcaagggtctt

SEQ ID NO: 70300 - DNA, 25 bp, Saccharomyces pastorianus
agcgcatccccatatcagatattgc

SEQ ID NO: 70301 - DNA, 25 bp, Saccharomyces pastorianus
ggagtaacagagtatgcttcttttt

SEQ ID NO: 70302 - DNA, 25 bp, Saccharomyces pastorianus
gaaggctacgcaaattcgtgatttt

SEQ ID NO: 70303 - DNA, 25 bp, Saccharomyces pastorianus
gcttcgctaaacaacctggtagagt

SEQ ID NO: 70304 - DNA, 25 bp, Saccharomyces pastorianus
tgggaaactgacatcgaattgcgaa

SEQ ID NO: 70305 - DNA, 25 bp, Saccharomyces pastorianus
tggtagagtcaatggtatcatcaat

SEQ ID NO: 70306 - DNA, 25 bp, Saccharomyces pastorianus
ggtatcatcaatgcttattcttcgc

SEQ ID NO: 70307 - DNA, 25 bp, Saccharomyces pastorianus
ggccttgatttctgggaaactgaca

SEQ ID NO: 70308 - DNA, 25 bp, Saccharomyces pastorianus
ttgatttctgggaaactgacatcga

SEQ ID NO: 70309 - DNA, 25 bp, Saccharomyces pastorianus
tattggccttgatttctgggaaact

SEQ ID NO: 70310 - DNA, 25 bp, Saccharomyces pastorianus
gctaaacaacctggtagagtcaatg

SEQ ID NO: 70311 - DNA, 25 bp, Saccharomyces pastorianus
aatgcttattcttcgcattttcctc

SEQ ID NO: 70312 - DNA, 25 bp, Saccharomyces pastorianus
cgaagcttcgctaaacaacctggta

SEQ ID NO: 70313 - DNA, 25 bp, Saccharomyces pastorianus
tgacatcgaattgcgaagcttcgct

SEQ ID NO: 70314 - DNA, 25 bp, Saccharomyces pastorianus
ataatggcgacacccaaacggctgt

SEQ ID NO: 70315 - DNA, 25 bp, Saccharomyces pastorianus
gagctacaccaagggaagcggtcct

SEQ ID NO: 70316 - DNA, 25 bp, Saccharomyces pastorianus
acggccgcctttgaggtactctaag

SEQ ID NO: 70317 - DNA, 25 bp, Saccharomyces pastorianus
ggtccaacaaatggttctcgaagct

SEQ ID NO: 70318 - DNA, 25 bp, Saccharomyces pastorianus
gacatagccgattttatcaactcaa

SEQ ID NO: 70319 - DNA, 25 bp, Saccharomyces pastorianus
aactatctgcaaacacgccagttat

SEQ ID NO: 70320 - DNA, 25 bp, Saccharomyces pastorianus
aagacctcagtcttccggaagttca

SEQ ID NO: 70321 - DNA, 25 bp, Saccharomyces pastorianus
gaagcggtcctgacgattggaaaac

SEQ ID NO: 70322 - DNA, 25 bp, Saccharomyces pastorianus
aaaaaactgtggctacccactgcac

SEQ ID NO: 70323 - DNA, 25 bp, Saccharomyces pastorianus
tgtttttgccctttctctactagat

SEQ ID NO: 70324 - DNA, 25 bp, Saccharomyces pastorianus
acatcggaaccagtgagaagacctc

SEQ ID NO: 70325 - DNA, 25 bp, Saccharomyces pastorianus
aactgtgctttggtcatcagcgaaa

SEQ ID NO: 70326 - DNA, 25 bp, Saccharomyces pastorianus
gagactgtctacgttttttcaaact

SEQ ID NO: 70327 - DNA, 25 bp, Saccharomyces pastorianus
gtcaactctttggacctcaagaaag

SEQ ID NO: 70328 - DNA, 25 bp, Saccharomyces pastorianus
aaactatttcggatagcggcaacaa

SEQ ID NO: 70329 - DNA, 25 bp, Saccharomyces pastorianus
ttcttcagtggtaacccagatgttg

SEQ ID NO: 70330 - DNA, 25 bp, Saccharomyces pastorianus
gtaccagaattcaactgagcagtct

SEQ ID NO: 70331 - DNA, 25 bp, Saccharomyces pastorianus
ggctctccaactaccacaatcaaaa

SEQ ID NO: 70332 - DNA, 25 bp, Saccharomyces pastorianus
ggcagatttgatgctaggctctcca

SEQ ID NO: 70333 - DNA, 25 bp, Saccharomyces pastorianus
gaatttgtcacgtcaactctttgga

SEQ ID NO: 70334 - DNA, 25 bp, Saccharomyces pastorianus
ttgacttcaaagctaaccgcaatag

SEQ ID NO: 70335 - DNA, 25 bp, Saccharomyces pastorianus
atctgatccttattgttttctttct

SEQ ID NO: 70336 - DNA, 25 bp, Saccharomyces pastorianus
tacttcttgcctgagactgttctgc

SEQ ID NO: 70337 - DNA, 25 bp, Saccharomyces pastorianus
ctgccattcgtttgaatacttagcc

SEQ ID NO: 70338 - DNA, 25 bp, Saccharomyces pastorianus
gcattcaataaaggtaagtccgcta

SEQ ID NO: 70339 - DNA, 25 bp, Saccharomyces pastorianus
ggctcctagcacacatacttttgaa

SEQ ID NO: 70340 - DNA, 25 bp, Saccharomyces pastorianus
tagcctgactgcctcaaaaagaaat

SEQ ID NO: 70341 - DNA, 25 bp, Saccharomyces pastorianus
ggatatagcctgactgcctcaaaaa

SEQ ID NO: 70342 - DNA, 25 bp, Saccharomyces pastorianus
gctaaggctttcgaatcagtgacac

SEQ ID NO: 70343 - DNA, 25 bp, Saccharomyces pastorianus
gaagtgcatctattaataatcgtgc

SEQ ID NO: 70344 - DNA, 25 bp, Saccharomyces pastorianus
gactgttctgccattcgtttgaata

SEQ ID NO: 70345 - DNA, 25 bp, Saccharomyces pastorianus
ggtaagtccgctaaggctttcgaat

SEQ ID NO: 70346 - DNA, 25 bp, Saccharomyces pastorianus
atcagtgacactttctacttcttgc

SEQ ID NO: 70347 - DNA, 25 bp, Saccharomyces pastorianus
aagtaacatacctctaacgcagctc

SEQ ID NO: 70348 - DNA, 25 bp, Saccharomyces pastorianus
aacgcagctccctagtggttcagaa

SEQ ID NO: 70349 - DNA, 25 bp, Saccharomyces pastorianus
agctcgacgcctcaattagtggcaa

SEQ ID NO: 70350 - DNA, 25 bp, Saccharomyces pastorianus
tgggatcccatatcacgtcgttata

SEQ ID NO: 70351 - DNA, 25 bp, Saccharomyces pastorianus
gaaacttctccgctaggttcatcta

SEQ ID NO: 70352 - DNA, 25 bp, Saccharomyces pastorianus
atgttttaacaaccacctcttcatc

SEQ ID NO: 70353 - DNA, 25 bp, Saccharomyces pastorianus
gactcgtcgattgatctgggatccc

SEQ ID NO: 70354 - DNA, 25 bp, Saccharomyces pastorianus
gcaagcggtgtttctgactcgtcga

SEQ ID NO: 70355 - DNA, 25 bp, Saccharomyces pastorianus
agcgaactcgatagctggctcaatc

SEQ ID NO: 70356 - DNA, 25 bp, Saccharomyces pastorianus
aagtcggataccttatctacctcag

SEQ ID NO: 70357 - DNA, 25 bp, Saccharomyces pastorianus
ttacgtggccgagtcgtctaaaagt

SEQ ID NO: 70358 - DNA, 25 bp, Saccharomyces pastorianus
ccccattttgttctgtgcgatttta

SEQ ID NO: 70359 - DNA, 25 bp, Saccharomyces pastorianus
gaattggcacaataccccattttgt

SEQ ID NO: 70360 - DNA, 25 bp, Saccharomyces pastorianus
atttaacggttgcacttgctaccac

SEQ ID NO: 70361 - DNA, 25 bp, Saccharomyces pastorianus
gaagcatttttcctcacgatgcatc

SEQ ID NO: 70362 - DNA, 25 bp, Saccharomyces pastorianus
ttgctaccaccctgaatgctaataa

SEQ ID NO: 70363 - DNA, 25 bp, Saccharomyces pastorianus
gatcgattggtactgtgcttgcatt

SEQ ID NO: 70364 - DNA, 25 bp, Saccharomyces pastorianus
atgagtccacaacaacgccatatgt

SEQ ID NO: 70365 - DNA, 25 bp, Saccharomyces pastorianus
ggatgtgtaagtgctgcttctgaca

SEQ ID NO: 70366 - DNA, 25 bp, Saccharomyces pastorianus
tatatcggtccagctaatctgctca

SEQ ID NO: 70367 - DNA, 25 bp, Saccharomyces pastorianus
gattttaactgtttccgctcgctat

SEQ ID NO: 70368 - DNA, 25 bp, Saccharomyces pastorianus
gtaaactctttgcactcatcatgtc

SEQ ID NO: 70369 - DNA, 25 bp, Saccharomyces pastorianus
aatttagaagctgacaacgacaacg

SEQ ID NO: 70370 - DNA, 25 bp, Saccharomyces pastorianus
tatagttactcatatctctgaaacc

SEQ ID NO: 70371 - DNA, 25 bp, Saccharomyces pastorianus
gcagaatcatttagtgtcttgaacc

SEQ ID NO: 70372 - DNA, 25 bp, Saccharomyces pastorianus
tagtgtcttgaacctaaacttagaa

SEQ ID NO: 70373 - DNA, 25 bp, Saccharomyces pastorianus
aaggacgatacgaatttggcacaaa

SEQ ID NO: 70374 - DNA, 25 bp, Saccharomyces pastorianus
aaatgcgttctgacagattgggaac

SEQ ID NO: 70375 - DNA, 25 bp, Saccharomyces pastorianus
gaatacgttctatattactccaata

SEQ ID NO: 70376 - DNA, 25 bp, Saccharomyces pastorianus
caccatttccgctagactctagagg

SEQ ID NO: 70377 - DNA, 25 bp, Saccharomyces pastorianus
tatctctgaaaccacaagcgcaatg

SEQ ID NO: 70378 - DNA, 25 bp, Saccharomyces pastorianus
gaaccaaaggtctttactagcagaa

SEQ ID NO: 70379 - DNA, 25 bp, Saccharomyces pastorianus
ccgcagtaaggctcgcacaggatat

SEQ ID NO: 70380 - DNA, 25 bp, Saccharomyces pastorianus
ataatgagcttttccaaggcccatc

SEQ ID NO: 70381 - DNA, 25 bp, Saccharomyces pastorianus
gaaacattcgatctcattcgcgaca

SEQ ID NO: 70382 - DNA, 25 bp, Saccharomyces pastorianus
cagagagtattttcgatcctttagc

SEQ ID NO: 70383 - DNA, 25 bp, Saccharomyces pastorianus
aactttgaaggaggccacacccgat

SEQ ID NO: 70384 - DNA, 25 bp, Saccharomyces pastorianus
cgatgagctacacctttgccaaagg

SEQ ID NO: 70385 - DNA, 25 bp, Saccharomyces pastorianus
aaggcccatcgttatctgaagaagt

SEQ ID NO: 70386 - DNA, 25 bp, Saccharomyces pastorianus
ggcgattcgccgttagaaggagcaa

SEQ ID NO: 70387 - DNA, 25 bp, Saccharomyces pastorianus
gacattgggctggagttcgtagaac

SEQ ID NO: 70388 - DNA, 25 bp, Saccharomyces pastorianus
tcgcgacaccgcagtaactttgaag

SEQ ID NO: 70389 - DNA, 25 bp, Saccharomyces pastorianus
gaaccgtggacagagctaatcgaac

SEQ ID NO: 70390 - DNA, 25 bp, Saccharomyces pastorianus
aagtggcctaaattcctttgtggat

SEQ ID NO: 70391 - DNA, 25 bp, Saccharomyces pastorianus
aataaagaaggtggccaggccaggc

SEQ ID NO: 70392 - DNA, 25 bp, Saccharomyces pastorianus
aaaggtcgacgctaaggccaagaat

SEQ ID NO: 70393 - DNA, 25 bp, Saccharomyces pastorianus
gaacaagaacgggactccaataaag

SEQ ID NO: 70394 - DNA, 25 bp, Saccharomyces pastorianus
caggccaggcagaaaggtcgacgct

SEQ ID NO: 70395 - DNA, 25 bp, Saccharomyces pastorianus
gcagaaaggtcgacgctaaggccaa

SEQ ID NO: 70396 - DNA, 25 bp, Saccharomyces pastorianus
gggactccaataaagaaggtggcca

SEQ ID NO: 70397 - DNA, 25 bp, Saccharomyces pastorianus
gccaggcagaaaggtcgacgctaag

SEQ ID NO: 70398 - DNA, 25 bp, Saccharomyces pastorianus
ggtgcacaaggtttattgaacaaga

SEQ ID NO: 70399 - DNA, 25 bp, Saccharomyces pastorianus
tttattgaacaagaacgggactcca

SEQ ID NO: 70400 - DNA, 25 bp, Saccharomyces pastorianus
gaacgggactccaataaagaaggtg

SEQ ID NO: 70401 - DNA, 25 bp, Saccharomyces pastorianus
ggtcgacgctaaggccaagaataaa

SEQ ID NO: 70402 - DNA, 25 bp, Saccharomyces pastorianus
gttagtaaccatctcatgggtccaa

SEQ ID NO: 70403 - DNA, 25 bp, Saccharomyces pastorianus
aaagttcaaatttccaagattccag

SEQ ID NO: 70404 - DNA, 25 bp, Saccharomyces pastorianus
gatttgcttaatgacactaattgaa

SEQ ID NO: 70405 - DNA, 25 bp, Saccharomyces pastorianus
tgaacatttagtcatgagagccata

SEQ ID NO: 70406 - DNA, 25 bp, Saccharomyces pastorianus
atttccaagattccagtattagcag

SEQ ID NO: 70407 - DNA, 25 bp, Saccharomyces pastorianus
tttgatgatatctccgaggcaaccc

SEQ ID NO: 70408 - DNA, 25 bp, Saccharomyces pastorianus
gcagaacatgaatcctttttacgac

SEQ ID NO: 70409 - DNA, 25 bp, Saccharomyces pastorianus
gattccaattatgactggctattcc

SEQ ID NO: 70410 - DNA, 25 bp, Saccharomyces pastorianus
gaggcaacccatttaccaaaggata

SEQ ID NO: 70411 - DNA, 25 bp, Saccharomyces pastorianus
gagagccataagtttacgcctatta

SEQ ID NO: 70412 - DNA, 25 bp, Saccharomyces pastorianus
tattgaatgcgttgactgttggtga

SEQ ID NO: 70413 - DNA, 25 bp, Saccharomyces pastorianus
actgtattgagtacacttcgcatgg

SEQ ID NO: 70414 - DNA, 25 bp, Saccharomyces pastorianus
ggaagcagaaccttctttccaccct

SEQ ID NO: 70415 - DNA, 25 bp, Saccharomyces pastorianus
aaccatgaacttgacactgtattga

SEQ ID NO: 70416 - DNA, 25 bp, Saccharomyces pastorianus
gacactgtattgagtacacttcgca

SEQ ID NO: 70417 - DNA, 25 bp, Saccharomyces pastorianus
gataaccatgaacttgacactgtat

SEQ ID NO: 70418 - DNA, 25 bp, Saccharomyces pastorianus
gaacttgacactgtattgagtacac

SEQ ID NO: 70419 - DNA, 25 bp, Saccharomyces pastorianus
atggaagcagaaccttctttccacc

SEQ ID NO: 70420 - DNA, 25 bp, Saccharomyces pastorianus
tttgataaccatgaacttgacactg

SEQ ID NO: 70421 - DNA, 25 bp, Saccharomyces pastorianus
gagtacacttcgcatggaagcagaa

SEQ ID NO: 70422 - DNA, 25 bp, Saccharomyces pastorianus
ttcgcatggaagcagaaccttcttt

SEQ ID NO: 70423 - DNA, 25 bp, Saccharomyces pastorianus
gtattgagtacacttcgcatggaag

SEQ ID NO: 70424 - DNA, 25 bp, Saccharomyces pastorianus
taatgacctccttgaaccagttttg

SEQ ID NO: 70425 - DNA, 25 bp, Saccharomyces pastorianus
ctccttgaaccagttttgtcaaact

SEQ ID NO: 70426 - DNA, 25 bp, Saccharomyces pastorianus
tgcctaatgacctccttgaaccagt

SEQ ID NO: 70427 - DNA, 25 bp, Saccharomyces pastorianus
gaaccagttttgtcaaactatcagg

SEQ ID NO: 70428 - DNA, 25 bp, Saccharomyces pastorianus
ccagttttgtcaaactatcaggatg

SEQ ID NO: 70429 - DNA, 25 bp, Saccharomyces pastorianus
gacctccttgaaccagttttgtcaa

SEQ ID NO: 70430 - DNA, 25 bp, Saccharomyces pastorianus
aatttgcctaatgacctccttgaac

SEQ ID NO: 70431 - DNA, 25 bp, Saccharomyces pastorianus
tttgcctaatgacctccttgaacca

SEQ ID NO: 70432 - DNA, 25 bp, Saccharomyces pastorianus
atgacctccttgaaccagttttgtc

SEQ ID NO: 70433 - DNA, 25 bp, Saccharomyces pastorianus
ctaatgacctccttgaaccagtttt

SEQ ID NO: 70434 - DNA, 25 bp, Saccharomyces pastorianus
aatgacctccttgaaccagttttgt

SEQ ID NO: 70435 - DNA, 25 bp, Saccharomyces pastorianus
atagtcaacgattccaattacgatt

SEQ ID NO: 70436 - DNA, 25 bp, Saccharomyces pastorianus
cgaacgtcaacaattggcctatgat

SEQ ID NO: 70437 - DNA, 25 bp, Saccharomyces pastorianus
agcttctattctacaaattcccagt

SEQ ID NO: 70438 - DNA, 25 bp, Saccharomyces pastorianus
aagcattactttagccgaacgtcaa

SEQ ID NO: 70439 - DNA, 25 bp, Saccharomyces pastorianus
aagattcctatattggctcaacatg

SEQ ID NO: 70440 - DNA, 25 bp, Saccharomyces pastorianus
aaaggattccattccattaaggata

SEQ ID NO: 70441 - DNA, 25 bp, Saccharomyces pastorianus
gatttcaattctttctactacacaa

SEQ ID NO: 70442 - DNA, 25 bp, Saccharomyces pastorianus
ggataacaaacagcttctattctac

SEQ ID NO: 70443 - DNA, 25 bp, Saccharomyces pastorianus
gagtatctcagcattgttaggtgac

SEQ ID NO: 70444 - DNA, 25 bp, Saccharomyces pastorianus
gaacgacctcgttaaggcaagagat

SEQ ID NO: 70445 - DNA, 25 bp, Saccharomyces pastorianus
tattaaatgctctaaccgttggtga

SEQ ID NO: 70446 - DNA, 25 bp, Saccharomyces pastorianus
ttgcctgccaagagataccgtatca

SEQ ID NO: 70447 - DNA, 25 bp, Saccharomyces pastorianus
gttgtttactctaaattgcctgcca

SEQ ID NO: 70448 - DNA, 25 bp, Saccharomyces pastorianus
aggtgaacacatgcacggtcgccca

SEQ ID NO: 70449 - DNA, 25 bp, Saccharomyces pastorianus
gatggtaccggtgctctagaattcc

SEQ ID NO: 70450 - DNA, 25 bp, Saccharomyces pastorianus
gattgtttgttagacctttcccatt

SEQ ID NO: 70451 - DNA, 25 bp, Saccharomyces pastorianus
accaatgcaccaccgtcaagaagga

SEQ ID NO: 70452 - DNA, 25 bp, Saccharomyces pastorianus
ggagaactctcgaacaccagattgt

SEQ ID NO: 70453 - DNA, 25 bp, Saccharomyces pastorianus
taagagttttgctaaccaacctttg

SEQ ID NO: 70454 - DNA, 25 bp, Saccharomyces pastorianus
gtcaagatcttgaacggcttcgcgt

SEQ ID NO: 70455 - DNA, 25 bp, Saccharomyces pastorianus
acggcttcgcgtttgttgaatttga

SEQ ID NO: 70456 - DNA, 25 bp, Saccharomyces pastorianus
gaatccgctgccaaagccattgaag

SEQ ID NO: 70457 - DNA, 25 bp, Saccharomyces pastorianus
attctacgcaaaggagattaagagt

SEQ ID NO: 70458 - DNA, 25 bp, Saccharomyces pastorianus
ccgcttctgaattctacgcaaagga

SEQ ID NO: 70459 - DNA, 25 bp, Saccharomyces pastorianus
cgcttctgaattctacgcaaaggag

SEQ ID NO: 70460 - DNA, 25 bp, Saccharomyces pastorianus
catttaagcaatttactgacttccc

SEQ ID NO: 70461 - DNA, 25 bp, Saccharomyces pastorianus
ttctgaattctacgcaaaggagatt

SEQ ID NO: 70462 - DNA, 25 bp, Saccharomyces pastorianus
gtgcatttaagcaatttactgactt

SEQ ID NO: 70463 - DNA, 25 bp, Saccharomyces pastorianus
cgcaaaggagattaagagtgcattt

SEQ ID NO: 70464 - DNA, 25 bp, Saccharomyces pastorianus
gagtgcatttaagcaatttactgac

SEQ ID NO: 70465 - DNA, 25 bp, Saccharomyces pastorianus
tccgcttctgaattctacgcaaagg

SEQ ID NO: 70466 - DNA, 25 bp, Saccharomyces pastorianus
agtgcatttaagcaatttactgact

SEQ ID NO: 70467 - DNA, 25 bp, Saccharomyces pastorianus
gcatttaagcaatttactgacttcc

SEQ ID NO: 70468 - DNA, 25 bp, Saccharomyces pastorianus
aacagtactgattgacaccacgtta

SEQ ID NO: 70469 - DNA, 25 bp, Saccharomyces pastorianus
gctccgtaaggatttacccgagttg

SEQ ID NO: 70470 - DNA, 25 bp, Saccharomyces pastorianus
aatgcagagactaacccagcgctac

SEQ ID NO: 70471 - DNA, 25 bp, Saccharomyces pastorianus
gcattgactatttttgacgtgtgta

SEQ ID NO: 70472 - DNA, 25 bp, Saccharomyces pastorianus
gcaagttccatcaacaggcgattct

SEQ ID NO: 70473 - DNA, 25 bp, Saccharomyces pastorianus
ggctattatgccatttcagactcta

SEQ ID NO: 70474 - DNA, 25 bp, Saccharomyces pastorianus
atatgtacgatctttcgctccgtaa

SEQ ID NO: 70475 - DNA, 25 bp, Saccharomyces pastorianus
taatcctgatatacctaagctatgg

SEQ ID NO: 70476 - DNA, 25 bp, Saccharomyces pastorianus
ataaattgaatgaactgcccgaagc

SEQ ID NO: 70477 - DNA, 25 bp, Saccharomyces pastorianus
cagcgctacgtggagatattgcatt

SEQ ID NO: 70478 - DNA, 25 bp, Saccharomyces pastorianus
gagaaatctcacatgcaagttccat

SEQ ID NO: 70479 - DNA, 25 bp, Saccharomyces pastorianus
aaatatgttgttctcgcctttgtgc

SEQ ID NO: 70480 - DNA, 25 bp, Saccharomyces pastorianus
caagccccagcttttaagaaaacag

SEQ ID NO: 70481 - DNA, 25 bp, Saccharomyces pastorianus
gtggcttgggtccagtcaatgttcc

SEQ ID NO: 70482 - DNA, 25 bp, Saccharomyces pastorianus
tggcgtggaccaaccttgctagaaa

SEQ ID NO: 70483 - DNA, 25 bp, Saccharomyces pastorianus
gtctgtccaactgaaattgtggcat

SEQ ID NO: 70484 - DNA, 25 bp, Saccharomyces pastorianus
ttagccgacaccaatcattctttgt

SEQ ID NO: 70485 - DNA, 25 bp, Saccharomyces pastorianus
gtgccattagccttttcatttgtct

SEQ ID NO: 70486 - DNA, 25 bp, Saccharomyces pastorianus
gtcaatgttcctttattagccgaca

SEQ ID NO: 70487 - DNA, 25 bp, Saccharomyces pastorianus
aggtgcccaaattctatttgcctcc

SEQ ID NO: 70488 - DNA, 25 bp, Saccharomyces pastorianus
cattttccgatgctgccaagaagtt

SEQ ID NO: 70489 - DNA, 25 bp, Saccharomyces pastorianus
agaagttcgaggagcaaggtgccca

SEQ ID NO: 70490 - DNA, 25 bp, Saccharomyces pastorianus
tattgaacagtcctcttacgacctg

SEQ ID NO: 70491 - DNA, 25 bp, Saccharomyces pastorianus
catctgccgcagtattttcacattt

SEQ ID NO: 70492 - DNA, 25 bp, Saccharomyces pastorianus
aagacgctgtggaggccatgacaat

SEQ ID NO: 70493 - DNA, 25 bp, Saccharomyces pastorianus
atcttctgcggaaattatggcccac

SEQ ID NO: 70494 - DNA, 25 bp, Saccharomyces pastorianus
agaatgttcctacgttcatgccact

SEQ ID NO: 70495 - DNA, 25 bp, Saccharomyces pastorianus
atggcaatgtcgtatccgatcacac

SEQ ID NO: 70496 - DNA, 25 bp, Saccharomyces pastorianus
tacgacctgaacgacatggcaatgt

SEQ ID NO: 70497 - DNA, 25 bp, Saccharomyces pastorianus
ccgtcacttccaattcatcagaatc

SEQ ID NO: 70498 - DNA, 25 bp, Saccharomyces pastorianus
agtattttcacatttcgactcccat

SEQ ID NO: 70499 - DNA, 25 bp, Saccharomyces pastorianus
gaggaagcagcaacagcaccctgat

SEQ ID NO: 70500 - DNA, 25 bp, Saccharomyces pastorianus
ggacccagaatatcttagccaaagc

SEQ ID NO: 70501 - DNA, 25 bp, Saccharomyces pastorianus
aactgaactagctggacaagccgtc

SEQ ID NO: 70502 - DNA, 25 bp, Saccharomyces pastorianus
agctgacttcactaacaaatctttt

SEQ ID NO: 70503 - DNA, 25 bp, Saccharomyces pastorianus
gatgattcggcaaaactcaacaacg

SEQ ID NO: 70504 - DNA, 25 bp, Saccharomyces pastorianus
ttttaatgcaactctccaagccaca

SEQ ID NO: 70505 - DNA, 25 bp, Saccharomyces pastorianus
gtggatgcgtttatgttccgaattt

SEQ ID NO: 70506 - DNA, 25 bp, Saccharomyces pastorianus
gagaacccaacccaatgaccaatgg

SEQ ID NO: 70507 - DNA, 25 bp, Saccharomyces pastorianus
aatctaaagcgctctcaggactata

SEQ ID NO: 70508 - DNA, 25 bp, Saccharomyces pastorianus
aagccacaaccagcactgaactaga

SEQ ID NO: 70509 - DNA, 25 bp, Saccharomyces pastorianus
gtatcaagagcgaaacctgcggcaa

SEQ ID NO: 70510 - DNA, 25 bp, Saccharomyces pastorianus
atatgctacacgcattaccggcgtt

SEQ ID NO: 70511 - DNA, 25 bp, Saccharomyces pastorianus
gacaagccgtcgaaggagaacccaa

SEQ ID NO: 70512 - DNA, 25 bp, Saccharomyces pastorianus
aacaagccccttgcagtgcagaagg

SEQ ID NO: 70513 - DNA, 25 bp, Saccharomyces pastorianus
gacgaatcgctctcggacgagcaaa

SEQ ID NO: 70514 - DNA, 25 bp, Saccharomyces pastorianus
cacagggcagtcaacggcagcgcga

SEQ ID NO: 70515 - DNA, 25 bp, Saccharomyces pastorianus
actggctggaggatgacgaatcgct

SEQ ID NO: 70516 - DNA, 25 bp, Saccharomyces pastorianus
aaggagatgagcacccacatggaga

SEQ ID NO: 70517 - DNA, 25 bp, Saccharomyces pastorianus
aacggcagcgcgacaaggcaattaa

SEQ ID NO: 70518 - DNA, 25 bp, Saccharomyces pastorianus
gcggaataggactcaaatcggcgaa

SEQ ID NO: 70519 - DNA, 25 bp, Saccharomyces pastorianus
aggcaattaacaagcccacccacag

SEQ ID NO: 70520 - DNA, 25 bp, Saccharomyces pastorianus
ggagcaacaacgagtctcttctttg

SEQ ID NO: 70521 - DNA, 25 bp, Saccharomyces pastorianus
atcgctggccagcaacacagatagg

SEQ ID NO: 70522 - DNA, 25 bp, Saccharomyces pastorianus
attgaggttcaggtcagcgagctgc

SEQ ID NO: 70523 - DNA, 25 bp, Saccharomyces pastorianus
ttgatacgattttaacggccgctaa

SEQ ID NO: 70524 - DNA, 25 bp, Saccharomyces pastorianus
actatgtgactatctctattggttc

SEQ ID NO: 70525 - DNA, 25 bp, Saccharomyces pastorianus
gccatcaactggtttacgcatgctt

SEQ ID NO: 70526 - DNA, 25 bp, Saccharomyces pastorianus
ttaaagctgatcctcaacacaatga

SEQ ID NO: 70527 - DNA, 25 bp, Saccharomyces pastorianus
taattacccattatctccgcaagaa

SEQ ID NO: 70528 - DNA, 25 bp, Saccharomyces pastorianus
gaaaggattcctaaggctaccacct

SEQ ID NO: 70529 - DNA, 25 bp, Saccharomyces pastorianus
gggctcctatttttacatgccatca

SEQ ID NO: 70530 - DNA, 25 bp, Saccharomyces pastorianus
aacggccgctaacaggtccatagaa

SEQ ID NO: 70531 - DNA, 25 bp, Saccharomyces pastorianus
tgccgtacttttatctcagaatttc

SEQ ID NO: 70532 - DNA, 25 bp, Saccharomyces pastorianus
tgacagtttaaagccgaattcccag

SEQ ID NO: 70533 - DNA, 25 bp, Saccharomyces pastorianus
attggttcgatatttctcaacgtca

SEQ ID NO: 70534 - DNA, 25 bp, Saccharomyces pastorianus
cgtgctttgcgttcgtactagattt

SEQ ID NO: 70535 - DNA, 25 bp, Saccharomyces pastorianus
gcgttcgtactagatttaggtctga

SEQ ID NO: 70536 - DNA, 25 bp, Saccharomyces pastorianus
cttcctcttcttcaaatgcaacgtg

SEQ ID NO: 70537 - DNA, 25 bp, Saccharomyces pastorianus
gctttgcgttcgtactagatttagg

SEQ ID NO: 70538 - DNA, 25 bp, Saccharomyces pastorianus
ctcttcttcaaatgcaacgtgcttt

SEQ ID NO: 70539 - DNA, 25 bp, Saccharomyces pastorianus
tatctaaagcagcatccacgtcttc

SEQ ID NO: 70540 - DNA, 25 bp, Saccharomyces pastorianus
tcgtactagatttaggtctgatatc

SEQ ID NO: 70541 - DNA, 25 bp, Saccharomyces pastorianus
gcaacgtgctttgcgttcgtactag

SEQ ID NO: 70542 - DNA, 25 bp, Saccharomyces pastorianus
aaagcagcatccacgtcttcgtctt

SEQ ID NO: 70543 - DNA, 25 bp, Saccharomyces pastorianus
ggtctgatatctaaagcagcatcca

SEQ ID NO: 70544 - DNA, 25 bp, Saccharomyces pastorianus
aatgcaacgtgctttgcgttcgtac

SEQ ID NO: 70545 - DNA, 25 bp, Saccharomyces pastorianus
gcgttcgtactagatttaggtctga

SEQ ID NO: 70546 - DNA, 25 bp, Saccharomyces pastorianus
cttcctcttcttcaaatgcaacgtg

SEQ ID NO: 70547 - DNA, 25 bp, Saccharomyces pastorianus
acgtgctttgcgttcgtactagatt

SEQ ID NO: 70548 - DNA, 25 bp, Saccharomyces pastorianus
gctttgcgttcgtactagatttagg

SEQ ID NO: 70549 - DNA, 25 bp, Saccharomyces pastorianus
tcatcggcatcgttatcgttttctt

SEQ ID NO: 70550 - DNA, 25 bp, Saccharomyces pastorianus
ctcttcttcaaatgcaacgtgcttt

SEQ ID NO: 70551 - DNA, 25 bp, Saccharomyces pastorianus
tatctaaagcagcatccacgtcttc

SEQ ID NO: 70552 - DNA, 25 bp, Saccharomyces pastorianus
aaagcagcatccacgtcttcgtctt

SEQ ID NO: 70553 - DNA, 25 bp, Saccharomyces pastorianus
aggtctgatatctaaagcagcatcc

SEQ ID NO: 70554 - DNA, 25 bp, Saccharomyces pastorianus
atcgttatcgttttcttcttcttct

SEQ ID NO: 70555 - DNA, 25 bp, Saccharomyces pastorianus
aatgcaacgtgctttgcgttcgtac

SEQ ID NO: 70556 - DNA, 25 bp, Saccharomyces pastorianus
accccgcaatcgtcttcaatgaaaa

SEQ ID NO: 70557 - DNA, 25 bp, Saccharomyces pastorianus
aatggctttaactttcaatctcaga

SEQ ID NO: 70558 - DNA, 25 bp, Saccharomyces pastorianus
aggaacaggagctcggccagccgta

SEQ ID NO: 70559 - DNA, 25 bp, Saccharomyces pastorianus
gtcttcctctattcttgattctgaa

SEQ ID NO: 70560 - DNA, 25 bp, Saccharomyces pastorianus
tacgatatagcatctctcactgaag

SEQ ID NO: 70561 - DNA, 25 bp, Saccharomyces pastorianus
cggagaacccctgcatgtatacaat

SEQ ID NO: 70562 - DNA, 25 bp, Saccharomyces pastorianus
gatccattactcctgtatcctgtaa

SEQ ID NO: 70563 - DNA, 25 bp, Saccharomyces pastorianus
gaaaggattagatcgaccccgcaat

SEQ ID NO: 70564 - DNA, 25 bp, Saccharomyces pastorianus
gaaagacccacagattcgcaaactt

SEQ ID NO: 70565 - DNA, 25 bp, Saccharomyces pastorianus
agcagagttctattacttccttatt

SEQ ID NO: 70566 - DNA, 25 bp, Saccharomyces pastorianus
atgatctagatacccctgcatcaaa

SEQ ID NO: 70567 - DNA, 25 bp, Saccharomyces pastorianus
cggacgtaccgtgattctcaatgaa

SEQ ID NO: 70568 - DNA, 25 bp, Saccharomyces pastorianus
gacactatcccaggtggtttctgaa

SEQ ID NO: 70569 - DNA, 25 bp, Saccharomyces pastorianus
taaggctgatccattcggacgtacc

SEQ ID NO: 70570 - DNA, 25 bp, Saccharomyces pastorianus
attacaagcatactcttctttcgcc

SEQ ID NO: 70571 - DNA, 25 bp, Saccharomyces pastorianus
gaatttggtaccgacgtgaccccag

SEQ ID NO: 70572 - DNA, 25 bp, Saccharomyces pastorianus
gttcaaaagcaatgtccccaggacg

SEQ ID NO: 70573 - DNA, 25 bp, Saccharomyces pastorianus
ggtagaatcgctgcagaatccattg

SEQ ID NO: 70574 - DNA, 25 bp, Saccharomyces pastorianus
gctactgaagggtctatacgccgct

SEQ ID NO: 70575 - DNA, 25 bp, Saccharomyces pastorianus
tggtgtccacggtgccaatagacta

SEQ ID NO: 70576 - DNA, 25 bp, Saccharomyces pastorianus
ggtattctattaaaccctgccaccg

SEQ ID NO: 70577 - DNA, 25 bp, Saccharomyces pastorianus
atacgccgctggtgaagtttctggt

SEQ ID NO: 70578 - DNA, 25 bp, Saccharomyces pastorianus
acagtccgtgaaacacctttctact

SEQ ID NO: 70579 - DNA, 25 bp, Saccharomyces pastorianus
gttggagtataaacgcatgaaatcc

SEQ ID NO: 70580 - DNA, 25 bp, Saccharomyces pastorianus
atgcacgtttgttccttgttggtaa

SEQ ID NO: 70581 - DNA, 25 bp, Saccharomyces pastorianus
gcacgtttgttccttgttggtaagc

SEQ ID NO: 70582 - DNA, 25 bp, Saccharomyces pastorianus
tccttgttggtaagcttggaagttg

SEQ ID NO: 70583 - DNA, 25 bp, Saccharomyces pastorianus
gtccgtgaaacacctttctactaag

SEQ ID NO: 70584 - DNA, 25 bp, Saccharomyces pastorianus
gaaacacctttctactaagttggag

SEQ ID NO: 70585 - DNA, 25 bp, Saccharomyces pastorianus
gtttgttccttgttggtaagcttgg

SEQ ID NO: 70586 - DNA, 25 bp, Saccharomyces pastorianus
gtcgttgacacagtccgtgaaacac

SEQ ID NO: 70587 - DNA, 25 bp, Saccharomyces pastorianus
acacctttctactaagttggagtat

SEQ ID NO: 70588 - DNA, 25 bp, Saccharomyces pastorianus
cttggaagttgtgaagtcgttgaca

SEQ ID NO: 70589 - DNA, 25 bp, Saccharomyces pastorianus
cattttttctttccattcattcttc

SEQ ID NO: 70590 - DNA, 25 bp, Saccharomyces pastorianus
tttttctttccattcattcttcttt

SEQ ID NO: 70591 - DNA, 25 bp, Saccharomyces pastorianus
ttttttctttccattcattcttctt

SEQ ID NO: 70592 - DNA, 25 bp, Saccharomyces pastorianus
tccattcattcttctttttttcctt

SEQ ID NO: 70593 - DNA, 25 bp, Saccharomyces pastorianus
ttttctttccattcattcttctttt

SEQ ID NO: 70594 - DNA, 25 bp, Saccharomyces pastorianus
ttatcaattataggaaagggttcat

SEQ ID NO: 70595 - DNA, 25 bp, Saccharomyces pastorianus
tttctttccattcattcttcttttt

SEQ ID NO: 70596 - DNA, 25 bp, Saccharomyces pastorianus
attttttctttccattcattcttct

SEQ ID NO: 70597 - DNA, 25 bp, Saccharomyces pastorianus
tctttccattcattcttcttttttt

SEQ ID NO: 70598 - DNA, 25 bp, Saccharomyces pastorianus
tcaattataggaaagggttcatttt

SEQ ID NO: 70599 - DNA, 25 bp, Saccharomyces pastorianus
ttctttccattcattcttctttttt

SEQ ID NO: 70600 - DNA, 25 bp, Saccharomyces pastorianus
aaagcagcgctgacatcgaagacca

SEQ ID NO: 70601 - DNA, 25 bp, Saccharomyces pastorianus
gacggaaatctcttgtgttgaaaat

SEQ ID NO: 70602 - DNA, 25 bp, Saccharomyces pastorianus
aattgagtcgtatggcattggcaca

SEQ ID NO: 70603 - DNA, 25 bp, Saccharomyces pastorianus
gaaattacccataacttttgtccag

SEQ ID NO: 70604 - DNA, 25 bp, Saccharomyces pastorianus
ataatctgccggaaactgaaactag

SEQ ID NO: 70605 - DNA, 25 bp, Saccharomyces pastorianus
gaagaccaggcaactttctatgagg

SEQ ID NO: 70606 - DNA, 25 bp, Saccharomyces pastorianus
gatgtatttcatctccaaggtttta

SEQ ID NO: 70607 - DNA, 25 bp, Saccharomyces pastorianus
aattcttcccagcttcacagtaagg

SEQ ID NO: 70608 - DNA, 25 bp, Saccharomyces pastorianus
gggtcaacctgactcatgaaaactg

SEQ ID NO: 70609 - DNA, 25 bp, Saccharomyces pastorianus
atgatattagtctgccacgttggaa

SEQ ID NO: 70610 - DNA, 25 bp, Saccharomyces pastorianus
gatgatctgaatatcgcatttcctt

SEQ ID NO: 70611 - DNA, 25 bp, Saccharomyces pastorianus
taaaatatcgttgccacccataggg

SEQ ID NO: 70612 - DNA, 25 bp, Saccharomyces pastorianus
aataccggccattagtgcagaggaa

SEQ ID NO: 70613 - DNA, 25 bp, Saccharomyces pastorianus
cagagtcctcagtgttttcgaaatc

SEQ ID NO: 70614 - DNA, 25 bp, Saccharomyces pastorianus
aatcaatcgagtaccttgctgcttt

SEQ ID NO: 70615 - DNA, 25 bp, Saccharomyces pastorianus
gcaactcgctagaccattatcaaca

SEQ ID NO: 70616 - DNA, 25 bp, Saccharomyces pastorianus
aggagtggtcacatgcacacagcaa

SEQ ID NO: 70617 - DNA, 25 bp, Saccharomyces pastorianus
ttcacctcttctgtatacgacgaca

SEQ ID NO: 70618 - DNA, 25 bp, Saccharomyces pastorianus
gagaaccagctacaatccctaaaat

SEQ ID NO: 70619 - DNA, 25 bp, Saccharomyces pastorianus
agtctcgattcgttagccaattcta

SEQ ID NO: 70620 - DNA, 25 bp, Saccharomyces pastorianus
taagacccatatccacttcaagcag

SEQ ID NO: 70621 - DNA, 25 bp, Saccharomyces pastorianus
taacagctgtgcatccataccgtat

SEQ ID NO: 70622 - DNA, 25 bp, Saccharomyces pastorianus
tctgtttttggtgccgaattgggtt

SEQ ID NO: 70623 - DNA, 25 bp, Saccharomyces pastorianus
ttacgaaaaatggtcatgggtgccc

SEQ ID NO: 70624 - DNA, 25 bp, Saccharomyces pastorianus
aatgggtaggtggttctactactgc

SEQ ID NO: 70625 - DNA, 25 bp, Saccharomyces pastorianus
gattctttccagatatttggtcggt

SEQ ID NO: 70626 - DNA, 25 bp, Saccharomyces pastorianus
gttacggcaaggattttctccttca

SEQ ID NO: 70627 - DNA, 25 bp, Saccharomyces pastorianus
ggttctactactgcgggtggtgttc

SEQ ID NO: 70628 - DNA, 25 bp, Saccharomyces pastorianus
tgtgaacacatctgtttccgctcaa

SEQ ID NO: 70629 - DNA, 25 bp, Saccharomyces pastorianus
ggtcattattgctcaacttgccaaa

SEQ ID NO: 70630 - DNA, 25 bp, Saccharomyces pastorianus
ttagttgctggcctagcgttccctc

SEQ ID NO: 70631 - DNA, 25 bp, Saccharomyces pastorianus
catctatttatggttttgctgcagg

SEQ ID NO: 70632 - DNA, 25 bp, Saccharomyces pastorianus
gattttcttttccttagttgctggc

SEQ ID NO: 70633 - DNA, 25 bp, Saccharomyces pastorianus
gatattgttcagtagttggataaca

SEQ ID NO: 70634 - DNA, 25 bp, Saccharomyces pastorianus
gttgttgcgaaacagaagtgaagtt

SEQ ID NO: 70635 - DNA, 25 bp, Saccharomyces pastorianus
gctcaacttctctctttgtactgat

SEQ ID NO: 70636 - DNA, 25 bp, Saccharomyces pastorianus
cttctctctttgtactgatattgtt

SEQ ID NO: 70637 - DNA, 25 bp, Saccharomyces pastorianus
gataacagtggacctagtagccgaa

SEQ ID NO: 70638 - DNA, 25 bp, Saccharomyces pastorianus
aacagtggacctagtagccgaagag

SEQ ID NO: 70639 - DNA, 25 bp, Saccharomyces pastorianus
aacttctctctttgtactgatattg

SEQ ID NO: 70640 - DNA, 25 bp, Saccharomyces pastorianus
cagtagttggataacagtggaccta

SEQ ID NO: 70641 - DNA, 25 bp, Saccharomyces pastorianus
atattgctcaacttctctctttgta

SEQ ID NO: 70642 - DNA, 25 bp, Saccharomyces pastorianus
gacagcaaactgttgttgcgaaaca

SEQ ID NO: 70643 - DNA, 25 bp, Saccharomyces pastorianus
agtgaagttttttaaatattgctca

SEQ ID NO: 70644 - DNA, 25 bp, Saccharomyces pastorianus
aaattggcccgacttaggcactttg

SEQ ID NO: 70645 - DNA, 25 bp, Saccharomyces pastorianus
gattccatcctctcgaatttcgaaa

SEQ ID NO: 70646 - DNA, 25 bp, Saccharomyces pastorianus
gacaatatatcattgacctcgctaa

SEQ ID NO: 70647 - DNA, 25 bp, Saccharomyces pastorianus
aatccaacctcgatcgtgcaagcaa

SEQ ID NO: 70648 - DNA, 25 bp, Saccharomyces pastorianus
gaagaaccggcactttatgtacagt

SEQ ID NO: 70649 - DNA, 25 bp, Saccharomyces pastorianus
atgtacagtggattccatcctctcg

SEQ ID NO: 70650 - DNA, 25 bp, Saccharomyces pastorianus
aaccctatgaggtgttacagattca

SEQ ID NO: 70651 - DNA, 25 bp, Saccharomyces pastorianus
gatattggtacattgttccgcaggt

SEQ ID NO: 70652 - DNA, 25 bp, Saccharomyces pastorianus
tcttttcagccaacaccaaaggtga

SEQ ID NO: 70653 - DNA, 25 bp, Saccharomyces pastorianus
gacgatcaacttcctacgatattgg

SEQ ID NO: 70654 - DNA, 25 bp, Saccharomyces pastorianus
ttaggcactttgctcaatccaacct

SEQ ID NO: 70655 - DNA, 25 bp, Saccharomyces pastorianus
gaaagcatccctctttggatcgtta

SEQ ID NO: 70656 - DNA, 25 bp, Saccharomyces pastorianus
ttggaaatccttgctacacacctac

SEQ ID NO: 70657 - DNA, 25 bp, Saccharomyces pastorianus
gtgatacatttgatcgtacctactc

SEQ ID NO: 70658 - DNA, 25 bp, Saccharomyces pastorianus
cacttcatttggtttaccggaaatg

SEQ ID NO: 70659 - DNA, 25 bp, Saccharomyces pastorianus
tacacacctactggaggagccaata

SEQ ID NO: 70660 - DNA, 25 bp, Saccharomyces pastorianus
taccggaaatgaatcttttagtggt

SEQ ID NO: 70661 - DNA, 25 bp, Saccharomyces pastorianus
tttgatcgtacctactcttttggaa

SEQ ID NO: 70662 - DNA, 25 bp, Saccharomyces pastorianus
ggatcgttatcgtctgttagttttg

SEQ ID NO: 70663 - DNA, 25 bp, Saccharomyces pastorianus
ttgtttgtcattcttcagccaggaa

SEQ ID NO: 70664 - DNA, 25 bp, Saccharomyces pastorianus
agtaaatcttttctccttctgttgt

SEQ ID NO: 70665 - DNA, 25 bp, Saccharomyces pastorianus
ttcagccaggaaccccaagtgtact

SEQ ID NO: 70666 - DNA, 25 bp, Saccharomyces pastorianus
ttctgtcggttcagttaatttccca

SEQ ID NO: 70667 - DNA, 25 bp, Saccharomyces pastorianus
gatgttgtcacaatcatggctttgg

SEQ ID NO: 70668 - DNA, 25 bp, Saccharomyces pastorianus
gccaaacattattctgacacctcac

SEQ ID NO: 70669 - DNA, 25 bp, Saccharomyces pastorianus
gtacctgccacttcagagaccacaa

SEQ ID NO: 70670 - DNA, 25 bp, Saccharomyces pastorianus
gacttcagaattagtttcgttgcca

SEQ ID NO: 70671 - DNA, 25 bp, Saccharomyces pastorianus
gaagtggctacctcattggctaaat

SEQ ID NO: 70672 - DNA, 25 bp, Saccharomyces pastorianus
tgctagacaggtttccaccttggat

SEQ ID NO: 70673 - DNA, 25 bp, Saccharomyces pastorianus
ttacccacacgaaccagctaagaat

SEQ ID NO: 70674 - DNA, 25 bp, Saccharomyces pastorianus
tgctccacaatttgccgccatgaag

SEQ ID NO: 70675 - DNA, 25 bp, Saccharomyces pastorianus
catggctttgggtactgctagacag

SEQ ID NO: 70676 - DNA, 25 bp, Saccharomyces pastorianus
gatttcgtatctttacacgtacctg

SEQ ID NO: 70677 - DNA, 25 bp, Saccharomyces pastorianus
gacggttcggtctttggctccagtc

SEQ ID NO: 70678 - DNA, 25 bp, Saccharomyces pastorianus
cactcaatgtagtggtcaactctac

SEQ ID NO: 70679 - DNA, 25 bp, Saccharomyces pastorianus
tggtctcctgcaacagctgcaaatg

SEQ ID NO: 70680 - DNA, 25 bp, Saccharomyces pastorianus
gccttgaggtcaatcaactcgtatt

SEQ ID NO: 70681 - DNA, 25 bp, Saccharomyces pastorianus
tattcttctgtgtatgaacctcaag

SEQ ID NO: 70682 - DNA, 25 bp, Saccharomyces pastorianus
aactcgtatttggaacactcaatgt

SEQ ID NO: 70683 - DNA, 25 bp, Saccharomyces pastorianus
tggtcctcttctccctttatatagg

SEQ ID NO: 70684 - DNA, 25 bp, Saccharomyces pastorianus
gaacctcaagacattggtctcctgc

SEQ ID NO: 70685 - DNA, 25 bp, Saccharomyces pastorianus
aaaccacctctctattcttctgtgt

SEQ ID NO: 70686 - DNA, 25 bp, Saccharomyces pastorianus
atctgtatttcctttgccttgaggt

SEQ ID NO: 70687 - DNA, 25 bp, Saccharomyces pastorianus
ctctacagataacttggtcctcttc

SEQ ID NO: 70688 - DNA, 25 bp, Saccharomyces pastorianus
atatatgcgtgatgatacttactgc

SEQ ID NO: 70689 - DNA, 25 bp, Saccharomyces pastorianus
tctgttgcctgtacttaaattttat

SEQ ID NO: 70690 - DNA, 25 bp, Saccharomyces pastorianus
aaggtgtatgatctttgattttaga

SEQ ID NO: 70691 - DNA, 25 bp, Saccharomyces pastorianus
cagttgtacaatctcgtcgaagtgc

SEQ ID NO: 70692 - DNA, 25 bp, Saccharomyces pastorianus
tgcagttcagactcacccagttgta

SEQ ID NO: 70693 - DNA, 25 bp, Saccharomyces pastorianus
agttcagactcacccagttgtacaa

SEQ ID NO: 70694 - DNA, 25 bp, Saccharomyces pastorianus
gatacttactgcagttcagactcac

SEQ ID NO: 70695 - DNA, 25 bp, Saccharomyces pastorianus
ctttgattttagatatatgcgtgat

SEQ ID NO: 70696 - DNA, 25 bp, Saccharomyces pastorianus
cacccagttgtacaatctcgtcgaa

SEQ ID NO: 70697 - DNA, 25 bp, Saccharomyces pastorianus
agactcacccagttgtacaatctcg

SEQ ID NO: 70698 - DNA, 25 bp, Saccharomyces pastorianus
tctttgttctgttgcctgtacttaa

SEQ ID NO: 70699 - DNA, 25 bp, Saccharomyces pastorianus
attgtccatttcatttattaccatt

SEQ ID NO: 70700 - DNA, 25 bp, Saccharomyces pastorianus
gaattcaggcgagttgtccaacgag

SEQ ID NO: 70701 - DNA, 25 bp, Saccharomyces pastorianus
cggtaagccgaatctgtctggttta

SEQ ID NO: 70702 - DNA, 25 bp, Saccharomyces pastorianus
taatcgtactagtctcgtttggtgt

SEQ ID NO: 70703 - DNA, 25 bp, Saccharomyces pastorianus
cacaggtgggactattttttgaatt

SEQ ID NO: 70704 - DNA, 25 bp, Saccharomyces pastorianus
ctatattgtgttttgtccttggcgc

SEQ ID NO: 70705 - DNA, 25 bp, Saccharomyces pastorianus
aacacggattccaccaaatatctga

SEQ ID NO: 70706 - DNA, 25 bp, Saccharomyces pastorianus
gaactctatttatatggtgaccaag

SEQ ID NO: 70707 - DNA, 25 bp, Saccharomyces pastorianus
ttgtccttggcgcattcatggcgtc

SEQ ID NO: 70708 - DNA, 25 bp, Saccharomyces pastorianus
atttacatccaagtcatgcataggg

SEQ ID NO: 70709 - DNA, 25 bp, Saccharomyces pastorianus
tcatggcgtctttcgtcggaacaag

SEQ ID NO: 70710 - DNA, 25 bp, Saccharomyces pastorianus
atatcttcaatatcgttggccctcg

SEQ ID NO: 70711 - DNA, 25 bp, Saccharomyces pastorianus
gtctcatgggtcatcgccattgcgg

SEQ ID NO: 70712 - DNA, 25 bp, Saccharomyces pastorianus
gcaaggacacacgtatggccactga

SEQ ID NO: 70713 - DNA, 25 bp, Saccharomyces pastorianus
gggtcatcgccattgcgggttccat

SEQ ID NO: 70714 - DNA, 25 bp, Saccharomyces pastorianus
atatcgttggccctcgtctcatggg

SEQ ID NO: 70715 - DNA, 25 bp, Saccharomyces pastorianus
ttctatgctgatccgttcgctatat

SEQ ID NO: 70716 - DNA, 25 bp, Saccharomyces pastorianus
tgaagaacttctatgctgatccgtt

SEQ ID NO: 70717 - DNA, 25 bp, Saccharomyces pastorianus
gccactgaccattccttcaatatga

SEQ ID NO: 70718 - DNA, 25 bp, Saccharomyces pastorianus
tgatccgttcgctatatcttcaata

SEQ ID NO: 70719 - DNA, 25 bp, Saccharomyces pastorianus
ttctgcatccactaaagagtccttc

SEQ ID NO: 70720 - DNA, 25 bp, Saccharomyces pastorianus
attgcgggttccatctcttctgcat

SEQ ID NO: 70721 - DNA, 25 bp, Saccharomyces pastorianus
tttccagaacttcgatgccgttccg

SEQ ID NO: 70722 - DNA, 25 bp, Saccharomyces pastorianus
tatctccgatcgtctctttccagaa

SEQ ID NO: 70723 - DNA, 25 bp, Saccharomyces pastorianus
gtctctttccagaacttcgatgccg

SEQ ID NO: 70724 - DNA, 25 bp, Saccharomyces pastorianus
gatcgtctctttccagaacttcgat

SEQ ID NO: 70725 - DNA, 25 bp, Saccharomyces pastorianus
atgccgttccgcagcactgtgtcaa

SEQ ID NO: 70726 - DNA, 25 bp, Saccharomyces pastorianus
ggtatcagagcgtatctccgatcgt

SEQ ID NO: 70727 - DNA, 25 bp, Saccharomyces pastorianus
gcactgtgtcaagaccattggcgtc

SEQ ID NO: 70728 - DNA, 25 bp, Saccharomyces pastorianus
aagaccattggcgtccatcacgctg

SEQ ID NO: 70729 - DNA, 25 bp, Saccharomyces pastorianus
ttccgcagcactgtgtcaagaccat

SEQ ID NO: 70730 - DNA, 25 bp, Saccharomyces pastorianus
gtgtcaagaccattggcgtccatca

SEQ ID NO: 70731 - DNA, 25 bp, Saccharomyces pastorianus
attggcgtccatcacgctggtgccg

SEQ ID NO: 70732 - DNA, 25 bp, Saccharomyces pastorianus
ttggtctcgtcctccgggtcgatga

SEQ ID NO: 70733 - DNA, 25 bp, Saccharomyces pastorianus
aacagcgtcctccagtatgacgttg

SEQ ID NO: 70734 - DNA, 25 bp, Saccharomyces pastorianus
attctgccgtggtgttgcatgacct

SEQ ID NO: 70735 - DNA, 25 bp, Saccharomyces pastorianus
actctctggttgattgttttgtcta

SEQ ID NO: 70736 - DNA, 25 bp, Saccharomyces pastorianus
tgcatgaccttcttgttcttggtct

SEQ ID NO: 70737 - DNA, 25 bp, Saccharomyces pastorianus
atggcgatgttgttgccgctcaaaa

SEQ ID NO: 70738 - DNA, 25 bp, Saccharomyces pastorianus
agcacgatcagcactctctggttga

SEQ ID NO: 70739 - DNA, 25 bp, Saccharomyces pastorianus
gctcaaaagcattctgccgtggtgt

SEQ ID NO: 70740 - DNA, 25 bp, Saccharomyces pastorianus
gaagtcgtcgaagccgaccagcgtg

SEQ ID NO: 70741 - DNA, 25 bp, Saccharomyces pastorianus
gggtcgatgagccactcaacagcgt

SEQ ID NO: 70742 - DNA, 25 bp, Saccharomyces pastorianus
gcgtgccctcaaattcgcggttcga

SEQ ID NO: 70743 - DNA, 25 bp, Saccharomyces pastorianus
ggatctccggcaagtgctttgacat

SEQ ID NO: 70744 - DNA, 25 bp, Saccharomyces pastorianus
atctcatgaactgcacggtgggcat

SEQ ID NO: 70745 - DNA, 25 bp, Saccharomyces pastorianus
atcgctgctaaattgctacaccgtg

SEQ ID NO: 70746 - DNA, 25 bp, Saccharomyces pastorianus
gctcaagaaggcgttgctgctgcag

SEQ ID NO: 70747 - DNA, 25 bp, Saccharomyces pastorianus
ggatgctcgaacacgacctggagga

SEQ ID NO: 70748 - DNA, 25 bp, Saccharomyces pastorianus
acgtagtcgggatatggcatctcat

SEQ ID NO: 70749 - DNA, 25 bp, Saccharomyces pastorianus
tgctgctgcaggtgctggtgaacta

SEQ ID NO: 70750 - DNA, 25 bp, Saccharomyces pastorianus
acggtgatgattctgtggctgttca

SEQ ID NO: 70751 - DNA, 25 bp, Saccharomyces pastorianus
tgcgggagacggacctgcagttcaa

SEQ ID NO: 70752 - DNA, 25 bp, Saccharomyces pastorianus
tctggtggcacgtcgagcgaagtaa

SEQ ID NO: 70753 - DNA, 25 bp, Saccharomyces pastorianus
ggccgagtacatgtcgaagcttcgc

SEQ ID NO: 70754 - DNA, 25 bp, Saccharomyces pastorianus
aacgcgacgttttccaagctgattg

SEQ ID NO: 70755 - DNA, 25 bp, Saccharomyces pastorianus
aacgcgaaccttgccagacagttgt

SEQ ID NO: 70756 - DNA, 25 bp, Saccharomyces pastorianus
gatctgtctattccgagagagccgc

SEQ ID NO: 70757 - DNA, 25 bp, Saccharomyces pastorianus
gcatcgcgtacttgagatctgtcta

SEQ ID NO: 70758 - DNA, 25 bp, Saccharomyces pastorianus
tgaccgcggcgctcgagaagtacat

SEQ ID NO: 70759 - DNA, 25 bp, Saccharomyces pastorianus
gaatggtgcatctcgacagggtcac

SEQ ID NO: 70760 - DNA, 25 bp, Saccharomyces pastorianus
atgccaaggaaatcgccggtgttct

SEQ ID NO: 70761 - DNA, 25 bp, Saccharomyces pastorianus
agaagcacaacgttatcctggccag

SEQ ID NO: 70762 - DNA, 25 bp, Saccharomyces pastorianus
ggttcggctaccacgagtcgatcaa

SEQ ID NO: 70763 - DNA, 25 bp, Saccharomyces pastorianus
gacagttgtctaagggtggcgccaa

SEQ ID NO: 70764 - DNA, 25 bp, Saccharomyces pastorianus
tgaacggcggctacttcagctggat

SEQ ID NO: 70765 - DNA, 25 bp, Saccharomyces pastorianus
ggctgccccggcagcgtgtccatct

SEQ ID NO: 70766 - DNA, 25 bp, Saccharomyces pastorianus
tgctcctgcggctgctgtagctggg

SEQ ID NO: 70767 - DNA, 25 bp, Saccharomyces pastorianus
tgcggctgctgtagctgggcggcta

SEQ ID NO: 70768 - DNA, 25 bp, Saccharomyces pastorianus
gggaagtcccgcagccgcagtggcg

SEQ ID NO: 70769 - DNA, 25 bp, Saccharomyces pastorianus
gctgctgtagctgggcggctacgcc

SEQ ID NO: 70770 - DNA, 25 bp, Saccharomyces pastorianus
accgccctggccaactgcgggaagt

SEQ ID NO: 70771 - DNA, 25 bp, Saccharomyces pastorianus
ggaagtcccgcagccgcagtggcgg

SEQ ID NO: 70772 - DNA, 25 bp, Saccharomyces pastorianus
tagctgggcggctacgcccaccgcc

SEQ ID NO: 70773 - DNA, 25 bp, Saccharomyces pastorianus
gccctggccaactgcgggaagtccc

SEQ ID NO: 70774 - DNA, 25 bp, Saccharomyces pastorianus
gctgcctgctcctgcggctgctgta

SEQ ID NO: 70775 - DNA, 25 bp, Saccharomyces pastorianus
tcctgcggctgctgtagctgggcgg

SEQ ID NO: 70776 - DNA, 25 bp, Saccharomyces pastorianus
tacgtgttgcccgtcgggttcgcaa

SEQ ID NO: 70777 - DNA, 25 bp, Saccharomyces pastorianus
agcatgtcgtacttccgggcaatgt

SEQ ID NO: 70778 - DNA, 25 bp, Saccharomyces pastorianus
caatgtcgatgagtctgcgtctggt

SEQ ID NO: 70779 - DNA, 25 bp, Saccharomyces pastorianus
gtggtgtagtccaggatgtcgtaca

SEQ ID NO: 70780 - DNA, 25 bp, Saccharomyces pastorianus
tcatcggtgatgaccagcatgtcgt

SEQ ID NO: 70781 - DNA, 25 bp, Saccharomyces pastorianus
gtacttccgggcaatgtcgatgagt

SEQ ID NO: 70782 - DNA, 25 bp, Saccharomyces pastorianus
gatgagtctgcgtctggtttcggac

SEQ ID NO: 70783 - DNA, 25 bp, Saccharomyces pastorianus
tgatgaccagcatgtcgtacttccg

SEQ ID NO: 70784 - DNA, 25 bp, Saccharomyces pastorianus
tttcggacgagtacgtgttgcccgt

SEQ ID NO: 70785 - DNA, 25 bp, Saccharomyces pastorianus
ggatgtcgtacacatcatcggtgat

SEQ ID NO: 70786 - DNA, 25 bp, Saccharomyces pastorianus
gtctgcgtctggtttcggacgagta

SEQ ID NO: 70787 - DNA, 25 bp, Saccharomyces pastorianus
gtcgtattctgtatcatcgttaaaa

SEQ ID NO: 70788 - DNA, 25 bp, Saccharomyces pastorianus
gggaggcccgatatgtgtatcttcg

SEQ ID NO: 70789 - DNA, 25 bp, Saccharomyces pastorianus
cgatatgtgtatcttcgttgctact

SEQ ID NO: 70790 - DNA, 25 bp, Saccharomyces pastorianus
aaaactaactcgtggccgactgtat

SEQ ID NO: 70791 - DNA, 25 bp, Saccharomyces pastorianus
cgtggccgactgtattcattagctg

SEQ ID NO: 70792 - DNA, 25 bp, Saccharomyces pastorianus
gcctcttcgcgtttacttttgggtg

SEQ ID NO: 70793 - DNA, 25 bp, Saccharomyces pastorianus
tgtattcattagctggtacgccatc

SEQ ID NO: 70794 - DNA, 25 bp, Saccharomyces pastorianus
aaagtgaattcttcagcctcttcgc

SEQ ID NO: 70795 - DNA, 25 bp, Saccharomyces pastorianus
gtggttcgtcattaaaactaactcg

SEQ ID NO: 70796 - DNA, 25 bp, Saccharomyces pastorianus
atggttgtcgtattctgtatcatcg

SEQ ID NO: 70797 - DNA, 25 bp, Saccharomyces pastorianus
tagctggtacgccatcattgacatg

SEQ ID NO: 70798 - DNA, 25 bp, Saccharomyces pastorianus
tggtgttgtattcaaaacggcctta

SEQ ID NO: 70799 - DNA, 25 bp, Saccharomyces pastorianus
atgacattcatggatcttctcgctt

SEQ ID NO: 70800 - DNA, 25 bp, Saccharomyces pastorianus
ggttatccctttttaattcatggtg

SEQ ID NO: 70801 - DNA, 25 bp, Saccharomyces pastorianus
tgtacaagtgattgcccctgaagag

SEQ ID NO: 70802 - DNA, 25 bp, Saccharomyces pastorianus
ggcattgaatacaccaggcgggatt

SEQ ID NO: 70803 - DNA, 25 bp, Saccharomyces pastorianus
gggattgccataccaccaagaattt

SEQ ID NO: 70804 - DNA, 25 bp, Saccharomyces pastorianus
tggtggaatcctagcaacagtaatt

SEQ ID NO: 70805 - DNA, 25 bp, Saccharomyces pastorianus
ccatggaccattttcggcggaagtt

SEQ ID NO: 70806 - DNA, 25 bp, Saccharomyces pastorianus
gggatggtacttaacgcaacatatg

SEQ ID NO: 70807 - DNA, 25 bp, Saccharomyces pastorianus
gttcctcacattagccaatcagttt

SEQ ID NO: 70808 - DNA, 25 bp, Saccharomyces pastorianus
agcgtttcatacaagttcctcacat

SEQ ID NO: 70809 - DNA, 25 bp, Saccharomyces pastorianus
ttcctttgaacgttatcaccggtct

SEQ ID NO: 70810 - DNA, 25 bp, Saccharomyces pastorianus
aggtgtaatgctagttcctttgaac

SEQ ID NO: 70811 - DNA, 25 bp, Saccharomyces pastorianus
aacgaagctgcggaaagcggtgcca

SEQ ID NO: 70812 - DNA, 25 bp, Saccharomyces pastorianus
gggtttcttgattttactgggcatt

SEQ ID NO: 70813 - DNA, 25 bp, Saccharomyces pastorianus
actatgtgctcacaacttcacaacc

SEQ ID NO: 70814 - DNA, 25 bp, Saccharomyces pastorianus
atcggtcatatccagttttttgcca

SEQ ID NO: 70815 - DNA, 25 bp, Saccharomyces pastorianus
ggctcagttgcaagtagaatcattt

SEQ ID NO: 70816 - DNA, 25 bp, Saccharomyces pastorianus
acgttatcaccggtctgtttggtat

SEQ ID NO: 70817 - DNA, 25 bp, Saccharomyces pastorianus
agcggtgccaaatcggtcatatcca

SEQ ID NO: 70818 - DNA, 25 bp, Saccharomyces pastorianus
caaagtatttggctcagttgcaagt

SEQ ID NO: 70819 - DNA, 25 bp, Saccharomyces pastorianus
ggcattgcaggttggctcttagcga

SEQ ID NO: 70820 - DNA, 25 bp, Saccharomyces pastorianus
aaatttctgcctcaatgatgacgac

SEQ ID NO: 70821 - DNA, 25 bp, Saccharomyces pastorianus
ttaccctcgtctgaataaatcgcca

SEQ ID NO: 70822 - DNA, 25 bp, Saccharomyces pastorianus
gagtgtcactacaacgtttaacgag

SEQ ID NO: 70823 - DNA, 25 bp, Saccharomyces pastorianus
tccatatatttaccctcgtctgaat

SEQ ID NO: 70824 - DNA, 25 bp, Saccharomyces pastorianus
gtcaaagggttcgatcctccatata

SEQ ID NO: 70825 - DNA, 25 bp, Saccharomyces pastorianus
gaaaaatctgcgctcctggaaaggt

SEQ ID NO: 70826 - DNA, 25 bp, Saccharomyces pastorianus
ggaacactcaggaaaccagcagtat

SEQ ID NO: 70827 - DNA, 25 bp, Saccharomyces pastorianus
atcgctgcccttaaaatccacggaa

SEQ ID NO: 70828 - DNA, 25 bp, Saccharomyces pastorianus
tggaaatttgaatcgctgcccttaa

SEQ ID NO: 70829 - DNA, 25 bp, Saccharomyces pastorianus
gagcacttacacgacgctgtttttg

SEQ ID NO: 70830 - DNA, 25 bp, Saccharomyces pastorianus
aaacgttcccaggtggatgagttca

SEQ ID NO: 70831 - DNA, 25 bp, Saccharomyces pastorianus
gaaatccgggacttccaactggaga

SEQ ID NO: 70832 - DNA, 25 bp, Saccharomyces pastorianus
aaccgcagcgtcgaaatggcagtca

SEQ ID NO: 70833 - DNA, 25 bp, Saccharomyces pastorianus
cacgaggcggttgcgatcgagtacc

SEQ ID NO: 70834 - DNA, 25 bp, Saccharomyces pastorianus
aagtggcattgcatccggatcgatt

SEQ ID NO: 70835 - DNA, 25 bp, Saccharomyces pastorianus
atgttgttgagcgtgaggttcctga

SEQ ID NO: 70836 - DNA, 25 bp, Saccharomyces pastorianus
agaaccagcccgtggcgacggaaga

SEQ ID NO: 70837 - DNA, 25 bp, Saccharomyces pastorianus
aaaccggtcagaatcgcgaacgtcg

SEQ ID NO: 70838 - DNA, 25 bp, Saccharomyces pastorianus
gagctggagcccatcgatgagtttg

SEQ ID NO: 70839 - DNA, 25 bp, Saccharomyces pastorianus
acatggtcaaggcatactcgctggg

SEQ ID NO: 70840 - DNA, 25 bp, Saccharomyces pastorianus
gaacccagacgaactgccgatgtgc

SEQ ID NO: 70841 - DNA, 25 bp, Saccharomyces pastorianus
aggttcctgaaagctacgcggacga

SEQ ID NO: 70842 - DNA, 25 bp, Saccharomyces pastorianus
gctggttgtcagtgtcatcggtctc

SEQ ID NO: 70843 - DNA, 25 bp, Saccharomyces pastorianus
ttaatgtgctggaacgacgtgcgat

SEQ ID NO: 70844 - DNA, 25 bp, Saccharomyces pastorianus
gtttaaattcagatccgggtcgaga

SEQ ID NO: 70845 - DNA, 25 bp, Saccharomyces pastorianus
cgcgccgttaagattcatgtccgaa

SEQ ID NO: 70846 - DNA, 25 bp, Saccharomyces pastorianus
atcggtctcgttgttagtcgtcgcc

SEQ ID NO: 70847 - DNA, 25 bp, Saccharomyces pastorianus
gtgcgattgtgcaggcgccaagaaa

SEQ ID NO: 70848 - DNA, 25 bp, Saccharomyces pastorianus
ggctctgttcttgctcataacttta

SEQ ID NO: 70849 - DNA, 25 bp, Saccharomyces pastorianus
gagtctggcaatattttctgcgcgc

SEQ ID NO: 70850 - DNA, 25 bp, Saccharomyces pastorianus
tgcgcgctcgagtacagattccaaa

SEQ ID NO: 70851 - DNA, 25 bp, Saccharomyces pastorianus
atccatgtcgttcagcaggtcggag

SEQ ID NO: 70852 - DNA, 25 bp, Saccharomyces pastorianus
aaacacgttctcgaacacggacgcg

SEQ ID NO: 70853 - DNA, 25 bp, Saccharomyces pastorianus
accaccattgtcatcaccgtagtag

SEQ ID NO: 70854 - DNA, 25 bp, Saccharomyces pastorianus
gtagtagttgttttcgacatagaca

SEQ ID NO: 70855 - DNA, 25 bp, Saccharomyces pastorianus
acattatcttggtcgtggttatcaa

SEQ ID NO: 70856 - DNA, 25 bp, Saccharomyces pastorianus
gttttcgacatagacattatcttgg

SEQ ID NO: 70857 - DNA, 25 bp, Saccharomyces pastorianus
tcaccgtagtagttgttttcgacat

SEQ ID NO: 70858 - DNA, 25 bp, Saccharomyces pastorianus
aaatgcattttccagcatggctcca

SEQ ID NO: 70859 - DNA, 25 bp, Saccharomyces pastorianus
accattgtcatcaccgtagtagttg

SEQ ID NO: 70860 - DNA, 25 bp, Saccharomyces pastorianus
gccgtcatagccaccgtcgaagtca

SEQ ID NO: 70861 - DNA, 25 bp, Saccharomyces pastorianus
gtcgaagtcaccaccattgtcatca

SEQ ID NO: 70862 - DNA, 25 bp, Saccharomyces pastorianus
ggtcgtggttatcaaatgcattttc

SEQ ID NO: 70863 - DNA, 25 bp, Saccharomyces pastorianus
tgtcatcaccgtagtagttgttttc

SEQ ID NO: 70864 - DNA, 25 bp, Saccharomyces pastorianus
aacgcttgccaggtagcctattgga

SEQ ID NO: 70865 - DNA, 25 bp, Saccharomyces pastorianus
gggagcctcctgctgaagacttttc

SEQ ID NO: 70866 - DNA, 25 bp, Saccharomyces pastorianus
aagacttttcccttgatcgccaaat

SEQ ID NO: 70867 - DNA, 25 bp, Saccharomyces pastorianus
gattgctactacgagtccagcgaaa

SEQ ID NO: 70868 - DNA, 25 bp, Saccharomyces pastorianus
cgctgcagaccaaacactcatgtga

SEQ ID NO: 70869 - DNA, 25 bp, Saccharomyces pastorianus
agtacgtgccttaatgacaatttcg

SEQ ID NO: 70870 - DNA, 25 bp, Saccharomyces pastorianus
gccttgctagctgtgacgataaacg

SEQ ID NO: 70871 - DNA, 25 bp, Saccharomyces pastorianus
ttttagcttcctacgacgggtctgt

SEQ ID NO: 70872 - DNA, 25 bp, Saccharomyces pastorianus
gacaatttcgaggaacgcttgccag

SEQ ID NO: 70873 - DNA, 25 bp, Saccharomyces pastorianus
gaatgccttgatgtagcgttatcgt

SEQ ID NO: 70874 - DNA, 25 bp, Saccharomyces pastorianus
gcgttatcgtcaccatcgtacataa

SEQ ID NO: 70875 - DNA, 25 bp, Saccharomyces pastorianus
atgatggtcgatcccttgtatagcg

SEQ ID NO: 70876 - DNA, 25 bp, Saccharomyces pastorianus
ggttgacaaaaccattctgttcgtc

SEQ ID NO: 70877 - DNA, 25 bp, Saccharomyces pastorianus
tctgttcgtctggattacgaccaat

SEQ ID NO: 70878 - DNA, 25 bp, Saccharomyces pastorianus
ggattacgaccaataacggtcagtt

SEQ ID NO: 70879 - DNA, 25 bp, Saccharomyces pastorianus
gacaaaaccattctgttcgtctgga

SEQ ID NO: 70880 - DNA, 25 bp, Saccharomyces pastorianus
tggtcgatcccttgtatagcggcgg

SEQ ID NO: 70881 - DNA, 25 bp, Saccharomyces pastorianus
ttgcgtagtgatatcgaaagttgac

SEQ ID NO: 70882 - DNA, 25 bp, Saccharomyces pastorianus
taacggtcagttgcgtagtgatatc

SEQ ID NO: 70883 - DNA, 25 bp, Saccharomyces pastorianus
tagcggcgggttgacaaaaccattc

SEQ ID NO: 70884 - DNA, 25 bp, Saccharomyces pastorianus
atcccttgtatagcggcgggttgac

SEQ ID NO: 70885 - DNA, 25 bp, Saccharomyces pastorianus
aaccattctgttcgtctggattacg

SEQ ID NO: 70886 - DNA, 25 bp, Saccharomyces pastorianus
gacctagcggcttggttgggaaaca

SEQ ID NO: 70887 - DNA, 25 bp, Saccharomyces pastorianus
attgccagctggctttgcgaggaat

SEQ ID NO: 70888 - DNA, 25 bp, Saccharomyces pastorianus
ttggtctaacctctgctaatcaaga

SEQ ID NO: 70889 - DNA, 25 bp, Saccharomyces pastorianus
ctcatcgcggttttgctttacgaat

SEQ ID NO: 70890 - DNA, 25 bp, Saccharomyces pastorianus
caaaggttcctctgggttattctct

SEQ ID NO: 70891 - DNA, 25 bp, Saccharomyces pastorianus
ggttattctctatcgtcctcaaaga

SEQ ID NO: 70892 - DNA, 25 bp, Saccharomyces pastorianus
ggtcaacttacgatgcgatggctat

SEQ ID NO: 70893 - DNA, 25 bp, Saccharomyces pastorianus
gtcctgggcacaagtactggttacg

SEQ ID NO: 70894 - DNA, 25 bp, Saccharomyces pastorianus
atcaagaatgctggccactattacg

SEQ ID NO: 70895 - DNA, 25 bp, Saccharomyces pastorianus
tttaggtgggcattctgactttctc

SEQ ID NO: 70896 - DNA, 25 bp, Saccharomyces pastorianus
ttaccaggtgccgacgattgccagc

SEQ ID NO: 70897 - DNA, 25 bp, Saccharomyces pastorianus
agcaacggcaatactccagagacaa

SEQ ID NO: 70898 - DNA, 25 bp, Saccharomyces pastorianus
gaagacctttcaatctccaatttca

SEQ ID NO: 70899 - DNA, 25 bp, Saccharomyces pastorianus
gaaaatgcatcgtccaacaataaga

SEQ ID NO: 70900 - DNA, 25 bp, Saccharomyces pastorianus
gaaattatcttgtggaaactcgacc

SEQ ID NO: 70901 - DNA, 25 bp, Saccharomyces pastorianus
acttgttttgaactacttggaggca

SEQ ID NO: 70902 - DNA, 25 bp, Saccharomyces pastorianus
ctccctctgtacctgaaaaatgcct

SEQ ID NO: 70903 - DNA, 25 bp, Saccharomyces pastorianus
catagccattgtgtgcggtgggtct

SEQ ID NO: 70904 - DNA, 25 bp, Saccharomyces pastorianus
ccgtcgtactacgtgactcaggaat

SEQ ID NO: 70905 - DNA, 25 bp, Saccharomyces pastorianus
agcatagttttactcttcacaagga

SEQ ID NO: 70906 - DNA, 25 bp, Saccharomyces pastorianus
acaagtcatagtcctacggccaaga

SEQ ID NO: 70907 - DNA, 25 bp, Saccharomyces pastorianus
tcttttggcctaccagtatttaggt

SEQ ID NO: 70908 - DNA, 25 bp, Saccharomyces pastorianus
gaattctaacgagccaaaacacact

SEQ ID NO: 70909 - DNA, 25 bp, Saccharomyces pastorianus
gcattttggcacatttacgtatgca

SEQ ID NO: 70910 - DNA, 25 bp, Saccharomyces pastorianus
gggagcacacacttttagaatctgg

SEQ ID NO: 70911 - DNA, 25 bp, Saccharomyces pastorianus
aaccccgataacgtcattgagatag

SEQ ID NO: 70912 - DNA, 25 bp, Saccharomyces pastorianus
ttcggtactggtctgcaagcatttt

SEQ ID NO: 70913 - DNA, 25 bp, Saccharomyces pastorianus
gcctacatcgacaccgaacttgttt

SEQ ID NO: 70914 - DNA, 25 bp, Saccharomyces pastorianus
cacacttacatctcgctaattggga

SEQ ID NO: 70915 - DNA, 25 bp, Saccharomyces pastorianus
tatttttggttgtctgcctacatcg

SEQ ID NO: 70916 - DNA, 25 bp, Saccharomyces pastorianus
caaatgatgctgtttctagtagtga

SEQ ID NO: 70917 - DNA, 25 bp, Saccharomyces pastorianus
gattccgaaatcaaccccgataacg

SEQ ID NO: 70918 - DNA, 25 bp, Saccharomyces pastorianus
tttgccagttgacatgtttcggtac

SEQ ID NO: 70919 - DNA, 25 bp, Saccharomyces pastorianus
tgtccttccttttcctttgcctctt

SEQ ID NO: 70920 - DNA, 25 bp, Saccharomyces pastorianus
tttgcctcttcctcttgttcttctc

SEQ ID NO: 70921 - DNA, 25 bp, Saccharomyces pastorianus
ttttcctttgcctcttcctcttgtt

SEQ ID NO: 70922 - DNA, 25 bp, Saccharomyces pastorianus
ttccttttcctttgcctcttcctct

SEQ ID NO: 70923 - DNA, 25 bp, Saccharomyces pastorianus
tttcctttgcctcttcctcttgttc

SEQ ID NO: 70924 - DNA, 25 bp, Saccharomyces pastorianus
ttcctttgcctcttcctcttgttct

SEQ ID NO: 70925 - DNA, 25 bp, Saccharomyces pastorianus
ttgcctcttcctcttgttcttctca

SEQ ID NO: 70926 - DNA, 25 bp, Saccharomyces pastorianus
cttttcctttgcctcttcctcttgt

SEQ ID NO: 70927 - DNA, 25 bp, Saccharomyces pastorianus
ctttgcctcttcctcttgttcttct

SEQ ID NO: 70928 - DNA, 25 bp, Saccharomyces pastorianus
ttgtccttccttttcctttgcctct

SEQ ID NO: 70929 - DNA, 25 bp, Saccharomyces pastorianus
tcctttgcctcttcctcttgttctt

SEQ ID NO: 70930 - DNA, 25 bp, Saccharomyces pastorianus
cagcaggtgttactgttagcatcaa

SEQ ID NO: 70931 - DNA, 25 bp, Saccharomyces pastorianus
tccagcaggtgttactgttagcatc

SEQ ID NO: 70932 - DNA, 25 bp, Saccharomyces pastorianus
tcgtcaaggtcgaaggtccaagagg

SEQ ID NO: 70933 - DNA, 25 bp, Saccharomyces pastorianus
aacgttccagcaggtgttactgtta

SEQ ID NO: 70934 - DNA, 25 bp, Saccharomyces pastorianus
ttaacgttccagcaggtgttactgt

SEQ ID NO: 70935 - DNA, 25 bp, Saccharomyces pastorianus
actgaacaacaaattaacgttccag

SEQ ID NO: 70936 - DNA, 25 bp, Saccharomyces pastorianus
agaatcgtcaaggtcgaaggtccaa

SEQ ID NO: 70937 - DNA, 25 bp, Saccharomyces pastorianus
aattaacgttccagcaggtgttact

SEQ ID NO: 70938 - DNA, 25 bp, Saccharomyces pastorianus
gttccagcaggtgttactgttagca

SEQ ID NO: 70939 - DNA, 25 bp, Saccharomyces pastorianus
caggtgttactgttagcatcaagtc

SEQ ID NO: 70940 - DNA, 25 bp, Saccharomyces pastorianus
atcgtcaaggtcgaaggtccaagag

SEQ ID NO: 70941 - DNA, 25 bp, Saccharomyces pastorianus
acagccctgcgaaagtggttgatct

SEQ ID NO: 70942 - DNA, 25 bp, Saccharomyces pastorianus
gtggttgatctgattccgaatggtt

SEQ ID NO: 70943 - DNA, 25 bp, Saccharomyces pastorianus
aaaatttgtcacatccgttcctcag

SEQ ID NO: 70944 - DNA, 25 bp, Saccharomyces pastorianus
tgaaatcgatgagcccaacagccct

SEQ ID NO: 70945 - DNA, 25 bp, Saccharomyces pastorianus
tgtaattattgctccacactggatg

SEQ ID NO: 70946 - DNA, 25 bp, Saccharomyces pastorianus
aattgctgaactactcgaacggatt

SEQ ID NO: 70947 - DNA, 25 bp, Saccharomyces pastorianus
cgttcctcaggctccgttacaggat

SEQ ID NO: 70948 - DNA, 25 bp, Saccharomyces pastorianus
acggattcttatcttccttttcaga

SEQ ID NO: 70949 - DNA, 25 bp, Saccharomyces pastorianus
ggacgatcagacaattgtggacttt

SEQ ID NO: 70950 - DNA, 25 bp, Saccharomyces pastorianus
tccttttcagatctcggaagttatg

SEQ ID NO: 70951 - DNA, 25 bp, Saccharomyces pastorianus
aaacctgtttcagcgtttcacggag

SEQ ID NO: 70952 - DNA, 25 bp, Saccharomyces pastorianus
atgtttcttcatcaatcttgcctaa

SEQ ID NO: 70953 - DNA, 25 bp, Saccharomyces pastorianus
tatcgactcagacccgacattatgg

SEQ ID NO: 70954 - DNA, 25 bp, Saccharomyces pastorianus
ggaattctttcacaccaagttcagt

SEQ ID NO: 70955 - DNA, 25 bp, Saccharomyces pastorianus
attagatttctactgccttctcgca

SEQ ID NO: 70956 - DNA, 25 bp, Saccharomyces pastorianus
gaactttgtcagaagactctcgtgg

SEQ ID NO: 70957 - DNA, 25 bp, Saccharomyces pastorianus
ttgcaaaactgctcatccctaattt

SEQ ID NO: 70958 - DNA, 25 bp, Saccharomyces pastorianus
gaaggcatattcacattccagggaa

SEQ ID NO: 70959 - DNA, 25 bp, Saccharomyces pastorianus
gactatgtttccgacgaaggccacg

SEQ ID NO: 70960 - DNA, 25 bp, Saccharomyces pastorianus
gcgttatattgcaagttctcccaat

SEQ ID NO: 70961 - DNA, 25 bp, Saccharomyces pastorianus
aagaactccgttctgatcactttac

SEQ ID NO: 70962 - DNA, 25 bp, Saccharomyces pastorianus
agctaatccgctcttttcagtttta

SEQ ID NO: 70963 - DNA, 25 bp, Saccharomyces pastorianus
ggcatctataaataagaccccgttg

SEQ ID NO: 70964 - DNA, 25 bp, Saccharomyces pastorianus
agcacttcaagaggcatctataaat

SEQ ID NO: 70965 - DNA, 25 bp, Saccharomyces pastorianus
gaggcatctataaataagaccccgt

SEQ ID NO: 70966 - DNA, 25 bp, Saccharomyces pastorianus
atgagagcacttcaagaggcatcta

SEQ ID NO: 70967 - DNA, 25 bp, Saccharomyces pastorianus
tataaataagaccccgttgcctcaa

SEQ ID NO: 70968 - DNA, 25 bp, Saccharomyces pastorianus
tctataaataagaccccgttgcctc

SEQ ID NO: 70969 - DNA, 25 bp, Saccharomyces pastorianus
atttcttgtataatgagagcacttc

SEQ ID NO: 70970 - DNA, 25 bp, Saccharomyces pastorianus
taatgagagcacttcaagaggcatc

SEQ ID NO: 70971 - DNA, 25 bp, Saccharomyces pastorianus
gagcacttcaagaggcatctataaa

SEQ ID NO: 70972 - DNA, 25 bp, Saccharomyces pastorianus
ctataaataagaccccgttgcctca

SEQ ID NO: 70973 - DNA, 25 bp, Saccharomyces pastorianus
gagagcacttcaagaggcatctata

SEQ ID NO: 70974 - DNA, 25 bp, Saccharomyces pastorianus
ttccctcccaggatgatattctgac

SEQ ID NO: 70975 - DNA, 25 bp, Saccharomyces pastorianus
gcgcgctacagcttacaaagggtta

SEQ ID NO: 70976 - DNA, 25 bp, Saccharomyces pastorianus
gatattctgacaagttttgccaaga

SEQ ID NO: 70977 - DNA, 25 bp, Saccharomyces pastorianus
gtggcgctgatagttcaggttttct

SEQ ID NO: 70978 - DNA, 25 bp, Saccharomyces pastorianus
atggagcttctttatgccactgggc

SEQ ID NO: 70979 - DNA, 25 bp, Saccharomyces pastorianus
taaagaggcattggcgcgcgctaca

SEQ ID NO: 70980 - DNA, 25 bp, Saccharomyces pastorianus
tatttactaggttcaccctatgtga

SEQ ID NO: 70981 - DNA, 25 bp, Saccharomyces pastorianus
tttggtgctgttcctgggttttact

SEQ ID NO: 70982 - DNA, 25 bp, Saccharomyces pastorianus
agagtttaccagtcttgtctaccca

SEQ ID NO: 70983 - DNA, 25 bp, Saccharomyces pastorianus
caagagatgtttggccgttgggtac

SEQ ID NO: 70984 - DNA, 25 bp, Saccharomyces pastorianus
gtatctatattgtcatgcttgcggc

SEQ ID NO: 70985 - DNA, 25 bp, Saccharomyces pastorianus
agaccattaccaatccgttgatttg

SEQ ID NO: 70986 - DNA, 25 bp, Saccharomyces pastorianus
ggcgaatacttctggtgttagcata

SEQ ID NO: 70987 - DNA, 25 bp, Saccharomyces pastorianus
atattttaccttgtgaaccgccgca

SEQ ID NO: 70988 - DNA, 25 bp, Saccharomyces pastorianus
ggcctggtctcaagtagcacatcaa

SEQ ID NO: 70989 - DNA, 25 bp, Saccharomyces pastorianus
taccgcgagattttcactactgatg

SEQ ID NO: 70990 - DNA, 25 bp, Saccharomyces pastorianus
gtgtgaactctatccaggccaatat

SEQ ID NO: 70991 - DNA, 25 bp, Saccharomyces pastorianus
tgctcgaggaggaattaacccattt

SEQ ID NO: 70992 - DNA, 25 bp, Saccharomyces pastorianus
gtttcaagtacgaacagcacgctaa

SEQ ID NO: 70993 - DNA, 25 bp, Saccharomyces pastorianus
atgtatgaaccttggccccagacag

SEQ ID NO: 70994 - DNA, 25 bp, Saccharomyces pastorianus
catgacctaatacggcttttctttt

SEQ ID NO: 70995 - DNA, 25 bp, Saccharomyces pastorianus
aaacttgaggtctagagctgcattc

SEQ ID NO: 70996 - DNA, 25 bp, Saccharomyces pastorianus
aagatactccccagcctgatgagtt

SEQ ID NO: 70997 - DNA, 25 bp, Saccharomyces pastorianus
tagaagaatctacctgcagcaataa

SEQ ID NO: 70998 - DNA, 25 bp, Saccharomyces pastorianus
gcctgcccataccaaatacatgttg

SEQ ID NO: 70999 - DNA, 25 bp, Saccharomyces pastorianus
gatagtgctaatgtttcaccaccag

SEQ ID NO: 71000 - DNA, 25 bp, Saccharomyces pastorianus
gcagcaatcctaacttacctcagta

SEQ ID NO: 71001 - DNA, 25 bp, Saccharomyces pastorianus
tcttccctggtgaaattgtgtatct

SEQ ID NO: 71002 - DNA, 25 bp, Saccharomyces pastorianus
gatgatgaaccttccactgttgcaa

SEQ ID NO: 71003 - DNA, 25 bp, Saccharomyces pastorianus
cagggatcgttctactttcactaaa

SEQ ID NO: 71004 - DNA, 25 bp, Saccharomyces pastorianus
gcaccttggtgcgttaaacctgaat

SEQ ID NO: 71005 - DNA, 25 bp, Saccharomyces pastorianus
aagaaatagcgatgcctgcccatac

SEQ ID NO: 71006 - DNA, 25 bp, Saccharomyces pastorianus
tgaccaagggcagatttacagggat

SEQ ID NO: 71007 - DNA, 25 bp, Saccharomyces pastorianus
gaaagtgcatccaactctaaatctg

SEQ ID NO: 71008 - DNA, 25 bp, Saccharomyces pastorianus
acaagggcagatgacgcagcagcaa

SEQ ID NO: 71009 - DNA, 25 bp, Saccharomyces pastorianus
aaagccggataactcaagtcccaca

SEQ ID NO: 71010 - DNA, 25 bp, Saccharomyces pastorianus
ggtccgccttactcattgaagtttt

SEQ ID NO: 71011 - DNA, 25 bp, Saccharomyces pastorianus
gaagtttttactgcattattgcgtc

SEQ ID NO: 71012 - DNA, 25 bp, Saccharomyces pastorianus
gcaaagaaatccgttcatccgtgaa

SEQ ID NO: 71013 - DNA, 25 bp, Saccharomyces pastorianus
cacctctctgaaatgtacggacgca

SEQ ID NO: 71014 - DNA, 25 bp, Saccharomyces pastorianus
gattatccatgacgatccagcaaca

SEQ ID NO: 71015 - DNA, 25 bp, Saccharomyces pastorianus
ttgaccagttcatcacctctctgaa

SEQ ID NO: 71016 - DNA, 25 bp, Saccharomyces pastorianus
gggtagcagctcactcttgaaaaca

SEQ ID NO: 71017 - DNA, 25 bp, Saccharomyces pastorianus
ttatctcacttcagtcttgaccagt

SEQ ID NO: 71018 - DNA, 25 bp, Saccharomyces pastorianus
tcttcgacgcagtcggtcacgtgaa

SEQ ID NO: 71019 - DNA, 25 bp, Saccharomyces pastorianus
tggtacgtgttcaggcgctacgcca

SEQ ID NO: 71020 - DNA, 25 bp, Saccharomyces pastorianus
atctggttcggcgtgggcccgatca

SEQ ID NO: 71021 - DNA, 25 bp, Saccharomyces pastorianus
ggcccgatcatggacctggtgtttg

SEQ ID NO: 71022 - DNA, 25 bp, Saccharomyces pastorianus
atggcgcactcgttcaggcgctacg

SEQ ID NO: 71023 - DNA, 25 bp, Saccharomyces pastorianus
aaacgctgaacaaggacggactggt

SEQ ID NO: 71024 - DNA, 25 bp, Saccharomyces pastorianus
acggactggtgaacgctgtgttcgt

SEQ ID NO: 71025 - DNA, 25 bp, Saccharomyces pastorianus
gatacctcataaacgcgtacggctg

SEQ ID NO: 71026 - DNA, 25 bp, Saccharomyces pastorianus
tacgtgttcacgcagggcatctggt

SEQ ID NO: 71027 - DNA, 25 bp, Saccharomyces pastorianus
gacttccagggctcggagactcgga

SEQ ID NO: 71028 - DNA, 25 bp, Saccharomyces pastorianus
gtggtggtgcatcatacgctacctg

SEQ ID NO: 71029 - DNA, 25 bp, Saccharomyces pastorianus
tatcagctttctctggcgttgtgaa

SEQ ID NO: 71030 - DNA, 25 bp, Saccharomyces pastorianus
gggcgttgtagactatttcctcact

SEQ ID NO: 71031 - DNA, 25 bp, Saccharomyces pastorianus
tgcgacacgtttcaatccattagcc

SEQ ID NO: 71032 - DNA, 25 bp, Saccharomyces pastorianus
gagttccaactcctatatcagcttt

SEQ ID NO: 71033 - DNA, 25 bp, Saccharomyces pastorianus
ccaaggcccttggtatggctggtga

SEQ ID NO: 71034 - DNA, 25 bp, Saccharomyces pastorianus
gatagagcctcagggagttccaact

SEQ ID NO: 71035 - DNA, 25 bp, Saccharomyces pastorianus
taggtagatcgtgtccccatgctca

SEQ ID NO: 71036 - DNA, 25 bp, Saccharomyces pastorianus
gaatatccaaactgcccaaagcctt

SEQ ID NO: 71037 - DNA, 25 bp, Saccharomyces pastorianus
ccatgctcatccaactaaagtgtgt

SEQ ID NO: 71038 - DNA, 25 bp, Saccharomyces pastorianus
atagccagcgttttactcaacgtgg

SEQ ID NO: 71039 - DNA, 25 bp, Saccharomyces pastorianus
atgcaccccaattcatgcctattga

SEQ ID NO: 71040 - DNA, 25 bp, Saccharomyces pastorianus
atactctctaccatattccaaggac

SEQ ID NO: 71041 - DNA, 25 bp, Saccharomyces pastorianus
aagccgttcgattctatggtagcac

SEQ ID NO: 71042 - DNA, 25 bp, Saccharomyces pastorianus
atgcaactgtcgtttggtcgcaaca

SEQ ID NO: 71043 - DNA, 25 bp, Saccharomyces pastorianus
tccacggtgaactcgtttctgcaaa

SEQ ID NO: 71044 - DNA, 25 bp, Saccharomyces pastorianus
caagggctttaacaaactgcaggaa

SEQ ID NO: 71045 - DNA, 25 bp, Saccharomyces pastorianus
gtagcactgttaatcccggaatcct

SEQ ID NO: 71046 - DNA, 25 bp, Saccharomyces pastorianus
atcataatgttctacagcggtgtca

SEQ ID NO: 71047 - DNA, 25 bp, Saccharomyces pastorianus
aatgcagacctatccgcgttgagag

SEQ ID NO: 71048 - DNA, 25 bp, Saccharomyces pastorianus
tagacgacaccaccaacgaggagat

SEQ ID NO: 71049 - DNA, 25 bp, Saccharomyces pastorianus
ggagaatgattttgactacgtctac

SEQ ID NO: 71050 - DNA, 25 bp, Saccharomyces pastorianus
aaagctactacttggcatgaacgta

SEQ ID NO: 71051 - DNA, 25 bp, Saccharomyces pastorianus
ttgttgaaaaatacagctcttgctg

SEQ ID NO: 71052 - DNA, 25 bp, Saccharomyces pastorianus
gaaaaatacagctcttgctgcccac

SEQ ID NO: 71053 - DNA, 25 bp, Saccharomyces pastorianus
tagcgatatacctttcagcaatttg

SEQ ID NO: 71054 - DNA, 25 bp, Saccharomyces pastorianus
aacatagcgatatacctttcagcaa

SEQ ID NO: 71055 - DNA, 25 bp, Saccharomyces pastorianus
gctcttctctacaccaatttgatac

SEQ ID NO: 71056 - DNA, 25 bp, Saccharomyces pastorianus
aaatacagctcttgctgcccacaaa

SEQ ID NO: 71057 - DNA, 25 bp, Saccharomyces pastorianus
atttgatacgacaacatagcgatat

SEQ ID NO: 71058 - DNA, 25 bp, Saccharomyces pastorianus
aattgcgctcttctctacaccaatt

SEQ ID NO: 71059 - DNA, 25 bp, Saccharomyces pastorianus
gacaacatagcgatatacctttcag

SEQ ID NO: 71060 - DNA, 25 bp, Saccharomyces pastorianus
ttctctacaccaatttgatacgaca

SEQ ID NO: 71061 - DNA, 25 bp, Saccharomyces pastorianus
gatatacctttcagcaatttgttga

SEQ ID NO: 71062 - DNA, 25 bp, Saccharomyces pastorianus
gttgtaagcgcctctaagttagcaa

SEQ ID NO: 71063 - DNA, 25 bp, Saccharomyces pastorianus
tttcatccatcttgtttgaccctat

SEQ ID NO: 71064 - DNA, 25 bp, Saccharomyces pastorianus
agtgtgctaatatcctatctaggct

SEQ ID NO: 71065 - DNA, 25 bp, Saccharomyces pastorianus
agagttccctgctcttcaaggacgt

SEQ ID NO: 71066 - DNA, 25 bp, Saccharomyces pastorianus
ttaagagctcttccaacacaatcga

SEQ ID NO: 71067 - DNA, 25 bp, Saccharomyces pastorianus
gttagaagctctcgttcaatcccat

SEQ ID NO: 71068 - DNA, 25 bp, Saccharomyces pastorianus
ccatacgttgttgagagttccctgc

SEQ ID NO: 71069 - DNA, 25 bp, Saccharomyces pastorianus
tgttggtcaaattactgccgaagtt

SEQ ID NO: 71070 - DNA, 25 bp, Saccharomyces pastorianus
ttgaccctatttcttacccatacga

SEQ ID NO: 71071 - DNA, 25 bp, Saccharomyces pastorianus
agacatcatcaactaacctcgtgga

SEQ ID NO: 71072 - DNA, 25 bp, Saccharomyces pastorianus
atgaccctagggttcgtgatttagc

SEQ ID NO: 71073 - DNA, 25 bp, Saccharomyces pastorianus
gaaacatcgaaaacggtcgactcgt

SEQ ID NO: 71074 - DNA, 25 bp, Saccharomyces pastorianus
atcgtgaagttcctgcatgttgtaa

SEQ ID NO: 71075 - DNA, 25 bp, Saccharomyces pastorianus
ttgcttgaccttcctttagggcaac

SEQ ID NO: 71076 - DNA, 25 bp, Saccharomyces pastorianus
tgaagttcctgcatgttgtaatgtt

SEQ ID NO: 71077 - DNA, 25 bp, Saccharomyces pastorianus
agccctatcatgaacgattccaaga

SEQ ID NO: 71078 - DNA, 25 bp, Saccharomyces pastorianus
aaataacagccctatcatgaacgat

SEQ ID NO: 71079 - DNA, 25 bp, Saccharomyces pastorianus
agcataatcgtgaagttcctgcatg

SEQ ID NO: 71080 - DNA, 25 bp, Saccharomyces pastorianus
gaacgattccaagagcaaattgctt

SEQ ID NO: 71081 - DNA, 25 bp, Saccharomyces pastorianus
tgaaaagatcgtttcgaaactctta

SEQ ID NO: 71082 - DNA, 25 bp, Saccharomyces pastorianus
agagcaaattgcttgaccttccttt

SEQ ID NO: 71083 - DNA, 25 bp, Saccharomyces pastorianus
cggtcgactcgttgattaatggtat

SEQ ID NO: 71084 - DNA, 25 bp, Saccharomyces pastorianus
cagcttgttagtgagcgagggtaca

SEQ ID NO: 71085 - DNA, 25 bp, Saccharomyces pastorianus
agcgatggatgaagctaagctttca

SEQ ID NO: 71086 - DNA, 25 bp, Saccharomyces pastorianus
gtggtctctgcaaaatccagatcga

SEQ ID NO: 71087 - DNA, 25 bp, Saccharomyces pastorianus
ggagttcgttagttgtattaccatg

SEQ ID NO: 71088 - DNA, 25 bp, Saccharomyces pastorianus
gctgaaagtggtctctgcaaaatcc

SEQ ID NO: 71089 - DNA, 25 bp, Saccharomyces pastorianus
atccagatcgaggaagatgccgtgt

SEQ ID NO: 71090 - DNA, 25 bp, Saccharomyces pastorianus
aattaaaggtggacagcttgttagt

SEQ ID NO: 71091 - DNA, 25 bp, Saccharomyces pastorianus
tgccgtgttagaagcgatggatgaa

SEQ ID NO: 71092 - DNA, 25 bp, Saccharomyces pastorianus
atcgaggaagatgccgtgttagaag

SEQ ID NO: 71093 - DNA, 25 bp, Saccharomyces pastorianus
ggaagatgctgaaagtggtctctgc

SEQ ID NO: 71094 - DNA, 25 bp, Saccharomyces pastorianus
agttcgttagttgtattaccatggt

SEQ ID NO: 71095 - DNA, 25 bp, Saccharomyces pastorianus
ggaattggaatcatcggcgattata

SEQ ID NO: 71096 - DNA, 25 bp, Saccharomyces pastorianus
gtggcaaaaccaatctctgagttaa

SEQ ID NO: 71097 - DNA, 25 bp, Saccharomyces pastorianus
gctgacttatttgcaatggctgata

SEQ ID NO: 71098 - DNA, 25 bp, Saccharomyces pastorianus
gtggtgaccctattgaatgagaaaa

SEQ ID NO: 71099 - DNA, 25 bp, Saccharomyces pastorianus
aagtgtgtggcgatgatattccaga

SEQ ID NO: 71100 - DNA, 25 bp, Saccharomyces pastorianus
gattctgaactcattaatacggaag

SEQ ID NO: 71101 - DNA, 25 bp, Saccharomyces pastorianus
tgcagaatttaatttatgcccagtt

SEQ ID NO: 71102 - DNA, 25 bp, Saccharomyces pastorianus
atatatgttgcctcgctagataata

SEQ ID NO: 71103 - DNA, 25 bp, Saccharomyces pastorianus
acgagagctattgtggtgaccctat

SEQ ID NO: 71104 - DNA, 25 bp, Saccharomyces pastorianus
tgttgtgtcaacgattcatacagaa

SEQ ID NO: 71105 - DNA, 25 bp, Saccharomyces pastorianus
actgaatgaggttttgcggcgtaat

SEQ ID NO: 71106 - DNA, 25 bp, Saccharomyces pastorianus
agcttggtaaagactctatacggga

SEQ ID NO: 71107 - DNA, 25 bp, Saccharomyces pastorianus
gaagcatcgctgatgtttgactcat

SEQ ID NO: 71108 - DNA, 25 bp, Saccharomyces pastorianus
ggaggacgtagtgctcccctcggta

SEQ ID NO: 71109 - DNA, 25 bp, Saccharomyces pastorianus
ggtgaaaatatcattcggttgtaag

SEQ ID NO: 71110 - DNA, 25 bp, Saccharomyces pastorianus
cctcggtacgatcattggtgaaaat

SEQ ID NO: 71111 - DNA, 25 bp, Saccharomyces pastorianus
tcttcaatagcagtggaggacgtag

SEQ ID NO: 71112 - DNA, 25 bp, Saccharomyces pastorianus
ggtcgccccagtatttgcaatattg

SEQ ID NO: 71113 - DNA, 25 bp, Saccharomyces pastorianus
attggtcgccccagtatttgcaata

SEQ ID NO: 71114 - DNA, 25 bp, Saccharomyces pastorianus
gccccagtatttgcaatattgttca

SEQ ID NO: 71115 - DNA, 25 bp, Saccharomyces pastorianus
tcccctcggtacgatcattggtgaa

SEQ ID NO: 71116 - DNA, 25 bp, Saccharomyces pastorianus
gactctatacgggaagcatcgctga

SEQ ID NO: 71117 - DNA, 25 bp, Saccharomyces pastorianus
gaacacgggaccctccagcagcagg

SEQ ID NO: 71118 - DNA, 25 bp, Saccharomyces pastorianus
gggagccctcgggatgtgtttcctt

SEQ ID NO: 71119 - DNA, 25 bp, Saccharomyces pastorianus
ttgctgttgtactgcgcgaacacgg

SEQ ID NO: 71120 - DNA, 25 bp, Saccharomyces pastorianus
agccctcgggatgtgtttccttgtc

SEQ ID NO: 71121 - DNA, 25 bp, Saccharomyces pastorianus
acagccggcgcagcttgctgttgta

SEQ ID NO: 71122 - DNA, 25 bp, Saccharomyces pastorianus
gcagcaggcctgcagcgggagccct

SEQ ID NO: 71123 - DNA, 25 bp, Saccharomyces pastorianus
agcttgctgttgtactgcgcgaaca

SEQ ID NO: 71124 - DNA, 25 bp, Saccharomyces pastorianus
tgtgtttccttgtcgcggcgacgag

SEQ ID NO: 71125 - DNA, 25 bp, Saccharomyces pastorianus
ggatgtgtttccttgtcgcggcgac

SEQ ID NO: 71126 - DNA, 25 bp, Saccharomyces pastorianus
atttcgcggtacaacagccggcgca

SEQ ID NO: 71127 - DNA, 25 bp, Saccharomyces pastorianus
ttgtactgcgcgaacacgggaccct

SEQ ID NO: 71128 - DNA, 25 bp, Saccharomyces pastorianus
gaaagtcgagcgcacggacatccga

SEQ ID NO: 71129 - DNA, 25 bp, Saccharomyces pastorianus
tttgtgcgtcttatcattcagtttg

SEQ ID NO: 71130 - DNA, 25 bp, Saccharomyces pastorianus
ttacgtgcggcgcaacaatcccgtt

SEQ ID NO: 71131 - DNA, 25 bp, Saccharomyces pastorianus
gttgagtatggatttgtgcgtctta

SEQ ID NO: 71132 - DNA, 25 bp, Saccharomyces pastorianus
tcaaagctcgtttcgtgcgtgctaa

SEQ ID NO: 71133 - DNA, 25 bp, Saccharomyces pastorianus
aacaatcccgttctcaaagctcgtt

SEQ ID NO: 71134 - DNA, 25 bp, Saccharomyces pastorianus
ttcgtgcgtgctaagtgatggattc

SEQ ID NO: 71135 - DNA, 25 bp, Saccharomyces pastorianus
actcgattcgaccagctggtgcaag

SEQ ID NO: 71136 - DNA, 25 bp, Saccharomyces pastorianus
gtgatggattcacccgagaattagt

SEQ ID NO: 71137 - DNA, 25 bp, Saccharomyces pastorianus
gaccatatttgttacgtgcggcgca

SEQ ID NO: 71138 - DNA, 25 bp, Saccharomyces pastorianus
ttggaaggaacttcgccactcgatt

SEQ ID NO: 71139 - DNA, 25 bp, Saccharomyces pastorianus
ttcggccaaagtgcaaaaaatcatt

SEQ ID NO: 71140 - DNA, 25 bp, Saccharomyces pastorianus
tgatttttcggccaaagtgcaaaaa

SEQ ID NO: 71141 - DNA, 25 bp, Saccharomyces pastorianus
atggacggaacactagaagtcattg

SEQ ID NO: 71142 - DNA, 25 bp, Saccharomyces pastorianus
gtcattgggtatgatttttcggcca

SEQ ID NO: 71143 - DNA, 25 bp, Saccharomyces pastorianus
ggcgatttctcggacctggtcatat

SEQ ID NO: 71144 - DNA, 25 bp, Saccharomyces pastorianus
gatttctcggacctggtcatatcac

SEQ ID NO: 71145 - DNA, 25 bp, Saccharomyces pastorianus
cggaacactagaagtcattgggtat

SEQ ID NO: 71146 - DNA, 25 bp, Saccharomyces pastorianus
ttctcggacctggtcatatcacacg

SEQ ID NO: 71147 - DNA, 25 bp, Saccharomyces pastorianus
attggcgatttctcggacctggtca

SEQ ID NO: 71148 - DNA, 25 bp, Saccharomyces pastorianus
aatcattggcgatttctcggacctg

SEQ ID NO: 71149 - DNA, 25 bp, Saccharomyces pastorianus
gggtatgatttttcggccaaagtgc

SEQ ID NO: 71150 - DNA, 25 bp, Saccharomyces pastorianus
atttgccatggcttcatcgtgttct

SEQ ID NO: 71151 - DNA, 25 bp, Saccharomyces pastorianus
aacaagttttttctcgatcattatg

SEQ ID NO: 71152 - DNA, 25 bp, Saccharomyces pastorianus
gaattccttcattgcatgccttaaa

SEQ ID NO: 71153 - DNA, 25 bp, Saccharomyces pastorianus
atctttgtccattagaatcttgatc

SEQ ID NO: 71154 - DNA, 25 bp, Saccharomyces pastorianus
gaatcttgatcatttgccatggctt

SEQ ID NO: 71155 - DNA, 25 bp, Saccharomyces pastorianus
catcgtgttctcttcagtggcagaa

SEQ ID NO: 71156 - DNA, 25 bp, Saccharomyces pastorianus
ttgcagctctgatttgaattccttc

SEQ ID NO: 71157 - DNA, 25 bp, Saccharomyces pastorianus
gaagtcccatctaaattaacaagtt

SEQ ID NO: 71158 - DNA, 25 bp, Saccharomyces pastorianus
gttctcttcagtggcagaagtccca

SEQ ID NO: 71159 - DNA, 25 bp, Saccharomyces pastorianus
gcatgccttaaatctttgtccatta

SEQ ID NO: 71160 - DNA, 25 bp, Saccharomyces pastorianus
atggcttcatcgtgttctcttcagt

SEQ ID NO: 71161 - DNA, 25 bp, Saccharomyces pastorianus
tgtttcagcgagagagcactgcccc

SEQ ID NO: 71162 - DNA, 25 bp, Saccharomyces pastorianus
atatttcgtttgcttacctgcccag

SEQ ID NO: 71163 - DNA, 25 bp, Saccharomyces pastorianus
tttcctccggaaaaacttgtgagca

SEQ ID NO: 71164 - DNA, 25 bp, Saccharomyces pastorianus
gcccagcttagctatcgtgatcaag

SEQ ID NO: 71165 - DNA, 25 bp, Saccharomyces pastorianus
gctccgcctttgtttcagcgagaga

SEQ ID NO: 71166 - DNA, 25 bp, Saccharomyces pastorianus
cccgacttcgggaaaatctggagtg

SEQ ID NO: 71167 - DNA, 25 bp, Saccharomyces pastorianus
ttttggctctttgtccatttgtgct

SEQ ID NO: 71168 - DNA, 25 bp, Saccharomyces pastorianus
agcacctgggtgatttttggctctt

SEQ ID NO: 71169 - DNA, 25 bp, Saccharomyces pastorianus
agctatcgtgatcaagcacctgggt

SEQ ID NO: 71170 - DNA, 25 bp, Saccharomyces pastorianus
gggcggcatatttcgtttgcttacc

SEQ ID NO: 71171 - DNA, 25 bp, Saccharomyces pastorianus
ccatgacgacagacgcccagcggga

SEQ ID NO: 71172 - DNA, 25 bp, Saccharomyces pastorianus
gaggcgatcattcccgcagacgtca

SEQ ID NO: 71173 - DNA, 25 bp, Saccharomyces pastorianus
gatcattcccgcagacgtcaagtta

SEQ ID NO: 71174 - DNA, 25 bp, Saccharomyces pastorianus
ccgcagacgtcaagttagaggactt

SEQ ID NO: 71175 - DNA, 25 bp, Saccharomyces pastorianus
tcattcccgcagacgtcaagttaga

SEQ ID NO: 71176 - DNA, 25 bp, Saccharomyces pastorianus
ttggaagtgacgctggccaacaacg

SEQ ID NO: 71177 - DNA, 25 bp, Saccharomyces pastorianus
gacttggaagtgacgctggccaaca

SEQ ID NO: 71178 - DNA, 25 bp, Saccharomyces pastorianus
attcccgcagacgtcaagttagagg

SEQ ID NO: 71179 - DNA, 25 bp, Saccharomyces pastorianus
atcattcccgcagacgtcaagttag

SEQ ID NO: 71180 - DNA, 25 bp, Saccharomyces pastorianus
tggaggcgatcattcccgcagacgt

SEQ ID NO: 71181 - DNA, 25 bp, Saccharomyces pastorianus
atggaggcgatcattcccgcagacg

SEQ ID NO: 71182 - DNA, 25 bp, Saccharomyces pastorianus
aggacttggaagtgacgctggccaa

SEQ ID NO: 71183 - DNA, 25 bp, Saccharomyces pastorianus
tgaaacccgaaaacttccaattcat

SEQ ID NO: 71184 - DNA, 25 bp, Saccharomyces pastorianus
atatcctcgcctcattttgtcgaga

SEQ ID NO: 71185 - DNA, 25 bp, Saccharomyces pastorianus
cccatagacacggatgttgcgttct

SEQ ID NO: 71186 - DNA, 25 bp, Saccharomyces pastorianus
gatgttgcgttctacaacgttgttt

SEQ ID NO: 71187 - DNA, 25 bp, Saccharomyces pastorianus
aatgcctgcagagattgaaacccga

SEQ ID NO: 71188 - DNA, 25 bp, Saccharomyces pastorianus
gatttccttaaatcctcatggtaca

SEQ ID NO: 71189 - DNA, 25 bp, Saccharomyces pastorianus
gaattgcactcacgaagatatcctc

SEQ ID NO: 71190 - DNA, 25 bp, Saccharomyces pastorianus
tgattctttacgtccttacactgtt

SEQ ID NO: 71191 - DNA, 25 bp, Saccharomyces pastorianus
caacgttgtttggatcacggaacta

SEQ ID NO: 71192 - DNA, 25 bp, Saccharomyces pastorianus
gatgccatttgtgaaaactgtattg

SEQ ID NO: 71193 - DNA, 25 bp, Saccharomyces pastorianus
tccaattcatttttgatgccatttg

SEQ ID NO: 71194 - DNA, 25 bp, Saccharomyces pastorianus
aaatcacccacttaactcaaactct

SEQ ID NO: 71195 - DNA, 25 bp, Saccharomyces pastorianus
taattcacaatctgtcgccttctta

SEQ ID NO: 71196 - DNA, 25 bp, Saccharomyces pastorianus
atccatgcaaccattccacatgttg

SEQ ID NO: 71197 - DNA, 25 bp, Saccharomyces pastorianus
aatgggcgcacaattccaacctttt

SEQ ID NO: 71198 - DNA, 25 bp, Saccharomyces pastorianus
ggcaagactggcactgataacgaca

SEQ ID NO: 71199 - DNA, 25 bp, Saccharomyces pastorianus
aggtcacccacacaatatatcttca

SEQ ID NO: 71200 - DNA, 25 bp, Saccharomyces pastorianus
gccaatccatctaggtccagtttta

SEQ ID NO: 71201 - DNA, 25 bp, Saccharomyces pastorianus
tatggaatcaggtctcctttcccta

SEQ ID NO: 71202 - DNA, 25 bp, Saccharomyces pastorianus
aaaaggacagcagccctacgactta

SEQ ID NO: 71203 - DNA, 25 bp, Saccharomyces pastorianus
ttatgctgcagcatacccttatggg

SEQ ID NO: 71204 - DNA, 25 bp, Saccharomyces pastorianus
tcgatgaatcctacccttggaccat

SEQ ID NO: 71205 - DNA, 25 bp, Saccharomyces pastorianus
gaacggtgtccatatcgaagcagat

SEQ ID NO: 71206 - DNA, 25 bp, Saccharomyces pastorianus
gcagattctggagccgaaacgacta

SEQ ID NO: 71207 - DNA, 25 bp, Saccharomyces pastorianus
attcatgcgagtgtacgttcaccac

SEQ ID NO: 71208 - DNA, 25 bp, Saccharomyces pastorianus
ttccctgcgccagctgcgaaatata

SEQ ID NO: 71209 - DNA, 25 bp, Saccharomyces pastorianus
gactgactccagttctagttctgtt

SEQ ID NO: 71210 - DNA, 25 bp, Saccharomyces pastorianus
ttggccggcagggttcgcaaaccga

SEQ ID NO: 71211 - DNA, 25 bp, Saccharomyces pastorianus
caaacttggagggagcgacgattca

SEQ ID NO: 71212 - DNA, 25 bp, Saccharomyces pastorianus
tcaccactcggcatggtagcagacg

SEQ ID NO: 71213 - DNA, 25 bp, Saccharomyces pastorianus
ttcccaatcctcagttgtgtgcaga

SEQ ID NO: 71214 - DNA, 25 bp, Saccharomyces pastorianus
gtgtgcagatggaccttgctcaata

SEQ ID NO: 71215 - DNA, 25 bp, Saccharomyces pastorianus
acgactatggactcaaacggttttg

SEQ ID NO: 71216 - DNA, 25 bp, Saccharomyces pastorianus
tagattactaatcgatccgcctttt

SEQ ID NO: 71217 - DNA, 25 bp, Saccharomyces pastorianus
tgtcatcgcgatagtcagtgcccca

SEQ ID NO: 71218 - DNA, 25 bp, Saccharomyces pastorianus
gaaggcgctgatgaaaacactgtca

SEQ ID NO: 71219 - DNA, 25 bp, Saccharomyces pastorianus
tgttggctggaaaagatcacttctt

SEQ ID NO: 71220 - DNA, 25 bp, Saccharomyces pastorianus
taatcgatccgccttttttgaacga

SEQ ID NO: 71221 - DNA, 25 bp, Saccharomyces pastorianus
gagcatatttacctgtttgaattcg

SEQ ID NO: 71222 - DNA, 25 bp, Saccharomyces pastorianus
gagatgccctattagaaggcgctga

SEQ ID NO: 71223 - DNA, 25 bp, Saccharomyces pastorianus
gactacaacaaacctctcgaattta

SEQ ID NO: 71224 - DNA, 25 bp, Saccharomyces pastorianus
ggcaactctctcaattttggtacag

SEQ ID NO: 71225 - DNA, 25 bp, Saccharomyces pastorianus
catcggtttacgctgcgatccaaaa

SEQ ID NO: 71226 - DNA, 25 bp, Saccharomyces pastorianus
gaaacagccgcaatcctaggagatg

SEQ ID NO: 71227 - DNA, 25 bp, Saccharomyces pastorianus
gaatttaggtgttacgcaaacttcg

SEQ ID NO: 71228 - DNA, 25 bp, Saccharomyces pastorianus
tcttccagagcattctaatggttta

SEQ ID NO: 71229 - DNA, 25 bp, Saccharomyces pastorianus
ggtttattcaaccacaagaattaca

SEQ ID NO: 71230 - DNA, 25 bp, Saccharomyces pastorianus
catttcttccagagcattctaatgg

SEQ ID NO: 71231 - DNA, 25 bp, Saccharomyces pastorianus
ttacgcaaacttcgagtgtaaatct

SEQ ID NO: 71232 - DNA, 25 bp, Saccharomyces pastorianus
gaattacaacatttcttccagagca

SEQ ID NO: 71233 - DNA, 25 bp, Saccharomyces pastorianus
agagcattctaatggtttaagtaac

SEQ ID NO: 71234 - DNA, 25 bp, Saccharomyces pastorianus
ggtgttacgcaaacttcgagtgtaa

SEQ ID NO: 71235 - DNA, 25 bp, Saccharomyces pastorianus
taggtgttacgcaaacttcgagtgt

SEQ ID NO: 71236 - DNA, 25 bp, Saccharomyces pastorianus
gccaaggtttattcaaccacaagaa

SEQ ID NO: 71237 - DNA, 25 bp, Saccharomyces pastorianus
acaacatttcttccagagcattcta

SEQ ID NO: 71238 - DNA, 25 bp, Saccharomyces pastorianus
tctttcttgctttcacacgatatca

SEQ ID NO: 71239 - DNA, 25 bp, Saccharomyces pastorianus
tacaacgatatttcatctacgaagg

SEQ ID NO: 71240 - DNA, 25 bp, Saccharomyces pastorianus
tcttccaaactctgttatcagatac

SEQ ID NO: 71241 - DNA, 25 bp, Saccharomyces pastorianus
atctacgaaggtacgtcttttcatc

SEQ ID NO: 71242 - DNA, 25 bp, Saccharomyces pastorianus
cagacgtggcatgtcagtacaatac

SEQ ID NO: 71243 - DNA, 25 bp, Saccharomyces pastorianus
gtggcatgtcagtacaataccttct

SEQ ID NO: 71244 - DNA, 25 bp, Saccharomyces pastorianus
gaaggaatattctcattatcaaaca

SEQ ID NO: 71245 - DNA, 25 bp, Saccharomyces pastorianus
aactctgttatcagatacatccaag

SEQ ID NO: 71246 - DNA, 25 bp, Saccharomyces pastorianus
tttcttgctttcacacgatatcatg

SEQ ID NO: 71247 - DNA, 25 bp, Saccharomyces pastorianus
gaaggtacgtcttttcatcagacgt

SEQ ID NO: 71248 - DNA, 25 bp, Saccharomyces pastorianus
catgtcagtacaataccttcttcca

SEQ ID NO: 71249 - DNA, 25 bp, Saccharomyces pastorianus
tatcgacgacgagcgtagcctctgt

SEQ ID NO: 71250 - DNA, 25 bp, Saccharomyces pastorianus
gacgctgccgttacatgtattttca

SEQ ID NO: 71251 - DNA, 25 bp, Saccharomyces pastorianus
ccttactattttgtcgacttcgtct

SEQ ID NO: 71252 - DNA, 25 bp, Saccharomyces pastorianus
attttcacaggagttggcccaggcc

SEQ ID NO: 71253 - DNA, 25 bp, Saccharomyces pastorianus
tagcctctgtttcgttcacttcttt

SEQ ID NO: 71254 - DNA, 25 bp, Saccharomyces pastorianus
atctcgctttctgcgcttgattcat

SEQ ID NO: 71255 - DNA, 25 bp, Saccharomyces pastorianus
gtttaccgtcgcaacatcgagcagc

SEQ ID NO: 71256 - DNA, 25 bp, Saccharomyces pastorianus
gagcagcctaagtctatcgacgacg

SEQ ID NO: 71257 - DNA, 25 bp, Saccharomyces pastorianus
tggtctgccgggtggttctcatagc

SEQ ID NO: 71258 - DNA, 25 bp, Saccharomyces pastorianus
atagcggtgttgttgacgctgccgt

SEQ ID NO: 71259 - DNA, 25 bp, Saccharomyces pastorianus
gcttgattcatccacgtttaccgtc

SEQ ID NO: 71260 - DNA, 25 bp, Saccharomyces pastorianus
gctattttaccccaatgttacatcg

SEQ ID NO: 71261 - DNA, 25 bp, Saccharomyces pastorianus
gccaaatgacgaaaacgctctcaaa

SEQ ID NO: 71262 - DNA, 25 bp, Saccharomyces pastorianus
aaagtttggatacgtgaggcagttc

SEQ ID NO: 71263 - DNA, 25 bp, Saccharomyces pastorianus
ttacgattttggtaagccaaatgac

SEQ ID NO: 71264 - DNA, 25 bp, Saccharomyces pastorianus
gaatgcatgcgcgaagaaccttgtt

SEQ ID NO: 71265 - DNA, 25 bp, Saccharomyces pastorianus
cgctctcaaattaatgaatgcatgc

SEQ ID NO: 71266 - DNA, 25 bp, Saccharomyces pastorianus
cacgatgctattttaccccaatgtt

SEQ ID NO: 71267 - DNA, 25 bp, Saccharomyces pastorianus
ggcagttcgaaacgcacgatgctat

SEQ ID NO: 71268 - DNA, 25 bp, Saccharomyces pastorianus
aaacgcacgatgctattttacccca

SEQ ID NO: 71269 - DNA, 25 bp, Saccharomyces pastorianus
atacgtgaggcagttcgaaacgcac

SEQ ID NO: 71270 - DNA, 25 bp, Saccharomyces pastorianus
accccaatgttacatcgtggtaaga

SEQ ID NO: 71271 - DNA, 25 bp, Saccharomyces pastorianus
aggtccactggatctttcttatgat

SEQ ID NO: 71272 - DNA, 25 bp, Saccharomyces pastorianus
gaacccgcaattatgctccatgatg

SEQ ID NO: 71273 - DNA, 25 bp, Saccharomyces pastorianus
aatactgctcgaacaacgggcttca

SEQ ID NO: 71274 - DNA, 25 bp, Saccharomyces pastorianus
gtatcggccgaaacctcaataagcg

SEQ ID NO: 71275 - DNA, 25 bp, Saccharomyces pastorianus
tgaacacccaggatgggcccattat

SEQ ID NO: 71276 - DNA, 25 bp, Saccharomyces pastorianus
catcccttccattctatggcgaaga

SEQ ID NO: 71277 - DNA, 25 bp, Saccharomyces pastorianus
ttaagaaaccatgggtcctcgccgc

SEQ ID NO: 71278 - DNA, 25 bp, Saccharomyces pastorianus
gggacgtgtacctgttggacttaag

SEQ ID NO: 71279 - DNA, 25 bp, Saccharomyces pastorianus
atactacacggcttgttcgggaaca

SEQ ID NO: 71280 - DNA, 25 bp, Saccharomyces pastorianus
aacgggcttcagtattgtgactcca

SEQ ID NO: 71281 - DNA, 25 bp, Saccharomyces pastorianus
ggaccgcccattattatactacacg

SEQ ID NO: 71282 - DNA, 25 bp, Saccharomyces pastorianus
gtgggatcaagaggccatgccgcaa

SEQ ID NO: 71283 - DNA, 25 bp, Saccharomyces pastorianus
ggatcaagaggccatgccgcaatct

SEQ ID NO: 71284 - DNA, 25 bp, Saccharomyces pastorianus
atctcgcctttcacgatggcgtctt

SEQ ID NO: 71285 - DNA, 25 bp, Saccharomyces pastorianus
atgccgcaatctcgcctttcacgat

SEQ ID NO: 71286 - DNA, 25 bp, Saccharomyces pastorianus
aatctcgcctttcacgatggcgtct

SEQ ID NO: 71287 - DNA, 25 bp, Saccharomyces pastorianus
tctcgcctttcacgatggcgtcttt

SEQ ID NO: 71288 - DNA, 25 bp, Saccharomyces pastorianus
atcaagaggccatgccgcaatctcg

SEQ ID NO: 71289 - DNA, 25 bp, Saccharomyces pastorianus
gaggccatgccgcaatctcgccttt

SEQ ID NO: 71290 - DNA, 25 bp, Saccharomyces pastorianus
gcaatctcgcctttcacgatggcgt

SEQ ID NO: 71291 - DNA, 25 bp, Saccharomyces pastorianus
gatcaagaggccatgccgcaatctc

SEQ ID NO: 71292 - DNA, 25 bp, Saccharomyces pastorianus
ctcgcctttcacgatggcgtctttt

SEQ ID NO: 71293 - DNA, 25 bp, Saccharomyces pastorianus
atattctaccgctgctcatgttgtt

SEQ ID NO: 71294 - DNA, 25 bp, Saccharomyces pastorianus
ggtgctcaacacttatctcgaagat

SEQ ID NO: 71295 - DNA, 25 bp, Saccharomyces pastorianus
actaggcggtactgtggcatgcata

SEQ ID NO: 71296 - DNA, 25 bp, Saccharomyces pastorianus
gtatccggagggtatagccaaaatc

SEQ ID NO: 71297 - DNA, 25 bp, Saccharomyces pastorianus
gttcctggttgcatctagttactaa

SEQ ID NO: 71298 - DNA, 25 bp, Saccharomyces pastorianus
aaatcgctgcgaccttatgcgaatg

SEQ ID NO: 71299 - DNA, 25 bp, Saccharomyces pastorianus
aactaggctgatcgatttgccagca

SEQ ID NO: 71300 - DNA, 25 bp, Saccharomyces pastorianus
ttataaatgggccacggcggcacta

SEQ ID NO: 71301 - DNA, 25 bp, Saccharomyces pastorianus
gtccgattatcttcatttttgccta

SEQ ID NO: 71302 - DNA, 25 bp, Saccharomyces pastorianus
gagatcacaacaaaaccgtcggtta

SEQ ID NO: 71303 - DNA, 25 bp, Saccharomyces pastorianus
actggtcaacaatcaacctttggca

SEQ ID NO: 71304 - DNA, 25 bp, Saccharomyces pastorianus
taaggtcgcaaactatatatcgtac

SEQ ID NO: 71305 - DNA, 25 bp, Saccharomyces pastorianus
acgacttgcccttctattgtattgg

SEQ ID NO: 71306 - DNA, 25 bp, Saccharomyces pastorianus
atctcaaattgacgacttgcccttc

SEQ ID NO: 71307 - DNA, 25 bp, Saccharomyces pastorianus
agagaatgccgagtttttgttgaga

SEQ ID NO: 71308 - DNA, 25 bp, Saccharomyces pastorianus
gaagaaaccgctgcttatgaaaata

SEQ ID NO: 71309 - DNA, 25 bp, Saccharomyces pastorianus
tattgtaccgtgtggaaaacccaga

SEQ ID NO: 71310 - DNA, 25 bp, Saccharomyces pastorianus
tgcacctgaatatacgttgcgtact

SEQ ID NO: 71311 - DNA, 25 bp, Saccharomyces pastorianus
gggctattaagctattgtaccgtgt

SEQ ID NO: 71312 - DNA, 25 bp, Saccharomyces pastorianus
gggtttatgaattactcaagggcta

SEQ ID NO: 71313 - DNA, 25 bp, Saccharomyces pastorianus
aattctcaagagtcactttactgga

SEQ ID NO: 71314 - DNA, 25 bp, Saccharomyces pastorianus
ttcgtgaagacgaccaattctcaag

SEQ ID NO: 71315 - DNA, 25 bp, Saccharomyces pastorianus
gatgatgctaacttgtatttcgcca

SEQ ID NO: 71316 - DNA, 25 bp, Saccharomyces pastorianus
ggccaggttgaacaaatagatacgt

SEQ ID NO: 71317 - DNA, 25 bp, Saccharomyces pastorianus
tcattggcatgaagcagagcgaaat

SEQ ID NO: 71318 - DNA, 25 bp, Saccharomyces pastorianus
gaagcagagcgaaatataaaccaaa

SEQ ID NO: 71319 - DNA, 25 bp, Saccharomyces pastorianus
gtatttcgccaagaattatttactg

SEQ ID NO: 71320 - DNA, 25 bp, Saccharomyces pastorianus
gtaaaatcattttgtcattggcatg

SEQ ID NO: 71321 - DNA, 25 bp, Saccharomyces pastorianus
atacccgaggttcaaggccaggttg

SEQ ID NO: 71322 - DNA, 25 bp, Saccharomyces pastorianus
atttactgggatcactggaatctac

SEQ ID NO: 71323 - DNA, 25 bp, Saccharomyces pastorianus
gaatctacagttccaatacccgagg

SEQ ID NO: 71324 - DNA, 25 bp, Saccharomyces pastorianus
gccattatactttgggcaaaacagt

SEQ ID NO: 71325 - DNA, 25 bp, Saccharomyces pastorianus
agtgccatcgccaacgtatcttgga

SEQ ID NO: 71326 - DNA, 25 bp, Saccharomyces pastorianus
catgcccaataaagcagtgcccttg

SEQ ID NO: 71327 - DNA, 25 bp, Saccharomyces pastorianus
gaagacactgtgcatctcagcatag

SEQ ID NO: 71328 - DNA, 25 bp, Saccharomyces pastorianus
gataaattcaaccttagaagaccgt

SEQ ID NO: 71329 - DNA, 25 bp, Saccharomyces pastorianus
gaggcatgtagccatggtgcataat

SEQ ID NO: 71330 - DNA, 25 bp, Saccharomyces pastorianus
tttgccgcgcatttagataaattca

SEQ ID NO: 71331 - DNA, 25 bp, Saccharomyces pastorianus
taataatgccgattcgaggttcaat

SEQ ID NO: 71332 - DNA, 25 bp, Saccharomyces pastorianus
agtatccagggctcagttgtccatt

SEQ ID NO: 71333 - DNA, 25 bp, Saccharomyces pastorianus
aagcagtgcccttggaaaatattag

SEQ ID NO: 71334 - DNA, 25 bp, Saccharomyces pastorianus
ggatttctgcaagcaacaggtttaa

SEQ ID NO: 71335 - DNA, 25 bp, Saccharomyces pastorianus
ttagaagaccgtacacatgcccaat

SEQ ID NO: 71336 - DNA, 25 bp, Saccharomyces pastorianus
cagttgtccattttctatttgccag

SEQ ID NO: 71337 - DNA, 25 bp, Saccharomyces pastorianus
gcttgcatgctatgtgggatagttc

SEQ ID NO: 71338 - DNA, 25 bp, Saccharomyces pastorianus
cagaccacgaacgagtttaatagag

SEQ ID NO: 71339 - DNA, 25 bp, Saccharomyces pastorianus
ttcagaccacgaacgagtttaatag

SEQ ID NO: 71340 - DNA, 25 bp, Saccharomyces pastorianus
cacgaacgagtttaatagagagggt

SEQ ID NO: 71341 - DNA, 25 bp, Saccharomyces pastorianus
atgtgggatagttcagaccacgaac

SEQ ID NO: 71342 - DNA, 25 bp, Saccharomyces pastorianus
gaccacgaacgagtttaatagagag

SEQ ID NO: 71343 - DNA, 25 bp, Saccharomyces pastorianus
gatagttcagaccacgaacgagttt

SEQ ID NO: 71344 - DNA, 25 bp, Saccharomyces pastorianus
tagttcagaccacgaacgagtttaa

SEQ ID NO: 71345 - DNA, 25 bp, Saccharomyces pastorianus
taatagagagggttgtcctaactgt

SEQ ID NO: 71346 - DNA, 25 bp, Saccharomyces pastorianus
atgctatgtgggatagttcagacca

SEQ ID NO: 71347 - DNA, 25 bp, Saccharomyces pastorianus
gggatagttcagaccacgaacgagt

SEQ ID NO: 71348 - DNA, 25 bp, Saccharomyces pastorianus
catgctattgcgacttctctgaaag

SEQ ID NO: 71349 - DNA, 25 bp, Saccharomyces pastorianus
gaattcgggccctcaacatcaaaga

SEQ ID NO: 71350 - DNA, 25 bp, Saccharomyces pastorianus
atccgttgctgctgatgcgagatca

SEQ ID NO: 71351 - DNA, 25 bp, Saccharomyces pastorianus
tcaagaggttccttatccgttgctg

SEQ ID NO: 71352 - DNA, 25 bp, Saccharomyces pastorianus
attctctacccttacttgatttact

SEQ ID NO: 71353 - DNA, 25 bp, Saccharomyces pastorianus
gcagcccttccgtaaaacttcaaga

SEQ ID NO: 71354 - DNA, 25 bp, Saccharomyces pastorianus
aatcaatcacatcgtgcttaccact

SEQ ID NO: 71355 - DNA, 25 bp, Saccharomyces pastorianus
tctggtcagactcctttatcgcata

SEQ ID NO: 71356 - DNA, 25 bp, Saccharomyces pastorianus
cataccacatcctgttacatgctat

SEQ ID NO: 71357 - DNA, 25 bp, Saccharomyces pastorianus
aacaattttgattcctcctcaggta

SEQ ID NO: 71358 - DNA, 25 bp, Saccharomyces pastorianus
atatctaactggtcatgcttcgctc

SEQ ID NO: 71359 - DNA, 25 bp, Saccharomyces pastorianus
gatgatgtcaacttaattggcgcat

SEQ ID NO: 71360 - DNA, 25 bp, Saccharomyces pastorianus
gccccattaaagttcacacatacct

SEQ ID NO: 71361 - DNA, 25 bp, Saccharomyces pastorianus
gatattagttttgatggctctcact

SEQ ID NO: 71362 - DNA, 25 bp, Saccharomyces pastorianus
tattttgcttcttctgccccattaa

SEQ ID NO: 71363 - DNA, 25 bp, Saccharomyces pastorianus
attcgggatgacctgttacgctata

SEQ ID NO: 71364 - DNA, 25 bp, Saccharomyces pastorianus
agaattacacacgaactgcccaatg

SEQ ID NO: 71365 - DNA, 25 bp, Saccharomyces pastorianus
ttgttctcacagatcattcgggatg

SEQ ID NO: 71366 - DNA, 25 bp, Saccharomyces pastorianus
ggtgagtttaccagaatccgaagat

SEQ ID NO: 71367 - DNA, 25 bp, Saccharomyces pastorianus
tggcgcatttttgtacccatcaata

SEQ ID NO: 71368 - DNA, 25 bp, Saccharomyces pastorianus
atacgaaactctacttttgccaaag

SEQ ID NO: 71369 - DNA, 25 bp, Saccharomyces pastorianus
tccgaagatcttttgttctcacaga

SEQ ID NO: 71370 - DNA, 25 bp, Saccharomyces pastorianus
tagtctaaacctatcctcactcgtt

SEQ ID NO: 71371 - DNA, 25 bp, Saccharomyces pastorianus
atagcttccgaagggttgccactaa

SEQ ID NO: 71372 - DNA, 25 bp, Saccharomyces pastorianus
gaggaattccattcttacagatagt

SEQ ID NO: 71373 - DNA, 25 bp, Saccharomyces pastorianus
ctcactcgtttctttgaacttcaca

SEQ ID NO: 71374 - DNA, 25 bp, Saccharomyces pastorianus
ctcccctgacaacaaccttgataaa

SEQ ID NO: 71375 - DNA, 25 bp, Saccharomyces pastorianus
tttctttcctttccgcgactaatag

SEQ ID NO: 71376 - DNA, 25 bp, Saccharomyces pastorianus
ccaactaccgttctttgacattcaa

SEQ ID NO: 71377 - DNA, 25 bp, Saccharomyces pastorianus
atgcgagaaactcacttcagcccaa

SEQ ID NO: 71378 - DNA, 25 bp, Saccharomyces pastorianus
aaaagtgatgcgtccttgcctgtaa

SEQ ID NO: 71379 - DNA, 25 bp, Saccharomyces pastorianus
atacggaggatattcgagcacaact

SEQ ID NO: 71380 - DNA, 25 bp, Saccharomyces pastorianus
gggttgccactaaatttctctgaga

SEQ ID NO: 71381 - DNA, 25 bp, Saccharomyces pastorianus
gataatctatcaacgtttcctgcta

SEQ ID NO: 71382 - DNA, 25 bp, Saccharomyces pastorianus
tgaccagcttcataacctcaacttg

SEQ ID NO: 71383 - DNA, 25 bp, Saccharomyces pastorianus
gtggtaccgttctttaactcgatgg

SEQ ID NO: 71384 - DNA, 25 bp, Saccharomyces pastorianus
ctttaactcgatggtaacttgctca

SEQ ID NO: 71385 - DNA, 25 bp, Saccharomyces pastorianus
ggtaacttgctcattacgcagtttt

SEQ ID NO: 71386 - DNA, 25 bp, Saccharomyces pastorianus
ctgtggtaccgttctttaactcgat

SEQ ID NO: 71387 - DNA, 25 bp, Saccharomyces pastorianus
aaagttgaccagcttcataacctca

SEQ ID NO: 71388 - DNA, 25 bp, Saccharomyces pastorianus
acgtttcctgctaatttggcaatcc

SEQ ID NO: 71389 - DNA, 25 bp, Saccharomyces pastorianus
atctatcaacgtttcctgctaattt

SEQ ID NO: 71390 - DNA, 25 bp, Saccharomyces pastorianus
gcttcataacctcaacttggataat

SEQ ID NO: 71391 - DNA, 25 bp, Saccharomyces pastorianus
gctcattacgcagttttttcaaaaa

SEQ ID NO: 71392 - DNA, 25 bp, Saccharomyces pastorianus
ggctcacacatatacacgcagggca

SEQ ID NO: 71393 - DNA, 25 bp, Saccharomyces pastorianus
aaaggcttcggctgcaaggaaactc

SEQ ID NO: 71394 - DNA, 25 bp, Saccharomyces pastorianus
ggatcccagacttgcagaataccct

SEQ ID NO: 71395 - DNA, 25 bp, Saccharomyces pastorianus
aggacgctgagcctatgcttctgca

SEQ ID NO: 71396 - DNA, 25 bp, Saccharomyces pastorianus
agctcctttcatcgagaacgtcaag

SEQ ID NO: 71397 - DNA, 25 bp, Saccharomyces pastorianus
caggaacggctctctaagtacaagt

SEQ ID NO: 71398 - DNA, 25 bp, Saccharomyces pastorianus
gatccgagcgactttgagctgtgct

SEQ ID NO: 71399 - DNA, 25 bp, Saccharomyces pastorianus
gaagatatgccagagcctgcgcaac

SEQ ID NO: 71400 - DNA, 25 bp, Saccharomyces pastorianus
gctgtgcttcggcaagttccaggaa

SEQ ID NO: 71401 - DNA, 25 bp, Saccharomyces pastorianus
tgaagcaattgcaaacccggatccc

SEQ ID NO: 71402 - DNA, 25 bp, Saccharomyces pastorianus
agggcactatggacacgctattcaa

SEQ ID NO: 71403 - DNA, 25 bp, Saccharomyces pastorianus
tactgccggttcattatctaagaag

SEQ ID NO: 71404 - DNA, 25 bp, Saccharomyces pastorianus
gcctatcattatcaccactgctcgt

SEQ ID NO: 71405 - DNA, 25 bp, Saccharomyces pastorianus
tatctaagaagtccacgggagacga

SEQ ID NO: 71406 - DNA, 25 bp, Saccharomyces pastorianus
accctcgcgaggtcacagatggcga

SEQ ID NO: 71407 - DNA, 25 bp, Saccharomyces pastorianus
ggtaccgaacaaggtcattactaag

SEQ ID NO: 71408 - DNA, 25 bp, Saccharomyces pastorianus
tgcggtcgaggccacgcctatcatt

SEQ ID NO: 71409 - DNA, 25 bp, Saccharomyces pastorianus
gtcacagatggcgatgacggtctcg

SEQ ID NO: 71410 - DNA, 25 bp, Saccharomyces pastorianus
tgaagaagacggaccctcgcgaggt

SEQ ID NO: 71411 - DNA, 25 bp, Saccharomyces pastorianus
atttcaggtaccgaacaaggtcatt

SEQ ID NO: 71412 - DNA, 25 bp, Saccharomyces pastorianus
tcattactaaggaggacatcacccc

SEQ ID NO: 71413 - DNA, 25 bp, Saccharomyces pastorianus
ccctgtccagatcgcacgtgaagaa

SEQ ID NO: 71414 - DNA, 25 bp, Saccharomyces pastorianus
aggaagacccatgtctgatgtcggt

SEQ ID NO: 71415 - DNA, 25 bp, Saccharomyces pastorianus
atatggactccaagataagaatcgt

SEQ ID NO: 71416 - DNA, 25 bp, Saccharomyces pastorianus
aaaagcctttttgcatcaaccaaag

SEQ ID NO: 71417 - DNA, 25 bp, Saccharomyces pastorianus
gaatttccaaatcctctgttagacg

SEQ ID NO: 71418 - DNA, 25 bp, Saccharomyces pastorianus
gatgtccatgaggatctaccgtatg

SEQ ID NO: 71419 - DNA, 25 bp, Saccharomyces pastorianus
ggaatcggatccaaaagcctttttg

SEQ ID NO: 71420 - DNA, 25 bp, Saccharomyces pastorianus
gagcgctaattttgacggaatttcc

SEQ ID NO: 71421 - DNA, 25 bp, Saccharomyces pastorianus
gtctgatgtcggtgtgagcgctaat

SEQ ID NO: 71422 - DNA, 25 bp, Saccharomyces pastorianus
aaacacattcttgtcacagctgaaa

SEQ ID NO: 71423 - DNA, 25 bp, Saccharomyces pastorianus
ggatgcaagatctacttacttcttt

SEQ ID NO: 71424 - DNA, 25 bp, Saccharomyces pastorianus
ggatctaccgtatgacttggaatcg

SEQ ID NO: 71425 - DNA, 25 bp, Saccharomyces pastorianus
tggacttatgccacgatggccattt

SEQ ID NO: 71426 - DNA, 25 bp, Saccharomyces pastorianus
gatgaaggcttccaaactccaactt

SEQ ID NO: 71427 - DNA, 25 bp, Saccharomyces pastorianus
agatgaccgtttcctcttatcaaat

SEQ ID NO: 71428 - DNA, 25 bp, Saccharomyces pastorianus
acgacttggaagcttctttggctgc

SEQ ID NO: 71429 - DNA, 25 bp, Saccharomyces pastorianus
tggctacaacaacgcggattttcat

SEQ ID NO: 71430 - DNA, 25 bp, Saccharomyces pastorianus
gaatttaccgttttaatggctgcat

SEQ ID NO: 71431 - DNA, 25 bp, Saccharomyces pastorianus
caatgtcgtccaagaccaattctca

SEQ ID NO: 71432 - DNA, 25 bp, Saccharomyces pastorianus
gatgtctcattctggttcattaggt

SEQ ID NO: 71433 - DNA, 25 bp, Saccharomyces pastorianus
aacaagattctgcttcacggctttt

SEQ ID NO: 71434 - DNA, 25 bp, Saccharomyces pastorianus
ggcttttcatcctaccaactattta

SEQ ID NO: 71435 - DNA, 25 bp, Saccharomyces pastorianus
aactcttctagttcgttcgcttcta

SEQ ID NO: 71436 - DNA, 25 bp, Saccharomyces pastorianus
gatttgttattcacacctggattaa

SEQ ID NO: 71437 - DNA, 25 bp, Saccharomyces pastorianus
tgttattgacttgaggacgcctgta

SEQ ID NO: 71438 - DNA, 25 bp, Saccharomyces pastorianus
ggactgcaacattgttcctgtggat

SEQ ID NO: 71439 - DNA, 25 bp, Saccharomyces pastorianus
gcgccatcccaatttccggaagatt

SEQ ID NO: 71440 - DNA, 25 bp, Saccharomyces pastorianus
ggacgcctgtaggtttgaagtcatc

SEQ ID NO: 71441 - DNA, 25 bp, Saccharomyces pastorianus
gaacttactacaaacacatggcctg

SEQ ID NO: 71442 - DNA, 25 bp, Saccharomyces pastorianus
aatggacccaacatatcaacttgta

SEQ ID NO: 71443 - DNA, 25 bp, Saccharomyces pastorianus
atatcactaatgaccaggcgccatc

SEQ ID NO: 71444 - DNA, 25 bp, Saccharomyces pastorianus
aaacctctattcaagggaccgcaca

SEQ ID NO: 71445 - DNA, 25 bp, Saccharomyces pastorianus
tattccattgcctatcgccacaaga

SEQ ID NO: 71446 - DNA, 25 bp, Saccharomyces pastorianus
agtcatcgtgtggtattctttcaat

SEQ ID NO: 71447 - DNA, 25 bp, Saccharomyces pastorianus
tgatcgtggctcttggtcctgtgaa

SEQ ID NO: 71448 - DNA, 25 bp, Saccharomyces pastorianus
gtcccaatcacacttacctgtttaa

SEQ ID NO: 71449 - DNA, 25 bp, Saccharomyces pastorianus
gatttgctcaaccaccaagagacgg

SEQ ID NO: 71450 - DNA, 25 bp, Saccharomyces pastorianus
ttcggtaaagtaggtcccaatcaca

SEQ ID NO: 71451 - DNA, 25 bp, Saccharomyces pastorianus
tcagcaagcttgtctgatttcaagg

SEQ ID NO: 71452 - DNA, 25 bp, Saccharomyces pastorianus
gtgggcagatcctcaagaagctaac

SEQ ID NO: 71453 - DNA, 25 bp, Saccharomyces pastorianus
tatgggtccttctcaacgtggtcta

SEQ ID NO: 71454 - DNA, 25 bp, Saccharomyces pastorianus
cggtgattttgttgatcgtggctct

SEQ ID NO: 71455 - DNA, 25 bp, Saccharomyces pastorianus
gtcctgtgaagttgcgttgttgttt

SEQ ID NO: 71456 - DNA, 25 bp, Saccharomyces pastorianus
gtttaccattggctacgctaattaa

SEQ ID NO: 71457 - DNA, 25 bp, Saccharomyces pastorianus
agctaacggtatgggtccttctcaa

SEQ ID NO: 71458 - DNA, 25 bp, Saccharomyces pastorianus
gaccaagaggcccattgttcaaaaa

SEQ ID NO: 71459 - DNA, 25 bp, Saccharomyces pastorianus
gactacgccgtattgatgggaaact

SEQ ID NO: 71460 - DNA, 25 bp, Saccharomyces pastorianus
gatccttctttgaacttttatgcgt

SEQ ID NO: 71461 - DNA, 25 bp, Saccharomyces pastorianus
cccatggtggcggtactgcttataa

SEQ ID NO: 71462 - DNA, 25 bp, Saccharomyces pastorianus
ggaaccacggtatctttggatgagt

SEQ ID NO: 71463 - DNA, 25 bp, Saccharomyces pastorianus
gactggctttctttcaagggttctt

SEQ ID NO: 71464 - DNA, 25 bp, Saccharomyces pastorianus
gagtttctctatgtcagcgattcaa

SEQ ID NO: 71465 - DNA, 25 bp, Saccharomyces pastorianus
gaacgcacgcgcattacgcatcagt

SEQ ID NO: 71466 - DNA, 25 bp, Saccharomyces pastorianus
gaaatggtgccctttccaatggaaa

SEQ ID NO: 71467 - DNA, 25 bp, Saccharomyces pastorianus
acgcatcagtaggtcagcattcgca

SEQ ID NO: 71468 - DNA, 25 bp, Saccharomyces pastorianus
gtgattttactgacagaggcccatt

SEQ ID NO: 71469 - DNA, 25 bp, Saccharomyces pastorianus
tttaaagactactgagcttctttgt

SEQ ID NO: 71470 - DNA, 25 bp, Saccharomyces pastorianus
gaaacttggtgcctcttatatttaa

SEQ ID NO: 71471 - DNA, 25 bp, Saccharomyces pastorianus
ggtgcctcttatatttaaagactac

SEQ ID NO: 71472 - DNA, 25 bp, Saccharomyces pastorianus
cttgtttttacgatcttcagctgga

SEQ ID NO: 71473 - DNA, 25 bp, Saccharomyces pastorianus
gggtacttgtttttacgatcttcag

SEQ ID NO: 71474 - DNA, 25 bp, Saccharomyces pastorianus
catcctctttttccctaccattagg

SEQ ID NO: 71475 - DNA, 25 bp, Saccharomyces pastorianus
gtttttacgatcttcagctggaacg

SEQ ID NO: 71476 - DNA, 25 bp, Saccharomyces pastorianus
ggagacttgaaacttggtgcctctt

SEQ ID NO: 71477 - DNA, 25 bp, Saccharomyces pastorianus
gctggaacgtggagacttgaaactt

SEQ ID NO: 71478 - DNA, 25 bp, Saccharomyces pastorianus
gatcttcagctggaacgtggagact

SEQ ID NO: 71479 - DNA, 25 bp, Saccharomyces pastorianus
gacttgaaacttggtgcctcttata

SEQ ID NO: 71480 - DNA, 25 bp, Saccharomyces pastorianus
ggcctaatggccgagaattcaaaaa

SEQ ID NO: 71481 - DNA, 25 bp, Saccharomyces pastorianus
gacatgtatttatttctcgactctt

SEQ ID NO: 71482 - DNA, 25 bp, Saccharomyces pastorianus
gggtgccacaaatccagagtagcaa

SEQ ID NO: 71483 - DNA, 25 bp, Saccharomyces pastorianus
aatcgagcataggtaccggtcaagt

SEQ ID NO: 71484 - DNA, 25 bp, Saccharomyces pastorianus
atggcagtagtgacgcgattgaaca

SEQ ID NO: 71485 - DNA, 25 bp, Saccharomyces pastorianus
aatgcacggttattttctctgagct

SEQ ID NO: 71486 - DNA, 25 bp, Saccharomyces pastorianus
tgtcaggccgtgtgggtgccacaaa

SEQ ID NO: 71487 - DNA, 25 bp, Saccharomyces pastorianus
tttaagaagtgtgggcctaatggcc

SEQ ID NO: 71488 - DNA, 25 bp, Saccharomyces pastorianus
attttctctgagctgcaatggcgca

SEQ ID NO: 71489 - DNA, 25 bp, Saccharomyces pastorianus
ggaacaagtctctttaacggtgata

SEQ ID NO: 71490 - DNA, 25 bp, Saccharomyces pastorianus
gtacagtgtcgcctagtttaaagtt

SEQ ID NO: 71491 - DNA, 25 bp, Saccharomyces pastorianus
aagaaggttactaggcccggctgct

SEQ ID NO: 71492 - DNA, 25 bp, Saccharomyces pastorianus
ggcatttagttacactactggtggt

SEQ ID NO: 71493 - DNA, 25 bp, Saccharomyces pastorianus
gctgtatatggtccacgttccatta

SEQ ID NO: 71494 - DNA, 25 bp, Saccharomyces pastorianus
agatttcaacgaatacgccacccaa

SEQ ID NO: 71495 - DNA, 25 bp, Saccharomyces pastorianus
gagatactttctttacatacgggat

SEQ ID NO: 71496 - DNA, 25 bp, Saccharomyces pastorianus
ggctgctgccaagcctatggcattt

SEQ ID NO: 71497 - DNA, 25 bp, Saccharomyces pastorianus
ggacctgctttggtagaagccagaa

SEQ ID NO: 71498 - DNA, 25 bp, Saccharomyces pastorianus
tacgccacccaaatacagcgaaggt

SEQ ID NO: 71499 - DNA, 25 bp, Saccharomyces pastorianus
agacgtcattaattaccgctgtata

SEQ ID NO: 71500 - DNA, 25 bp, Saccharomyces pastorianus
tcgagaattgtaacggacctgcttt

SEQ ID NO: 71501 - DNA, 25 bp, Saccharomyces pastorianus
gaaactcaaagcatcagacgtcatt

SEQ ID NO: 71502 - DNA, 25 bp, Saccharomyces pastorianus
cattcatcatcgatggaccatgata

SEQ ID NO: 71503 - DNA, 25 bp, Saccharomyces pastorianus
tccttctttaaccattcatcatcga

SEQ ID NO: 71504 - DNA, 25 bp, Saccharomyces pastorianus
ttctttaaccattcatcatcgatgg

SEQ ID NO: 71505 - DNA, 25 bp, Saccharomyces pastorianus
cttctttaaccattcatcatcgatg

SEQ ID NO: 71506 - DNA, 25 bp, Saccharomyces pastorianus
accattcatcatcgatggaccatga

SEQ ID NO: 71507 - DNA, 25 bp, Saccharomyces pastorianus
tttaaccattcatcatcgatggacc

SEQ ID NO: 71508 - DNA, 25 bp, Saccharomyces pastorianus
taaccattcatcatcgatggaccat

SEQ ID NO: 71509 - DNA, 25 bp, Saccharomyces pastorianus
ttcatcatcgatggaccatgatagt

SEQ ID NO: 71510 - DNA, 25 bp, Saccharomyces pastorianus
ttccttctttaaccattcatcatcg

SEQ ID NO: 71511 - DNA, 25 bp, Saccharomyces pastorianus
ccttctttaaccattcatcatcgat

SEQ ID NO: 71512 - DNA, 25 bp, Saccharomyces pastorianus
aaccattcatcatcgatggaccatg

SEQ ID NO: 71513 - DNA, 25 bp, Saccharomyces pastorianus
gtggactcttctaataccggcaatg

SEQ ID NO: 71514 - DNA, 25 bp, Saccharomyces pastorianus
gagattggcattaacttcgaccata

SEQ ID NO: 71515 - DNA, 25 bp, Saccharomyces pastorianus
aatggtggtggcttctaccaaccgt

SEQ ID NO: 71516 - DNA, 25 bp, Saccharomyces pastorianus
ggtcttttcctattgatggctggca

SEQ ID NO: 71517 - DNA, 25 bp, Saccharomyces pastorianus
atgcgcatgaacctccattgttgga

SEQ ID NO: 71518 - DNA, 25 bp, Saccharomyces pastorianus
gggtattctacatgctctttctaca

SEQ ID NO: 71519 - DNA, 25 bp, Saccharomyces pastorianus
gctggcaaagtccatttcgggtata

SEQ ID NO: 71520 - DNA, 25 bp, Saccharomyces pastorianus
aacaatctgggtgttgcccctgatc

SEQ ID NO: 71521 - DNA, 25 bp, Saccharomyces pastorianus
atgtctttctacaaccccaatgata

SEQ ID NO: 71522 - DNA, 25 bp, Saccharomyces pastorianus
aatttgccgtgcctcaaggatctat

SEQ ID NO: 71523 - DNA, 25 bp, Saccharomyces pastorianus
tcgggtatatctacggtgttgcttt

SEQ ID NO: 71524 - DNA, 25 bp, Saccharomyces pastorianus
atagctctttgcttaagttggtgtt

SEQ ID NO: 71525 - DNA, 25 bp, Saccharomyces pastorianus
gttggtgttgttgatatcttcttgt

SEQ ID NO: 71526 - DNA, 25 bp, Saccharomyces pastorianus
tgttgatatcttcttgttgtacgtc

SEQ ID NO: 71527 - DNA, 25 bp, Saccharomyces pastorianus
ctttgcttaagttggtgttgttgat

SEQ ID NO: 71528 - DNA, 25 bp, Saccharomyces pastorianus
gatgtctcacagatagctctttgct

SEQ ID NO: 71529 - DNA, 25 bp, Saccharomyces pastorianus
tggcaccaccgacggctaaggtcaa

SEQ ID NO: 71530 - DNA, 25 bp, Saccharomyces pastorianus
gtctcacagatagctctttgcttaa

SEQ ID NO: 71531 - DNA, 25 bp, Saccharomyces pastorianus
ttcttgttgtacgtcatcaccacca

SEQ ID NO: 71532 - DNA, 25 bp, Saccharomyces pastorianus
ttgtacgtcatcaccaccacggaag

SEQ ID NO: 71533 - DNA, 25 bp, Saccharomyces pastorianus
ggctaaggtcaaaagatgtctcaca

SEQ ID NO: 71534 - DNA, 25 bp, Saccharomyces pastorianus
atcttcttgttgtacgtcatcacca

SEQ ID NO: 71535 - DNA, 25 bp, Saccharomyces pastorianus
ggaggccttgtttcagcaatactac

SEQ ID NO: 71536 - DNA, 25 bp, Saccharomyces pastorianus
acgttgttagcatctgttcctggca

SEQ ID NO: 71537 - DNA, 25 bp, Saccharomyces pastorianus
tgaccgtatcctaatggccccttta

SEQ ID NO: 71538 - DNA, 25 bp, Saccharomyces pastorianus
agtactgtgcagtcgatgtctgcca

SEQ ID NO: 71539 - DNA, 25 bp, Saccharomyces pastorianus
gttcctggcacatggcgcatatata

SEQ ID NO: 71540 - DNA, 25 bp, Saccharomyces pastorianus
gagcaacgtcactactacttacaac

SEQ ID NO: 71541 - DNA, 25 bp, Saccharomyces pastorianus
gaactcgctattcaattcttcagat

SEQ ID NO: 71542 - DNA, 25 bp, Saccharomyces pastorianus
acagacaccctgtacaattctttaa

SEQ ID NO: 71543 - DNA, 25 bp, Saccharomyces pastorianus
tctgccatcataccgacgttgttag

SEQ ID NO: 71544 - DNA, 25 bp, Saccharomyces pastorianus
agagcaactattctacccttgatgc

SEQ ID NO: 71545 - DNA, 25 bp, Saccharomyces pastorianus
cacgaaggagtatcttccctcattg

SEQ ID NO: 71546 - DNA, 25 bp, Saccharomyces pastorianus
aatcccggttggtatagtttcatcg

SEQ ID NO: 71547 - DNA, 25 bp, Saccharomyces pastorianus
gattgtcgccaagttgaggtttaac

SEQ ID NO: 71548 - DNA, 25 bp, Saccharomyces pastorianus
tggtctactctctcaggacgttaaa

SEQ ID NO: 71549 - DNA, 25 bp, Saccharomyces pastorianus
gttggcccatgtgaatacgatccct

SEQ ID NO: 71550 - DNA, 25 bp, Saccharomyces pastorianus
aatacgatccctccggagtcaaatg

SEQ ID NO: 71551 - DNA, 25 bp, Saccharomyces pastorianus
gagtcaaatggccttcttttcgaat

SEQ ID NO: 71552 - DNA, 25 bp, Saccharomyces pastorianus
gaaggcgaagtttcctagtgcaaat

SEQ ID NO: 71553 - DNA, 25 bp, Saccharomyces pastorianus
tccctttatcctttttctctacatt

SEQ ID NO: 71554 - DNA, 25 bp, Saccharomyces pastorianus
tagtttcatcgtctcttctatggag

SEQ ID NO: 71555 - DNA, 25 bp, Saccharomyces pastorianus
ttatactatcgtggtctactctctc

SEQ ID NO: 71556 - DNA, 25 bp, Saccharomyces pastorianus
aagctaccgttgacagtccctttat

SEQ ID NO: 71557 - DNA, 25 bp, Saccharomyces pastorianus
tatccccctttacaacaaatatggc

SEQ ID NO: 71558 - DNA, 25 bp, Saccharomyces pastorianus
aaatatggcaaagatttcccacgag

SEQ ID NO: 71559 - DNA, 25 bp, Saccharomyces pastorianus
atggcaaagatttcccacgagaaac

SEQ ID NO: 71560 - DNA, 25 bp, Saccharomyces pastorianus
gagctattacgaaatatcccccttt

SEQ ID NO: 71561 - DNA, 25 bp, Saccharomyces pastorianus
aataacgttgaggagctattacgaa

SEQ ID NO: 71562 - DNA, 25 bp, Saccharomyces pastorianus
tgaacaataacgttgaggagctatt

SEQ ID NO: 71563 - DNA, 25 bp, Saccharomyces pastorianus
ttcccacgagaaacagtaaccagat

SEQ ID NO: 71564 - DNA, 25 bp, Saccharomyces pastorianus
gcaaagatttcccacgagaaacagt

SEQ ID NO: 71565 - DNA, 25 bp, Saccharomyces pastorianus
tgaggagctattacgaaatatcccc

SEQ ID NO: 71566 - DNA, 25 bp, Saccharomyces pastorianus
aacagtaaccagattacagatgcct

SEQ ID NO: 71567 - DNA, 25 bp, Saccharomyces pastorianus
gatttcccacgagaaacagtaacca

SEQ ID NO: 71568 - DNA, 25 bp, Saccharomyces pastorianus
atgcccagggatccattgattggta

SEQ ID NO: 71569 - DNA, 25 bp, Saccharomyces pastorianus
gtaggagcatttccctttaccacga

SEQ ID NO: 71570 - DNA, 25 bp, Saccharomyces pastorianus
gtgcggcggtaggagcatttccctt

SEQ ID NO: 71571 - DNA, 25 bp, Saccharomyces pastorianus
ttaccacgatcgagccaaatcaggc

SEQ ID NO: 71572 - DNA, 25 bp, Saccharomyces pastorianus
aagccatcttcagggaaatccacca

SEQ ID NO: 71573 - DNA, 25 bp, Saccharomyces pastorianus
gtgggtaagccatcttcagggaaat

SEQ ID NO: 71574 - DNA, 25 bp, Saccharomyces pastorianus
ggtattgtgggtaagccatcttcag

SEQ ID NO: 71575 - DNA, 25 bp, Saccharomyces pastorianus
agcatttccctttaccacgatcgag

SEQ ID NO: 71576 - DNA, 25 bp, Saccharomyces pastorianus
tccaccacattaaattctttgacgg

SEQ ID NO: 71577 - DNA, 25 bp, Saccharomyces pastorianus
attctttgacggacgcaggtgcggc

SEQ ID NO: 71578 - DNA, 25 bp, Saccharomyces pastorianus
atcttcagggaaatccaccacatta

SEQ ID NO: 71579 - DNA, 25 bp, Saccharomyces pastorianus
tgacttgactccagaagacgcccaa

SEQ ID NO: 71580 - DNA, 25 bp, Saccharomyces pastorianus
atgtccttaccagctacttttgact

SEQ ID NO: 71581 - DNA, 25 bp, Saccharomyces pastorianus
aagacgcccaactattgttggctgc

SEQ ID NO: 71582 - DNA, 25 bp, Saccharomyces pastorianus
gacgcccaactattgttggctgcta

SEQ ID NO: 71583 - DNA, 25 bp, Saccharomyces pastorianus
gactccagaagacgcccaactattg

SEQ ID NO: 71584 - DNA, 25 bp, Saccharomyces pastorianus
tttgacttgactccagaagacgccc

SEQ ID NO: 71585 - DNA, 25 bp, Saccharomyces pastorianus
ttgactccagaagacgcccaactat

SEQ ID NO: 71586 - DNA, 25 bp, Saccharomyces pastorianus
cgcccaactattgttggctgctaac

SEQ ID NO: 71587 - DNA, 25 bp, Saccharomyces pastorianus
agaagacgcccaactattgttggct

SEQ ID NO: 71588 - DNA, 25 bp, Saccharomyces pastorianus
tacttttgacttgactccagaagac

SEQ ID NO: 71589 - DNA, 25 bp, Saccharomyces pastorianus
ttttgacttgactccagaagacgcc

SEQ ID NO: 71590 - DNA, 25 bp, Saccharomyces pastorianus
agctggtgctggaacacttgcaatc

SEQ ID NO: 71591 - DNA, 25 bp, Saccharomyces pastorianus
ggaacacttgcaatcgacaggaaga

SEQ ID NO: 71592 - DNA, 25 bp, Saccharomyces pastorianus
gaagagtacttggaactgtggaaac

SEQ ID NO: 71593 - DNA, 25 bp, Saccharomyces pastorianus
gtggaaacaaaaacttctgctggaa

SEQ ID NO: 71594 - DNA, 25 bp, Saccharomyces pastorianus
gcggccaatttaccatgggctgact

SEQ ID NO: 71595 - DNA, 25 bp, Saccharomyces pastorianus
gactttgtgtcaattttgccggaga

SEQ ID NO: 71596 - DNA, 25 bp, Saccharomyces pastorianus
gtggtcatcagcaactgcaggtgaa

SEQ ID NO: 71597 - DNA, 25 bp, Saccharomyces pastorianus
gaagctataacccatatttggtcag

SEQ ID NO: 71598 - DNA, 25 bp, Saccharomyces pastorianus
gtgaagaaacctttgatcttacagt

SEQ ID NO: 71599 - DNA, 25 bp, Saccharomyces pastorianus
gaatcaatacaaaaaccgcggccaa

SEQ ID NO: 71600 - DNA, 25 bp, Saccharomyces pastorianus
aatcagcttttagtggtggtcatca

SEQ ID NO: 71601 - DNA, 25 bp, Saccharomyces pastorianus
gtactcacaatagcactctgatcaa

SEQ ID NO: 71602 - DNA, 25 bp, Saccharomyces pastorianus
tggcacaagccatcccctaaagaat

SEQ ID NO: 71603 - DNA, 25 bp, Saccharomyces pastorianus
aaaacccagtgtttgacgctcatcg

SEQ ID NO: 71604 - DNA, 25 bp, Saccharomyces pastorianus
ttacgagatgcgttttagccccaac

SEQ ID NO: 71605 - DNA, 25 bp, Saccharomyces pastorianus
ttgacgctcatcgaagtgctaatag

SEQ ID NO: 71606 - DNA, 25 bp, Saccharomyces pastorianus
aacaaactcgcatgaccattcgcat

SEQ ID NO: 71607 - DNA, 25 bp, Saccharomyces pastorianus
ccagggcaccctaataagagtattc

SEQ ID NO: 71608 - DNA, 25 bp, Saccharomyces pastorianus
ttggctggtgccaagataccaacaa

SEQ ID NO: 71609 - DNA, 25 bp, Saccharomyces pastorianus
aaatatttggactccgtgtggtcaa

SEQ ID NO: 71610 - DNA, 25 bp, Saccharomyces pastorianus
cggtagcaaattggccgcattgtca

SEQ ID NO: 71611 - DNA, 25 bp, Saccharomyces pastorianus
aacgcggcacacgatgatgaatttt

SEQ ID NO: 71612 - DNA, 25 bp, Saccharomyces pastorianus
gaaccagtctttgtttttcaaacag

SEQ ID NO: 71613 - DNA, 25 bp, Saccharomyces pastorianus
gagtcaaatcgcacattccttatcg

SEQ ID NO: 71614 - DNA, 25 bp, Saccharomyces pastorianus
gatgcgccttgcttgagaaatgact

SEQ ID NO: 71615 - DNA, 25 bp, Saccharomyces pastorianus
gccaggcgaggtatgtaagttcttt

SEQ ID NO: 71616 - DNA, 25 bp, Saccharomyces pastorianus
gggttgttccgtgtacatttggtca

SEQ ID NO: 71617 - DNA, 25 bp, Saccharomyces pastorianus
gtgtcgccgccgaaaagctttcaaa

SEQ ID NO: 71618 - DNA, 25 bp, Saccharomyces pastorianus
aaacggcagtgtaagtctattcgaa

SEQ ID NO: 71619 - DNA, 25 bp, Saccharomyces pastorianus
ccttatcgtgtattggatgcgcctt

SEQ ID NO: 71620 - DNA, 25 bp, Saccharomyces pastorianus
gggcagtgtccatcttagatcatca

SEQ ID NO: 71621 - DNA, 25 bp, Saccharomyces pastorianus
gaattcttccattccaccaaaaagg

SEQ ID NO: 71622 - DNA, 25 bp, Saccharomyces pastorianus
gtgtttcattctgtccttataatag

SEQ ID NO: 71623 - DNA, 25 bp, Saccharomyces pastorianus
ggcggttaattcacctatatcgtta

SEQ ID NO: 71624 - DNA, 25 bp, Saccharomyces pastorianus
aattcacctatatcgttattgtcgt

SEQ ID NO: 71625 - DNA, 25 bp, Saccharomyces pastorianus
ttctccctctttggcggttaattca

SEQ ID NO: 71626 - DNA, 25 bp, Saccharomyces pastorianus
cttcatcttcaacattttcgctttc

SEQ ID NO: 71627 - DNA, 25 bp, Saccharomyces pastorianus
tctcttactttacgaactttaccat

SEQ ID NO: 71628 - DNA, 25 bp, Saccharomyces pastorianus
tttggttcagcgacatcttcatctt

SEQ ID NO: 71629 - DNA, 25 bp, Saccharomyces pastorianus
atgttttcaaattcttctcttactt

SEQ ID NO: 71630 - DNA, 25 bp, Saccharomyces pastorianus
tcaacattttcgctttcttctacct

SEQ ID NO: 71631 - DNA, 25 bp, Saccharomyces pastorianus
cgttattgtcgttatcatctttttt

SEQ ID NO: 71632 - DNA, 25 bp, Saccharomyces pastorianus
ttacgaactttaccatcatcatcat

SEQ ID NO: 71633 - DNA, 25 bp, Saccharomyces pastorianus
tttcttctacctttgcttcttctgc

SEQ ID NO: 71634 - DNA, 25 bp, Saccharomyces pastorianus
gagatgattatcctgcaggcctggt

SEQ ID NO: 71635 - DNA, 25 bp, Saccharomyces pastorianus
gaatcagtacgacgccttaaggcat

SEQ ID NO: 71636 - DNA, 25 bp, Saccharomyces pastorianus
gcaggcctggtctctgagtatttac

SEQ ID NO: 71637 - DNA, 25 bp, Saccharomyces pastorianus
ttgtccatactaacactcaaccgat

SEQ ID NO: 71638 - DNA, 25 bp, Saccharomyces pastorianus
ggctctttagccttcatgcaagcta

SEQ ID NO: 71639 - DNA, 25 bp, Saccharomyces pastorianus
gagaattggaacaccgcgacgacat

SEQ ID NO: 71640 - DNA, 25 bp, Saccharomyces pastorianus
attatcctctggtgctggtgttaca

SEQ ID NO: 71641 - DNA, 25 bp, Saccharomyces pastorianus
aagtgctccagctggtgattttacc

SEQ ID NO: 71642 - DNA, 25 bp, Saccharomyces pastorianus
aaggcattattcactctgttctgct

SEQ ID NO: 71643 - DNA, 25 bp, Saccharomyces pastorianus
tctgcttctgccaaggacggtttga

SEQ ID NO: 71644 - DNA, 25 bp, Saccharomyces pastorianus
agatgtgtacacctgtggctcttta

SEQ ID NO: 71645 - DNA, 25 bp, Saccharomyces pastorianus
aggctctaacaatccgttttcgttg

SEQ ID NO: 71646 - DNA, 25 bp, Saccharomyces pastorianus
aagcgcaggtaccagtagcatcgaa

SEQ ID NO: 71647 - DNA, 25 bp, Saccharomyces pastorianus
aagttcagtatgcttccaccggtat

SEQ ID NO: 71648 - DNA, 25 bp, Saccharomyces pastorianus
ggacatacatgactggttcaccggc

SEQ ID NO: 71649 - DNA, 25 bp, Saccharomyces pastorianus
tgatactttttctttcgagccagca

SEQ ID NO: 71650 - DNA, 25 bp, Saccharomyces pastorianus
aatctccagtataccccaaatttca

SEQ ID NO: 71651 - DNA, 25 bp, Saccharomyces pastorianus
aactgggatgtatgcctccaatctc

SEQ ID NO: 71652 - DNA, 25 bp, Saccharomyces pastorianus
aacagcaaccagtccaattggccgg

SEQ ID NO: 71653 - DNA, 25 bp, Saccharomyces pastorianus
gaacccatttacgttgcagcaagct

SEQ ID NO: 71654 - DNA, 25 bp, Saccharomyces pastorianus
aacagttaacccatttcaagcacaa

SEQ ID NO: 71655 - DNA, 25 bp, Saccharomyces pastorianus
aacccgtttggctcgcaacaacaag

SEQ ID NO: 71656 - DNA, 25 bp, Saccharomyces pastorianus
aggcgtctgtaatctcttggaagtc

SEQ ID NO: 71657 - DNA, 25 bp, Saccharomyces pastorianus
tctgtaatctcttggaagtcacggg

SEQ ID NO: 71658 - DNA, 25 bp, Saccharomyces pastorianus
tggtccacgccgtatctgacaacct

SEQ ID NO: 71659 - DNA, 25 bp, Saccharomyces pastorianus
gagaatggggtccacgtatttttgt

SEQ ID NO: 71660 - DNA, 25 bp, Saccharomyces pastorianus
tcacgggggttcgaagtgcccatga

SEQ ID NO: 71661 - DNA, 25 bp, Saccharomyces pastorianus
accttacgtccaaggcgtctgtaat

SEQ ID NO: 71662 - DNA, 25 bp, Saccharomyces pastorianus
gtatctgacaaccttacgtccaagg

SEQ ID NO: 71663 - DNA, 25 bp, Saccharomyces pastorianus
gggagccatctttatcttggtcgcc

SEQ ID NO: 71664 - DNA, 25 bp, Saccharomyces pastorianus
acgtccaaggcgtctgtaatctctt

SEQ ID NO: 71665 - DNA, 25 bp, Saccharomyces pastorianus
tgacaaccttacgtccaaggcgtct

SEQ ID NO: 71666 - DNA, 25 bp, Saccharomyces pastorianus
gcgtctgtaatctcttggaagtcac

SEQ ID NO: 71667 - DNA, 25 bp, Saccharomyces pastorianus
ggacatggatcctgaagctgccttc

SEQ ID NO: 71668 - DNA, 25 bp, Saccharomyces pastorianus
cctgccgattttgccaagctacaag

SEQ ID NO: 71669 - DNA, 25 bp, Saccharomyces pastorianus
gtcctatcagatacaagcagtcacg

SEQ ID NO: 71670 - DNA, 25 bp, Saccharomyces pastorianus
gaaattgcttccacccgtattttga

SEQ ID NO: 71671 - DNA, 25 bp, Saccharomyces pastorianus
acccgtattttgactcctgccgatt

SEQ ID NO: 71672 - DNA, 25 bp, Saccharomyces pastorianus
cgacttggaactaagcggcgacgat

SEQ ID NO: 71673 - DNA, 25 bp, Saccharomyces pastorianus
gattcaaacacactaactggtccta

SEQ ID NO: 71674 - DNA, 25 bp, Saccharomyces pastorianus
aatgttcgttccactaccaatagag

SEQ ID NO: 71675 - DNA, 25 bp, Saccharomyces pastorianus
ggtaagcgtgacaatgttcgttcca

SEQ ID NO: 71676 - DNA, 25 bp, Saccharomyces pastorianus
atgggtgttcacaagcaggacagac

SEQ ID NO: 71677 - DNA, 25 bp, Saccharomyces pastorianus
gaagagctagtcgattcaaacacac

SEQ ID NO: 71678 - DNA, 25 bp, Saccharomyces pastorianus
ataaaggagcttgtaccccatctgg

SEQ ID NO: 71679 - DNA, 25 bp, Saccharomyces pastorianus
attttccagactcgaacaggcgcta

SEQ ID NO: 71680 - DNA, 25 bp, Saccharomyces pastorianus
aagaccatctttcagtccattgctg

SEQ ID NO: 71681 - DNA, 25 bp, Saccharomyces pastorianus
ggtccaaagaagcttggcctcacat

SEQ ID NO: 71682 - DNA, 25 bp, Saccharomyces pastorianus
cggtgctccggttgatatcttaata

SEQ ID NO: 71683 - DNA, 25 bp, Saccharomyces pastorianus
agggtcaggccactacgtcaagatg

SEQ ID NO: 71684 - DNA, 25 bp, Saccharomyces pastorianus
gcaaggtatcctctttgtaggttct

SEQ ID NO: 71685 - DNA, 25 bp, Saccharomyces pastorianus
cattgctgctaagtccgatggcgag

SEQ ID NO: 71686 - DNA, 25 bp, Saccharomyces pastorianus
gaccatggttttaccgtagttgcgt

SEQ ID NO: 71687 - DNA, 25 bp, Saccharomyces pastorianus
ttatcattgacggtggtaactccca

SEQ ID NO: 71688 - DNA, 25 bp, Saccharomyces pastorianus
gctcttgattaaagccggtgctccg

SEQ ID NO: 71689 - DNA, 25 bp, Saccharomyces pastorianus
caaaggcttattcataccacgggta

SEQ ID NO: 71690 - DNA, 25 bp, Saccharomyces pastorianus
gatagttcacaggaggatacgctta

SEQ ID NO: 71691 - DNA, 25 bp, Saccharomyces pastorianus
gctcaagcgatggttctgaagtgca

SEQ ID NO: 71692 - DNA, 25 bp, Saccharomyces pastorianus
ttcccaaggccacccagtatttgat

SEQ ID NO: 71693 - DNA, 25 bp, Saccharomyces pastorianus
cgcgtccgccgaatttgaagaactt

SEQ ID NO: 71694 - DNA, 25 bp, Saccharomyces pastorianus
aaacggtgacgtacttcaatgggat

SEQ ID NO: 71695 - DNA, 25 bp, Saccharomyces pastorianus
aagattcaggtgcactactacagga

SEQ ID NO: 71696 - DNA, 25 bp, Saccharomyces pastorianus
ttggaggcaataaaccccgcgtccg

SEQ ID NO: 71697 - DNA, 25 bp, Saccharomyces pastorianus
gatacttgggctgggctcaagcgat

SEQ ID NO: 71698 - DNA, 25 bp, Saccharomyces pastorianus
gcgagataaacctactgacacaatg

SEQ ID NO: 71699 - DNA, 25 bp, Saccharomyces pastorianus
gatattatcgtccttgagactcaaa

SEQ ID NO: 71700 - DNA, 25 bp, Saccharomyces pastorianus
gtattccaattgtcctgtgtatgtt

SEQ ID NO: 71701 - DNA, 25 bp, Saccharomyces pastorianus
tacgccagattatccgatgtctttg

SEQ ID NO: 71702 - DNA, 25 bp, Saccharomyces pastorianus
gttacacatgcaatgggtcgccaga

SEQ ID NO: 71703 - DNA, 25 bp, Saccharomyces pastorianus
gattgccggtaacgtcacttccagg

SEQ ID NO: 71704 - DNA, 25 bp, Saccharomyces pastorianus
gttgcatttcttggttcccattgac

SEQ ID NO: 71705 - DNA, 25 bp, Saccharomyces pastorianus
gtaccatcattcaatctcaggctta

SEQ ID NO: 71706 - DNA, 25 bp, Saccharomyces pastorianus
atcttccctctatcatgtattccaa

SEQ ID NO: 71707 - DNA, 25 bp, Saccharomyces pastorianus
aacgccggttatgttggagtcatct

SEQ ID NO: 71708 - DNA, 25 bp, Saccharomyces pastorianus
tctatccgatttctcctctttaaaa

SEQ ID NO: 71709 - DNA, 25 bp, Saccharomyces pastorianus
cgcccacttggccatttattatcaa

SEQ ID NO: 71710 - DNA, 25 bp, Saccharomyces pastorianus
tatgctgctggtgcgatattctata

SEQ ID NO: 71711 - DNA, 25 bp, Saccharomyces pastorianus
agtggagttagcgatgtcgttcttc

SEQ ID NO: 71712 - DNA, 25 bp, Saccharomyces pastorianus
atatactcgtcagcgtcagcgatgg

SEQ ID NO: 71713 - DNA, 25 bp, Saccharomyces pastorianus
agcagattgagcctgttgcgctcct

SEQ ID NO: 71714 - DNA, 25 bp, Saccharomyces pastorianus
gagttagcgatgtcgttcttcacgc

SEQ ID NO: 71715 - DNA, 25 bp, Saccharomyces pastorianus
cgttcttcacgctaaatagcagatt

SEQ ID NO: 71716 - DNA, 25 bp, Saccharomyces pastorianus
attgagcctgttgcgctcctgctgg

SEQ ID NO: 71717 - DNA, 25 bp, Saccharomyces pastorianus
tactcgtcagcgtcagcgatgggag

SEQ ID NO: 71718 - DNA, 25 bp, Saccharomyces pastorianus
agcgatgtcgttcttcacgctaaat

SEQ ID NO: 71719 - DNA, 25 bp, Saccharomyces pastorianus
aatagcagattgagcctgttgcgct

SEQ ID NO: 71720 - DNA, 25 bp, Saccharomyces pastorianus
tccgtagtggagttagcgatgtcgt

SEQ ID NO: 71721 - DNA, 25 bp, Saccharomyces pastorianus
gatgtcgttcttcacgctaaatagc

SEQ ID NO: 71722 - DNA, 25 bp, Saccharomyces pastorianus
actccgtctgggtctcgagcgagat

SEQ ID NO: 71723 - DNA, 25 bp, Saccharomyces pastorianus
tggtctgcgcgaacgtggagtactt

SEQ ID NO: 71724 - DNA, 25 bp, Saccharomyces pastorianus
ggccttgcccctgatagttatgaaa

SEQ ID NO: 71725 - DNA, 25 bp, Saccharomyces pastorianus
gagcgagatggccttgcccctgata

SEQ ID NO: 71726 - DNA, 25 bp, Saccharomyces pastorianus
agctgcgtgtctattgccttctctt

SEQ ID NO: 71727 - DNA, 25 bp, Saccharomyces pastorianus
gttatgaaagatggttgtgagctca

SEQ ID NO: 71728 - DNA, 25 bp, Saccharomyces pastorianus
tctgcgcgaacgtggagtacttcga

SEQ ID NO: 71729 - DNA, 25 bp, Saccharomyces pastorianus
aggagagactccgtctgggtctcga

SEQ ID NO: 71730 - DNA, 25 bp, Saccharomyces pastorianus
agtacttcgagaggagagactccgt

SEQ ID NO: 71731 - DNA, 25 bp, Saccharomyces pastorianus
ttctgagctggtggtctgcgcgaac

SEQ ID NO: 71732 - DNA, 25 bp, Saccharomyces pastorianus
tcttccccagtctgttctgagctgg

SEQ ID NO: 71733 - DNA, 25 bp, Saccharomyces pastorianus
atggtgagcgcatctagccttgcaa

SEQ ID NO: 71734 - DNA, 25 bp, Saccharomyces pastorianus
aatccagcacgacggagagctctgt

SEQ ID NO: 71735 - DNA, 25 bp, Saccharomyces pastorianus
gtagtagtagcacgagcactgtccc

SEQ ID NO: 71736 - DNA, 25 bp, Saccharomyces pastorianus
gtgaacctgcagacatcactgatgt

SEQ ID NO: 71737 - DNA, 25 bp, Saccharomyces pastorianus
gtgacttccgtgcaaaccaaggact

SEQ ID NO: 71738 - DNA, 25 bp, Saccharomyces pastorianus
tcaagtacatccacatcgagcacga

SEQ ID NO: 71739 - DNA, 25 bp, Saccharomyces pastorianus
aagcacgagcattatctctacgcca

SEQ ID NO: 71740 - DNA, 25 bp, Saccharomyces pastorianus
gactcaaacgtctcggaattcactt

SEQ ID NO: 71741 - DNA, 25 bp, Saccharomyces pastorianus
acaagcgcgacctcgtcaagtacat

SEQ ID NO: 71742 - DNA, 25 bp, Saccharomyces pastorianus
gaattcacttcgaggtatttcacca

SEQ ID NO: 71743 - DNA, 25 bp, Saccharomyces pastorianus
gagagctctgtgactacaacggcat

SEQ ID NO: 71744 - DNA, 25 bp, Saccharomyces pastorianus
gacacaagacactttcccttataac

SEQ ID NO: 71745 - DNA, 25 bp, Saccharomyces pastorianus
tataccggcaacattcactcactga

SEQ ID NO: 71746 - DNA, 25 bp, Saccharomyces pastorianus
catagtattagatcaccacccggtg

SEQ ID NO: 71747 - DNA, 25 bp, Saccharomyces pastorianus
aattcctcgcatttacagttacggc

SEQ ID NO: 71748 - DNA, 25 bp, Saccharomyces pastorianus
aagcattttttggaacgagctgaaa

SEQ ID NO: 71749 - DNA, 25 bp, Saccharomyces pastorianus
aaaagaatcgactccaccagggcta

SEQ ID NO: 71750 - DNA, 25 bp, Saccharomyces pastorianus
atgatcactcattttgcagaaggtt

SEQ ID NO: 71751 - DNA, 25 bp, Saccharomyces pastorianus
tcaatagtaccactttgggcgggtt

SEQ ID NO: 71752 - DNA, 25 bp, Saccharomyces pastorianus
tgaaactcacaactctacctttgtg

SEQ ID NO: 71753 - DNA, 25 bp, Saccharomyces pastorianus
gggcagtttcgagagagtttcatac

SEQ ID NO: 71754 - DNA, 25 bp, Saccharomyces pastorianus
gcacaaccgctcaactaaatctatt

SEQ ID NO: 71755 - DNA, 25 bp, Saccharomyces pastorianus
aggcattgacgttcagagtccccgt

SEQ ID NO: 71756 - DNA, 25 bp, Saccharomyces pastorianus
gtccccgattttggcaggatccata

SEQ ID NO: 71757 - DNA, 25 bp, Saccharomyces pastorianus
cgtgcctggtaatgccgctatagaa

SEQ ID NO: 71758 - DNA, 25 bp, Saccharomyces pastorianus
tttatatccgtcaacttcactggcg

SEQ ID NO: 71759 - DNA, 25 bp, Saccharomyces pastorianus
gtcactattgctggcaccattatca

SEQ ID NO: 71760 - DNA, 25 bp, Saccharomyces pastorianus
ggacccagcagccttgtcactattg

SEQ ID NO: 71761 - DNA, 25 bp, Saccharomyces pastorianus
ggtcctaggcaatcgtaatccgtca

SEQ ID NO: 71762 - DNA, 25 bp, Saccharomyces pastorianus
aacaactacattgtcgtcgtcctgg

SEQ ID NO: 71763 - DNA, 25 bp, Saccharomyces pastorianus
attatcaagagtgtgcgtgcctggt

SEQ ID NO: 71764 - DNA, 25 bp, Saccharomyces pastorianus
accgccgttgttattggacccagca

SEQ ID NO: 71765 - DNA, 25 bp, Saccharomyces pastorianus
tgccgtcattctgtaaggcattgac

SEQ ID NO: 71766 - DNA, 25 bp, Saccharomyces pastorianus
aagcattctctttataagccttgga

SEQ ID NO: 71767 - DNA, 25 bp, Saccharomyces pastorianus
gaggctagaagtgctttcatttccc

SEQ ID NO: 71768 - DNA, 25 bp, Saccharomyces pastorianus
gtgctttcatttcccaattttcttt

SEQ ID NO: 71769 - DNA, 25 bp, Saccharomyces pastorianus
gatcttggccgatgacagtatagtt

SEQ ID NO: 71770 - DNA, 25 bp, Saccharomyces pastorianus
taaaatacacctccaagtcccaaga

SEQ ID NO: 71771 - DNA, 25 bp, Saccharomyces pastorianus
aaacaaggaattctcattgaccact

SEQ ID NO: 71772 - DNA, 25 bp, Saccharomyces pastorianus
ctactccagtagcaatcagaacaca

SEQ ID NO: 71773 - DNA, 25 bp, Saccharomyces pastorianus
aactgtttacaaagcttacgaggct

SEQ ID NO: 71774 - DNA, 25 bp, Saccharomyces pastorianus
aagaagccagtttgaccgctgtcaa

SEQ ID NO: 71775 - DNA, 25 bp, Saccharomyces pastorianus
tcatttaccggtacttctaaatcct

SEQ ID NO: 71776 - DNA, 25 bp, Saccharomyces pastorianus
actaatgggtgtcaaggcttacaac

SEQ ID NO: 71777 - DNA, 25 bp, Saccharomyces pastorianus
cgggcaggttcatgacatagtgact

SEQ ID NO: 71778 - DNA, 25 bp, Saccharomyces pastorianus
ttgcccaagaacgagatggcgctgt

SEQ ID NO: 71779 - DNA, 25 bp, Saccharomyces pastorianus
tttgaagcgcggttgctgttgttgt

SEQ ID NO: 71780 - DNA, 25 bp, Saccharomyces pastorianus
cgggaacagggatcttaatcgtgcc

SEQ ID NO: 71781 - DNA, 25 bp, Saccharomyces pastorianus
aagatgccgcggaagttgcccaaga

SEQ ID NO: 71782 - DNA, 25 bp, Saccharomyces pastorianus
gatcggcacttctttgaagcgcggt

SEQ ID NO: 71783 - DNA, 25 bp, Saccharomyces pastorianus
agctgggatcggcacttctttgaag

SEQ ID NO: 71784 - DNA, 25 bp, Saccharomyces pastorianus
gtttcctggcgggaacagggatctt

SEQ ID NO: 71785 - DNA, 25 bp, Saccharomyces pastorianus
actgattcgagctgggatcggcact

SEQ ID NO: 71786 - DNA, 25 bp, Saccharomyces pastorianus
acatagtgactgattcgagctggga

SEQ ID NO: 71787 - DNA, 25 bp, Saccharomyces pastorianus
gcgctgtcgggcaggttcatgacat

SEQ ID NO: 71788 - DNA, 25 bp, Saccharomyces pastorianus
actttcatttgcatacggattgcag

SEQ ID NO: 71789 - DNA, 25 bp, Saccharomyces pastorianus
gcatattcactttcatttgcatacg

SEQ ID NO: 71790 - DNA, 25 bp, Saccharomyces pastorianus
cctggtttgataaggtctacgcttt

SEQ ID NO: 71791 - DNA, 25 bp, Saccharomyces pastorianus
ctacgcttttgcatgcatattcact

SEQ ID NO: 71792 - DNA, 25 bp, Saccharomyces pastorianus
attcctggtttgataaggtctacgc

SEQ ID NO: 71793 - DNA, 25 bp, Saccharomyces pastorianus
ttcactttcatttgcatacggattg

SEQ ID NO: 71794 - DNA, 25 bp, Saccharomyces pastorianus
tttactgttccaaacgttgttatag

SEQ ID NO: 71795 - DNA, 25 bp, Saccharomyces pastorianus
acgttgttatagattcctggtttga

SEQ ID NO: 71796 - DNA, 25 bp, Saccharomyces pastorianus
gaactattgggagaaaaatttactg

SEQ ID NO: 71797 - DNA, 25 bp, Saccharomyces pastorianus
catacggattgcagagcggaagctt

SEQ ID NO: 71798 - DNA, 25 bp, Saccharomyces pastorianus
gttccaaacgttgttatagattcct

SEQ ID NO: 71799 - DNA, 25 bp, Saccharomyces pastorianus
tcggaccctttagcaatcactattg

SEQ ID NO: 71800 - DNA, 25 bp, Saccharomyces pastorianus
ggtcagtaccaccatctcatacgtt

SEQ ID NO: 71801 - DNA, 25 bp, Saccharomyces pastorianus
gtaaagttccaaattcttgcgctct

SEQ ID NO: 71802 - DNA, 25 bp, Saccharomyces pastorianus
aacatgatctcgactctttgacaaa

SEQ ID NO: 71803 - DNA, 25 bp, Saccharomyces pastorianus
aaatacctcacatcatataccactc

SEQ ID NO: 71804 - DNA, 25 bp, Saccharomyces pastorianus
ttgctacatcagtctccgcaggtaa

SEQ ID NO: 71805 - DNA, 25 bp, Saccharomyces pastorianus
ctttgttgtctctctgcggtcagta

SEQ ID NO: 71806 - DNA, 25 bp, Saccharomyces pastorianus
ggttttaccgtatactgtcttcata

SEQ ID NO: 71807 - DNA, 25 bp, Saccharomyces pastorianus
ttcttgcgctctttgccatgcaaaa

SEQ ID NO: 71808 - DNA, 25 bp, Saccharomyces pastorianus
tgaaaacgcggcatcggacccttta

SEQ ID NO: 71809 - DNA, 25 bp, Saccharomyces pastorianus
acgttgtgactcttttgcctgtaaa

SEQ ID NO: 71810 - DNA, 25 bp, Saccharomyces pastorianus
gtcagaccccaactttagaaatata

SEQ ID NO: 71811 - DNA, 25 bp, Saccharomyces pastorianus
acttcaatgtcagaccccaacttta

SEQ ID NO: 71812 - DNA, 25 bp, Saccharomyces pastorianus
gtaaatccctattatggacaacgga

SEQ ID NO: 71813 - DNA, 25 bp, Saccharomyces pastorianus
atggcataagctacgtagcacttca

SEQ ID NO: 71814 - DNA, 25 bp, Saccharomyces pastorianus
ctggccactgtttcaagtttatact

SEQ ID NO: 71815 - DNA, 25 bp, Saccharomyces pastorianus
ttatatggcataagctacgtagcac

SEQ ID NO: 71816 - DNA, 25 bp, Saccharomyces pastorianus
ggccactgtttcaagtttatactat

SEQ ID NO: 71817 - DNA, 25 bp, Saccharomyces pastorianus
aattttttggttatatggcataagc

SEQ ID NO: 71818 - DNA, 25 bp, Saccharomyces pastorianus
agctacgtagcacttcaatgtcaga

SEQ ID NO: 71819 - DNA, 25 bp, Saccharomyces pastorianus
gtagcacttcaatgtcagaccccaa

SEQ ID NO: 71820 - DNA, 25 bp, Saccharomyces pastorianus
ccctattatggacaacggacgccta

SEQ ID NO: 71821 - DNA, 25 bp, Saccharomyces pastorianus
caattcttattgcaattctaagcta

SEQ ID NO: 71822 - DNA, 25 bp, Saccharomyces pastorianus
gctttgtcaattcttattgcaattc

SEQ ID NO: 71823 - DNA, 25 bp, Saccharomyces pastorianus
gtatcgctttgtcaattcttattgc

SEQ ID NO: 71824 - DNA, 25 bp, Saccharomyces pastorianus
tcgctttgtcaattcttattgcaat

SEQ ID NO: 71825 - DNA, 25 bp, Saccharomyces pastorianus
gacaagtatcgctttgtcaattctt

SEQ ID NO: 71826 - DNA, 25 bp, Saccharomyces pastorianus
atcgctttgtcaattcttattgcaa

SEQ ID NO: 71827 - DNA, 25 bp, Saccharomyces pastorianus
tcttattgcaattctaagctatatc

SEQ ID NO: 71828 - DNA, 25 bp, Saccharomyces pastorianus
caagtatcgctttgtcaattcttat

SEQ ID NO: 71829 - DNA, 25 bp, Saccharomyces pastorianus
agtatcgctttgtcaattcttattg

SEQ ID NO: 71830 - DNA, 25 bp, Saccharomyces pastorianus
tgcaattctaagctatatcaatatc

SEQ ID NO: 71831 - DNA, 25 bp, Saccharomyces pastorianus
gtcaattcttattgcaattctaagc

SEQ ID NO: 71832 - DNA, 25 bp, Saccharomyces pastorianus
tattaatcttactccagccattctt

SEQ ID NO: 71833 - DNA, 25 bp, Saccharomyces pastorianus
agaggcctattctttgacaagcaaa

SEQ ID NO: 71834 - DNA, 25 bp, Saccharomyces pastorianus
gacagctatcattctatcgttcata

SEQ ID NO: 71835 - DNA, 25 bp, Saccharomyces pastorianus
ttgccctctcataaagtcctacaat

SEQ ID NO: 71836 - DNA, 25 bp, Saccharomyces pastorianus
aaagtcctacaatctctgcgagttc

SEQ ID NO: 71837 - DNA, 25 bp, Saccharomyces pastorianus
ttgggtgtggcccttgacagctatc

SEQ ID NO: 71838 - DNA, 25 bp, Saccharomyces pastorianus
aagtgggctctctatttgacatcat

SEQ ID NO: 71839 - DNA, 25 bp, Saccharomyces pastorianus
ttccgtatccggagtgttcatgtac

SEQ ID NO: 71840 - DNA, 25 bp, Saccharomyces pastorianus
aacagctctggttcaaagtgggctc

SEQ ID NO: 71841 - DNA, 25 bp, Saccharomyces pastorianus
acaagtggtcctacgaacagctctg

SEQ ID NO: 71842 - DNA, 25 bp, Saccharomyces pastorianus
ttacacagaatattccttgccctct

SEQ ID NO: 71843 - DNA, 25 bp, Saccharomyces pastorianus
gagctatttagaaacacaattaacc

SEQ ID NO: 71844 - DNA, 25 bp, Saccharomyces pastorianus
gactaagacattcgaactgatttct

SEQ ID NO: 71845 - DNA, 25 bp, Saccharomyces pastorianus
gacattcgaactgatttctgcagaa

SEQ ID NO: 71846 - DNA, 25 bp, Saccharomyces pastorianus
ctgactaagacattcgaactgattt

SEQ ID NO: 71847 - DNA, 25 bp, Saccharomyces pastorianus
taagacattcgaactgatttctgca

SEQ ID NO: 71848 - DNA, 25 bp, Saccharomyces pastorianus
atcaagaaatgaacagtagtctgac

SEQ ID NO: 71849 - DNA, 25 bp, Saccharomyces pastorianus
agacattcgaactgatttctgcaga

SEQ ID NO: 71850 - DNA, 25 bp, Saccharomyces pastorianus
gaaatgaacagtagtctgactaaga

SEQ ID NO: 71851 - DNA, 25 bp, Saccharomyces pastorianus
gtagtctgactaagacattcgaact

SEQ ID NO: 71852 - DNA, 25 bp, Saccharomyces pastorianus
gtctgactaagacattcgaactgat

SEQ ID NO: 71853 - DNA, 25 bp, Saccharomyces pastorianus
agaaacacaattaaccaaaagacag

SEQ ID NO: 71854 - DNA, 25 bp, Saccharomyces pastorianus
cagctgctgctgttgtctagtgaga

SEQ ID NO: 71855 - DNA, 25 bp, Saccharomyces pastorianus
aagccggcagccaatgactctagag

SEQ ID NO: 71856 - DNA, 25 bp, Saccharomyces pastorianus
ggacaaagccaagcagtatgacaat

SEQ ID NO: 71857 - DNA, 25 bp, Saccharomyces pastorianus
aagagcatcatttccaacgtcttgg

SEQ ID NO: 71858 - DNA, 25 bp, Saccharomyces pastorianus
attcgaaaacgataagccggcagcc

SEQ ID NO: 71859 - DNA, 25 bp, Saccharomyces pastorianus
tatgcatatgtgttgagctctttga

SEQ ID NO: 71860 - DNA, 25 bp, Saccharomyces pastorianus
aattcgaaccctctataagcaagaa

SEQ ID NO: 71861 - DNA, 25 bp, Saccharomyces pastorianus
aaaccgttggatgaacagctgctgc

SEQ ID NO: 71862 - DNA, 25 bp, Saccharomyces pastorianus
aaagacatgtctcccatactaaatg

SEQ ID NO: 71863 - DNA, 25 bp, Saccharomyces pastorianus
gctctttgatgtttgctagtatgaa

SEQ ID NO: 71864 - DNA, 25 bp, Saccharomyces pastorianus
agatttaactaaccgctatgcatat

SEQ ID NO: 71865 - DNA, 25 bp, Saccharomyces pastorianus
caagccttttatggtgcagacgatc

SEQ ID NO: 71866 - DNA, 25 bp, Saccharomyces pastorianus
gcaatggaatgctgcagtctcgcca

SEQ ID NO: 71867 - DNA, 25 bp, Saccharomyces pastorianus
tgaagacctcactcatccggaaaag

SEQ ID NO: 71868 - DNA, 25 bp, Saccharomyces pastorianus
tatcctccgaatacgttttatcctc

SEQ ID NO: 71869 - DNA, 25 bp, Saccharomyces pastorianus
tgcagtctcgccatacaattcaaga

SEQ ID NO: 71870 - DNA, 25 bp, Saccharomyces pastorianus
gtcagcaatgttcccattcatgcag

SEQ ID NO: 71871 - DNA, 25 bp, Saccharomyces pastorianus
taaagaattttcgatgccaaccccg

SEQ ID NO: 71872 - DNA, 25 bp, Saccharomyces pastorianus
attcaagagcgccatctactactac

SEQ ID NO: 71873 - DNA, 25 bp, Saccharomyces pastorianus
gccaaccccggattcgaatactttg

SEQ ID NO: 71874 - DNA, 25 bp, Saccharomyces pastorianus
tgcagacgatcttttctttccttct

SEQ ID NO: 71875 - DNA, 25 bp, Saccharomyces pastorianus
attatagatcaacacccgggtcagc

SEQ ID NO: 71876 - DNA, 25 bp, Saccharomyces pastorianus
tatgattcttcctctgaaaagcctc

SEQ ID NO: 71877 - DNA, 25 bp, Saccharomyces pastorianus
gactatttccctgtatcggttgagt

SEQ ID NO: 71878 - DNA, 25 bp, Saccharomyces pastorianus
atatcaattatctgtggcgcccact

SEQ ID NO: 71879 - DNA, 25 bp, Saccharomyces pastorianus
aagagagtctatgcccgtgaattcc

SEQ ID NO: 71880 - DNA, 25 bp, Saccharomyces pastorianus
gaaaatgcgtttgacccatttcctc

SEQ ID NO: 71881 - DNA, 25 bp, Saccharomyces pastorianus
gtgccagcatcttcatcaagacagc

SEQ ID NO: 71882 - DNA, 25 bp, Saccharomyces pastorianus
gtgactgtgacaaaccagccacttt

SEQ ID NO: 71883 - DNA, 25 bp, Saccharomyces pastorianus
tgaacccgctttatcattctcatat

SEQ ID NO: 71884 - DNA, 25 bp, Saccharomyces pastorianus
tagcagcttcccctcaaattaatga

SEQ ID NO: 71885 - DNA, 25 bp, Saccharomyces pastorianus
aaatctgacgattcgcccacaaagt

SEQ ID NO: 71886 - DNA, 25 bp, Saccharomyces pastorianus
agaaccatctcacgttttatccaag

SEQ ID NO: 71887 - DNA, 25 bp, Saccharomyces pastorianus
tactccgtgggtatcgtgattcaaa

SEQ ID NO: 71888 - DNA, 25 bp, Saccharomyces pastorianus
aaatcggcctagtcattgtggtcgt

SEQ ID NO: 71889 - DNA, 25 bp, Saccharomyces pastorianus
gagaaatcaggcaactctaccgcac

SEQ ID NO: 71890 - DNA, 25 bp, Saccharomyces pastorianus
cgatttccggtttcgtcagacaaag

SEQ ID NO: 71891 - DNA, 25 bp, Saccharomyces pastorianus
cccctagagggatctgctactgtga

SEQ ID NO: 71892 - DNA, 25 bp, Saccharomyces pastorianus
tatctttccaacgtcaggaccggtt

SEQ ID NO: 71893 - DNA, 25 bp, Saccharomyces pastorianus
gtcagatttgctgttcgtgtccatc

SEQ ID NO: 71894 - DNA, 25 bp, Saccharomyces pastorianus
ggaaccactcgtgctaacggtacaa

SEQ ID NO: 71895 - DNA, 25 bp, Saccharomyces pastorianus
cggttataacgctccacatggtggt

SEQ ID NO: 71896 - DNA, 25 bp, Saccharomyces pastorianus
gtgagcacgaactctaactcttata

SEQ ID NO: 71897 - DNA, 25 bp, Saccharomyces pastorianus
attgtggtcgtcatttactccgtgg

SEQ ID NO: 71898 - DNA, 25 bp, Saccharomyces pastorianus
ttagtttccaaaaggcactcgtcag

SEQ ID NO: 71899 - DNA, 25 bp, Saccharomyces pastorianus
aaggagcagctctatcaatgcaaac

SEQ ID NO: 71900 - DNA, 25 bp, Saccharomyces pastorianus
gcactcgtcagtgattgcaccataa

SEQ ID NO: 71901 - DNA, 25 bp, Saccharomyces pastorianus
gaagcaccccaattactagagcaag

SEQ ID NO: 71902 - DNA, 25 bp, Saccharomyces pastorianus
gaattcgaagttgactctcagcagg

SEQ ID NO: 71903 - DNA, 25 bp, Saccharomyces pastorianus
atagttatggcagccgccgaagcac

SEQ ID NO: 71904 - DNA, 25 bp, Saccharomyces pastorianus
gagccagtcattacatctgacagca

SEQ ID NO: 71905 - DNA, 25 bp, Saccharomyces pastorianus
gcaagacctagaaggagcagctcta

SEQ ID NO: 71906 - DNA, 25 bp, Saccharomyces pastorianus
gagaccacggaacgaagtttgccgt

SEQ ID NO: 71907 - DNA, 25 bp, Saccharomyces pastorianus
tgcaccataatgacggagaccacgg

SEQ ID NO: 71908 - DNA, 25 bp, Saccharomyces pastorianus
cagcaatagttatggcagccgccga

SEQ ID NO: 71909 - DNA, 25 bp, Saccharomyces pastorianus
gagtaactctcaggtgaatggacac

SEQ ID NO: 71910 - DNA, 25 bp, Saccharomyces pastorianus
tggtcctgctttccgaactagtaat

SEQ ID NO: 71911 - DNA, 25 bp, Saccharomyces pastorianus
aaggcgggcatcttctactttaagc

SEQ ID NO: 71912 - DNA, 25 bp, Saccharomyces pastorianus
tgatgattgcaataccggtgatggt

SEQ ID NO: 71913 - DNA, 25 bp, Saccharomyces pastorianus
agttatttatatccctgttcctggt

SEQ ID NO: 71914 - DNA, 25 bp, Saccharomyces pastorianus
agggttatatcgttggacctacaga

SEQ ID NO: 71915 - DNA, 25 bp, Saccharomyces pastorianus
gattttacgacggatttgtctcaaa

SEQ ID NO: 71916 - DNA, 25 bp, Saccharomyces pastorianus
agtagatcagtttctctcgcagaga

SEQ ID NO: 71917 - DNA, 25 bp, Saccharomyces pastorianus
gatattaacggtagccatgttcatg

SEQ ID NO: 71918 - DNA, 25 bp, Saccharomyces pastorianus
atacggttcatgtttgcagtagtca

SEQ ID NO: 71919 - DNA, 25 bp, Saccharomyces pastorianus
acaagagcgcaattgctgggatagc

SEQ ID NO: 71920 - DNA, 25 bp, Saccharomyces pastorianus
agaatttgcaggagtttttcttcaa

SEQ ID NO: 71921 - DNA, 25 bp, Saccharomyces pastorianus
aatagacatttgatggcacatgacc

SEQ ID NO: 71922 - DNA, 25 bp, Saccharomyces pastorianus
ataggttcacttttgaggacagctc

SEQ ID NO: 71923 - DNA, 25 bp, Saccharomyces pastorianus
tgccattcagggaccccaggaggat

SEQ ID NO: 71924 - DNA, 25 bp, Saccharomyces pastorianus
ggacagctctgcgttgtttagggac

SEQ ID NO: 71925 - DNA, 25 bp, Saccharomyces pastorianus
cgcacctttaactgacgattatgat

SEQ ID NO: 71926 - DNA, 25 bp, Saccharomyces pastorianus
ggaccccaggaggattatagtaagt

SEQ ID NO: 71927 - DNA, 25 bp, Saccharomyces pastorianus
gatggcacatgaccaggcagtgttt

SEQ ID NO: 71928 - DNA, 25 bp, Saccharomyces pastorianus
gaaggacgtctgatcatagatgaca

SEQ ID NO: 71929 - DNA, 25 bp, Saccharomyces pastorianus
gtttagggacgtgatcgcaccttta

SEQ ID NO: 71930 - DNA, 25 bp, Saccharomyces pastorianus
actaatacaagatacgatgcctaat

SEQ ID NO: 71931 - DNA, 25 bp, Saccharomyces pastorianus
gacgctcgtgtcatccgtttagaaa

SEQ ID NO: 71932 - DNA, 25 bp, Saccharomyces pastorianus
aagatatttgctcccggtttgcggc

SEQ ID NO: 71933 - DNA, 25 bp, Saccharomyces pastorianus
aagagctcctagtggtgcttctcag

SEQ ID NO: 71934 - DNA, 25 bp, Saccharomyces pastorianus
agtcctggagttggctgacatcacc

SEQ ID NO: 71935 - DNA, 25 bp, Saccharomyces pastorianus
atttcttgaggctaaccatcgctta

SEQ ID NO: 71936 - DNA, 25 bp, Saccharomyces pastorianus
gaaactgaatcttaccaagccggcc

SEQ ID NO: 71937 - DNA, 25 bp, Saccharomyces pastorianus
tttttgaccttggataccgacgctc

SEQ ID NO: 71938 - DNA, 25 bp, Saccharomyces pastorianus
agccggccaattcagcgtcatggaa

SEQ ID NO: 71939 - DNA, 25 bp, Saccharomyces pastorianus
gccattgtctattccaccataaggg

SEQ ID NO: 71940 - DNA, 25 bp, Saccharomyces pastorianus
gctctcctttatcgttgctaacaga

SEQ ID NO: 71941 - DNA, 25 bp, Saccharomyces pastorianus
ccgccggcatgtttatcatcatcaa

SEQ ID NO: 71942 - DNA, 25 bp, Saccharomyces pastorianus
tccaagtgcgccgtggtgaacgagt

SEQ ID NO: 71943 - DNA, 25 bp, Saccharomyces pastorianus
gaattcttcaatcatcacggtggtg

SEQ ID NO: 71944 - DNA, 25 bp, Saccharomyces pastorianus
aatgcagcagcggtggcagacctct

SEQ ID NO: 71945 - DNA, 25 bp, Saccharomyces pastorianus
agacctctagtttccgcgtattgga

SEQ ID NO: 71946 - DNA, 25 bp, Saccharomyces pastorianus
aatcctggcaaccatgtctttggta

SEQ ID NO: 71947 - DNA, 25 bp, Saccharomyces pastorianus
acatggagtcgttggagccaccgga

SEQ ID NO: 71948 - DNA, 25 bp, Saccharomyces pastorianus
tttgggttctcgttgaagggcgtct

SEQ ID NO: 71949 - DNA, 25 bp, Saccharomyces pastorianus
aaggctgggcggttaatcctggcaa

SEQ ID NO: 71950 - DNA, 25 bp, Saccharomyces pastorianus
tggtctcatcgcagagggtctcgaa

SEQ ID NO: 71951 - DNA, 25 bp, Saccharomyces pastorianus
gacaggatcacgtcccagtttgaat

SEQ ID NO: 71952 - DNA, 25 bp, Saccharomyces pastorianus
ttttcaagtcaatggcctcgatcgg

SEQ ID NO: 71953 - DNA, 25 bp, Saccharomyces pastorianus
gttccccaagtctgacacagtttca

SEQ ID NO: 71954 - DNA, 25 bp, Saccharomyces pastorianus
gatgtcaacgacagtacgtggtagc

SEQ ID NO: 71955 - DNA, 25 bp, Saccharomyces pastorianus
attagttagtatattctccatggca

SEQ ID NO: 71956 - DNA, 25 bp, Saccharomyces pastorianus
gcaggaggagcaacacattatagaa

SEQ ID NO: 71957 - DNA, 25 bp, Saccharomyces pastorianus
tcaacattcgtaacgttccccaagt

SEQ ID NO: 71958 - DNA, 25 bp, Saccharomyces pastorianus
gaaggtcagttatttcattctcata

SEQ ID NO: 71959 - DNA, 25 bp, Saccharomyces pastorianus
taacgttccccaagtctgacacagt

SEQ ID NO: 71960 - DNA, 25 bp, Saccharomyces pastorianus
gacacagtttcagcaggaggagcaa

SEQ ID NO: 71961 - DNA, 25 bp, Saccharomyces pastorianus
acgacagtacgtggtagcaatcggc

SEQ ID NO: 71962 - DNA, 25 bp, Saccharomyces pastorianus
gttatttcattctcatattagttag

SEQ ID NO: 71963 - DNA, 25 bp, Saccharomyces pastorianus
tcttctctatcatcaacattcgtaa

SEQ ID NO: 71964 - DNA, 25 bp, Saccharomyces pastorianus
ttttttctattctccttaaccgatg

SEQ ID NO: 71965 - DNA, 25 bp, Saccharomyces pastorianus
tatccagtcactttggcaaattcag

SEQ ID NO: 71966 - DNA, 25 bp, Saccharomyces pastorianus
agttgtctcttctaccactgaaaaa

SEQ ID NO: 71967 - DNA, 25 bp, Saccharomyces pastorianus
tgctgtctacaccaaaacacttgcg

SEQ ID NO: 71968 - DNA, 25 bp, Saccharomyces pastorianus
tccaatggcgttgtctacagttatg

SEQ ID NO: 71969 - DNA, 25 bp, Saccharomyces pastorianus
tattctccttaaccgatgccaacaa

SEQ ID NO: 71970 - DNA, 25 bp, Saccharomyces pastorianus
gtcaaactctttacttccaatggcg

SEQ ID NO: 71971 - DNA, 25 bp, Saccharomyces pastorianus
aactaccagagtatatccagtcact

SEQ ID NO: 71972 - DNA, 25 bp, Saccharomyces pastorianus
gtggtcaaaacaatttcctatacaa

SEQ ID NO: 71973 - DNA, 25 bp, Saccharomyces pastorianus
ttgcgcctgcaagagttgtggtcaa

SEQ ID NO: 71974 - DNA, 25 bp, Saccharomyces pastorianus
gcaaattcagttgtctcttctacca

SEQ ID NO: 71975 - DNA, 25 bp, Saccharomyces pastorianus
ggtgtcgacttcattgttcagcagc

SEQ ID NO: 71976 - DNA, 25 bp, Saccharomyces pastorianus
aagccaaggaatggtgccggaacct

SEQ ID NO: 71977 - DNA, 25 bp, Saccharomyces pastorianus
gtttcacaagtggacaagctgctga

SEQ ID NO: 71978 - DNA, 25 bp, Saccharomyces pastorianus
gttgcttactgggacattctattgc

SEQ ID NO: 71979 - DNA, 25 bp, Saccharomyces pastorianus
gatacgagtaggctggtttcacaag

SEQ ID NO: 71980 - DNA, 25 bp, Saccharomyces pastorianus
gccggaaccttctctggcagttaat

SEQ ID NO: 71981 - DNA, 25 bp, Saccharomyces pastorianus
atcaccagggtttggttcgggacag

SEQ ID NO: 71982 - DNA, 25 bp, Saccharomyces pastorianus
gtcaacgagcattttttggtcaatt

SEQ ID NO: 71983 - DNA, 25 bp, Saccharomyces pastorianus
accgaggtcacctccgtagagagga

SEQ ID NO: 71984 - DNA, 25 bp, Saccharomyces pastorianus
gttcagtattttatcaccgaggtca

SEQ ID NO: 71985 - DNA, 25 bp, Saccharomyces pastorianus
tttgatgcctgaagttcccagaaga

SEQ ID NO: 71986 - DNA, 25 bp, Saccharomyces pastorianus
ggccgagcttttcatcacaaatcaa

SEQ ID NO: 71987 - DNA, 25 bp, Saccharomyces pastorianus
agtaaggctttagtagtctcacaaa

SEQ ID NO: 71988 - DNA, 25 bp, Saccharomyces pastorianus
gatcaaaatcgtcatcatcgtgtag

SEQ ID NO: 71989 - DNA, 25 bp, Saccharomyces pastorianus
gtcaagagctgaccgtatcgaaaga

SEQ ID NO: 71990 - DNA, 25 bp, Saccharomyces pastorianus
caagcacggccatggtaatcgaaat

SEQ ID NO: 71991 - DNA, 25 bp, Saccharomyces pastorianus
gataaatgatttgaaggccgagctt

SEQ ID NO: 71992 - DNA, 25 bp, Saccharomyces pastorianus
gatggagcacagctcactgagccaa

SEQ ID NO: 71993 - DNA, 25 bp, Saccharomyces pastorianus
tccgtatcgtctaaccaagaggaaa

SEQ ID NO: 71994 - DNA, 25 bp, Saccharomyces pastorianus
acgagggttctaacgatgccagtaa

SEQ ID NO: 71995 - DNA, 25 bp, Saccharomyces pastorianus
agggcgaaccctacagtgatcaaaa

SEQ ID NO: 71996 - DNA, 25 bp, Saccharomyces pastorianus
gaaaagctatcctctgaatatcatg

SEQ ID NO: 71997 - DNA, 25 bp, Saccharomyces pastorianus
gctccaccgcaacaacgtaacgtat

SEQ ID NO: 71998 - DNA, 25 bp, Saccharomyces pastorianus
ggaagacaccttctgatgcatccaa

SEQ ID NO: 71999 - DNA, 25 bp, Saccharomyces pastorianus
gatcaaacttcagaactctccattt

SEQ ID NO: 72000 - DNA, 25 bp, Saccharomyces pastorianus
ggaaatcatcctaacgccaataaga

SEQ ID NO: 72001 - DNA, 25 bp, Saccharomyces pastorianus
atgcatccaactctgaccaatctag

SEQ ID NO: 72002 - DNA, 25 bp, Saccharomyces pastorianus
gtcaactcctccgagtgagaagttt

SEQ ID NO: 72003 - DNA, 25 bp, Saccharomyces pastorianus
gttgcttctgcagactctagagatc

SEQ ID NO: 72004 - DNA, 25 bp, Saccharomyces pastorianus
gaatcaaggatccaaccgactgcag

SEQ ID NO: 72005 - DNA, 25 bp, Saccharomyces pastorianus
aaaaggacgtcaattctcacaagga

SEQ ID NO: 72006 - DNA, 25 bp, Saccharomyces pastorianus
gtaacgtatcaggaccatctaccac

SEQ ID NO: 72007 - DNA, 25 bp, Saccharomyces pastorianus
ctaccactcttcataagcaagcttc

SEQ ID NO: 72008 - DNA, 25 bp, Saccharomyces pastorianus
tcccgtgtagctggttcttaattgt

SEQ ID NO: 72009 - DNA, 25 bp, Saccharomyces pastorianus
gtggtggcggcaaagcagcctctaa

SEQ ID NO: 72010 - DNA, 25 bp, Saccharomyces pastorianus
ggtacttcaaagtcacctggaggtg

SEQ ID NO: 72011 - DNA, 25 bp, Saccharomyces pastorianus
cttcaagttcatatccaggtggcgg

SEQ ID NO: 72012 - DNA, 25 bp, Saccharomyces pastorianus
ataccatcactatttggtggctgta

SEQ ID NO: 72013 - DNA, 25 bp, Saccharomyces pastorianus
gaattgtttggttcttcaagttcat

SEQ ID NO: 72014 - DNA, 25 bp, Saccharomyces pastorianus
aaaggtggctcgataggtacttcaa

SEQ ID NO: 72015 - DNA, 25 bp, Saccharomyces pastorianus
tcttaattgtggtggtgttctcgaa

SEQ ID NO: 72016 - DNA, 25 bp, Saccharomyces pastorianus
gtgttctcgaatccatcgatgtctg

SEQ ID NO: 72017 - DNA, 25 bp, Saccharomyces pastorianus
ggtggtaagtcttcgtgttcttcaa

SEQ ID NO: 72018 - DNA, 25 bp, Saccharomyces pastorianus
ttcaatttccttttcccgtgtagct

SEQ ID NO: 72019 - DNA, 25 bp, Saccharomyces pastorianus
cgatgttgtcgctccagctttcgtc

SEQ ID NO: 72020 - DNA, 25 bp, Saccharomyces pastorianus
tcaaggctaacttggatgtcaagaa

SEQ ID NO: 72021 - DNA, 25 bp, Saccharomyces pastorianus
tgtcaagaaccaatccgctgtcgat

SEQ ID NO: 72022 - DNA, 25 bp, Saccharomyces pastorianus
ccaatccgctgtcgatgacttcttg

SEQ ID NO: 72023 - DNA, 25 bp, Saccharomyces pastorianus
gatgtcaagaaccaatccgctgtcg

SEQ ID NO: 72024 - DNA, 25 bp, Saccharomyces pastorianus
agaaccaatccgctgtcgatgactt

SEQ ID NO: 72025 - DNA, 25 bp, Saccharomyces pastorianus
gaacgtcaacgatgttgtcgctcca

SEQ ID NO: 72026 - DNA, 25 bp, Saccharomyces pastorianus
tcaagaaccaatccgctgtcgatga

SEQ ID NO: 72027 - DNA, 25 bp, Saccharomyces pastorianus
acgtcaacgatgttgtcgctccagc

SEQ ID NO: 72028 - DNA, 25 bp, Saccharomyces pastorianus
aaccaatccgctgtcgatgacttct

SEQ ID NO: 72029 - DNA, 25 bp, Saccharomyces pastorianus
tcaacgatgttgtcgctccagcttt

SEQ ID NO: 72030 - DNA, 25 bp, Saccharomyces pastorianus
gtgtgtcctcttttgttgatggcag

SEQ ID NO: 72031 - DNA, 25 bp, Saccharomyces pastorianus
ggaccgggacacatgagttcttctg

SEQ ID NO: 72032 - DNA, 25 bp, Saccharomyces pastorianus
ttctgctcctattccttcaaatatg

SEQ ID NO: 72033 - DNA, 25 bp, Saccharomyces pastorianus
gtagcacctccactgatgtattctt

SEQ ID NO: 72034 - DNA, 25 bp, Saccharomyces pastorianus
ataatgctggcgctcaatctgggtt

SEQ ID NO: 72035 - DNA, 25 bp, Saccharomyces pastorianus
cctgccaatttacaagcccatagag

SEQ ID NO: 72036 - DNA, 25 bp, Saccharomyces pastorianus
agtctcacagtccatgatctactat

SEQ ID NO: 72037 - DNA, 25 bp, Saccharomyces pastorianus
aaatagttctgccagtgtgtcctct

SEQ ID NO: 72038 - DNA, 25 bp, Saccharomyces pastorianus
gatgcctcctgtatattcaatgcta

SEQ ID NO: 72039 - DNA, 25 bp, Saccharomyces pastorianus
ggatccaacggtcattgtcgtcttc

SEQ ID NO: 72040 - DNA, 25 bp, Saccharomyces pastorianus
aagtggcgatccgtactacccaaga

SEQ ID NO: 72041 - DNA, 25 bp, Saccharomyces pastorianus
gaaaatatgcattttaccagcactt

SEQ ID NO: 72042 - DNA, 25 bp, Saccharomyces pastorianus
atgctgcccctattacaagaaccga

SEQ ID NO: 72043 - DNA, 25 bp, Saccharomyces pastorianus
cacctcctgtacagtatccagatgt

SEQ ID NO: 72044 - DNA, 25 bp, Saccharomyces pastorianus
atgagctccaatgttctccaacctc

SEQ ID NO: 72045 - DNA, 25 bp, Saccharomyces pastorianus
gtatccagatgttcttgcaccaaaa

SEQ ID NO: 72046 - DNA, 25 bp, Saccharomyces pastorianus
caatccaaatgctgcccctattaca

SEQ ID NO: 72047 - DNA, 25 bp, Saccharomyces pastorianus
acagtatccagatgttcttgcacca

SEQ ID NO: 72048 - DNA, 25 bp, Saccharomyces pastorianus
ttaccagcacttcgcatgagtgttc

SEQ ID NO: 72049 - DNA, 25 bp, Saccharomyces pastorianus
agcacttcgcatgagtgttccacct

SEQ ID NO: 72050 - DNA, 25 bp, Saccharomyces pastorianus
gcattttaccagcacttcgcatgag

SEQ ID NO: 72051 - DNA, 25 bp, Saccharomyces pastorianus
tgagtgttccacctcctgtacagta

SEQ ID NO: 72052 - DNA, 25 bp, Saccharomyces pastorianus
catcgatgatgatgtcgcccttttc

SEQ ID NO: 72053 - DNA, 25 bp, Saccharomyces pastorianus
gcccttttccagaagtgggacaatt

SEQ ID NO: 72054 - DNA, 25 bp, Saccharomyces pastorianus
ttccttgatcaaggcgtcgactgga

SEQ ID NO: 72055 - DNA, 25 bp, Saccharomyces pastorianus
cttgatcaaggcgtcgactggagca

SEQ ID NO: 72056 - DNA, 25 bp, Saccharomyces pastorianus
gaagtgggacaatttccttgatcaa

SEQ ID NO: 72057 - DNA, 25 bp, Saccharomyces pastorianus
cgatgatgatgtcgcccttttccag

SEQ ID NO: 72058 - DNA, 25 bp, Saccharomyces pastorianus
atgtcgcccttttccagaagtggga

SEQ ID NO: 72059 - DNA, 25 bp, Saccharomyces pastorianus
gatgatgtcgcccttttccagaagt

SEQ ID NO: 72060 - DNA, 25 bp, Saccharomyces pastorianus
gtcgcccttttccagaagtgggaca

SEQ ID NO: 72061 - DNA, 25 bp, Saccharomyces pastorianus
tgatgtcgcccttttccagaagtgg

SEQ ID NO: 72062 - DNA, 25 bp, Saccharomyces pastorianus
gtgggacaatttccttgatcaaggc

SEQ ID NO: 72063 - DNA, 25 bp, Saccharomyces pastorianus
ctacgtcgttttcggcgaagccaag

SEQ ID NO: 72064 - DNA, 25 bp, Saccharomyces pastorianus
agatgttgctaccaagtctccagaa

SEQ ID NO: 72065 - DNA, 25 bp, Saccharomyces pastorianus
aaatcactttctttgtccttctcgg

SEQ ID NO: 72066 - DNA, 25 bp, Saccharomyces pastorianus
aagcccacaacggtgatttagtcaa

SEQ ID NO: 72067 - DNA, 25 bp, Saccharomyces pastorianus
aagctagtggtatcatgccatccaa

SEQ ID NO: 72068 - DNA, 25 bp, Saccharomyces pastorianus
tcaaaagctagctgctgcccaacaa

SEQ ID NO: 72069 - DNA, 25 bp, Saccharomyces pastorianus
taacgtctcccaaaacgaagccatc

SEQ ID NO: 72070 - DNA, 25 bp, Saccharomyces pastorianus
aagccaaggtcgacaacttcactca

SEQ ID NO: 72071 - DNA, 25 bp, Saccharomyces pastorianus
cgacgccggcgacttgaacaaggac

SEQ ID NO: 72072 - DNA, 25 bp, Saccharomyces pastorianus
cagtgtcaacgctgctttggaagaa

SEQ ID NO: 72073 - DNA, 25 bp, Saccharomyces pastorianus
agctgacatgcaagctgctgctgaa

SEQ ID NO: 72074 - DNA, 25 bp, Saccharomyces pastorianus
aagcccttctgccaacaacgagagc

SEQ ID NO: 72075 - DNA, 25 bp, Saccharomyces pastorianus
aatgaaagcccttctgccaacaacg

SEQ ID NO: 72076 - DNA, 25 bp, Saccharomyces pastorianus
gccaacaacgagagcaacacaaata

SEQ ID NO: 72077 - DNA, 25 bp, Saccharomyces pastorianus
gcccttctgccaacaacgagagcaa

SEQ ID NO: 72078 - DNA, 25 bp, Saccharomyces pastorianus
aacgaaaagacaacaatgaaccaat

SEQ ID NO: 72079 - DNA, 25 bp, Saccharomyces pastorianus
ttctgccaacaacgagagcaacaca

SEQ ID NO: 72080 - DNA, 25 bp, Saccharomyces pastorianus
acgagagcaacacaaataaagatat

SEQ ID NO: 72081 - DNA, 25 bp, Saccharomyces pastorianus
aaacagaaacagagatagcaagaaa

SEQ ID NO: 72082 - DNA, 25 bp, Saccharomyces pastorianus
aagataagcctaattctataacggg

SEQ ID NO: 72083 - DNA, 25 bp, Saccharomyces pastorianus
ggaatgaaagcccttctgccaacaa

SEQ ID NO: 72084 - DNA, 25 bp, Saccharomyces pastorianus
tgaaagcccttctgccaacaacgag

SEQ ID NO: 72085 - DNA, 25 bp, Saccharomyces pastorianus
aacacaggtgtttcattaccggcat

SEQ ID NO: 72086 - DNA, 25 bp, Saccharomyces pastorianus
gttaatctctaatgacagtcgccca

SEQ ID NO: 72087 - DNA, 25 bp, Saccharomyces pastorianus
acagtcgcccagctagttcaaataa

SEQ ID NO: 72088 - DNA, 25 bp, Saccharomyces pastorianus
cagcagctgataacaaggtcccttc

SEQ ID NO: 72089 - DNA, 25 bp, Saccharomyces pastorianus
gagaagccttctattgttaccaaat

SEQ ID NO: 72090 - DNA, 25 bp, Saccharomyces pastorianus
tgccgctactagttttaacacaggt

SEQ ID NO: 72091 - DNA, 25 bp, Saccharomyces pastorianus
gaactatggaatagcccctcgaagg

SEQ ID NO: 72092 - DNA, 25 bp, Saccharomyces pastorianus
attcaggttgctttacattgtctag

SEQ ID NO: 72093 - DNA, 25 bp, Saccharomyces pastorianus
actgttgatacagcgggcccaaatg

SEQ ID NO: 72094 - DNA, 25 bp, Saccharomyces pastorianus
ggtgaagtaccctctgataccgatt

SEQ ID NO: 72095 - DNA, 25 bp, Saccharomyces pastorianus
atttagtatccaacctgcctttgca

SEQ ID NO: 72096 - DNA, 25 bp, Saccharomyces pastorianus
gggtgatgttgagcttattactaaa

SEQ ID NO: 72097 - DNA, 25 bp, Saccharomyces pastorianus
aagctgcttggcatatatcttatgg

SEQ ID NO: 72098 - DNA, 25 bp, Saccharomyces pastorianus
aaatattggctaaccctgatactcc

SEQ ID NO: 72099 - DNA, 25 bp, Saccharomyces pastorianus
cattgggccttttcagtttgataaa

SEQ ID NO: 72100 - DNA, 25 bp, Saccharomyces pastorianus
ggttaggcatctcattgggcctttt

SEQ ID NO: 72101 - DNA, 25 bp, Saccharomyces pastorianus
attgctgataacttaatggagcgcc

SEQ ID NO: 72102 - DNA, 25 bp, Saccharomyces pastorianus
cttccttgggagaaactaaatggca

SEQ ID NO: 72103 - DNA, 25 bp, Saccharomyces pastorianus
atggagcgccagaaacttccttggg

SEQ ID NO: 72104 - DNA, 25 bp, Saccharomyces pastorianus
taaccctgatactccaaagacgatg

SEQ ID NO: 72105 - DNA, 25 bp, Saccharomyces pastorianus
gagcttattactaaaggtgtctttt

SEQ ID NO: 72106 - DNA, 25 bp, Saccharomyces pastorianus
gggacccagaagagcagtttataga

SEQ ID NO: 72107 - DNA, 25 bp, Saccharomyces pastorianus
agctggcaactatatcgatgctatc

SEQ ID NO: 72108 - DNA, 25 bp, Saccharomyces pastorianus
gctagaattccaagcaagactacaa

SEQ ID NO: 72109 - DNA, 25 bp, Saccharomyces pastorianus
gggactgtttaaatccttcagacga

SEQ ID NO: 72110 - DNA, 25 bp, Saccharomyces pastorianus
gactttgaccaaaacatcttctatg

SEQ ID NO: 72111 - DNA, 25 bp, Saccharomyces pastorianus
atttcttccataaatgtctaccgag

SEQ ID NO: 72112 - DNA, 25 bp, Saccharomyces pastorianus
aatgtctaccgagggatacttctga

SEQ ID NO: 72113 - DNA, 25 bp, Saccharomyces pastorianus
cgatgctatcatttgtttccagaaa

SEQ ID NO: 72114 - DNA, 25 bp, Saccharomyces pastorianus
aattcatcttctgggtctagacttg

SEQ ID NO: 72115 - DNA, 25 bp, Saccharomyces pastorianus
aaggtacctgaagttattagacgat

SEQ ID NO: 72116 - DNA, 25 bp, Saccharomyces pastorianus
agagctcgttgataagttcacataa

SEQ ID NO: 72117 - DNA, 25 bp, Saccharomyces pastorianus
gggatacttctgacccagagacgaa

SEQ ID NO: 72118 - DNA, 25 bp, Saccharomyces pastorianus
ttcgccttcctcttcgttaggcacg

SEQ ID NO: 72119 - DNA, 25 bp, Saccharomyces pastorianus
tgtggaaattcctctatcctcttca

SEQ ID NO: 72120 - DNA, 25 bp, Saccharomyces pastorianus
gaaattcctctatcctcttcaacca

SEQ ID NO: 72121 - DNA, 25 bp, Saccharomyces pastorianus
ttaggcacgttttccacgtcagcgt

SEQ ID NO: 72122 - DNA, 25 bp, Saccharomyces pastorianus
taataaccatttgggcttgctgcct

SEQ ID NO: 72123 - DNA, 25 bp, Saccharomyces pastorianus
atcgctaggttcaacagggccattc

SEQ ID NO: 72124 - DNA, 25 bp, Saccharomyces pastorianus
gttttccacgtcagcgtttgaaagg

SEQ ID NO: 72125 - DNA, 25 bp, Saccharomyces pastorianus
taggcggttcatcgctaggttcaac

SEQ ID NO: 72126 - DNA, 25 bp, Saccharomyces pastorianus
tagctttaaaagtagtctgtggaaa

SEQ ID NO: 72127 - DNA, 25 bp, Saccharomyces pastorianus
tcttcgttaggcacgttttccacgt

SEQ ID NO: 72128 - DNA, 25 bp, Saccharomyces pastorianus
atttgggcttgctgccttcgccttc

SEQ ID NO: 72129 - DNA, 25 bp, Saccharomyces pastorianus
agaacaattccctgggctcatgcaa

SEQ ID NO: 72130 - DNA, 25 bp, Saccharomyces pastorianus
tattacgccctcacgtgataacgat

SEQ ID NO: 72131 - DNA, 25 bp, Saccharomyces pastorianus
aacgatccgcacaacgtcgaagaac

SEQ ID NO: 72132 - DNA, 25 bp, Saccharomyces pastorianus
aatactgtggatgacagatcacctg

SEQ ID NO: 72133 - DNA, 25 bp, Saccharomyces pastorianus
tgggctcatgcaactgactttcaaa

SEQ ID NO: 72134 - DNA, 25 bp, Saccharomyces pastorianus
ctgactttcaaaggccaacagttaa

SEQ ID NO: 72135 - DNA, 25 bp, Saccharomyces pastorianus
gataacgatccgcacaacgtcgaag

SEQ ID NO: 72136 - DNA, 25 bp, Saccharomyces pastorianus
gaaggtcttctgtatttgaaaacat

SEQ ID NO: 72137 - DNA, 25 bp, Saccharomyces pastorianus
gcataccgtgggaccttcaggagaa

SEQ ID NO: 72138 - DNA, 25 bp, Saccharomyces pastorianus
ttcaagaacaattccctgggctcat

SEQ ID NO: 72139 - DNA, 25 bp, Saccharomyces pastorianus
ccttcaggagaaggtcttctgtatt

SEQ ID NO: 72140 - DNA, 25 bp, Saccharomyces pastorianus
atatggcgctacttgccgtatatgt

SEQ ID NO: 72141 - DNA, 25 bp, Saccharomyces pastorianus
catgcatgagtcctgtttgctggaa

SEQ ID NO: 72142 - DNA, 25 bp, Saccharomyces pastorianus
atttccaaacctggcgcggatgtga

SEQ ID NO: 72143 - DNA, 25 bp, Saccharomyces pastorianus
tatacggttacgatcggactctaga

SEQ ID NO: 72144 - DNA, 25 bp, Saccharomyces pastorianus
gagaagatacccttttccttactat

SEQ ID NO: 72145 - DNA, 25 bp, Saccharomyces pastorianus
tgatgctagacggatcttcgcctta

SEQ ID NO: 72146 - DNA, 25 bp, Saccharomyces pastorianus
tgggctggctgctgtattatacata

SEQ ID NO: 72147 - DNA, 25 bp, Saccharomyces pastorianus
tatgtcgtggagacgctaccgacga

SEQ ID NO: 72148 - DNA, 25 bp, Saccharomyces pastorianus
ctctttttcacccttgcaaatgcaa

SEQ ID NO: 72149 - DNA, 25 bp, Saccharomyces pastorianus
tttggctataactattgggctggct

SEQ ID NO: 72150 - DNA, 25 bp, Saccharomyces pastorianus
gccgccaacgatgatgtgccatatg

SEQ ID NO: 72151 - DNA, 25 bp, Saccharomyces pastorianus
gctacccattccagcaaacaggact

SEQ ID NO: 72152 - DNA, 25 bp, Saccharomyces pastorianus
ttccagcaaacaggactcatgcatg

SEQ ID NO: 72153 - DNA, 25 bp, Saccharomyces pastorianus
tacccattccagcaaacaggactca

SEQ ID NO: 72154 - DNA, 25 bp, Saccharomyces pastorianus
agctacccattccagcaaacaggac

SEQ ID NO: 72155 - DNA, 25 bp, Saccharomyces pastorianus
acccattccagcaaacaggactcat

SEQ ID NO: 72156 - DNA, 25 bp, Saccharomyces pastorianus
cccattccagcaaacaggactcatg

SEQ ID NO: 72157 - DNA, 25 bp, Saccharomyces pastorianus
cacatccgcgccaggtttggaaatg

SEQ ID NO: 72158 - DNA, 25 bp, Saccharomyces pastorianus
cattccagcaaacaggactcatgca

SEQ ID NO: 72159 - DNA, 25 bp, Saccharomyces pastorianus
ccattccagcaaacaggactcatgc

SEQ ID NO: 72160 - DNA, 25 bp, Saccharomyces pastorianus
tcacatccgcgccaggtttggaaat

SEQ ID NO: 72161 - DNA, 25 bp, Saccharomyces pastorianus
attccagcaaacaggactcatgcat

SEQ ID NO: 72162 - DNA, 25 bp, Saccharomyces pastorianus
gctacccattccagcaaacaggact

SEQ ID NO: 72163 - DNA, 25 bp, Saccharomyces pastorianus
ttccagcaaacaggactcatgcatg

SEQ ID NO: 72164 - DNA, 25 bp, Saccharomyces pastorianus
tacccattccagcaaacaggactca

SEQ ID NO: 72165 - DNA, 25 bp, Saccharomyces pastorianus
agctacccattccagcaaacaggac

SEQ ID NO: 72166 - DNA, 25 bp, Saccharomyces pastorianus
gtctatatttttcgaagctacccat

SEQ ID NO: 72167 - DNA, 25 bp, Saccharomyces pastorianus
acccattccagcaaacaggactcat

SEQ ID NO: 72168 - DNA, 25 bp, Saccharomyces pastorianus
cccattccagcaaacaggactcatg

SEQ ID NO: 72169 - DNA, 25 bp, Saccharomyces pastorianus
cacatccgcgccaggtttggaaatg

SEQ ID NO: 72170 - DNA, 25 bp, Saccharomyces pastorianus
cattccagcaaacaggactcatgca

SEQ ID NO: 72171 - DNA, 25 bp, Saccharomyces pastorianus
tcacatccgcgccaggtttggaaat

SEQ ID NO: 72172 - DNA, 25 bp, Saccharomyces pastorianus
attccagcaaacaggactcatgcat

SEQ ID NO: 72173 - DNA, 25 bp, Saccharomyces pastorianus
agtcaccatccatgtctttcacact

SEQ ID NO: 72174 - DNA, 25 bp, Saccharomyces pastorianus
gagtcaccatccatgtctttcacac

SEQ ID NO: 72175 - DNA, 25 bp, Saccharomyces pastorianus
tctagtttccttgattcaattggta

SEQ ID NO: 72176 - DNA, 25 bp, Saccharomyces pastorianus
gtcagagtcaccatccatgtctttc

SEQ ID NO: 72177 - DNA, 25 bp, Saccharomyces pastorianus
atgtcagagtcaccatccatgtctt

SEQ ID NO: 72178 - DNA, 25 bp, Saccharomyces pastorianus
acttctagtttccttgattcaattg

SEQ ID NO: 72179 - DNA, 25 bp, Saccharomyces pastorianus
accatccatgtctttcacacttcta

SEQ ID NO: 72180 - DNA, 25 bp, Saccharomyces pastorianus
tgtcagagtcaccatccatgtcttt

SEQ ID NO: 72181 - DNA, 25 bp, Saccharomyces pastorianus
tcagagtcaccatccatgtctttca

SEQ ID NO: 72182 - DNA, 25 bp, Saccharomyces pastorianus
agagtcaccatccatgtctttcaca

SEQ ID NO: 72183 - DNA, 25 bp, Saccharomyces pastorianus
cttctagtttccttgattcaattgg

SEQ ID NO: 72184 - DNA, 25 bp, Saccharomyces pastorianus
gcctcttgatgtcattcagcagctt

SEQ ID NO: 72185 - DNA, 25 bp, Saccharomyces pastorianus
gttgatgtcgttgagcttcgccttc

SEQ ID NO: 72186 - DNA, 25 bp, Saccharomyces pastorianus
tgcttgatcttgtccagctcgttca

SEQ ID NO: 72187 - DNA, 25 bp, Saccharomyces pastorianus
agaactcgttctccttgttcagctg

SEQ ID NO: 72188 - DNA, 25 bp, Saccharomyces pastorianus
ttgttgatctgcacgttcaggccat

SEQ ID NO: 72189 - DNA, 25 bp, Saccharomyces pastorianus
tggccgctgtttatcatgcctatga

SEQ ID NO: 72190 - DNA, 25 bp, Saccharomyces pastorianus
gcagcttcagcgacttgatttcgtt

SEQ ID NO: 72191 - DNA, 25 bp, Saccharomyces pastorianus
gagtcgttcgagatcaggctctgta

SEQ ID NO: 72192 - DNA, 25 bp, Saccharomyces pastorianus
agcttcttgaattgcgacacgtctt

SEQ ID NO: 72193 - DNA, 25 bp, Saccharomyces pastorianus
catgcagcttgttcaggttctcgaa

SEQ ID NO: 72194 - DNA, 25 bp, Saccharomyces pastorianus
atgcggtcgcgcagcttgttgatct

SEQ ID NO: 72195 - DNA, 25 bp, Saccharomyces pastorianus
gcagctcagtatgcaagcacttgga

SEQ ID NO: 72196 - DNA, 25 bp, Saccharomyces pastorianus
gaagtttacgctactcaagatgtta

SEQ ID NO: 72197 - DNA, 25 bp, Saccharomyces pastorianus
ctggtccacaaggtactgttcaatt

SEQ ID NO: 72198 - DNA, 25 bp, Saccharomyces pastorianus
gacttccctggtttctactggaaca

SEQ ID NO: 72199 - DNA, 25 bp, Saccharomyces pastorianus
aggtcattcgcaaacagacttccct

SEQ ID NO: 72200 - DNA, 25 bp, Saccharomyces pastorianus
gctgcttccagtaccgaatcttcat

SEQ ID NO: 72201 - DNA, 25 bp, Saccharomyces pastorianus
ggttcaaaaccatctactactaaat

SEQ ID NO: 72202 - DNA, 25 bp, Saccharomyces pastorianus
gatttcacagctactttcgaagttt

SEQ ID NO: 72203 - DNA, 25 bp, Saccharomyces pastorianus
acatctttcgatttgtccactggtt

SEQ ID NO: 72204 - DNA, 25 bp, Saccharomyces pastorianus
aggtcattggtattactggtccaca

SEQ ID NO: 72205 - DNA, 25 bp, Saccharomyces pastorianus
agaatctagcacatcttcaccaagc

SEQ ID NO: 72206 - DNA, 25 bp, Saccharomyces pastorianus
cacttgttgaatcttgtctgggttc

SEQ ID NO: 72207 - DNA, 25 bp, Saccharomyces pastorianus
tatagtttggttgtcagccgcactt

SEQ ID NO: 72208 - DNA, 25 bp, Saccharomyces pastorianus
tgtcgcctttgagttctgctaatga

SEQ ID NO: 72209 - DNA, 25 bp, Saccharomyces pastorianus
aatggaattaactcttggcgaagac

SEQ ID NO: 72210 - DNA, 25 bp, Saccharomyces pastorianus
gacctttccgttcctatagatgttt

SEQ ID NO: 72211 - DNA, 25 bp, Saccharomyces pastorianus
gggcattcatttgtgtactggagtt

SEQ ID NO: 72212 - DNA, 25 bp, Saccharomyces pastorianus
tcctcttttaggttcgaattgtcgc

SEQ ID NO: 72213 - DNA, 25 bp, Saccharomyces pastorianus
tgtactggagttcacgttcgcaatg

SEQ ID NO: 72214 - DNA, 25 bp, Saccharomyces pastorianus
gtctgggttcgtgtatagagctcaa

SEQ ID NO: 72215 - DNA, 25 bp, Saccharomyces pastorianus
gatgtttcgtttgctacgacacttg

SEQ ID NO: 72216 - DNA, 25 bp, Saccharomyces pastorianus
agccgcacttggttcctcttttagg

SEQ ID NO: 72217 - DNA, 25 bp, Saccharomyces pastorianus
gtaccacttaaaggccaacaaattg

SEQ ID NO: 72218 - DNA, 25 bp, Saccharomyces pastorianus
ggttagaaccgtcacatcgacgagt

SEQ ID NO: 72219 - DNA, 25 bp, Saccharomyces pastorianus
aagatttccattaagaaccaggcta

SEQ ID NO: 72220 - DNA, 25 bp, Saccharomyces pastorianus
gtcacatcgacgagtgcaggtgcta

SEQ ID NO: 72221 - DNA, 25 bp, Saccharomyces pastorianus
aagaagtcttagtcccatgagatta

SEQ ID NO: 72222 - DNA, 25 bp, Saccharomyces pastorianus
gataatcaagccaatacttttagta

SEQ ID NO: 72223 - DNA, 25 bp, Saccharomyces pastorianus
agtgcaggtgctaaggcaaagtcaa

SEQ ID NO: 72224 - DNA, 25 bp, Saccharomyces pastorianus
ggatcgatattaaactcagtcatag

SEQ ID NO: 72225 - DNA, 25 bp, Saccharomyces pastorianus
gtcccatgagattaacggttagaac

SEQ ID NO: 72226 - DNA, 25 bp, Saccharomyces pastorianus
agaaccaggctaataagaagtctta

SEQ ID NO: 72227 - DNA, 25 bp, Saccharomyces pastorianus
cttttagtaatggtgtttggatcga

SEQ ID NO: 72228 - DNA, 25 bp, Saccharomyces pastorianus
agacccgtacgtgtggctggaaccg

SEQ ID NO: 72229 - DNA, 25 bp, Saccharomyces pastorianus
agcacggtcaccacatacaaggtgc

SEQ ID NO: 72230 - DNA, 25 bp, Saccharomyces pastorianus
atgataggccacgttgagccacttg

SEQ ID NO: 72231 - DNA, 25 bp, Saccharomyces pastorianus
taccacgagaaccattgaacacaaa

SEQ ID NO: 72232 - DNA, 25 bp, Saccharomyces pastorianus
gttgagccacttgtacagcttcagc

SEQ ID NO: 72233 - DNA, 25 bp, Saccharomyces pastorianus
tggctcctaccacgagaaccattga

SEQ ID NO: 72234 - DNA, 25 bp, Saccharomyces pastorianus
agtgggtgatcttcctccacacgta

SEQ ID NO: 72235 - DNA, 25 bp, Saccharomyces pastorianus
aacacaaagtgggtgatcttcctcc

SEQ ID NO: 72236 - DNA, 25 bp, Saccharomyces pastorianus
gtgcgtttcctgcatcggaaagcta

SEQ ID NO: 72237 - DNA, 25 bp, Saccharomyces pastorianus
ttgtacagcttcagccacgccatct

SEQ ID NO: 72238 - DNA, 25 bp, Saccharomyces pastorianus
cggaaagctacaccgctcagcgcag

SEQ ID NO: 72239 - DNA, 25 bp, Saccharomyces pastorianus
agagctctctgtttcgccaaacaag

SEQ ID NO: 72240 - DNA, 25 bp, Saccharomyces pastorianus
cttattgttatccttctccacagaa

SEQ ID NO: 72241 - DNA, 25 bp, Saccharomyces pastorianus
tcgttattcgaaacagagctctctg

SEQ ID NO: 72242 - DNA, 25 bp, Saccharomyces pastorianus
tgtttcgccaaacaagttatcgcta

SEQ ID NO: 72243 - DNA, 25 bp, Saccharomyces pastorianus
attactcgaatcttctatcacgcca

SEQ ID NO: 72244 - DNA, 25 bp, Saccharomyces pastorianus
gcaagcttattgttatccttctcca

SEQ ID NO: 72245 - DNA, 25 bp, Saccharomyces pastorianus
gctatatcgggagtgtttgtctcgt

SEQ ID NO: 72246 - DNA, 25 bp, Saccharomyces pastorianus
gggagtgtttgtctcgttattcgaa

SEQ ID NO: 72247 - DNA, 25 bp, Saccharomyces pastorianus
gttatccttctccacagaattaata

SEQ ID NO: 72248 - DNA, 25 bp, Saccharomyces pastorianus
gaatcttctatcacgccatccttct

SEQ ID NO: 72249 - DNA, 25 bp, Saccharomyces pastorianus
ccatccttcttttcagcaagcttat

SEQ ID NO: 72250 - DNA, 25 bp, Saccharomyces pastorianus
ggcgcgcgccggtgcatcgttgcgc

SEQ ID NO: 72251 - DNA, 25 bp, Saccharomyces pastorianus
gtatacgggcgagggcgcgcgccgg

SEQ ID NO: 72252 - DNA, 25 bp, Saccharomyces pastorianus
cgcgccggtgcatcgttgcgccgat

SEQ ID NO: 72253 - DNA, 25 bp, Saccharomyces pastorianus
ggtgcatcgttgcgccgatatgtgt

SEQ ID NO: 72254 - DNA, 25 bp, Saccharomyces pastorianus
cggtgcatcgttgcgccgatatgtg

SEQ ID NO: 72255 - DNA, 25 bp, Saccharomyces pastorianus
tatacgggcgagggcgcgcgccggt

SEQ ID NO: 72256 - DNA, 25 bp, Saccharomyces pastorianus
atacgggcgagggcgcgcgccggtg

SEQ ID NO: 72257 - DNA, 25 bp, Saccharomyces pastorianus
cgccggtgcatcgttgcgccgatat

SEQ ID NO: 72258 - DNA, 25 bp, Saccharomyces pastorianus
gccggtgcatcgttgcgccgatatg

SEQ ID NO: 72259 - DNA, 25 bp, Saccharomyces pastorianus
ccggtgcatcgttgcgccgatatgt

SEQ ID NO: 72260 - DNA, 25 bp, Saccharomyces pastorianus
gggcgcgcgccggtgcatcgttgcg

SEQ ID NO: 72261 - DNA, 25 bp, Saccharomyces pastorianus
aatgattgcagtatcttattggcag

SEQ ID NO: 72262 - DNA, 25 bp, Saccharomyces pastorianus
tttctttccggatgctttgtactca

SEQ ID NO: 72263 - DNA, 25 bp, Saccharomyces pastorianus
gatgctttgtactcatgtgcacctt

SEQ ID NO: 72264 - DNA, 25 bp, Saccharomyces pastorianus
taacaaaattgcaagctgctggagt

SEQ ID NO: 72265 - DNA, 25 bp, Saccharomyces pastorianus
agctggttctttctttccggatgct

SEQ ID NO: 72266 - DNA, 25 bp, Saccharomyces pastorianus
attggcccaatttcttaatgattgc

SEQ ID NO: 72267 - DNA, 25 bp, Saccharomyces pastorianus
ggagttactacccatctattttatt

SEQ ID NO: 72268 - DNA, 25 bp, Saccharomyces pastorianus
gcttaactacttctattgtaacaaa

SEQ ID NO: 72269 - DNA, 25 bp, Saccharomyces pastorianus
ctgctggagttactacccatctatt

SEQ ID NO: 72270 - DNA, 25 bp, Saccharomyces pastorianus
attatttgcttaactacttctattg

SEQ ID NO: 72271 - DNA, 25 bp, Saccharomyces pastorianus
gtactcatgtgcaccttcaaataag

SEQ ID NO: 72272 - DNA, 25 bp, Saccharomyces pastorianus
cgacgactgcgacttgtgccaagaa

SEQ ID NO: 72273 - DNA, 25 bp, Saccharomyces pastorianus
tcacttgaaaccatcactgtttttt

SEQ ID NO: 72274 - DNA, 25 bp, Saccharomyces pastorianus
ttcctcacttgaaaccatcactgtt

SEQ ID NO: 72275 - DNA, 25 bp, Saccharomyces pastorianus
tgcgaccgggaaacaaacttcctca

SEQ ID NO: 72276 - DNA, 25 bp, Saccharomyces pastorianus
acttgtgccaagaatgcgaccggga

SEQ ID NO: 72277 - DNA, 25 bp, Saccharomyces pastorianus
tcgcatatcaaacgcgcctatctta

SEQ ID NO: 72278 - DNA, 25 bp, Saccharomyces pastorianus
tttttctcgcatatcaaacgcgcct

SEQ ID NO: 72279 - DNA, 25 bp, Saccharomyces pastorianus
tcaaacgcgcctatcttagacataa

SEQ ID NO: 72280 - DNA, 25 bp, Saccharomyces pastorianus
atgatgggctcgacgactgcgactt

SEQ ID NO: 72281 - DNA, 25 bp, Saccharomyces pastorianus
gcgcctatcttagacataacaacaa

SEQ ID NO: 72282 - DNA, 25 bp, Saccharomyces pastorianus
acaaacttcctcacttgaaaccatc

SEQ ID NO: 72283 - DNA, 25 bp, Saccharomyces pastorianus
gaactcaatcgggtttagctcttga

SEQ ID NO: 72284 - DNA, 25 bp, Saccharomyces pastorianus
tgacctaaccgatgcgtccaaaatt

SEQ ID NO: 72285 - DNA, 25 bp, Saccharomyces pastorianus
gctagcgccagtatcgtcagacaga

SEQ ID NO: 72286 - DNA, 25 bp, Saccharomyces pastorianus
gaagatatccccttatctgacctaa

SEQ ID NO: 72287 - DNA, 25 bp, Saccharomyces pastorianus
ggttcaggccagttcacttttagag

SEQ ID NO: 72288 - DNA, 25 bp, Saccharomyces pastorianus
agacccagatgcttcccaaaatgac

SEQ ID NO: 72289 - DNA, 25 bp, Saccharomyces pastorianus
gaaaatgacgcgtcctccaaattta

SEQ ID NO: 72290 - DNA, 25 bp, Saccharomyces pastorianus
gagataaacctcgtcgtcgcaaaag

SEQ ID NO: 72291 - DNA, 25 bp, Saccharomyces pastorianus
aaccccgggcaattcaggtgacgag

SEQ ID NO: 72292 - DNA, 25 bp, Saccharomyces pastorianus
gtgatagcaactaccaaaccccggg

SEQ ID NO: 72293 - DNA, 25 bp, Saccharomyces pastorianus
agcaggagtgcttctggttcaggcc

SEQ ID NO: 72294 - DNA, 25 bp, Saccharomyces pastorianus
attcccctggagagattcctttaca

SEQ ID NO: 72295 - DNA, 25 bp, Saccharomyces pastorianus
gaatctgattgatacgccaggccac

SEQ ID NO: 72296 - DNA, 25 bp, Saccharomyces pastorianus
aggtatcaccattcaaagtgctgca

SEQ ID NO: 72297 - DNA, 25 bp, Saccharomyces pastorianus
gatgctttattatgccggagtcttg

SEQ ID NO: 72298 - DNA, 25 bp, Saccharomyces pastorianus
tagtgcttgcagtggccgattgagt

SEQ ID NO: 72299 - DNA, 25 bp, Saccharomyces pastorianus
ataggtatcattgcccacatcgatg

SEQ ID NO: 72300 - DNA, 25 bp, Saccharomyces pastorianus
tgctgcaatttcattcccctggaga

SEQ ID NO: 72301 - DNA, 25 bp, Saccharomyces pastorianus
acctgtccacggcaacattttcttt

SEQ ID NO: 72302 - DNA, 25 bp, Saccharomyces pastorianus
gccaggccacatagactttacattc

SEQ ID NO: 72303 - DNA, 25 bp, Saccharomyces pastorianus
gacactggcgacaccatgacagatt

SEQ ID NO: 72304 - DNA, 25 bp, Saccharomyces pastorianus
acagagcgtgtacagatggaccaga

SEQ ID NO: 72305 - DNA, 25 bp, Saccharomyces pastorianus
agaattggtccaacattttctggaa

SEQ ID NO: 72306 - DNA, 25 bp, Saccharomyces pastorianus
ggcaagtttcaatcatacagtcaaa

SEQ ID NO: 72307 - DNA, 25 bp, Saccharomyces pastorianus
gaagctcagtgcctcagtaacgatg

SEQ ID NO: 72308 - DNA, 25 bp, Saccharomyces pastorianus
aactggcagcgattatgttttccaa

SEQ ID NO: 72309 - DNA, 25 bp, Saccharomyces pastorianus
tttccaaggtgtcatcgatgttata

SEQ ID NO: 72310 - DNA, 25 bp, Saccharomyces pastorianus
aacatggaaccaggaggatcccgac

SEQ ID NO: 72311 - DNA, 25 bp, Saccharomyces pastorianus
atgacctggatagtgattctcttga

SEQ ID NO: 72312 - DNA, 25 bp, Saccharomyces pastorianus
tgcaaggcacaactactaaaccagt

SEQ ID NO: 72313 - DNA, 25 bp, Saccharomyces pastorianus
gattctcttgagcaatacaaccgtt

SEQ ID NO: 72314 - DNA, 25 bp, Saccharomyces pastorianus
ggatcccgacgcgattgttatcaat

SEQ ID NO: 72315 - DNA, 25 bp, Saccharomyces pastorianus
gtatctgcacaatcgttaaatgcct

SEQ ID NO: 72316 - DNA, 25 bp, Saccharomyces pastorianus
gcaacatgccattttcgagtgaagt

SEQ ID NO: 72317 - DNA, 25 bp, Saccharomyces pastorianus
ggttcacatttggtctaagagcatt

SEQ ID NO: 72318 - DNA, 25 bp, Saccharomyces pastorianus
gaacgcactactgatctgttgcaat

SEQ ID NO: 72319 - DNA, 25 bp, Saccharomyces pastorianus
ctgttgcaatcatcttccttatata

SEQ ID NO: 72320 - DNA, 25 bp, Saccharomyces pastorianus
ctatcgtctgcctttttcaaatcta

SEQ ID NO: 72321 - DNA, 25 bp, Saccharomyces pastorianus
gatttggtattattgcccttgaagg

SEQ ID NO: 72322 - DNA, 25 bp, Saccharomyces pastorianus
agtaatattctctaccacacgggaa

SEQ ID NO: 72323 - DNA, 25 bp, Saccharomyces pastorianus
gaggaagcccagttcttactgacga

SEQ ID NO: 72324 - DNA, 25 bp, Saccharomyces pastorianus
atgacgatccgcattttactgcgaa

SEQ ID NO: 72325 - DNA, 25 bp, Saccharomyces pastorianus
ttacggttgctcactgaacgcacta

SEQ ID NO: 72326 - DNA, 25 bp, Saccharomyces pastorianus
ttaaaagccatccacttacggttgc

SEQ ID NO: 72327 - DNA, 25 bp, Saccharomyces pastorianus
ggccaaattccaaactacacgaaga

SEQ ID NO: 72328 - DNA, 25 bp, Saccharomyces pastorianus
ggtgtgcaatttggtccatatcccc

SEQ ID NO: 72329 - DNA, 25 bp, Saccharomyces pastorianus
ggtccatatccccttttcgatgatg

SEQ ID NO: 72330 - DNA, 25 bp, Saccharomyces pastorianus
gaacccgttccattacaacgctagt

SEQ ID NO: 72331 - DNA, 25 bp, Saccharomyces pastorianus
caacgctagttcaccattaacgcta

SEQ ID NO: 72332 - DNA, 25 bp, Saccharomyces pastorianus
tagggcctaccgtatttggccaaat

SEQ ID NO: 72333 - DNA, 25 bp, Saccharomyces pastorianus
ttaacgctattcctctttcaggcat

SEQ ID NO: 72334 - DNA, 25 bp, Saccharomyces pastorianus
caggcatgccttatattattggtgt

SEQ ID NO: 72335 - DNA, 25 bp, Saccharomyces pastorianus
agacaatattcccaccatcatcgat

SEQ ID NO: 72336 - DNA, 25 bp, Saccharomyces pastorianus
tttatcaggtgtgaacccgttccat

SEQ ID NO: 72337 - DNA, 25 bp, Saccharomyces pastorianus
gaggcagcctaaggttatctctgaa

SEQ ID NO: 72338 - DNA, 25 bp, Saccharomyces pastorianus
gtgcatttggatcaagaaatactca

SEQ ID NO: 72339 - DNA, 25 bp, Saccharomyces pastorianus
ggaacagccaacaaagacaaagcaa

SEQ ID NO: 72340 - DNA, 25 bp, Saccharomyces pastorianus
tcttctggtgaggaacagccaacaa

SEQ ID NO: 72341 - DNA, 25 bp, Saccharomyces pastorianus
atactcaatcttctggtgaggaaca

SEQ ID NO: 72342 - DNA, 25 bp, Saccharomyces pastorianus
gaaatactcaatcttctggtgagga

SEQ ID NO: 72343 - DNA, 25 bp, Saccharomyces pastorianus
tcaatcttctggtgaggaacagcca

SEQ ID NO: 72344 - DNA, 25 bp, Saccharomyces pastorianus
agggtattcagtgcatttggatcaa

SEQ ID NO: 72345 - DNA, 25 bp, Saccharomyces pastorianus
ggtattcagtgcatttggatcaaga

SEQ ID NO: 72346 - DNA, 25 bp, Saccharomyces pastorianus
gtgaggaacagccaacaaagacaaa

SEQ ID NO: 72347 - DNA, 25 bp, Saccharomyces pastorianus
tgtttagggtattcagtgcatttgg

SEQ ID NO: 72348 - DNA, 25 bp, Saccharomyces pastorianus
aatcttctggtgaggaacagccaac

SEQ ID NO: 72349 - DNA, 25 bp, Saccharomyces pastorianus
tcgtggtgtacctaactctgttttc

SEQ ID NO: 72350 - DNA, 25 bp, Saccharomyces pastorianus
ctcaggttcttcgtgatcggtatca

SEQ ID NO: 72351 - DNA, 25 bp, Saccharomyces pastorianus
atgacgctcgtggtgtacctaactc

SEQ ID NO: 72352 - DNA, 25 bp, Saccharomyces pastorianus
ctttaatatcgtggcggagacgtcg

SEQ ID NO: 72353 - DNA, 25 bp, Saccharomyces pastorianus
actaggagcctcaggttcttcgtga

SEQ ID NO: 72354 - DNA, 25 bp, Saccharomyces pastorianus
gcagatggccatcggtcgactttaa

SEQ ID NO: 72355 - DNA, 25 bp, Saccharomyces pastorianus
gttcaagaactgcagatggccatcg

SEQ ID NO: 72356 - DNA, 25 bp, Saccharomyces pastorianus
ggccatcggtcgactttaatatcgt

SEQ ID NO: 72357 - DNA, 25 bp, Saccharomyces pastorianus
gatcggtatcacatcgttcaagaac

SEQ ID NO: 72358 - DNA, 25 bp, Saccharomyces pastorianus
tgttttcctccactaggagcctcag

SEQ ID NO: 72359 - DNA, 25 bp, Saccharomyces pastorianus
gtgtacctaactctgttttcctcca

SEQ ID NO: 72360 - DNA, 25 bp, Saccharomyces pastorianus
tggagcgaacaaggcggtggaaccc

SEQ ID NO: 72361 - DNA, 25 bp, Saccharomyces pastorianus
tactttttccacaggcagctggagc

SEQ ID NO: 72362 - DNA, 25 bp, Saccharomyces pastorianus
atgcgtcgtctgaagtgtccatgta

SEQ ID NO: 72363 - DNA, 25 bp, Saccharomyces pastorianus
gaatgcgtcgtctgaagtgtccatg

SEQ ID NO: 72364 - DNA, 25 bp, Saccharomyces pastorianus
tgaagtgtccatgtattccggatca

SEQ ID NO: 72365 - DNA, 25 bp, Saccharomyces pastorianus
tgtactttttccacaggcagctgga

SEQ ID NO: 72366 - DNA, 25 bp, Saccharomyces pastorianus
gcgtcgtctgaagtgtccatgtatt

SEQ ID NO: 72367 - DNA, 25 bp, Saccharomyces pastorianus
ttttccacaggcagctggagcgaac

SEQ ID NO: 72368 - DNA, 25 bp, Saccharomyces pastorianus
cacaggcagctggagcgaacaaggc

SEQ ID NO: 72369 - DNA, 25 bp, Saccharomyces pastorianus
cgtctgaagtgtccatgtattccgg

SEQ ID NO: 72370 - DNA, 25 bp, Saccharomyces pastorianus
tcctctgtactttttccacaggcag

SEQ ID NO: 72371 - DNA, 25 bp, Saccharomyces pastorianus
tgcgtcgtctgaagtgtccatgtat

SEQ ID NO: 72372 - DNA, 25 bp, Saccharomyces pastorianus
tggagcgaacaaggcggtggaaccc

SEQ ID NO: 72373 - DNA, 25 bp, Saccharomyces pastorianus
gaatgcgtcgtctgaagtgtccatg

SEQ ID NO: 72374 - DNA, 25 bp, Saccharomyces pastorianus
tgaagtgtccatgtattccggatca

SEQ ID NO: 72375 - DNA, 25 bp, Saccharomyces pastorianus
ttggctatcctctgtactttttcca

SEQ ID NO: 72376 - DNA, 25 bp, Saccharomyces pastorianus
gtattccggatcattcttggctatc

SEQ ID NO: 72377 - DNA, 25 bp, Saccharomyces pastorianus
tgtactttttccacaggcagctgga

SEQ ID NO: 72378 - DNA, 25 bp, Saccharomyces pastorianus
tttttccacaggcagctggagcgaa

SEQ ID NO: 72379 - DNA, 25 bp, Saccharomyces pastorianus
gtcgtctgaagtgtccatgtattcc

SEQ ID NO: 72380 - DNA, 25 bp, Saccharomyces pastorianus
cacaggcagctggagcgaacaaggc

SEQ ID NO: 72381 - DNA, 25 bp, Saccharomyces pastorianus
tcctctgtactttttccacaggcag

SEQ ID NO: 72382 - DNA, 25 bp, Saccharomyces pastorianus
gcaactccacgtctgctgacaaaag

SEQ ID NO: 72383 - DNA, 25 bp, Saccharomyces pastorianus
aacgattgaggcaggcttggcgcaa

SEQ ID NO: 72384 - DNA, 25 bp, Saccharomyces pastorianus
atgtacggtagtcattccttcatcc

SEQ ID NO: 72385 - DNA, 25 bp, Saccharomyces pastorianus
attcacatatctcccttcaagtaca

SEQ ID NO: 72386 - DNA, 25 bp, Saccharomyces pastorianus
gagttctagatactaacccgcgcaa

SEQ ID NO: 72387 - DNA, 25 bp, Saccharomyces pastorianus
caagggactacatcgggccattcac

SEQ ID NO: 72388 - DNA, 25 bp, Saccharomyces pastorianus
tcctgaagggattgaacggcatact

SEQ ID NO: 72389 - DNA, 25 bp, Saccharomyces pastorianus
tggtcactactgttttagccatcag

SEQ ID NO: 72390 - DNA, 25 bp, Saccharomyces pastorianus
cgagtcagcagagttgtagccgcaa

SEQ ID NO: 72391 - DNA, 25 bp, Saccharomyces pastorianus
aggccaagctggtcaattcgttaag

SEQ ID NO: 72392 - DNA, 25 bp, Saccharomyces pastorianus
gcttggcgcaaggtgtagtcgattt

SEQ ID NO: 72393 - DNA, 25 bp, Saccharomyces pastorianus
tcactggatcccatttcatatcttg

SEQ ID NO: 72394 - DNA, 25 bp, Saccharomyces pastorianus
atatcttgtttcttctgtaagtctg

SEQ ID NO: 72395 - DNA, 25 bp, Saccharomyces pastorianus
taagtctgtgaccttgctaagcgca

SEQ ID NO: 72396 - DNA, 25 bp, Saccharomyces pastorianus
tatccctcgaagtctaccagcaaca

SEQ ID NO: 72397 - DNA, 25 bp, Saccharomyces pastorianus
gtctgtgaccttgctaagcgcagta

SEQ ID NO: 72398 - DNA, 25 bp, Saccharomyces pastorianus
gaaattatccctcgaagtctaccag

SEQ ID NO: 72399 - DNA, 25 bp, Saccharomyces pastorianus
cttgctaagcgcagtattcttgaaa

SEQ ID NO: 72400 - DNA, 25 bp, Saccharomyces pastorianus
ggatcccatttcatatcttgtttct

SEQ ID NO: 72401 - DNA, 25 bp, Saccharomyces pastorianus
gtttcttctgtaagtctgtgacctt

SEQ ID NO: 72402 - DNA, 25 bp, Saccharomyces pastorianus
gtgaccttgctaagcgcagtattct

SEQ ID NO: 72403 - DNA, 25 bp, Saccharomyces pastorianus
catttcatatcttgtttcttctgta

SEQ ID NO: 72404 - DNA, 25 bp, Saccharomyces pastorianus
gccgacatgggcgtagaatgcattg

SEQ ID NO: 72405 - DNA, 25 bp, Saccharomyces pastorianus
gtgaacgaacacctggattgctaca

SEQ ID NO: 72406 - DNA, 25 bp, Saccharomyces pastorianus
gggccactccattgcctagattagg

SEQ ID NO: 72407 - DNA, 25 bp, Saccharomyces pastorianus
gtgttgcagccgtcaagggactaat

SEQ ID NO: 72408 - DNA, 25 bp, Saccharomyces pastorianus
gcctagattaggtgcgccaactcca

SEQ ID NO: 72409 - DNA, 25 bp, Saccharomyces pastorianus
gatacggtatactagtcttgaaggt

SEQ ID NO: 72410 - DNA, 25 bp, Saccharomyces pastorianus
attgatgatggtgttgcagccgtca

SEQ ID NO: 72411 - DNA, 25 bp, Saccharomyces pastorianus
aaatgctcgatttttctaagggcga

SEQ ID NO: 72412 - DNA, 25 bp, Saccharomyces pastorianus
atgcattgttgcaggtgctggtgtt

SEQ ID NO: 72413 - DNA, 25 bp, Saccharomyces pastorianus
ttgcctggtgctggtgctaccgaaa

SEQ ID NO: 72414 - DNA, 25 bp, Saccharomyces pastorianus
ttgcagttttcacttgtccgcttga

SEQ ID NO: 72415 - DNA, 25 bp, Saccharomyces pastorianus
tttcatcagtgcacttcgttcctaa

SEQ ID NO: 72416 - DNA, 25 bp, Saccharomyces pastorianus
tgaggatgactacacacgcgctgaa

SEQ ID NO: 72417 - DNA, 25 bp, Saccharomyces pastorianus
gaaccctgttagacatcacacgtaa

SEQ ID NO: 72418 - DNA, 25 bp, Saccharomyces pastorianus
gatgttaaatcctcgaagtcgttag

SEQ ID NO: 72419 - DNA, 25 bp, Saccharomyces pastorianus
tagagttgaaacacccactatatcg

SEQ ID NO: 72420 - DNA, 25 bp, Saccharomyces pastorianus
acgtaagtctcaacggcctcaattt

SEQ ID NO: 72421 - DNA, 25 bp, Saccharomyces pastorianus
atgctcaacctctctatatgtcgaa

SEQ ID NO: 72422 - DNA, 25 bp, Saccharomyces pastorianus
tatatgtcgaatgcctcttctttgg

SEQ ID NO: 72423 - DNA, 25 bp, Saccharomyces pastorianus
agagcttcaaaaggcacattccgaa

SEQ ID NO: 72424 - DNA, 25 bp, Saccharomyces pastorianus
tcttctttggctcctcaagagatat

SEQ ID NO: 72425 - DNA, 25 bp, Saccharomyces pastorianus
gccagcaagtacttctttggaaatt

SEQ ID NO: 72426 - DNA, 25 bp, Saccharomyces pastorianus
attagactcatctagctcagctgat

SEQ ID NO: 72427 - DNA, 25 bp, Saccharomyces pastorianus
gaaaaggactctattgctggcaaac

SEQ ID NO: 72428 - DNA, 25 bp, Saccharomyces pastorianus
gcgcaagagttggttgaatcctaca

SEQ ID NO: 72429 - DNA, 25 bp, Saccharomyces pastorianus
atcgccttattatcaacattcttac

SEQ ID NO: 72430 - DNA, 25 bp, Saccharomyces pastorianus
gagagtcaaatccaccaagacccaa

SEQ ID NO: 72431 - DNA, 25 bp, Saccharomyces pastorianus
gtgagtccctaaccgtttcacgtga

SEQ ID NO: 72432 - DNA, 25 bp, Saccharomyces pastorianus
gattttattggttctggttctggtt

SEQ ID NO: 72433 - DNA, 25 bp, Saccharomyces pastorianus
acgtgaacaattatcgatcgcctta

SEQ ID NO: 72434 - DNA, 25 bp, Saccharomyces pastorianus
ggttcgccattgtcctaggtgagtc

SEQ ID NO: 72435 - DNA, 25 bp, Saccharomyces pastorianus
caggtacagaattaagacgccgctt

SEQ ID NO: 72436 - DNA, 25 bp, Saccharomyces pastorianus
tggtggtgaaatccctgaatggttt

SEQ ID NO: 72437 - DNA, 25 bp, Saccharomyces pastorianus
gtctgaatgctacgatatacaatcc

SEQ ID NO: 72438 - DNA, 25 bp, Saccharomyces pastorianus
aaacgtgcctttggattttgatcaa

SEQ ID NO: 72439 - DNA, 25 bp, Saccharomyces pastorianus
tgcccgacagcaatcacaagaggtt

SEQ ID NO: 72440 - DNA, 25 bp, Saccharomyces pastorianus
aaacctatacccaatatcgttgaag

SEQ ID NO: 72441 - DNA, 25 bp, Saccharomyces pastorianus
atggcaggcgatgaacttagttatg

SEQ ID NO: 72442 - DNA, 25 bp, Saccharomyces pastorianus
gtaccaaacgttactctagatgaga

SEQ ID NO: 72443 - DNA, 25 bp, Saccharomyces pastorianus
gaacgaggccttgggaaagacagca

SEQ ID NO: 72444 - DNA, 25 bp, Saccharomyces pastorianus
gagagtttaagtagttcgccttcac

SEQ ID NO: 72445 - DNA, 25 bp, Saccharomyces pastorianus
atcagtccggtaatgatgcccgaca

SEQ ID NO: 72446 - DNA, 25 bp, Saccharomyces pastorianus
gtagttcgccttcactgaaaccaag

SEQ ID NO: 72447 - DNA, 25 bp, Saccharomyces pastorianus
gacctcaccatcaaagctgtctgaa

SEQ ID NO: 72448 - DNA, 25 bp, Saccharomyces pastorianus
attctgggtcctatcgttcgtcatt

SEQ ID NO: 72449 - DNA, 25 bp, Saccharomyces pastorianus
ggattctgggtcctatcgttcgtca

SEQ ID NO: 72450 - DNA, 25 bp, Saccharomyces pastorianus
ttccttggattctgggtcctatcgt

SEQ ID NO: 72451 - DNA, 25 bp, Saccharomyces pastorianus
tgggtcctatcgttcgtcattttaa

SEQ ID NO: 72452 - DNA, 25 bp, Saccharomyces pastorianus
ttggattctgggtcctatcgttcgt

SEQ ID NO: 72453 - DNA, 25 bp, Saccharomyces pastorianus
gtcattttaaacatcgctccatcct

SEQ ID NO: 72454 - DNA, 25 bp, Saccharomyces pastorianus
tcattttaaacatcgctccatcctt

SEQ ID NO: 72455 - DNA, 25 bp, Saccharomyces pastorianus
ttgcacaatttctgccatcttccaa

SEQ ID NO: 72456 - DNA, 25 bp, Saccharomyces pastorianus
taaacatcgctccatccttctttac

SEQ ID NO: 72457 - DNA, 25 bp, Saccharomyces pastorianus
ttaaacatcgctccatccttcttta

SEQ ID NO: 72458 - DNA, 25 bp, Saccharomyces pastorianus
ttttaaacatcgctccatccttctt

SEQ ID NO: 72459 - DNA, 25 bp, Saccharomyces pastorianus
tgtattggatgtccacgtggctgtt

SEQ ID NO: 72460 - DNA, 25 bp, Saccharomyces pastorianus
gaatactatgaccacaggccgttca

SEQ ID NO: 72461 - DNA, 25 bp, Saccharomyces pastorianus
ttccagttcctgttatatggcccat

SEQ ID NO: 72462 - DNA, 25 bp, Saccharomyces pastorianus
taaggcctgccaacggtataattta

SEQ ID NO: 72463 - DNA, 25 bp, Saccharomyces pastorianus
tcatggtctacctttttccttgcat

SEQ ID NO: 72464 - DNA, 25 bp, Saccharomyces pastorianus
acaggccgttcaccgaccgtattgt

SEQ ID NO: 72465 - DNA, 25 bp, Saccharomyces pastorianus
taccgtatcgccatgtcatggtcta

SEQ ID NO: 72466 - DNA, 25 bp, Saccharomyces pastorianus
ttatatggcccattgcacgcagaaa

SEQ ID NO: 72467 - DNA, 25 bp, Saccharomyces pastorianus
gaaaacgcggtgatgcttgtcatca

SEQ ID NO: 72468 - DNA, 25 bp, Saccharomyces pastorianus
acttcaccaagtctttcggcagagg

SEQ ID NO: 72469 - DNA, 25 bp, Saccharomyces pastorianus
gagccttctatacgttcaactactt

SEQ ID NO: 72470 - DNA, 25 bp, Saccharomyces pastorianus
gtcctcgaaactgggctgcatctcg

SEQ ID NO: 72471 - DNA, 25 bp, Saccharomyces pastorianus
tgaccagggtctttagctcgtccgt

SEQ ID NO: 72472 - DNA, 25 bp, Saccharomyces pastorianus
accggtgcgaagcaggtcttctcga

SEQ ID NO: 72473 - DNA, 25 bp, Saccharomyces pastorianus
cttgagcttgaaggcggcgtcctcg

SEQ ID NO: 72474 - DNA, 25 bp, Saccharomyces pastorianus
gagttggtcttggaagcgtcgtcca

SEQ ID NO: 72475 - DNA, 25 bp, Saccharomyces pastorianus
tcacttctccgaccttgagcttgaa

SEQ ID NO: 72476 - DNA, 25 bp, Saccharomyces pastorianus
gtcttctcgagtcctggtgcttgat

SEQ ID NO: 72477 - DNA, 25 bp, Saccharomyces pastorianus
gatatggtgatgttctcggaccggt

SEQ ID NO: 72478 - DNA, 25 bp, Saccharomyces pastorianus
gaagagcagtcggacctctccttag

SEQ ID NO: 72479 - DNA, 25 bp, Saccharomyces pastorianus
gtggcctcttgcttggatatggtga

SEQ ID NO: 72480 - DNA, 25 bp, Saccharomyces pastorianus
ttagccagcgcctcgaaggagttgg

SEQ ID NO: 72481 - DNA, 25 bp, Saccharomyces pastorianus
caaacgtgcccttggaccctacagg

SEQ ID NO: 72482 - DNA, 25 bp, Saccharomyces pastorianus
gaagttccggccgttgcgcaggttc

SEQ ID NO: 72483 - DNA, 25 bp, Saccharomyces pastorianus
agatcagcttgtcgtgctggtacgc

SEQ ID NO: 72484 - DNA, 25 bp, Saccharomyces pastorianus
atcgccacccttgatgaagtacgag

SEQ ID NO: 72485 - DNA, 25 bp, Saccharomyces pastorianus
ctagcagcgattgcgacaccagcgt

SEQ ID NO: 72486 - DNA, 25 bp, Saccharomyces pastorianus
tggcacggtgtacaacgacgctagc

SEQ ID NO: 72487 - DNA, 25 bp, Saccharomyces pastorianus
gcttgtggatgaagttccggccgtt

SEQ ID NO: 72488 - DNA, 25 bp, Saccharomyces pastorianus
gttgcgcaggttctgcacatggtac

SEQ ID NO: 72489 - DNA, 25 bp, Saccharomyces pastorianus
gagtcgtgctccttagaccgctgca

SEQ ID NO: 72490 - DNA, 25 bp, Saccharomyces pastorianus
ggtacgcactaacctgcttgtggat

SEQ ID NO: 72491 - DNA, 25 bp, Saccharomyces pastorianus
accgctgcacggcaaacaggatcat

SEQ ID NO: 72492 - DNA, 25 bp, Saccharomyces pastorianus
actggccgtcagtcttgattataac

SEQ ID NO: 72493 - DNA, 25 bp, Saccharomyces pastorianus
ttgctatgagacactggccgtcagt

SEQ ID NO: 72494 - DNA, 25 bp, Saccharomyces pastorianus
tataacgacccttttattcaggtat

SEQ ID NO: 72495 - DNA, 25 bp, Saccharomyces pastorianus
gacccttttattcaggtattccttg

SEQ ID NO: 72496 - DNA, 25 bp, Saccharomyces pastorianus
gtcagtcttgattataacgaccctt

SEQ ID NO: 72497 - DNA, 25 bp, Saccharomyces pastorianus
ggtattccttgagtattggtgacat

SEQ ID NO: 72498 - DNA, 25 bp, Saccharomyces pastorianus
tcgaagccgtccaagcttgctatga

SEQ ID NO: 72499 - DNA, 25 bp, Saccharomyces pastorianus
tagtgttcttgtcgaagccgtccaa

SEQ ID NO: 72500 - DNA, 25 bp, Saccharomyces pastorianus
ataggttagtgttcttgtcgaagcc

SEQ ID NO: 72501 - DNA, 25 bp, Saccharomyces pastorianus
aagcttgctatgagacactggccgt

SEQ ID NO: 72502 - DNA, 25 bp, Saccharomyces pastorianus
ttggtgacattgagcttggtatctg

SEQ ID NO: 72503 - DNA, 25 bp, Saccharomyces pastorianus
gtacatgaagcgcatcttacggaaa

SEQ ID NO: 72504 - DNA, 25 bp, Saccharomyces pastorianus
gcacgtgccgcagaatacatccaaa

SEQ ID NO: 72505 - DNA, 25 bp, Saccharomyces pastorianus
agcaaggctgcgatactggcacgtg

SEQ ID NO: 72506 - DNA, 25 bp, Saccharomyces pastorianus
aggcgtcgccgtgaaaatataaaca

SEQ ID NO: 72507 - DNA, 25 bp, Saccharomyces pastorianus
gagcgatctgctccctgtaagagag

SEQ ID NO: 72508 - DNA, 25 bp, Saccharomyces pastorianus
taaacaccgccatcaatgtcttgag

SEQ ID NO: 72509 - DNA, 25 bp, Saccharomyces pastorianus
gacggtactggtatgaacctcaaga

SEQ ID NO: 72510 - DNA, 25 bp, Saccharomyces pastorianus
agaatgcatcgcagttggccagtgc

SEQ ID NO: 72511 - DNA, 25 bp, Saccharomyces pastorianus
accacactggccacgacagaggaat

SEQ ID NO: 72512 - DNA, 25 bp, Saccharomyces pastorianus
atgctcataccattgcccgaacatg

SEQ ID NO: 72513 - DNA, 25 bp, Saccharomyces pastorianus
catgaatatgcagtcgggccgtcga

SEQ ID NO: 72514 - DNA, 25 bp, Saccharomyces pastorianus
tgcacaagatggttcgtttgcccgt

SEQ ID NO: 72515 - DNA, 25 bp, Saccharomyces pastorianus
tggcggctcagctagatttcatgaa

SEQ ID NO: 72516 - DNA, 25 bp, Saccharomyces pastorianus
ggaaaatgtcatccagacttcctgg

SEQ ID NO: 72517 - DNA, 25 bp, Saccharomyces pastorianus
atttcatgaactaccacgcaaaccg

SEQ ID NO: 72518 - DNA, 25 bp, Saccharomyces pastorianus
tcttcctcagtctcttctggagaaa

SEQ ID NO: 72519 - DNA, 25 bp, Saccharomyces pastorianus
agacttcctgggaatcacttccata

SEQ ID NO: 72520 - DNA, 25 bp, Saccharomyces pastorianus
tgaatgggattacttgtttgcacaa

SEQ ID NO: 72521 - DNA, 25 bp, Saccharomyces pastorianus
tcgtttgcccgttgtgagtttgaaa

SEQ ID NO: 72522 - DNA, 25 bp, Saccharomyces pastorianus
tattgcagatggaattggcggctca

SEQ ID NO: 72523 - DNA, 25 bp, Saccharomyces pastorianus
aaaccgcctcataaagtagcttcgt

SEQ ID NO: 72524 - DNA, 25 bp, Saccharomyces pastorianus
gttcgaattacctattgacttcatg

SEQ ID NO: 72525 - DNA, 25 bp, Saccharomyces pastorianus
gtgcggatcctctccgcagtatagg

SEQ ID NO: 72526 - DNA, 25 bp, Saccharomyces pastorianus
ccatctcaccttgcgggttctggtg

SEQ ID NO: 72527 - DNA, 25 bp, Saccharomyces pastorianus
ataggcgtgttccatacgtcggctg

SEQ ID NO: 72528 - DNA, 25 bp, Saccharomyces pastorianus
tctccgcagtataggcgtgttccat

SEQ ID NO: 72529 - DNA, 25 bp, Saccharomyces pastorianus
gtataggcgtgttccatacgtcggc

SEQ ID NO: 72530 - DNA, 25 bp, Saccharomyces pastorianus
aggcgtgttccatacgtcggctgtc

SEQ ID NO: 72531 - DNA, 25 bp, Saccharomyces pastorianus
tgttccatacgtcggctgtccttac

SEQ ID NO: 72532 - DNA, 25 bp, Saccharomyces pastorianus
gatcctctccgcagtataggcgtgt

SEQ ID NO: 72533 - DNA, 25 bp, Saccharomyces pastorianus
cgcagtataggcgtgttccatacgt

SEQ ID NO: 72534 - DNA, 25 bp, Saccharomyces pastorianus
tcaccttgcgggttctggtgcggat

SEQ ID NO: 72535 - DNA, 25 bp, Saccharomyces pastorianus
ttgcgggttctggtgcggatcctct

SEQ ID NO: 72536 - DNA, 25 bp, Saccharomyces pastorianus
cattgtgtgtgtatgctctttgcct

SEQ ID NO: 72537 - DNA, 25 bp, Saccharomyces pastorianus
tctttgcctttattgggtgatgccc

SEQ ID NO: 72538 - DNA, 25 bp, Saccharomyces pastorianus
aatagacgtggcctgcacaacaaat

SEQ ID NO: 72539 - DNA, 25 bp, Saccharomyces pastorianus
gcacaacaaatgtctcctcgcagaa

SEQ ID NO: 72540 - DNA, 25 bp, Saccharomyces pastorianus
tgtgtgtatgctctttgcctttatt

SEQ ID NO: 72541 - DNA, 25 bp, Saccharomyces pastorianus
gtctcctcgcagaatgcagcattgt

SEQ ID NO: 72542 - DNA, 25 bp, Saccharomyces pastorianus
cctttattgggtgatgcccgttggt

SEQ ID NO: 72543 - DNA, 25 bp, Saccharomyces pastorianus
tatgctctttgcctttattgggtga

SEQ ID NO: 72544 - DNA, 25 bp, Saccharomyces pastorianus
gtggcctgcacaacaaatgtctcct

SEQ ID NO: 72545 - DNA, 25 bp, Saccharomyces pastorianus
gcccgttggtggatagcatgtatat

SEQ ID NO: 72546 - DNA, 25 bp, Saccharomyces pastorianus
acaaatgtctcctcgcagaatgcag

SEQ ID NO: 72547 - DNA, 25 bp, Saccharomyces pastorianus
agcaattctgtttctctgtcttttg

SEQ ID NO: 72548 - DNA, 25 bp, Saccharomyces pastorianus
aaagtcgctggacacccgctggttg

SEQ ID NO: 72549 - DNA, 25 bp, Saccharomyces pastorianus
gatccagttccaagcaattctgttt

SEQ ID NO: 72550 - DNA, 25 bp, Saccharomyces pastorianus
tcttcgcccagacgcacggcaaagt

SEQ ID NO: 72551 - DNA, 25 bp, Saccharomyces pastorianus
agttccaagcaattctgtttctctg

SEQ ID NO: 72552 - DNA, 25 bp, Saccharomyces pastorianus
agacgcacggcaaagtcgctggaca

SEQ ID NO: 72553 - DNA, 25 bp, Saccharomyces pastorianus
gcacgatccagttccaagcaattct

SEQ ID NO: 72554 - DNA, 25 bp, Saccharomyces pastorianus
tccaagcaattctgtttctctgtct

SEQ ID NO: 72555 - DNA, 25 bp, Saccharomyces pastorianus
tctgcacgatccagttccaagcaat

SEQ ID NO: 72556 - DNA, 25 bp, Saccharomyces pastorianus
tggacacccgctggttggcgctctg

SEQ ID NO: 72557 - DNA, 25 bp, Saccharomyces pastorianus
tggttggcgctctgcacgatccagt

SEQ ID NO: 72558 - DNA, 25 bp, Saccharomyces pastorianus
ggcacaagcctttaatactacaaat

SEQ ID NO: 72559 - DNA, 25 bp, Saccharomyces pastorianus
ttatgcttgctgaagaggacgttga

SEQ ID NO: 72560 - DNA, 25 bp, Saccharomyces pastorianus
acttccaatctattgttccgctaag

SEQ ID NO: 72561 - DNA, 25 bp, Saccharomyces pastorianus
acgctgttttcatctactgttttgt

SEQ ID NO: 72562 - DNA, 25 bp, Saccharomyces pastorianus
atccacgatctgattccattgttag

SEQ ID NO: 72563 - DNA, 25 bp, Saccharomyces pastorianus
taacaggtgtttcatatctttggga

SEQ ID NO: 72564 - DNA, 25 bp, Saccharomyces pastorianus
gtcctaaacggtatccacgatctga

SEQ ID NO: 72565 - DNA, 25 bp, Saccharomyces pastorianus
gacagaagctatgaacttgccacaa

SEQ ID NO: 72566 - DNA, 25 bp, Saccharomyces pastorianus
tttgctcttctttttgtcctaaacg

SEQ ID NO: 72567 - DNA, 25 bp, Saccharomyces pastorianus
tacaacggccaactgggtctttttg

SEQ ID NO: 72568 - DNA, 25 bp, Saccharomyces pastorianus
ttaacattgtcacgttacaacggcc

SEQ ID NO: 72569 - DNA, 25 bp, Saccharomyces pastorianus
gctgcacctgctaccgttactgctg

SEQ ID NO: 72570 - DNA, 25 bp, Saccharomyces pastorianus
cttgctgtagcgattgtcgctgcac

SEQ ID NO: 72571 - DNA, 25 bp, Saccharomyces pastorianus
gtagtcgccgccctagtagtcgtcg

SEQ ID NO: 72572 - DNA, 25 bp, Saccharomyces pastorianus
agtcgtcgttcggagtgactatgcg

SEQ ID NO: 72573 - DNA, 25 bp, Saccharomyces pastorianus
cggagtgactatgcgggttgtcctt

SEQ ID NO: 72574 - DNA, 25 bp, Saccharomyces pastorianus
actatgcgggttgtccttgctgtag

SEQ ID NO: 72575 - DNA, 25 bp, Saccharomyces pastorianus
gcgggttgtccttgctgtagcgatt

SEQ ID NO: 72576 - DNA, 25 bp, Saccharomyces pastorianus
ttgtccttgctgtagcgattgtcgc

SEQ ID NO: 72577 - DNA, 25 bp, Saccharomyces pastorianus
attgtcgctgcacctgctaccgtta

SEQ ID NO: 72578 - DNA, 25 bp, Saccharomyces pastorianus
tagcgattgtcgctgcacctgctac

SEQ ID NO: 72579 - DNA, 25 bp, Saccharomyces pastorianus
ccctagtagtcgtcgttcggagtga

SEQ ID NO: 72580 - DNA, 25 bp, Saccharomyces pastorianus
aagaaaacgagtctactcgaatgat

SEQ ID NO: 72581 - DNA, 25 bp, Saccharomyces pastorianus
atattcttggacagcctctatcatg

SEQ ID NO: 72582 - DNA, 25 bp, Saccharomyces pastorianus
gggtcctcaagattcttgtgggact

SEQ ID NO: 72583 - DNA, 25 bp, Saccharomyces pastorianus
ggttatattcttggacagcctctat

SEQ ID NO: 72584 - DNA, 25 bp, Saccharomyces pastorianus
atgattattaattcacacttgtggg

SEQ ID NO: 72585 - DNA, 25 bp, Saccharomyces pastorianus
tggacagcctctatcatgcagccag

SEQ ID NO: 72586 - DNA, 25 bp, Saccharomyces pastorianus
atggaatatcatgcgaatgctgcta

SEQ ID NO: 72587 - DNA, 25 bp, Saccharomyces pastorianus
gatgcggttatattcttggacagcc

SEQ ID NO: 72588 - DNA, 25 bp, Saccharomyces pastorianus
ttcttggacagcctctatcatgcag

SEQ ID NO: 72589 - DNA, 25 bp, Saccharomyces pastorianus
agattcttgtgggactttcgaaaag

SEQ ID NO: 72590 - DNA, 25 bp, Saccharomyces pastorianus
aatgctgctaaaagtgatgcggtta

SEQ ID NO: 72591 - DNA, 25 bp, Saccharomyces pastorianus
tctgtgacatgggagaaaactttct

SEQ ID NO: 72592 - DNA, 25 bp, Saccharomyces pastorianus
tattggctggaaacgtgatcaaaaa

SEQ ID NO: 72593 - DNA, 25 bp, Saccharomyces pastorianus
ggaaacgtgatcaaaaaatgctcta

SEQ ID NO: 72594 - DNA, 25 bp, Saccharomyces pastorianus
gggagaaaactttctgaatgaacag

SEQ ID NO: 72595 - DNA, 25 bp, Saccharomyces pastorianus
tttattggctggaaacgtgatcaaa

SEQ ID NO: 72596 - DNA, 25 bp, Saccharomyces pastorianus
tatttattggctggaaacgtgatca

SEQ ID NO: 72597 - DNA, 25 bp, Saccharomyces pastorianus
gtgacatgggagaaaactttctgaa

SEQ ID NO: 72598 - DNA, 25 bp, Saccharomyces pastorianus
acagaattatttattggctggaaac

SEQ ID NO: 72599 - DNA, 25 bp, Saccharomyces pastorianus
gaattatttattggctggaaacgtg

SEQ ID NO: 72600 - DNA, 25 bp, Saccharomyces pastorianus
aaacgtgatcaaaaaatgctctagc

SEQ ID NO: 72601 - DNA, 25 bp, Saccharomyces pastorianus
ttggctggaaacgtgatcaaaaaat

SEQ ID NO: 72602 - DNA, 25 bp, Saccharomyces pastorianus
aaatcaggccggttcgacaagagca

SEQ ID NO: 72603 - DNA, 25 bp, Saccharomyces pastorianus
aggacggtctcctagtcaggtttct

SEQ ID NO: 72604 - DNA, 25 bp, Saccharomyces pastorianus
atttctttctatgcgtattcaccaa

SEQ ID NO: 72605 - DNA, 25 bp, Saccharomyces pastorianus
gaggatgatctttttcccttgttaa

SEQ ID NO: 72606 - DNA, 25 bp, Saccharomyces pastorianus
ataacaggcctgctcttatgaaagg

SEQ ID NO: 72607 - DNA, 25 bp, Saccharomyces pastorianus
cgctgttatcattggaggacggtct

SEQ ID NO: 72608 - DNA, 25 bp, Saccharomyces pastorianus
tcaggtttctggtgcgttggagtcc

SEQ ID NO: 72609 - DNA, 25 bp, Saccharomyces pastorianus
attgctcacaactcttctctaaaga

SEQ ID NO: 72610 - DNA, 25 bp, Saccharomyces pastorianus
ttcaccaatcgcaggagggttcttg

SEQ ID NO: 72611 - DNA, 25 bp, Saccharomyces pastorianus
aactataacgcgttctcacgggcga

SEQ ID NO: 72612 - DNA, 25 bp, Saccharomyces pastorianus
agcaatcatattgggcagctgtatt

SEQ ID NO: 72613 - DNA, 25 bp, Saccharomyces pastorianus
ttgttttgctacaacatgggcacct

SEQ ID NO: 72614 - DNA, 25 bp, Saccharomyces pastorianus
atcaatttctattacggttacgtgt

SEQ ID NO: 72615 - DNA, 25 bp, Saccharomyces pastorianus
tacaacatgggcacctgtcgcttat

SEQ ID NO: 72616 - DNA, 25 bp, Saccharomyces pastorianus
gatttcaactgcgttcaactggtta

SEQ ID NO: 72617 - DNA, 25 bp, Saccharomyces pastorianus
atgcttggtcgctatgtttttctac

SEQ ID NO: 72618 - DNA, 25 bp, Saccharomyces pastorianus
ctacatcttctttttcttgccagaa

SEQ ID NO: 72619 - DNA, 25 bp, Saccharomyces pastorianus
gagcagccgggatgatggcctgtat

SEQ ID NO: 72620 - DNA, 25 bp, Saccharomyces pastorianus
gagctatgtcgatttcaactgcgtt

SEQ ID NO: 72621 - DNA, 25 bp, Saccharomyces pastorianus
ttacgtgttcgtgggatgcttggtc

SEQ ID NO: 72622 - DNA, 25 bp, Saccharomyces pastorianus
ggtcgctatgtttttctacatcttc

SEQ ID NO: 72623 - DNA, 25 bp, Saccharomyces pastorianus
atggcagtttttgattggtttcttt

SEQ ID NO: 72624 - DNA, 25 bp, Saccharomyces pastorianus
gaccactaccgcaggaatcatcata

SEQ ID NO: 72625 - DNA, 25 bp, Saccharomyces pastorianus
gatccaggacctgcagcatatagaa

SEQ ID NO: 72626 - DNA, 25 bp, Saccharomyces pastorianus
cacggacgcaaatctctttttagga

SEQ ID NO: 72627 - DNA, 25 bp, Saccharomyces pastorianus
ggacctttaactatcacggacgcaa

SEQ ID NO: 72628 - DNA, 25 bp, Saccharomyces pastorianus
gacattcacactgtagctgctggag

SEQ ID NO: 72629 - DNA, 25 bp, Saccharomyces pastorianus
gattgtgccacgctgaaaataccca

SEQ ID NO: 72630 - DNA, 25 bp, Saccharomyces pastorianus
gtagcatttccgcaggattgtgcca

SEQ ID NO: 72631 - DNA, 25 bp, Saccharomyces pastorianus
tagaacacgttttcgagaccactac

SEQ ID NO: 72632 - DNA, 25 bp, Saccharomyces pastorianus
aatattcccttgatcggttttgata

SEQ ID NO: 72633 - DNA, 25 bp, Saccharomyces pastorianus
aaatcaatactatctggccctgcag

SEQ ID NO: 72634 - DNA, 25 bp, Saccharomyces pastorianus
gggcacatccactgacgtaagtagg

SEQ ID NO: 72635 - DNA, 25 bp, Saccharomyces pastorianus
tttggatctgaactccttcgggctc

SEQ ID NO: 72636 - DNA, 25 bp, Saccharomyces pastorianus
ccgatgccaataggaaaggtgtttt

SEQ ID NO: 72637 - DNA, 25 bp, Saccharomyces pastorianus
aactttacgcttttcaatattacat

SEQ ID NO: 72638 - DNA, 25 bp, Saccharomyces pastorianus
tactgatgactttatccccgttagc

SEQ ID NO: 72639 - DNA, 25 bp, Saccharomyces pastorianus
aacgggctcacttgtaaacgataat

SEQ ID NO: 72640 - DNA, 25 bp, Saccharomyces pastorianus
taccagtaacacctttttggatctg

SEQ ID NO: 72641 - DNA, 25 bp, Saccharomyces pastorianus
ttcgggctcgatctttttgctccaa

SEQ ID NO: 72642 - DNA, 25 bp, Saccharomyces pastorianus
ttacattagatggaacgggctcact

SEQ ID NO: 72643 - DNA, 25 bp, Saccharomyces pastorianus
ttagcgacgctaatgtaaatccagt

SEQ ID NO: 72644 - DNA, 25 bp, Saccharomyces pastorianus
attattcacttgtctgagggcttga

SEQ ID NO: 72645 - DNA, 25 bp, Saccharomyces pastorianus
tttttgctccaactttatccgatgc

SEQ ID NO: 72646 - DNA, 25 bp, Saccharomyces pastorianus
atcgcaccacaaagaagttcaaaaa

SEQ ID NO: 72647 - DNA, 25 bp, Saccharomyces pastorianus
aaagaagaacgctgttgctaagaaa

SEQ ID NO: 72648 - DNA, 25 bp, Saccharomyces pastorianus
aagaagagccaaccgttatctcagc

SEQ ID NO: 72649 - DNA, 25 bp, Saccharomyces pastorianus
gaataccaaagtcaagccatgtcaa

SEQ ID NO: 72650 - DNA, 25 bp, Saccharomyces pastorianus
aaccagctgctgatgtcgaagaata

SEQ ID NO: 72651 - DNA, 25 bp, Saccharomyces pastorianus
gttatctcagccactgatttggaaa

SEQ ID NO: 72652 - DNA, 25 bp, Saccharomyces pastorianus
tgaagcagttgctatcgcaccacaa

SEQ ID NO: 72653 - DNA, 25 bp, Saccharomyces pastorianus
atgaagaaatcccaacaactgaaaa

SEQ ID NO: 72654 - DNA, 25 bp, Saccharomyces pastorianus
ggttcagaaggatgcctccgaagaa

SEQ ID NO: 72655 - DNA, 25 bp, Saccharomyces pastorianus
gttgctaagaaagaaccagctgctg

SEQ ID NO: 72656 - DNA, 25 bp, Saccharomyces pastorianus
aagagaaggcaccagaggttcagaa

SEQ ID NO: 72657 - DNA, 25 bp, Saccharomyces pastorianus
caagatcaagggtaagctggtttat

SEQ ID NO: 72658 - DNA, 25 bp, Saccharomyces pastorianus
agagcaccaaagtatcacagccaca

SEQ ID NO: 72659 - DNA, 25 bp, Saccharomyces pastorianus
aaatgctgtcgtagttgcacgtgaa

SEQ ID NO: 72660 - DNA, 25 bp, Saccharomyces pastorianus
aagcgacgagcacatggacaagatc

SEQ ID NO: 72661 - DNA, 25 bp, Saccharomyces pastorianus
actgccatggaaaaagcattccttc

SEQ ID NO: 72662 - DNA, 25 bp, Saccharomyces pastorianus
gctttcgaaagggtacaactgccat

SEQ ID NO: 72663 - DNA, 25 bp, Saccharomyces pastorianus
ccgagagagaattagctttttacaa

SEQ ID NO: 72664 - DNA, 25 bp, Saccharomyces pastorianus
gctggtttatgaggctagtgacaag

SEQ ID NO: 72665 - DNA, 25 bp, Saccharomyces pastorianus
atgaagcacgctttcgaaagggtac

SEQ ID NO: 72666 - DNA, 25 bp, Saccharomyces pastorianus
cccattcaagagaccattggactat

SEQ ID NO: 72667 - DNA, 25 bp, Saccharomyces pastorianus
atcacagccacaaccaatacagatg

SEQ ID NO: 72668 - DNA, 25 bp, Saccharomyces pastorianus
gtaagcaagtccaacatgccactct

SEQ ID NO: 72669 - DNA, 25 bp, Saccharomyces pastorianus
gttcggtaagcaagtccaacatgcc

SEQ ID NO: 72670 - DNA, 25 bp, Saccharomyces pastorianus
taaagaagttcggtaagcaagtcca

SEQ ID NO: 72671 - DNA, 25 bp, Saccharomyces pastorianus
taagcaagtccaacatgccactctg

SEQ ID NO: 72672 - DNA, 25 bp, Saccharomyces pastorianus
ggtaagcaagtccaacatgccactc

SEQ ID NO: 72673 - DNA, 25 bp, Saccharomyces pastorianus
aagttcggtaagcaagtccaacatg

SEQ ID NO: 72674 - DNA, 25 bp, Saccharomyces pastorianus
tcggtaagcaagtccaacatgccac

SEQ ID NO: 72675 - DNA, 25 bp, Saccharomyces pastorianus
cggtaagcaagtccaacatgccact

SEQ ID NO: 72676 - DNA, 25 bp, Saccharomyces pastorianus
agaagttcggtaagcaagtccaaca

SEQ ID NO: 72677 - DNA, 25 bp, Saccharomyces pastorianus
gaagttcggtaagcaagtccaacat

SEQ ID NO: 72678 - DNA, 25 bp, Saccharomyces pastorianus
ttcggtaagcaagtccaacatgcca

SEQ ID NO: 72679 - DNA, 25 bp, Saccharomyces pastorianus
tacaacaatgaactcgaagccccag

SEQ ID NO: 72680 - DNA, 25 bp, Saccharomyces pastorianus
ttattggcggcaaccatgagtcaat

SEQ ID NO: 72681 - DNA, 25 bp, Saccharomyces pastorianus
ataagcatacctcccaaataccaaa

SEQ ID NO: 72682 - DNA, 25 bp, Saccharomyces pastorianus
ttgtcacggtcaactgaaccagata

SEQ ID NO: 72683 - DNA, 25 bp, Saccharomyces pastorianus
caaagaagtgtcacgactccacgca

SEQ ID NO: 72684 - DNA, 25 bp, Saccharomyces pastorianus
ccacgcaaagactcccattgattta

SEQ ID NO: 72685 - DNA, 25 bp, Saccharomyces pastorianus
tgctgttcagggatgttgtcacggt

SEQ ID NO: 72686 - DNA, 25 bp, Saccharomyces pastorianus
ggagatttccaaagcatccgtaatt

SEQ ID NO: 72687 - DNA, 25 bp, Saccharomyces pastorianus
tcgaagccccagttcctacaatttt

SEQ ID NO: 72688 - DNA, 25 bp, Saccharomyces pastorianus
aatgagacacttaatgcttctacca

SEQ ID NO: 72689 - DNA, 25 bp, Saccharomyces pastorianus
gcatccgtaattctcaagatttcaa

SEQ ID NO: 72690 - DNA, 25 bp, Saccharomyces pastorianus
ttgttcttctacgatagcctcacga

SEQ ID NO: 72691 - DNA, 25 bp, Saccharomyces pastorianus
aaccaccagcaaagcagttctagac

SEQ ID NO: 72692 - DNA, 25 bp, Saccharomyces pastorianus
gataacggctatagcaactatccaa

SEQ ID NO: 72693 - DNA, 25 bp, Saccharomyces pastorianus
gagcaaccgcagaaccaagggatcc

SEQ ID NO: 72694 - DNA, 25 bp, Saccharomyces pastorianus
gataagttgtcataaccgcctggcg

SEQ ID NO: 72695 - DNA, 25 bp, Saccharomyces pastorianus
gccacgctcgccgatgattgtagtg

SEQ ID NO: 72696 - DNA, 25 bp, Saccharomyces pastorianus
gcaactatccaaaacgaaccaccag

SEQ ID NO: 72697 - DNA, 25 bp, Saccharomyces pastorianus
actactttggcctcggaacacaggt

SEQ ID NO: 72698 - DNA, 25 bp, Saccharomyces pastorianus
gcctcacgagcacaatattgcggga

SEQ ID NO: 72699 - DNA, 25 bp, Saccharomyces pastorianus
tagcggcgggcagtaggttatcaaa

SEQ ID NO: 72700 - DNA, 25 bp, Saccharomyces pastorianus
gttctagacgtactactttggcctc

SEQ ID NO: 72701 - DNA, 25 bp, Saccharomyces pastorianus
gaatcgatccatcggtaaccatgat

SEQ ID NO: 72702 - DNA, 25 bp, Saccharomyces pastorianus
ggaagtcgtcgaactgcccttatta

SEQ ID NO: 72703 - DNA, 25 bp, Saccharomyces pastorianus
acttccattacctccaagaatcgat

SEQ ID NO: 72704 - DNA, 25 bp, Saccharomyces pastorianus
aaattgcgaagtttgttgtcgggct

SEQ ID NO: 72705 - DNA, 25 bp, Saccharomyces pastorianus
attatctccagaaaggtttgccgct

SEQ ID NO: 72706 - DNA, 25 bp, Saccharomyces pastorianus
tatattgttatatggtcctcctggt

SEQ ID NO: 72707 - DNA, 25 bp, Saccharomyces pastorianus
ggcacgtaccaagaaggcatgcatt

SEQ ID NO: 72708 - DNA, 25 bp, Saccharomyces pastorianus
aggtttgccgctttaggtatcgatc

SEQ ID NO: 72709 - DNA, 25 bp, Saccharomyces pastorianus
cgatgtcacttatagcgatgttggt

SEQ ID NO: 72710 - DNA, 25 bp, Saccharomyces pastorianus
ggtatcgatcctccaaagggtatat

SEQ ID NO: 72711 - DNA, 25 bp, Saccharomyces pastorianus
gatgctaagtacgtgattaacctaa

SEQ ID NO: 72712 - DNA, 25 bp, Saccharomyces pastorianus
gaccaaatcatcaacggctacgata

SEQ ID NO: 72713 - DNA, 25 bp, Saccharomyces pastorianus
aactgtccctaagaagaaatcgtga

SEQ ID NO: 72714 - DNA, 25 bp, Saccharomyces pastorianus
gtgcttgacgaccaatacgaccaaa

SEQ ID NO: 72715 - DNA, 25 bp, Saccharomyces pastorianus
tagtgccattgcacgtacagagacc

SEQ ID NO: 72716 - DNA, 25 bp, Saccharomyces pastorianus
aagcggtggccgtaagctagctaag

SEQ ID NO: 72717 - DNA, 25 bp, Saccharomyces pastorianus
gagaccatgacagtgcttgacgacc

SEQ ID NO: 72718 - DNA, 25 bp, Saccharomyces pastorianus
catgacgacggagagatctgatttc

SEQ ID NO: 72719 - DNA, 25 bp, Saccharomyces pastorianus
gatctgatttcgaatcaatgctcga

SEQ ID NO: 72720 - DNA, 25 bp, Saccharomyces pastorianus
ttaccaaccgtttgacatgacgacg

SEQ ID NO: 72721 - DNA, 25 bp, Saccharomyces pastorianus
aatgctcgatgatttcttggacaat

SEQ ID NO: 72722 - DNA, 25 bp, Saccharomyces pastorianus
tgacagactaaaggaagcggcagac

SEQ ID NO: 72723 - DNA, 25 bp, Saccharomyces pastorianus
gatattgtagttgaagaccccagga

SEQ ID NO: 72724 - DNA, 25 bp, Saccharomyces pastorianus
gatccagatgagtttgaagacgaat

SEQ ID NO: 72725 - DNA, 25 bp, Saccharomyces pastorianus
atcaagccgatgtcagaagattcca

SEQ ID NO: 72726 - DNA, 25 bp, Saccharomyces pastorianus
gatatttttgcccagcttttaggaa

SEQ ID NO: 72727 - DNA, 25 bp, Saccharomyces pastorianus
cagaagatgatatttttgcccagct

SEQ ID NO: 72728 - DNA, 25 bp, Saccharomyces pastorianus
gaccccaggaaatctaatgctgaga

SEQ ID NO: 72729 - DNA, 25 bp, Saccharomyces pastorianus
gaagattccaaaagggcaaatccac

SEQ ID NO: 72730 - DNA, 25 bp, Saccharomyces pastorianus
tatcgattatcaagccgatgtcaga

SEQ ID NO: 72731 - DNA, 25 bp, Saccharomyces pastorianus
gggcaaatccactttggagaagcta

SEQ ID NO: 72732 - DNA, 25 bp, Saccharomyces pastorianus
tgaagcgggagatccagatgagttt

SEQ ID NO: 72733 - DNA, 25 bp, Saccharomyces pastorianus
ttgcccagcttttaggaagcggtga

SEQ ID NO: 72734 - DNA, 25 bp, Saccharomyces pastorianus
aagtttgcaggatcccatttgccac

SEQ ID NO: 72735 - DNA, 25 bp, Saccharomyces pastorianus
tcgcttatcccgacgttggtaatag

SEQ ID NO: 72736 - DNA, 25 bp, Saccharomyces pastorianus
ccgcaaacggtatagtgtgcacttt

SEQ ID NO: 72737 - DNA, 25 bp, Saccharomyces pastorianus
ttgcgtttcgtacaaattcatcatt

SEQ ID NO: 72738 - DNA, 25 bp, Saccharomyces pastorianus
acataagagcttctcgtcgcttatc

SEQ ID NO: 72739 - DNA, 25 bp, Saccharomyces pastorianus
ggtttctataatgcaccactggcaa

SEQ ID NO: 72740 - DNA, 25 bp, Saccharomyces pastorianus
cactccctcgatattgcgtttcgta

SEQ ID NO: 72741 - DNA, 25 bp, Saccharomyces pastorianus
ttgccacctagtccggtttctataa

SEQ ID NO: 72742 - DNA, 25 bp, Saccharomyces pastorianus
gttttggcgaggaatcaagtttgca

SEQ ID NO: 72743 - DNA, 25 bp, Saccharomyces pastorianus
attcatcattagacccatccaatac

SEQ ID NO: 72744 - DNA, 25 bp, Saccharomyces pastorianus
accactggcaacatttcttggcgaa

SEQ ID NO: 72745 - DNA, 25 bp, Saccharomyces pastorianus
cacagcgatgagattccttacgaga

SEQ ID NO: 72746 - DNA, 25 bp, Saccharomyces pastorianus
attccatgacgttgccaagcgacta

SEQ ID NO: 72747 - DNA, 25 bp, Saccharomyces pastorianus
caaggttactgtcgtcgggcaaacg

SEQ ID NO: 72748 - DNA, 25 bp, Saccharomyces pastorianus
ggcgcaacgggatgccaaggttact

SEQ ID NO: 72749 - DNA, 25 bp, Saccharomyces pastorianus
ggtatcattgcttcacgccaaagac

SEQ ID NO: 72750 - DNA, 25 bp, Saccharomyces pastorianus
aatgaatgcttggttctcgacgcta

SEQ ID NO: 72751 - DNA, 25 bp, Saccharomyces pastorianus
gttctcgacgctacggacaggtata

SEQ ID NO: 72752 - DNA, 25 bp, Saccharomyces pastorianus
gtaagcgtatttctcacagcgatga

SEQ ID NO: 72753 - DNA, 25 bp, Saccharomyces pastorianus
gtactggtggaattggacgcgccat

SEQ ID NO: 72754 - DNA, 25 bp, Saccharomyces pastorianus
aaattacagtgcctatgccacacac

SEQ ID NO: 72755 - DNA, 25 bp, Saccharomyces pastorianus
tgccaaaagtattcatcgccgggtt

SEQ ID NO: 72756 - DNA, 25 bp, Saccharomyces pastorianus
aatgttgtcgagaagttcatggaaa

SEQ ID NO: 72757 - DNA, 25 bp, Saccharomyces pastorianus
aagggagatgccattttgcccacgc

SEQ ID NO: 72758 - DNA, 25 bp, Saccharomyces pastorianus
gcccacgcctggtttgacgaaaaat

SEQ ID NO: 72759 - DNA, 25 bp, Saccharomyces pastorianus
gttcagtaacaagggagatgccatt

SEQ ID NO: 72760 - DNA, 25 bp, Saccharomyces pastorianus
atctcgcagcgggacaatgttcagt

SEQ ID NO: 72761 - DNA, 25 bp, Saccharomyces pastorianus
gatctgtactttgattgtaagccct

SEQ ID NO: 72762 - DNA, 25 bp, Saccharomyces pastorianus
gtactttgattgtaagccctgccat

SEQ ID NO: 72763 - DNA, 25 bp, Saccharomyces pastorianus
attgtaagccctgccattgaatctc

SEQ ID NO: 72764 - DNA, 25 bp, Saccharomyces pastorianus
aactgttggtggaaaaagctctgca

SEQ ID NO: 72765 - DNA, 25 bp, Saccharomyces pastorianus
gcagcgggacaatgttcagtaacaa

SEQ ID NO: 72766 - DNA, 25 bp, Saccharomyces pastorianus
tgccattgaatctcgcagcgggaca

SEQ ID NO: 72767 - DNA, 25 bp, Saccharomyces pastorianus
tttgacaataggaagccatgcaggc

SEQ ID NO: 72768 - DNA, 25 bp, Saccharomyces pastorianus
ttactttgacaataggaagccatgc

SEQ ID NO: 72769 - DNA, 25 bp, Saccharomyces pastorianus
atgccatctctgtcaaaattacttt

SEQ ID NO: 72770 - DNA, 25 bp, Saccharomyces pastorianus
aagatgccatctctgtcaaaattac

SEQ ID NO: 72771 - DNA, 25 bp, Saccharomyces pastorianus
gagcaatgtgcccagaccccaagat

SEQ ID NO: 72772 - DNA, 25 bp, Saccharomyces pastorianus
gccatctctgtcaaaattactttga

SEQ ID NO: 72773 - DNA, 25 bp, Saccharomyces pastorianus
gatgccatctctgtcaaaattactt

SEQ ID NO: 72774 - DNA, 25 bp, Saccharomyces pastorianus
aatgtgcccagaccccaagatgcca

SEQ ID NO: 72775 - DNA, 25 bp, Saccharomyces pastorianus
ccaagatgccatctctgtcaaaatt

SEQ ID NO: 72776 - DNA, 25 bp, Saccharomyces pastorianus
accccaagatgccatctctgtcaaa

SEQ ID NO: 72777 - DNA, 25 bp, Saccharomyces pastorianus
agcaatgtgcccagaccccaagatg

SEQ ID NO: 72778 - DNA, 25 bp, Saccharomyces pastorianus
gttgacaccagttttgattgcacct

SEQ ID NO: 72779 - DNA, 25 bp, Saccharomyces pastorianus
gtggctaacagcagctctatgcata

SEQ ID NO: 72780 - DNA, 25 bp, Saccharomyces pastorianus
gttccatatcttgattggcgccacg

SEQ ID NO: 72781 - DNA, 25 bp, Saccharomyces pastorianus
aaagcccgcagaacattttttgaga

SEQ ID NO: 72782 - DNA, 25 bp, Saccharomyces pastorianus
tgacgctaacctaaatctgaacctt

SEQ ID NO: 72783 - DNA, 25 bp, Saccharomyces pastorianus
gatatttttctaatcgcgcccttgt

SEQ ID NO: 72784 - DNA, 25 bp, Saccharomyces pastorianus
aacgcttctaaaccgatggacgcca

SEQ ID NO: 72785 - DNA, 25 bp, Saccharomyces pastorianus
aaattctatcgttcacatgcctggt

SEQ ID NO: 72786 - DNA, 25 bp, Saccharomyces pastorianus
gtgtgccctttacagagtttttcca

SEQ ID NO: 72787 - DNA, 25 bp, Saccharomyces pastorianus
taaggaggttattgcaccacccacg

SEQ ID NO: 72788 - DNA, 25 bp, Saccharomyces pastorianus
tttatttcaatcctaagcccaacgc

SEQ ID NO: 72789 - DNA, 25 bp, Saccharomyces pastorianus
gactcgaaacgaaacggcctcggat

SEQ ID NO: 72790 - DNA, 25 bp, Saccharomyces pastorianus
ggcgactcgaaacgaaacggcctcg

SEQ ID NO: 72791 - DNA, 25 bp, Saccharomyces pastorianus
caagaagaacaggagggtattaaca

SEQ ID NO: 72792 - DNA, 25 bp, Saccharomyces pastorianus
aaacgaaacggcctcggatgagagc

SEQ ID NO: 72793 - DNA, 25 bp, Saccharomyces pastorianus
taagaaaagccagggatgaagagac

SEQ ID NO: 72794 - DNA, 25 bp, Saccharomyces pastorianus
acagacattgtggagattgtgagga

SEQ ID NO: 72795 - DNA, 25 bp, Saccharomyces pastorianus
gagacgggagacaaagagcaagaac

SEQ ID NO: 72796 - DNA, 25 bp, Saccharomyces pastorianus
taacaacgggaacgacgacgaagag

SEQ ID NO: 72797 - DNA, 25 bp, Saccharomyces pastorianus
agaatggacagacattgtggagatt

SEQ ID NO: 72798 - DNA, 25 bp, Saccharomyces pastorianus
ctcgaaacgaaacggcctcggatga

SEQ ID NO: 72799 - DNA, 25 bp, Saccharomyces pastorianus
aacggcctcggatgagagcgatgat

SEQ ID NO: 72800 - DNA, 25 bp, Saccharomyces pastorianus
taagttacaggccagaatctcagat

SEQ ID NO: 72801 - DNA, 25 bp, Saccharomyces pastorianus
ggaggctttgcgttctaagttacag

SEQ ID NO: 72802 - DNA, 25 bp, Saccharomyces pastorianus
gctggtagaacgaaaggcccatcca

SEQ ID NO: 72803 - DNA, 25 bp, Saccharomyces pastorianus
gaaccacgtcagacctacagagatt

SEQ ID NO: 72804 - DNA, 25 bp, Saccharomyces pastorianus
aaatggatctgattccgatgtggac

SEQ ID NO: 72805 - DNA, 25 bp, Saccharomyces pastorianus
ggaaagcgcctggttctagagaagc

SEQ ID NO: 72806 - DNA, 25 bp, Saccharomyces pastorianus
aatgcagatggtgtgatgtttcaga

SEQ ID NO: 72807 - DNA, 25 bp, Saccharomyces pastorianus
tttgatgacggtgcgagaaccacgt

SEQ ID NO: 72808 - DNA, 25 bp, Saccharomyces pastorianus
aaggccaaaagggactcagagatta

SEQ ID NO: 72809 - DNA, 25 bp, Saccharomyces pastorianus
ggcccatccaagaacgacgctaaat

SEQ ID NO: 72810 - DNA, 25 bp, Saccharomyces pastorianus
gatggtcctataatggcagcattag

SEQ ID NO: 72811 - DNA, 25 bp, Saccharomyces pastorianus
aatctctttacctcaaaatgcccaa

SEQ ID NO: 72812 - DNA, 25 bp, Saccharomyces pastorianus
accgatttgtggtttcacgagagtt

SEQ ID NO: 72813 - DNA, 25 bp, Saccharomyces pastorianus
gatcgggtccttagatacattaata

SEQ ID NO: 72814 - DNA, 25 bp, Saccharomyces pastorianus
tcaaaatgcccaacctgttatcgcc

SEQ ID NO: 72815 - DNA, 25 bp, Saccharomyces pastorianus
agagcatttgtttctgattttaaaa

SEQ ID NO: 72816 - DNA, 25 bp, Saccharomyces pastorianus
attcccgaattcaagatcgggtcct

SEQ ID NO: 72817 - DNA, 25 bp, Saccharomyces pastorianus
tatcgcccctggttccaaaaccgat

SEQ ID NO: 72818 - DNA, 25 bp, Saccharomyces pastorianus
actgcgttatatactgcaaacgatt

SEQ ID NO: 72819 - DNA, 25 bp, Saccharomyces pastorianus
gtttcacgagagtttaattggcggt

SEQ ID NO: 72820 - DNA, 25 bp, Saccharomyces pastorianus
taattggcggtagagcatttgtttc

SEQ ID NO: 72821 - DNA, 25 bp, Saccharomyces pastorianus
ttacctcaaaatgcccaacctgtta

SEQ ID NO: 72822 - DNA, 25 bp, Saccharomyces pastorianus
gcttactataacatggcttcctcta

SEQ ID NO: 72823 - DNA, 25 bp, Saccharomyces pastorianus
gtagtcactcccagaatatttcgta

SEQ ID NO: 72824 - DNA, 25 bp, Saccharomyces pastorianus
ggtgcttccaaactgcttttttaca

SEQ ID NO: 72825 - DNA, 25 bp, Saccharomyces pastorianus
tatttaccccggctcagcgtttgat

SEQ ID NO: 72826 - DNA, 25 bp, Saccharomyces pastorianus
acagcagcaatacccgcattgtagc

SEQ ID NO: 72827 - DNA, 25 bp, Saccharomyces pastorianus
gagttactcgcgtcatttaatatag

SEQ ID NO: 72828 - DNA, 25 bp, Saccharomyces pastorianus
gtcattgtcgagtttagctcccaga

SEQ ID NO: 72829 - DNA, 25 bp, Saccharomyces pastorianus
ttatctcgggtttatctcacagcag

SEQ ID NO: 72830 - DNA, 25 bp, Saccharomyces pastorianus
acaactgctctctcggtgcaaataa

SEQ ID NO: 72831 - DNA, 25 bp, Saccharomyces pastorianus
gtactatggttttggcttgccgatc

SEQ ID NO: 72832 - DNA, 25 bp, Saccharomyces pastorianus
aaggaagccccaaccatgtcattgt

SEQ ID NO: 72833 - DNA, 25 bp, Saccharomyces pastorianus
atgagacattcatcacagaggtcaa

SEQ ID NO: 72834 - DNA, 25 bp, Saccharomyces pastorianus
gaagtgatcaagatatgtcaaccgg

SEQ ID NO: 72835 - DNA, 25 bp, Saccharomyces pastorianus
tcatcacagaggtcaaagaaacttt

SEQ ID NO: 72836 - DNA, 25 bp, Saccharomyces pastorianus
gagacattcatcacagaggtcaaag

SEQ ID NO: 72837 - DNA, 25 bp, Saccharomyces pastorianus
tcaagatatgtcaaccgggtgtaga

SEQ ID NO: 72838 - DNA, 25 bp, Saccharomyces pastorianus
tatgtcaaccgggtgtagattacag

SEQ ID NO: 72839 - DNA, 25 bp, Saccharomyces pastorianus
accgggtgtagattacagacttaat

SEQ ID NO: 72840 - DNA, 25 bp, Saccharomyces pastorianus
gacattcatcacagaggtcaaagaa

SEQ ID NO: 72841 - DNA, 25 bp, Saccharomyces pastorianus
ttggatttgaaggatgagacattca

SEQ ID NO: 72842 - DNA, 25 bp, Saccharomyces pastorianus
gatcaagatatgtcaaccgggtgta

SEQ ID NO: 72843 - DNA, 25 bp, Saccharomyces pastorianus
gtcaaccgggtgtagattacagact

SEQ ID NO: 72844 - DNA, 25 bp, Saccharomyces pastorianus
gtaaataccgtttcgcaacaagagc

SEQ ID NO: 72845 - DNA, 25 bp, Saccharomyces pastorianus
actctcaaggatacgcttacggtca

SEQ ID NO: 72846 - DNA, 25 bp, Saccharomyces pastorianus
aactactacactcaacagcaacaac

SEQ ID NO: 72847 - DNA, 25 bp, Saccharomyces pastorianus
ggtcaacaataccaacagcttgctc

SEQ ID NO: 72848 - DNA, 25 bp, Saccharomyces pastorianus
tacccaggtatgtttgactctcaag

SEQ ID NO: 72849 - DNA, 25 bp, Saccharomyces pastorianus
caattccctggttattcttacccag

SEQ ID NO: 72850 - DNA, 25 bp, Saccharomyces pastorianus
gttgctgcccaacaatactatatgt

SEQ ID NO: 72851 - DNA, 25 bp, Saccharomyces pastorianus
gccgctactgctaacttgactagtg

SEQ ID NO: 72852 - DNA, 25 bp, Saccharomyces pastorianus
caaaccaccggtaatgctaatcaat

SEQ ID NO: 72853 - DNA, 25 bp, Saccharomyces pastorianus
aactacaacaacaatacctatccca

SEQ ID NO: 72854 - DNA, 25 bp, Saccharomyces pastorianus
ggttatggtcagactggcgccaaca

SEQ ID NO: 72855 - DNA, 25 bp, Saccharomyces pastorianus
aggtcctcaggacgacgtagaattt

SEQ ID NO: 72856 - DNA, 25 bp, Saccharomyces pastorianus
cgtgcgttatccttgctgcaaagaa

SEQ ID NO: 72857 - DNA, 25 bp, Saccharomyces pastorianus
tcactcgtacgccttagatagatat

SEQ ID NO: 72858 - DNA, 25 bp, Saccharomyces pastorianus
ggctaactcggccattcaaagtgaa

SEQ ID NO: 72859 - DNA, 25 bp, Saccharomyces pastorianus
aagcagatgtgtcaacggttaagca

SEQ ID NO: 72860 - DNA, 25 bp, Saccharomyces pastorianus
ggttaagcaaactcactcgtacgcc

SEQ ID NO: 72861 - DNA, 25 bp, Saccharomyces pastorianus
aattcgaaaataccagcgttctaca

SEQ ID NO: 72862 - DNA, 25 bp, Saccharomyces pastorianus
tcatgcaggaaatctcgaaacggaa

SEQ ID NO: 72863 - DNA, 25 bp, Saccharomyces pastorianus
gtaggagaccaacaatcgattaatg

SEQ ID NO: 72864 - DNA, 25 bp, Saccharomyces pastorianus
taatgatcgtgcgttatccttgctg

SEQ ID NO: 72865 - DNA, 25 bp, Saccharomyces pastorianus
gtcctagcgaattagctctctacga

SEQ ID NO: 72866 - DNA, 25 bp, Saccharomyces pastorianus
gttgctgccaattttaaaccatctt

SEQ ID NO: 72867 - DNA, 25 bp, Saccharomyces pastorianus
ttgaaggcctaccagcatcttccaa

SEQ ID NO: 72868 - DNA, 25 bp, Saccharomyces pastorianus
caattttaaaccatctttcgtcagg

SEQ ID NO: 72869 - DNA, 25 bp, Saccharomyces pastorianus
ctattgaaggcctaccagcatcttc

SEQ ID NO: 72870 - DNA, 25 bp, Saccharomyces pastorianus
tgaacgaagatgacaggttgctgcc

SEQ ID NO: 72871 - DNA, 25 bp, Saccharomyces pastorianus
gaaggcctaccagcatcttccaaga

SEQ ID NO: 72872 - DNA, 25 bp, Saccharomyces pastorianus
gaagatgacaggttgctgccaattt

SEQ ID NO: 72873 - DNA, 25 bp, Saccharomyces pastorianus
gctgccaattttaaaccatctttcg

SEQ ID NO: 72874 - DNA, 25 bp, Saccharomyces pastorianus
cagcatcttccaagactgaacgaag

SEQ ID NO: 72875 - DNA, 25 bp, Saccharomyces pastorianus
tgacaggttgctgccaattttaaac

SEQ ID NO: 72876 - DNA, 25 bp, Saccharomyces pastorianus
ctaccagcatcttccaagactgaac

SEQ ID NO: 72877 - DNA, 25 bp, Saccharomyces pastorianus
gactggagccacgacagactatctg

SEQ ID NO: 72878 - DNA, 25 bp, Saccharomyces pastorianus
agaactgcgttccatgaaactcacc

SEQ ID NO: 72879 - DNA, 25 bp, Saccharomyces pastorianus
tttagacacaactacggcctcgaag

SEQ ID NO: 72880 - DNA, 25 bp, Saccharomyces pastorianus
gcggcgattatcacggatgcccatt

SEQ ID NO: 72881 - DNA, 25 bp, Saccharomyces pastorianus
ggagatcagctcgaattatccattg

SEQ ID NO: 72882 - DNA, 25 bp, Saccharomyces pastorianus
gagtaccgctacagttttagacaca

SEQ ID NO: 72883 - DNA, 25 bp, Saccharomyces pastorianus
ggttgagcgccgacgaagctttgaa

SEQ ID NO: 72884 - DNA, 25 bp, Saccharomyces pastorianus
ataagtgtcctagattcgtgccaaa

SEQ ID NO: 72885 - DNA, 25 bp, Saccharomyces pastorianus
ctttcgtcaggatacacaattgcag

SEQ ID NO: 72886 - DNA, 25 bp, Saccharomyces pastorianus
ggactgtcacaccattctatctaag

SEQ ID NO: 72887 - DNA, 25 bp, Saccharomyces pastorianus
gatgcccattccgtgactggagcca

SEQ ID NO: 72888 - DNA, 25 bp, Saccharomyces pastorianus
gaacagagccttttaacggtgatga

SEQ ID NO: 72889 - DNA, 25 bp, Saccharomyces pastorianus
aaatacattctctcactaggcacct

SEQ ID NO: 72890 - DNA, 25 bp, Saccharomyces pastorianus
taggcacctctggaaacactctgtt

SEQ ID NO: 72891 - DNA, 25 bp, Saccharomyces pastorianus
gagcccagaaggaaccgcgtcaggt

SEQ ID NO: 72892 - DNA, 25 bp, Saccharomyces pastorianus
gagcagaaattgtactttcaatcag

SEQ ID NO: 72893 - DNA, 25 bp, Saccharomyces pastorianus
ggtttgcgcggaagatagtttgtaa

SEQ ID NO: 72894 - DNA, 25 bp, Saccharomyces pastorianus
atgtgtcttggtatgcttcttagta

SEQ ID NO: 72895 - DNA, 25 bp, Saccharomyces pastorianus
gacattgtgatatgcttggtgggtt

SEQ ID NO: 72896 - DNA, 25 bp, Saccharomyces pastorianus
cactctgttgtttatttaggtttat

SEQ ID NO: 72897 - DNA, 25 bp, Saccharomyces pastorianus
gtatgcttcttagtagacattgtga

SEQ ID NO: 72898 - DNA, 25 bp, Saccharomyces pastorianus
ggtttatatactttattcagactag

SEQ ID NO: 72899 - DNA, 25 bp, Saccharomyces pastorianus
tgcaaagggcgtcgttgtaaaattt

SEQ ID NO: 72900 - DNA, 25 bp, Saccharomyces pastorianus
gcttttctatctcaatcgatcacca

SEQ ID NO: 72901 - DNA, 25 bp, Saccharomyces pastorianus
aggtaagtcttccatcgttcatcgt

SEQ ID NO: 72902 - DNA, 25 bp, Saccharomyces pastorianus
acgagatcttgtccgagcctaatag

SEQ ID NO: 72903 - DNA, 25 bp, Saccharomyces pastorianus
gacttggtcatttatttactaggga

SEQ ID NO: 72904 - DNA, 25 bp, Saccharomyces pastorianus
ggtgactcgtctgtaggtaagtctt

SEQ ID NO: 72905 - DNA, 25 bp, Saccharomyces pastorianus
ctatagaaacgccaatgcagctttg

SEQ ID NO: 72906 - DNA, 25 bp, Saccharomyces pastorianus
tttgttaaggacacgttcgacgaat

SEQ ID NO: 72907 - DNA, 25 bp, Saccharomyces pastorianus
aatcgatcaccattcatccaaatga

SEQ ID NO: 72908 - DNA, 25 bp, Saccharomyces pastorianus
atgtctagggacacctgatgctgaa

SEQ ID NO: 72909 - DNA, 25 bp, Saccharomyces pastorianus
gcagctttggtggtttacgatatca

SEQ ID NO: 72910 - DNA, 25 bp, Saccharomyces pastorianus
gtaaattagcccaacaatccaggag

SEQ ID NO: 72911 - DNA, 25 bp, Saccharomyces pastorianus
ggacgcgccaaatctcaacgcatta

SEQ ID NO: 72912 - DNA, 25 bp, Saccharomyces pastorianus
attatgcggctgctgtaacaggtta

SEQ ID NO: 72913 - DNA, 25 bp, Saccharomyces pastorianus
cctttgcaagcagaattccggaata

SEQ ID NO: 72914 - DNA, 25 bp, Saccharomyces pastorianus
tcgtggaacacaactatgcaggata

SEQ ID NO: 72915 - DNA, 25 bp, Saccharomyces pastorianus
atgaaaacccctcttgccaataaag

SEQ ID NO: 72916 - DNA, 25 bp, Saccharomyces pastorianus
aatccaggagccagatccaagccgg

SEQ ID NO: 72917 - DNA, 25 bp, Saccharomyces pastorianus
gagactccagaaagatcctatcgca

SEQ ID NO: 72918 - DNA, 25 bp, Saccharomyces pastorianus
gaatacggcatccactatcatcaat

SEQ ID NO: 72919 - DNA, 25 bp, Saccharomyces pastorianus
agaacctttgatacgagactccaga

SEQ ID NO: 72920 - DNA, 25 bp, Saccharomyces pastorianus
gatccaagccggtccaaagacacaa

SEQ ID NO: 72921 - DNA, 25 bp, Saccharomyces pastorianus
gatttcatccagttagtatacacca

SEQ ID NO: 72922 - DNA, 25 bp, Saccharomyces pastorianus
gcctaatggtgagttgattgctgaa

SEQ ID NO: 72923 - DNA, 25 bp, Saccharomyces pastorianus
aatggaaatgccgtttggtgagatt

SEQ ID NO: 72924 - DNA, 25 bp, Saccharomyces pastorianus
agatccaattcatttgacacatttg

SEQ ID NO: 72925 - DNA, 25 bp, Saccharomyces pastorianus
gtgtctctacacaatcagcagcggg

SEQ ID NO: 72926 - DNA, 25 bp, Saccharomyces pastorianus
gatgcttaacgagactaagttgcca

SEQ ID NO: 72927 - DNA, 25 bp, Saccharomyces pastorianus
tagatcaccttaatccggagtacgg

SEQ ID NO: 72928 - DNA, 25 bp, Saccharomyces pastorianus
gcagcgggcgatttcattaaggcat

SEQ ID NO: 72929 - DNA, 25 bp, Saccharomyces pastorianus
gagcaatgaactcgcttcaggaata

SEQ ID NO: 72930 - DNA, 25 bp, Saccharomyces pastorianus
tggtgagattgaacctctaggcttt

SEQ ID NO: 72931 - DNA, 25 bp, Saccharomyces pastorianus
gttacattgagcactaactcgagca

SEQ ID NO: 72932 - DNA, 25 bp, Saccharomyces pastorianus
atttgcaagcacacagttcctgaga

SEQ ID NO: 72933 - DNA, 25 bp, Saccharomyces pastorianus
ggatacacttggaatacggcattga

SEQ ID NO: 72934 - DNA, 25 bp, Saccharomyces pastorianus
gaagggcgcccatgctgttagctaa

SEQ ID NO: 72935 - DNA, 25 bp, Saccharomyces pastorianus
ggtgcccggcttcgttatttgcaag

SEQ ID NO: 72936 - DNA, 25 bp, Saccharomyces pastorianus
gagcatttcttctaacgtagccgaa

SEQ ID NO: 72937 - DNA, 25 bp, Saccharomyces pastorianus
agagactggcatccgaccttctgga

SEQ ID NO: 72938 - DNA, 25 bp, Saccharomyces pastorianus
aaggtcttctgtgaatcctgctacg

SEQ ID NO: 72939 - DNA, 25 bp, Saccharomyces pastorianus
ttctggactcactattgtccgggtg

SEQ ID NO: 72940 - DNA, 25 bp, Saccharomyces pastorianus
agctggacgttagagtatctccttt

SEQ ID NO: 72941 - DNA, 25 bp, Saccharomyces pastorianus
gatagacgaccttcattgccaagaa

SEQ ID NO: 72942 - DNA, 25 bp, Saccharomyces pastorianus
atctgccattggtagactaaggtct

SEQ ID NO: 72943 - DNA, 25 bp, Saccharomyces pastorianus
tgtcgacattattggatccgtcccc

SEQ ID NO: 72944 - DNA, 25 bp, Saccharomyces pastorianus
cttctcagatcctactataccggag

SEQ ID NO: 72945 - DNA, 25 bp, Saccharomyces pastorianus
tagagttgacaaggctacccacact

SEQ ID NO: 72946 - DNA, 25 bp, Saccharomyces pastorianus
ggttagcgggtccatcaaaccactg

SEQ ID NO: 72947 - DNA, 25 bp, Saccharomyces pastorianus
gctgacttggaagctgcacaacgaa

SEQ ID NO: 72948 - DNA, 25 bp, Saccharomyces pastorianus
cgagccaaggcccattagtttgaaa

SEQ ID NO: 72949 - DNA, 25 bp, Saccharomyces pastorianus
aacaatgccagctctaactctaaca

SEQ ID NO: 72950 - DNA, 25 bp, Saccharomyces pastorianus
aatattctttggaacccagcgagcc

SEQ ID NO: 72951 - DNA, 25 bp, Saccharomyces pastorianus
ttgcggccttttcctgaaattgcat

SEQ ID NO: 72952 - DNA, 25 bp, Saccharomyces pastorianus
gagcccagtgggaagaactacctct

SEQ ID NO: 72953 - DNA, 25 bp, Saccharomyces pastorianus
gtggaggctcgctgcccagtaataa

SEQ ID NO: 72954 - DNA, 25 bp, Saccharomyces pastorianus
ggaacattgtccagttttgcacttt

SEQ ID NO: 72955 - DNA, 25 bp, Saccharomyces pastorianus
tgcctcatcgtgacggcggtttgta

SEQ ID NO: 72956 - DNA, 25 bp, Saccharomyces pastorianus
aattccatgccattttcgtcagcaa

SEQ ID NO: 72957 - DNA, 25 bp, Saccharomyces pastorianus
attcacacccatatcttcatatacg

SEQ ID NO: 72958 - DNA, 25 bp, Saccharomyces pastorianus
ttatcgttgtccaccagcatggcat

SEQ ID NO: 72959 - DNA, 25 bp, Saccharomyces pastorianus
actggtgtccaaatcttcgaattgc

SEQ ID NO: 72960 - DNA, 25 bp, Saccharomyces pastorianus
ttgcactttgcttcaattccatgcc

SEQ ID NO: 72961 - DNA, 25 bp, Saccharomyces pastorianus
ctttgtgcaagtttgtcttcctttt

SEQ ID NO: 72962 - DNA, 25 bp, Saccharomyces pastorianus
gcaactttgctcattagttcatcca

SEQ ID NO: 72963 - DNA, 25 bp, Saccharomyces pastorianus
ggtttgtacccttgatgcgaccgaa

SEQ ID NO: 72964 - DNA, 25 bp, Saccharomyces pastorianus
ttcgtcgtcaacattaacctctttc

SEQ ID NO: 72965 - DNA, 25 bp, Saccharomyces pastorianus
cgctcgtttttcttccttatagcat

SEQ ID NO: 72966 - DNA, 25 bp, Saccharomyces pastorianus
atggatgcggacacctgtctcattg

SEQ ID NO: 72967 - DNA, 25 bp, Saccharomyces pastorianus
tgttggtttcttgtttctcctcctt

SEQ ID NO: 72968 - DNA, 25 bp, Saccharomyces pastorianus
gatactcgtatccaggtcttcgaac

SEQ ID NO: 72969 - DNA, 25 bp, Saccharomyces pastorianus
tttcagtagctgtaaccgctcgttt

SEQ ID NO: 72970 - DNA, 25 bp, Saccharomyces pastorianus
ggagatctcctcattttcgttgaga

SEQ ID NO: 72971 - DNA, 25 bp, Saccharomyces pastorianus
gcggtttgcactcttgatgcgacag

SEQ ID NO: 72972 - DNA, 25 bp, Saccharomyces pastorianus
tgtctcattgtgacggcggtttgca

SEQ ID NO: 72973 - DNA, 25 bp, Saccharomyces pastorianus
atagcatccgaattgacgcccatat

SEQ ID NO: 72974 - DNA, 25 bp, Saccharomyces pastorianus
gacgccttatttgcttgcttttgca

SEQ ID NO: 72975 - DNA, 25 bp, Saccharomyces pastorianus
gaatccactctggatgccagtttca

SEQ ID NO: 72976 - DNA, 25 bp, Saccharomyces pastorianus
ttccccactgatctaattctcaaag

SEQ ID NO: 72977 - DNA, 25 bp, Saccharomyces pastorianus
ggttcctcgcttatttctaattcta

SEQ ID NO: 72978 - DNA, 25 bp, Saccharomyces pastorianus
atggccgctcacagagttcaagcaa

SEQ ID NO: 72979 - DNA, 25 bp, Saccharomyces pastorianus
gaggttctgcttcaagatgaccgtt

SEQ ID NO: 72980 - DNA, 25 bp, Saccharomyces pastorianus
ttcatgttcgacaccgatctcatag

SEQ ID NO: 72981 - DNA, 25 bp, Saccharomyces pastorianus
ttaaagatgactcccagatccagcg

SEQ ID NO: 72982 - DNA, 25 bp, Saccharomyces pastorianus
gcgactactgtatgccttggagaac

SEQ ID NO: 72983 - DNA, 25 bp, Saccharomyces pastorianus
caacgggcggtgttggcttgaacaa

SEQ ID NO: 72984 - DNA, 25 bp, Saccharomyces pastorianus
gcattatccgccgtgtttaaagatg

SEQ ID NO: 72985 - DNA, 25 bp, Saccharomyces pastorianus
acgaacaactgtcttccaagctggg

SEQ ID NO: 72986 - DNA, 25 bp, Saccharomyces pastorianus
agaatacgaccagttgtcccacaac

SEQ ID NO: 72987 - DNA, 25 bp, Saccharomyces pastorianus
cggacttgtgcgttgtcgtttcttt

SEQ ID NO: 72988 - DNA, 25 bp, Saccharomyces pastorianus
cgtactcgaaaagcgcactgccatg

SEQ ID NO: 72989 - DNA, 25 bp, Saccharomyces pastorianus
gtggtgacacacttgtaacccgcta

SEQ ID NO: 72990 - DNA, 25 bp, Saccharomyces pastorianus
tctaacaaagactggccgggcgtat

SEQ ID NO: 72991 - DNA, 25 bp, Saccharomyces pastorianus
actgccatgattcgccggacttgtg

SEQ ID NO: 72992 - DNA, 25 bp, Saccharomyces pastorianus
ccggcaccagccgtatagtaggttt

SEQ ID NO: 72993 - DNA, 25 bp, Saccharomyces pastorianus
acgggcgtgtcaccaagatggccta

SEQ ID NO: 72994 - DNA, 25 bp, Saccharomyces pastorianus
atggcgctgcgtttgcttcacgggc

SEQ ID NO: 72995 - DNA, 25 bp, Saccharomyces pastorianus
ggcgtatttcttttcggcgtcattg

SEQ ID NO: 72996 - DNA, 25 bp, Saccharomyces pastorianus
atagtaggtttctgtttctcttcgc

SEQ ID NO: 72997 - DNA, 25 bp, Saccharomyces pastorianus
tggacttctctcttgctttttctaa

SEQ ID NO: 72998 - DNA, 25 bp, Saccharomyces pastorianus
catctccgaacaagcctttgcaaag

SEQ ID NO: 72999 - DNA, 25 bp, Saccharomyces pastorianus
gtcttctacactgtcaaccgataca

SEQ ID NO: 73000 - DNA, 25 bp, Saccharomyces pastorianus
gatggaatcccaactttcagaaacg

SEQ ID NO: 73001 - DNA, 25 bp, Saccharomyces pastorianus
aatcgtcctcgtctggtgtgtttaa

SEQ ID NO: 73002 - DNA, 25 bp, Saccharomyces pastorianus
aactgaactctaaatcgtcctcgtc

SEQ ID NO: 73003 - DNA, 25 bp, Saccharomyces pastorianus
agtttcaatattcctgctccacagg

SEQ ID NO: 73004 - DNA, 25 bp, Saccharomyces pastorianus
gtgtttaatccttttacttcgccat

SEQ ID NO: 73005 - DNA, 25 bp, Saccharomyces pastorianus
gaacgagagcctttgagcaacgaaa

SEQ ID NO: 73006 - DNA, 25 bp, Saccharomyces pastorianus
gaagcaaggtgtcgatagccctccc

SEQ ID NO: 73007 - DNA, 25 bp, Saccharomyces pastorianus
gactcatttggcacccagtttcaat

SEQ ID NO: 73008 - DNA, 25 bp, Saccharomyces pastorianus
aattctccatttaatccactgctgt

SEQ ID NO: 73009 - DNA, 25 bp, Saccharomyces pastorianus
caatcgttaactcttcaactaccgg

SEQ ID NO: 73010 - DNA, 25 bp, Saccharomyces pastorianus
caatgtcttcaacctttactttgcc

SEQ ID NO: 73011 - DNA, 25 bp, Saccharomyces pastorianus
tagctcttccacatcaatcgttaac

SEQ ID NO: 73012 - DNA, 25 bp, Saccharomyces pastorianus
taacgattagttcctctggatcatc

SEQ ID NO: 73013 - DNA, 25 bp, Saccharomyces pastorianus
atctcttcctcattcactactattt

SEQ ID NO: 73014 - DNA, 25 bp, Saccharomyces pastorianus
atccaccgaaacttctcgtagtcaa

SEQ ID NO: 73015 - DNA, 25 bp, Saccharomyces pastorianus
gtcattcaaatctgttccatctacc

SEQ ID NO: 73016 - DNA, 25 bp, Saccharomyces pastorianus
accggttcttcgcaaactactgatt

SEQ ID NO: 73017 - DNA, 25 bp, Saccharomyces pastorianus
aaaatactccagcttctgcttcaat

SEQ ID NO: 73018 - DNA, 25 bp, Saccharomyces pastorianus
actactatttccactggtgctacta

SEQ ID NO: 73019 - DNA, 25 bp, Saccharomyces pastorianus
gtagcacttctatcactagttccga

SEQ ID NO: 73020 - DNA, 25 bp, Saccharomyces pastorianus
agacactcagacctctactgttaca

SEQ ID NO: 73021 - DNA, 25 bp, Saccharomyces pastorianus
gacttcgacgggtatgtctattcct

SEQ ID NO: 73022 - DNA, 25 bp, Saccharomyces pastorianus
acaagtgtcagctcttcaattgcca

SEQ ID NO: 73023 - DNA, 25 bp, Saccharomyces pastorianus
tgttagtgatgacttcgacgggtat

SEQ ID NO: 73024 - DNA, 25 bp, Saccharomyces pastorianus
attcctttgaagatgacttgtccca

SEQ ID NO: 73025 - DNA, 25 bp, Saccharomyces pastorianus
gacgggtatgtctattcctttgaag

SEQ ID NO: 73026 - DNA, 25 bp, Saccharomyces pastorianus
tgaagatgacttgtcccaggccaac

SEQ ID NO: 73027 - DNA, 25 bp, Saccharomyces pastorianus
tcttcaattgccacatcgtctgatg

SEQ ID NO: 73028 - DNA, 25 bp, Saccharomyces pastorianus
ggaataatcaccaccacaacagaac

SEQ ID NO: 73029 - DNA, 25 bp, Saccharomyces pastorianus
tactgttacaggtcccaatggttta

SEQ ID NO: 73030 - DNA, 25 bp, Saccharomyces pastorianus
cccaaactataccactacaggaata

SEQ ID NO: 73031 - DNA, 25 bp, Saccharomyces pastorianus
agaagatactcagtggctgctggac

SEQ ID NO: 73032 - DNA, 25 bp, Saccharomyces pastorianus
aagagaggacactacgcgctaatat

SEQ ID NO: 73033 - DNA, 25 bp, Saccharomyces pastorianus
gttcggagcagacccaaacttaatt

SEQ ID NO: 73034 - DNA, 25 bp, Saccharomyces pastorianus
aaagtcttctctgtactcaagtgcc

SEQ ID NO: 73035 - DNA, 25 bp, Saccharomyces pastorianus
atattatcctactgtgagctccaag

SEQ ID NO: 73036 - DNA, 25 bp, Saccharomyces pastorianus
gttacgggtgcttgttttctatggc

SEQ ID NO: 73037 - DNA, 25 bp, Saccharomyces pastorianus
gatgcggtagtccttgaacaaaatt

SEQ ID NO: 73038 - DNA, 25 bp, Saccharomyces pastorianus
gagctccaaggagactttccagaat

SEQ ID NO: 73039 - DNA, 25 bp, Saccharomyces pastorianus
gcacctcgcttactaaacttttcaa

SEQ ID NO: 73040 - DNA, 25 bp, Saccharomyces pastorianus
gttcatttggcgcaccattcagaat

SEQ ID NO: 73041 - DNA, 25 bp, Saccharomyces pastorianus
gctatgggtggctcgattattttaa

SEQ ID NO: 73042 - DNA, 25 bp, Saccharomyces pastorianus
tagtcggtgaccaggaagcattcag

SEQ ID NO: 73043 - DNA, 25 bp, Saccharomyces pastorianus
gggttagacactttcatcgatatag

SEQ ID NO: 73044 - DNA, 25 bp, Saccharomyces pastorianus
ggaccagtattttcgtatttagttg

SEQ ID NO: 73045 - DNA, 25 bp, Saccharomyces pastorianus
agcattcaggccaacttacttaaga

SEQ ID NO: 73046 - DNA, 25 bp, Saccharomyces pastorianus
aatctttactgggtgtcgagggcaa

SEQ ID NO: 73047 - DNA, 25 bp, Saccharomyces pastorianus
agattaatgtttccctgtaaggtcg

SEQ ID NO: 73048 - DNA, 25 bp, Saccharomyces pastorianus
gggctctttgtcaagaaattcgtct

SEQ ID NO: 73049 - DNA, 25 bp, Saccharomyces pastorianus
tttggagcctactcacaagcttcaa

SEQ ID NO: 73050 - DNA, 25 bp, Saccharomyces pastorianus
ttccatccatgtgatacgtcaagca

SEQ ID NO: 73051 - DNA, 25 bp, Saccharomyces pastorianus
aatactgcttggtactctttccatc

SEQ ID NO: 73052 - DNA, 25 bp, Saccharomyces pastorianus
gtgaacccttactgcttttacgaat

SEQ ID NO: 73053 - DNA, 25 bp, Saccharomyces pastorianus
agtggtcacacttggctaccggaga

SEQ ID NO: 73054 - DNA, 25 bp, Saccharomyces pastorianus
gaactacctgcgctgccggatggac

SEQ ID NO: 73055 - DNA, 25 bp, Saccharomyces pastorianus
gaacgcaatgaactgccgcttactg

SEQ ID NO: 73056 - DNA, 25 bp, Saccharomyces pastorianus
gcttactggccaagaactacctgcg

SEQ ID NO: 73057 - DNA, 25 bp, Saccharomyces pastorianus
gaccacgacggcgattgcacgaaac

SEQ ID NO: 73058 - DNA, 25 bp, Saccharomyces pastorianus
ccggatggaccaccagctgatggat

SEQ ID NO: 73059 - DNA, 25 bp, Saccharomyces pastorianus
ggagtaccttaaatgcatgcagctg

SEQ ID NO: 73060 - DNA, 25 bp, Saccharomyces pastorianus
agaaagaggctcgttcccactagac

SEQ ID NO: 73061 - DNA, 25 bp, Saccharomyces pastorianus
agctggtgcagaacgagaacgcaat

SEQ ID NO: 73062 - DNA, 25 bp, Saccharomyces pastorianus
cacgaaacacatgcaggagtacctt

SEQ ID NO: 73063 - DNA, 25 bp, Saccharomyces pastorianus
gatggatacgacgagtggtcacact

SEQ ID NO: 73064 - DNA, 25 bp, Saccharomyces pastorianus
gatgattacgttcccgtcaaaagca

SEQ ID NO: 73065 - DNA, 25 bp, Saccharomyces pastorianus
ttacgttcccgtcaaaagcacacag

SEQ ID NO: 73066 - DNA, 25 bp, Saccharomyces pastorianus
tcaaaagcacacaggaatctcaaat

SEQ ID NO: 73067 - DNA, 25 bp, Saccharomyces pastorianus
ctgatgattacgttcccgtcaaaag

SEQ ID NO: 73068 - DNA, 25 bp, Saccharomyces pastorianus
tacgttcccgtcaaaagcacacagg

SEQ ID NO: 73069 - DNA, 25 bp, Saccharomyces pastorianus
caaaagcacacaggaatctcaaatg

SEQ ID NO: 73070 - DNA, 25 bp, Saccharomyces pastorianus
gattacgttcccgtcaaaagcacac

SEQ ID NO: 73071 - DNA, 25 bp, Saccharomyces pastorianus
tctgatgattacgttcccgtcaaaa

SEQ ID NO: 73072 - DNA, 25 bp, Saccharomyces pastorianus
tgatgattacgttcccgtcaaaagc

SEQ ID NO: 73073 - DNA, 25 bp, Saccharomyces pastorianus
acgttcccgtcaaaagcacacagga

SEQ ID NO: 73074 - DNA, 25 bp, Saccharomyces pastorianus
attacgttcccgtcaaaagcacaca

SEQ ID NO: 73075 - DNA, 25 bp, Saccharomyces pastorianus
gacggtcacagagacggtgtctatg

SEQ ID NO: 73076 - DNA, 25 bp, Saccharomyces pastorianus
ggtcacagagacggtgtctatgcta

SEQ ID NO: 73077 - DNA, 25 bp, Saccharomyces pastorianus
ggacggtcacagagacggtgtctat

SEQ ID NO: 73078 - DNA, 25 bp, Saccharomyces pastorianus
tgtaggtcagttgggggacggtcac

SEQ ID NO: 73079 - DNA, 25 bp, Saccharomyces pastorianus
cggtcacagagacggtgtctatgct

SEQ ID NO: 73080 - DNA, 25 bp, Saccharomyces pastorianus
tcacagagacggtgtctatgctatt

SEQ ID NO: 73081 - DNA, 25 bp, Saccharomyces pastorianus
acggtcacagagacggtgtctatgc

SEQ ID NO: 73082 - DNA, 25 bp, Saccharomyces pastorianus
gtcacagagacggtgtctatgctat

SEQ ID NO: 73083 - DNA, 25 bp, Saccharomyces pastorianus
ggaggagtccttcttggcaatattt

SEQ ID NO: 73084 - DNA, 25 bp, Saccharomyces pastorianus
aaggtatacccagcgcaaagaaaag

SEQ ID NO: 73085 - DNA, 25 bp, Saccharomyces pastorianus
cttgccttagattcacatatggact

SEQ ID NO: 73086 - DNA, 25 bp, Saccharomyces pastorianus
attatccgacaatcagttgcttcaa

SEQ ID NO: 73087 - DNA, 25 bp, Saccharomyces pastorianus
tgaaaccgtttttaccaccattcag

SEQ ID NO: 73088 - DNA, 25 bp, Saccharomyces pastorianus
aagatactgaaaacgggccttcgag

SEQ ID NO: 73089 - DNA, 25 bp, Saccharomyces pastorianus
gacaggactactaccagctggagga

SEQ ID NO: 73090 - DNA, 25 bp, Saccharomyces pastorianus
aatcgccatcaggtacaaaaatcag

SEQ ID NO: 73091 - DNA, 25 bp, Saccharomyces pastorianus
gatgatgttattcgcgaccaaatcg

SEQ ID NO: 73092 - DNA, 25 bp, Saccharomyces pastorianus
gttattcttcgaggccactgattac

SEQ ID NO: 73093 - DNA, 25 bp, Saccharomyces pastorianus
acggtaagtacatcggcaaggcatt

SEQ ID NO: 73094 - DNA, 25 bp, Saccharomyces pastorianus
cggagtgtgtttattgtgcggccaa

SEQ ID NO: 73095 - DNA, 25 bp, Saccharomyces pastorianus
tacccaatttagctcatttcctgaa

SEQ ID NO: 73096 - DNA, 25 bp, Saccharomyces pastorianus
aacgctatatatctgtcatacggca

SEQ ID NO: 73097 - DNA, 25 bp, Saccharomyces pastorianus
gtaaatctctccaagttttcccttg

SEQ ID NO: 73098 - DNA, 25 bp, Saccharomyces pastorianus
gacaacgatggcgacagcacgacta

SEQ ID NO: 73099 - DNA, 25 bp, Saccharomyces pastorianus
gaggtacgttttatgcagcacccta

SEQ ID NO: 73100 - DNA, 25 bp, Saccharomyces pastorianus
ataaactcaagatcatacccgtccc

SEQ ID NO: 73101 - DNA, 25 bp, Saccharomyces pastorianus
acaaattcagtacccctgtctattt

SEQ ID NO: 73102 - DNA, 25 bp, Saccharomyces pastorianus
gtgcggccaaagatgtcatatccaa

SEQ ID NO: 73103 - DNA, 25 bp, Saccharomyces pastorianus
agcaccctatctgagcaagtacgga

SEQ ID NO: 73104 - DNA, 25 bp, Saccharomyces pastorianus
atgcgaaatcacatcttcctacggg

SEQ ID NO: 73105 - DNA, 25 bp, Saccharomyces pastorianus
agtacacccaggactatgtcaccta

SEQ ID NO: 73106 - DNA, 25 bp, Saccharomyces pastorianus
aatgagtagttgctgtgacgatgac

SEQ ID NO: 73107 - DNA, 25 bp, Saccharomyces pastorianus
tagcgtggacacttctgaaatcagt

SEQ ID NO: 73108 - DNA, 25 bp, Saccharomyces pastorianus
gatttcacaaatccgccagacatta

SEQ ID NO: 73109 - DNA, 25 bp, Saccharomyces pastorianus
gtgacgatgactgtgcattttgcaa

SEQ ID NO: 73110 - DNA, 25 bp, Saccharomyces pastorianus
tatacgccgggtatactatggccca

SEQ ID NO: 73111 - DNA, 25 bp, Saccharomyces pastorianus
gaacaaactacttcgtatacgccgg

SEQ ID NO: 73112 - DNA, 25 bp, Saccharomyces pastorianus
tagcggtaagcatccaagaaacagt

SEQ ID NO: 73113 - DNA, 25 bp, Saccharomyces pastorianus
gaataagttcccagcttagcggtaa

SEQ ID NO: 73114 - DNA, 25 bp, Saccharomyces pastorianus
atgtcacctagtttatcgccttcta

SEQ ID NO: 73115 - DNA, 25 bp, Saccharomyces pastorianus
gaagaagctagctcaacagcaatta

SEQ ID NO: 73116 - DNA, 25 bp, Saccharomyces pastorianus
gcatatcagcatctgcagcggcgga

SEQ ID NO: 73117 - DNA, 25 bp, Saccharomyces pastorianus
gaacggcatatcagcatctgcagcg

SEQ ID NO: 73118 - DNA, 25 bp, Saccharomyces pastorianus
ataccaggaagaacggcatatcagc

SEQ ID NO: 73119 - DNA, 25 bp, Saccharomyces pastorianus
agcggcggacctggccagtgtattc

SEQ ID NO: 73120 - DNA, 25 bp, Saccharomyces pastorianus
gaagtatactgtggaaatgcggttt

SEQ ID NO: 73121 - DNA, 25 bp, Saccharomyces pastorianus
gaaatcctccaaaaataccaggaag

SEQ ID NO: 73122 - DNA, 25 bp, Saccharomyces pastorianus
tgcggtttcgaaatcctccaaaaat

SEQ ID NO: 73123 - DNA, 25 bp, Saccharomyces pastorianus
ggacctggccagtgtattctcatct

SEQ ID NO: 73124 - DNA, 25 bp, Saccharomyces pastorianus
cctggccagtgtattctcatctgca

SEQ ID NO: 73125 - DNA, 25 bp, Saccharomyces pastorianus
atcagcatctgcagcggcggacctg

SEQ ID NO: 73126 - DNA, 25 bp, Saccharomyces pastorianus
gaaatgcggtttcgaaatcctccaa

SEQ ID NO: 73127 - DNA, 25 bp, Saccharomyces pastorianus
gagagcacatcacattagtcgcaga

SEQ ID NO: 73128 - DNA, 25 bp, Saccharomyces pastorianus
agggttcgtatcttctgtactcaga

SEQ ID NO: 73129 - DNA, 25 bp, Saccharomyces pastorianus
gaccctacgccatatgaacttttta

SEQ ID NO: 73130 - DNA, 25 bp, Saccharomyces pastorianus
actttttaggccattcgtctacaag

SEQ ID NO: 73131 - DNA, 25 bp, Saccharomyces pastorianus
aatggacggctattctatttacctg

SEQ ID NO: 73132 - DNA, 25 bp, Saccharomyces pastorianus
gtcttacgaaatttcaactccgatg

SEQ ID NO: 73133 - DNA, 25 bp, Saccharomyces pastorianus
gtacagtacttcattgttacgggtt

SEQ ID NO: 73134 - DNA, 25 bp, Saccharomyces pastorianus
gatgttaaatacacctccatggaat

SEQ ID NO: 73135 - DNA, 25 bp, Saccharomyces pastorianus
ggaagatcctatgactttacgatta

SEQ ID NO: 73136 - DNA, 25 bp, Saccharomyces pastorianus
aaattgttacttgtcacttcatggg

SEQ ID NO: 73137 - DNA, 25 bp, Saccharomyces pastorianus
ttgggtacgtacacggatatgtctt

SEQ ID NO: 73138 - DNA, 25 bp, Saccharomyces pastorianus
tgatcggtactctagcattcccaat

SEQ ID NO: 73139 - DNA, 25 bp, Saccharomyces pastorianus
accagctgggttgttgatgactatt

SEQ ID NO: 73140 - DNA, 25 bp, Saccharomyces pastorianus
atttctttcggtactaccagctggg

SEQ ID NO: 73141 - DNA, 25 bp, Saccharomyces pastorianus
tttcgataaccgactctagaggatc

SEQ ID NO: 73142 - DNA, 25 bp, Saccharomyces pastorianus
tatcagaaccgctatcataccgatt

SEQ ID NO: 73143 - DNA, 25 bp, Saccharomyces pastorianus
agtgctgtagctttatcggtcgcat

SEQ ID NO: 73144 - DNA, 25 bp, Saccharomyces pastorianus
aaagcatccgctgagtccgaaacga

SEQ ID NO: 73145 - DNA, 25 bp, Saccharomyces pastorianus
gcaatctgcttcttacctatagcac

SEQ ID NO: 73146 - DNA, 25 bp, Saccharomyces pastorianus
ggttcatatccatggttgtgtcatt

SEQ ID NO: 73147 - DNA, 25 bp, Saccharomyces pastorianus
ggtcgcatttgcagtaagttcattg

SEQ ID NO: 73148 - DNA, 25 bp, Saccharomyces pastorianus
gttatatcgcaactatttctttcgg

SEQ ID NO: 73149 - DNA, 25 bp, Saccharomyces pastorianus
tttcgccgctgttgccgccgttgcc

SEQ ID NO: 73150 - DNA, 25 bp, Saccharomyces pastorianus
tactgtcgcctctttcgccgctgtt

SEQ ID NO: 73151 - DNA, 25 bp, Saccharomyces pastorianus
ctttcgccgctgttgccgccgttgc

SEQ ID NO: 73152 - DNA, 25 bp, Saccharomyces pastorianus
tgcaattctctactgtcgcctcttt

SEQ ID NO: 73153 - DNA, 25 bp, Saccharomyces pastorianus
ttcgccgctgttgccgccgttgcct

SEQ ID NO: 73154 - DNA, 25 bp, Saccharomyces pastorianus
atgcaattctctactgtcgcctctt

SEQ ID NO: 73155 - DNA, 25 bp, Saccharomyces pastorianus
aattctctactgtcgcctctttcgc

SEQ ID NO: 73156 - DNA, 25 bp, Saccharomyces pastorianus
attctctactgtcgcctctttcgcc

SEQ ID NO: 73157 - DNA, 25 bp, Saccharomyces pastorianus
actgtcgcctctttcgccgctgttg

SEQ ID NO: 73158 - DNA, 25 bp, Saccharomyces pastorianus
tgttgccgccgttgcctctgccgct

SEQ ID NO: 73159 - DNA, 25 bp, Saccharomyces pastorianus
tctttcgccgctgttgccgccgttg

SEQ ID NO: 73160 - DNA, 25 bp, Saccharomyces pastorianus
ggacggttttcgaaatcacaaatag

SEQ ID NO: 73161 - DNA, 25 bp, Saccharomyces pastorianus
ttgttcagccacagacactttgacg

SEQ ID NO: 73162 - DNA, 25 bp, Saccharomyces pastorianus
attaggacgcaaatattcgggacgg

SEQ ID NO: 73163 - DNA, 25 bp, Saccharomyces pastorianus
acaatgatctgaaccctgtcgggat

SEQ ID NO: 73164 - DNA, 25 bp, Saccharomyces pastorianus
gaagctactgaaacacctgagacat

SEQ ID NO: 73165 - DNA, 25 bp, Saccharomyces pastorianus
tgctggccaaaagaacgtaccgtga

SEQ ID NO: 73166 - DNA, 25 bp, Saccharomyces pastorianus
aaaaaatcatgaagcccttctccac

SEQ ID NO: 73167 - DNA, 25 bp, Saccharomyces pastorianus
gacgtctcaaccagttgccattaaa

SEQ ID NO: 73168 - DNA, 25 bp, Saccharomyces pastorianus
gaacgtaccgtgaactgaagctact

SEQ ID NO: 73169 - DNA, 25 bp, Saccharomyces pastorianus
tgagaatctgatttgtctgcaggac

SEQ ID NO: 73170 - DNA, 25 bp, Saccharomyces pastorianus
gtgcgttcggactcgtttgttcagc

SEQ ID NO: 73171 - DNA, 25 bp, Saccharomyces pastorianus
aaagccgaagtactatccaaagaga

SEQ ID NO: 73172 - DNA, 25 bp, Saccharomyces pastorianus
tcaaggcactagtaacgatgatggt

SEQ ID NO: 73173 - DNA, 25 bp, Saccharomyces pastorianus
ggtagcgagacacacaaaagcattc

SEQ ID NO: 73174 - DNA, 25 bp, Saccharomyces pastorianus
atgatgaagacagcgtggaggacaa

SEQ ID NO: 73175 - DNA, 25 bp, Saccharomyces pastorianus
gaacgtactgttcataagacaaaag

SEQ ID NO: 73176 - DNA, 25 bp, Saccharomyces pastorianus
agataacggttctccttataccaat

SEQ ID NO: 73177 - DNA, 25 bp, Saccharomyces pastorianus
gaagcccatggcagtgaaaacgaaa

SEQ ID NO: 73178 - DNA, 25 bp, Saccharomyces pastorianus
gacacacaaaagcattcaaggcact

SEQ ID NO: 73179 - DNA, 25 bp, Saccharomyces pastorianus
aacgatgatggtgaaagtagcgatg

SEQ ID NO: 73180 - DNA, 25 bp, Saccharomyces pastorianus
aaagctgatagtgcacaagacaatg

SEQ ID NO: 73181 - DNA, 25 bp, Saccharomyces pastorianus
aagttataatggtagcgagacacac

SEQ ID NO: 73182 - DNA, 25 bp, Saccharomyces pastorianus
gttatggtccatcctcaagtgaaaa

SEQ ID NO: 73183 - DNA, 25 bp, Saccharomyces pastorianus
gatatcgtacgatcgctgtatacaa

SEQ ID NO: 73184 - DNA, 25 bp, Saccharomyces pastorianus
agcagacatggtaacgccggattta

SEQ ID NO: 73185 - DNA, 25 bp, Saccharomyces pastorianus
acacgaggcgtgcaagatctatttt

SEQ ID NO: 73186 - DNA, 25 bp, Saccharomyces pastorianus
gtagataattcgttcatcccgcttt

SEQ ID NO: 73187 - DNA, 25 bp, Saccharomyces pastorianus
tcccgctttgggtacgatacgtcga

SEQ ID NO: 73188 - DNA, 25 bp, Saccharomyces pastorianus
atgggccaatggattcgttacgcga

SEQ ID NO: 73189 - DNA, 25 bp, Saccharomyces pastorianus
ggtgttctttggaaccaggtgtcaa

SEQ ID NO: 73190 - DNA, 25 bp, Saccharomyces pastorianus
gcatggaactccttcgttgatttcg

SEQ ID NO: 73191 - DNA, 25 bp, Saccharomyces pastorianus
tgggccaagttcgaaagcagacatg

SEQ ID NO: 73192 - DNA, 25 bp, Saccharomyces pastorianus
gtctagctttagacaccgtggctaa

SEQ ID NO: 73193 - DNA, 25 bp, Saccharomyces pastorianus
caatttggtaatttaaactctatcg

SEQ ID NO: 73194 - DNA, 25 bp, Saccharomyces pastorianus
tgaagcttcattaagtcgtgacgca

SEQ ID NO: 73195 - DNA, 25 bp, Saccharomyces pastorianus
tggtaatttaaactctatcgaagaa

SEQ ID NO: 73196 - DNA, 25 bp, Saccharomyces pastorianus
atgaagcttcattaagtcgtgacgc

SEQ ID NO: 73197 - DNA, 25 bp, Saccharomyces pastorianus
ggactatgaagcttcattaagtcgt

SEQ ID NO: 73198 - DNA, 25 bp, Saccharomyces pastorianus
aggaaaatggactatgaagcttcat

SEQ ID NO: 73199 - DNA, 25 bp, Saccharomyces pastorianus
ctatgaagcttcattaagtcgtgac

SEQ ID NO: 73200 - DNA, 25 bp, Saccharomyces pastorianus
tttggtaatttaaactctatcgaag

SEQ ID NO: 73201 - DNA, 25 bp, Saccharomyces pastorianus
gaaaatggactatgaagcttcatta

SEQ ID NO: 73202 - DNA, 25 bp, Saccharomyces pastorianus
ctatcgaagaaactatcagttataa

SEQ ID NO: 73203 - DNA, 25 bp, Saccharomyces pastorianus
tatgaagcttcattaagtcgtgacg

SEQ ID NO: 73204 - DNA, 25 bp, Saccharomyces pastorianus
agaggcaatcttgttcttcaaaaac

SEQ ID NO: 73205 - DNA, 25 bp, Saccharomyces pastorianus
gatcagcagttatccgatttagcaa

SEQ ID NO: 73206 - DNA, 25 bp, Saccharomyces pastorianus
atttggatcgaatacgcagagctgg

SEQ ID NO: 73207 - DNA, 25 bp, Saccharomyces pastorianus
attcggagtttctcacaatggaggc

SEQ ID NO: 73208 - DNA, 25 bp, Saccharomyces pastorianus
gttaaaggagttcgaccgtgtcaga

SEQ ID NO: 73209 - DNA, 25 bp, Saccharomyces pastorianus
gctggatcgaatttgccatgtatca

SEQ ID NO: 73210 - DNA, 25 bp, Saccharomyces pastorianus
ggaaacatatggtactgagctcgat

SEQ ID NO: 73211 - DNA, 25 bp, Saccharomyces pastorianus
aattcattgaattccagccctttaa

SEQ ID NO: 73212 - DNA, 25 bp, Saccharomyces pastorianus
gtatcaaagttcaaccccaacggat

SEQ ID NO: 73213 - DNA, 25 bp, Saccharomyces pastorianus
gaggcgtttatactattgcattgga

SEQ ID NO: 73214 - DNA, 25 bp, Saccharomyces pastorianus
aattttctgttcaaagctggatcga

SEQ ID NO: 73215 - DNA, 25 bp, Saccharomyces pastorianus
ggcctctctttaatggttcttccat

SEQ ID NO: 73216 - DNA, 25 bp, Saccharomyces pastorianus
atacgtttctatccttggttctgct

SEQ ID NO: 73217 - DNA, 25 bp, Saccharomyces pastorianus
gaacagcgaacgattcctcttatat

SEQ ID NO: 73218 - DNA, 25 bp, Saccharomyces pastorianus
tcattggattgtagagcgtggcctc

SEQ ID NO: 73219 - DNA, 25 bp, Saccharomyces pastorianus
tgggtctctaaagccttctatggga

SEQ ID NO: 73220 - DNA, 25 bp, Saccharomyces pastorianus
gattatggttcctttggtcactaca

SEQ ID NO: 73221 - DNA, 25 bp, Saccharomyces pastorianus
ttacaatccccttcttgccaaagat

SEQ ID NO: 73222 - DNA, 25 bp, Saccharomyces pastorianus
gggtcactgccatatcgggtttcag

SEQ ID NO: 73223 - DNA, 25 bp, Saccharomyces pastorianus
gcagagctcacggttcatatcattg

SEQ ID NO: 73224 - DNA, 25 bp, Saccharomyces pastorianus
gcaaggtgcatcactatgccatgta

SEQ ID NO: 73225 - DNA, 25 bp, Saccharomyces pastorianus
gaagcaggtcttattgggtctctaa

SEQ ID NO: 73226 - DNA, 25 bp, Saccharomyces pastorianus
ctccatcttcgcgtggacaagaggt

SEQ ID NO: 73227 - DNA, 25 bp, Saccharomyces pastorianus
aaacttcaacaaattccatcgcctc

SEQ ID NO: 73228 - DNA, 25 bp, Saccharomyces pastorianus
tggagagctccacagtgaacacagt

SEQ ID NO: 73229 - DNA, 25 bp, Saccharomyces pastorianus
gaagccgcgcatggcacagtgacaa

SEQ ID NO: 73230 - DNA, 25 bp, Saccharomyces pastorianus
ggttgatgacgtccttgttgattac

SEQ ID NO: 73231 - DNA, 25 bp, Saccharomyces pastorianus
tcgttgcacagggatttggttcttt

SEQ ID NO: 73232 - DNA, 25 bp, Saccharomyces pastorianus
ggcatctggtacgaacaccgtttga

SEQ ID NO: 73233 - DNA, 25 bp, Saccharomyces pastorianus
gacgtcgtcaagttcggccaaatct

SEQ ID NO: 73234 - DNA, 25 bp, Saccharomyces pastorianus
tatatattcttcttccctttttcat

SEQ ID NO: 73235 - DNA, 25 bp, Saccharomyces pastorianus
gggtaagcttgacagcactcccgac

SEQ ID NO: 73236 - DNA, 25 bp, Saccharomyces pastorianus
attaaggccgcgtcttctgacgtta

SEQ ID NO: 73237 - DNA, 25 bp, Saccharomyces pastorianus
ggagacgacgtacccgaatacattg

SEQ ID NO: 73238 - DNA, 25 bp, Saccharomyces pastorianus
gtatatacatgacagcaaaccggaa

SEQ ID NO: 73239 - DNA, 25 bp, Saccharomyces pastorianus
aaactctgatgagccaggagacgac

SEQ ID NO: 73240 - DNA, 25 bp, Saccharomyces pastorianus
gacgagttggccaacatcatggata

SEQ ID NO: 73241 - DNA, 25 bp, Saccharomyces pastorianus
agcaattgaaagacgggccctggga

SEQ ID NO: 73242 - DNA, 25 bp, Saccharomyces pastorianus
tcaccggcgcacaaatcgtattcaa

SEQ ID NO: 73243 - DNA, 25 bp, Saccharomyces pastorianus
aagcaaagggaggtgccgccgcctt

SEQ ID NO: 73244 - DNA, 25 bp, Saccharomyces pastorianus
aatacattgacgattccgatagcat

SEQ ID NO: 73245 - DNA, 25 bp, Saccharomyces pastorianus
agagctggattacactgactttata

SEQ ID NO: 73246 - DNA, 25 bp, Saccharomyces pastorianus
actgactttatagacgacaacgagg

SEQ ID NO: 73247 - DNA, 25 bp, Saccharomyces pastorianus
agaaggtcgctttggtgttgtattg

SEQ ID NO: 73248 - DNA, 25 bp, Saccharomyces pastorianus
ttaaatgccctacttgctgaacagc

SEQ ID NO: 73249 - DNA, 25 bp, Saccharomyces pastorianus
gtgccattgggcaagctaactgtac

SEQ ID NO: 73250 - DNA, 25 bp, Saccharomyces pastorianus
gcagcaagagccactacttttcaat

SEQ ID NO: 73251 - DNA, 25 bp, Saccharomyces pastorianus
accccgctgttctcattttggatga

SEQ ID NO: 73252 - DNA, 25 bp, Saccharomyces pastorianus
gatttgatttccattcccagtagtg

SEQ ID NO: 73253 - DNA, 25 bp, Saccharomyces pastorianus
agcactagggtcattgtactgggaa

SEQ ID NO: 73254 - DNA, 25 bp, Saccharomyces pastorianus
gacaacattctctattgcattccac

SEQ ID NO: 73255 - DNA, 25 bp, Saccharomyces pastorianus
agaaagaccgtgtcgcacgtgccat

SEQ ID NO: 73256 - DNA, 25 bp, Saccharomyces pastorianus
cacggttctgttgtcgaaactggtt

SEQ ID NO: 73257 - DNA, 25 bp, Saccharomyces pastorianus
aagttcttagccaatttcccagatg

SEQ ID NO: 73258 - DNA, 25 bp, Saccharomyces pastorianus
gctagagcattcttgttagaccccg

SEQ ID NO: 73259 - DNA, 25 bp, Saccharomyces pastorianus
tagttcccaaaaaagctcgagccct

SEQ ID NO: 73260 - DNA, 25 bp, Saccharomyces pastorianus
gttaggcgaatcatacacgtccacc

SEQ ID NO: 73261 - DNA, 25 bp, Saccharomyces pastorianus
ggaccaatcaccgtagtaaccactt

SEQ ID NO: 73262 - DNA, 25 bp, Saccharomyces pastorianus
agcagcacggcttcttcaagtggat

SEQ ID NO: 73263 - DNA, 25 bp, Saccharomyces pastorianus
gtggctcccagtagcactgtagtga

SEQ ID NO: 73264 - DNA, 25 bp, Saccharomyces pastorianus
atcatccgctacattgagcagcacg

SEQ ID NO: 73265 - DNA, 25 bp, Saccharomyces pastorianus
gagactaattcagctgctaccacga

SEQ ID NO: 73266 - DNA, 25 bp, Saccharomyces pastorianus
gattccggctccttagatgaccagg

SEQ ID NO: 73267 - DNA, 25 bp, Saccharomyces pastorianus
gggaaaagtcttagctctgcctcct

SEQ ID NO: 73268 - DNA, 25 bp, Saccharomyces pastorianus
aaagcagcgtctacaacggcgagcc

SEQ ID NO: 73269 - DNA, 25 bp, Saccharomyces pastorianus
ggaaaaacgaccacgcagtacctgt

SEQ ID NO: 73270 - DNA, 25 bp, Saccharomyces pastorianus
agagcgacagcgaggtacccgatct

SEQ ID NO: 73271 - DNA, 25 bp, Saccharomyces pastorianus
gatctgcgggacctgcgctaacaga

SEQ ID NO: 73272 - DNA, 25 bp, Saccharomyces pastorianus
agcgaggtacccgatctgcgggacc

SEQ ID NO: 73273 - DNA, 25 bp, Saccharomyces pastorianus
agcgacagcgaggtacccgatctgc

SEQ ID NO: 73274 - DNA, 25 bp, Saccharomyces pastorianus
tctgcgggacctgcgctaacagacg

SEQ ID NO: 73275 - DNA, 25 bp, Saccharomyces pastorianus
cgacagcgaggtacccgatctgcgg

SEQ ID NO: 73276 - DNA, 25 bp, Saccharomyces pastorianus
acctgggtggctgggtattaccaga

SEQ ID NO: 73277 - DNA, 25 bp, Saccharomyces pastorianus
aggtacccgatctgcgggacctgcg

SEQ ID NO: 73278 - DNA, 25 bp, Saccharomyces pastorianus
accagagcgacagcgaggtacccga

SEQ ID NO: 73279 - DNA, 25 bp, Saccharomyces pastorianus
ggtattaccagagcgacagcgaggt

SEQ ID NO: 73280 - DNA, 25 bp, Saccharomyces pastorianus
tgggtattaccagagcgacagcgag

SEQ ID NO: 73281 - DNA, 25 bp, Saccharomyces pastorianus
cagcagcacggttagcgagccgttg

SEQ ID NO: 73282 - DNA, 25 bp, Saccharomyces pastorianus
caacaacaacgaggatcagcagcac

SEQ ID NO: 73283 - DNA, 25 bp, Saccharomyces pastorianus
aggatcagcagcacggttagcgagc

SEQ ID NO: 73284 - DNA, 25 bp, Saccharomyces pastorianus
aacgaggatcagcagcacggttagc

SEQ ID NO: 73285 - DNA, 25 bp, Saccharomyces pastorianus
atgcctgccatgcaagagggtattc

SEQ ID NO: 73286 - DNA, 25 bp, Saccharomyces pastorianus
gagggtattctgagctcaatgacga

SEQ ID NO: 73287 - DNA, 25 bp, Saccharomyces pastorianus
ggtattctgagctcaatgacgatta

SEQ ID NO: 73288 - DNA, 25 bp, Saccharomyces pastorianus
atgcaagagggtattctgagctcaa

SEQ ID NO: 73289 - DNA, 25 bp, Saccharomyces pastorianus
gagctcaatgacgattatgacgatg

SEQ ID NO: 73290 - DNA, 25 bp, Saccharomyces pastorianus
gcctgccatgcaagagggtattctg

SEQ ID NO: 73291 - DNA, 25 bp, Saccharomyces pastorianus
aacaacgaggatcagcagcacggtt

SEQ ID NO: 73292 - DNA, 25 bp, Saccharomyces pastorianus
aaaaccgcacaatacgacgattcgt

SEQ ID NO: 73293 - DNA, 25 bp, Saccharomyces pastorianus
gacgattcgtccctcgaatgggatt

SEQ ID NO: 73294 - DNA, 25 bp, Saccharomyces pastorianus
cagtttacggcgcaggtcgatcaaa

SEQ ID NO: 73295 - DNA, 25 bp, Saccharomyces pastorianus
caaaggttccctgttggaggcgaca

SEQ ID NO: 73296 - DNA, 25 bp, Saccharomyces pastorianus
tatacaggtacccacaaactccgat

SEQ ID NO: 73297 - DNA, 25 bp, Saccharomyces pastorianus
cccgcgcgcaccgttgtaaagaagg

SEQ ID NO: 73298 - DNA, 25 bp, Saccharomyces pastorianus
tggaggcgacacttgggcgacttac

SEQ ID NO: 73299 - DNA, 25 bp, Saccharomyces pastorianus
gctctgaacacaatgggcctggaac

SEQ ID NO: 73300 - DNA, 25 bp, Saccharomyces pastorianus
aagaaaaatgcaaccgccatcctcg

SEQ ID NO: 73301 - DNA, 25 bp, Saccharomyces pastorianus
gggattgttttatcactccgagagt

SEQ ID NO: 73302 - DNA, 25 bp, Saccharomyces pastorianus
gactgggagaattcgcctgatataa

SEQ ID NO: 73303 - DNA, 25 bp, Saccharomyces pastorianus
gattgatgcctgtgacaaccctgat

SEQ ID NO: 73304 - DNA, 25 bp, Saccharomyces pastorianus
atgcctgactattgttgagaacctg

SEQ ID NO: 73305 - DNA, 25 bp, Saccharomyces pastorianus
aaggtgatgacgcttcagaaactat

SEQ ID NO: 73306 - DNA, 25 bp, Saccharomyces pastorianus
gttgtcatatgcctacgaagccttc

SEQ ID NO: 73307 - DNA, 25 bp, Saccharomyces pastorianus
ggttaccatcctcatatttatcagt

SEQ ID NO: 73308 - DNA, 25 bp, Saccharomyces pastorianus
tgaatcctcagaagaaaccccatcc

SEQ ID NO: 73309 - DNA, 25 bp, Saccharomyces pastorianus
taagttgaccattgaatgcctgact

SEQ ID NO: 73310 - DNA, 25 bp, Saccharomyces pastorianus
gagaacctgattgatgcctgtgaca

SEQ ID NO: 73311 - DNA, 25 bp, Saccharomyces pastorianus
tacgaagccttcatcgaagccggca

SEQ ID NO: 73312 - DNA, 25 bp, Saccharomyces pastorianus
aagccggcacttcagcagaaaatta

SEQ ID NO: 73313 - DNA, 25 bp, Saccharomyces pastorianus
gtatcggattttcaactacccaaag

SEQ ID NO: 73314 - DNA, 25 bp, Saccharomyces pastorianus
cttcttccatggcttacttggttgt

SEQ ID NO: 73315 - DNA, 25 bp, Saccharomyces pastorianus
gatattttttatccaatttcaatgc

SEQ ID NO: 73316 - DNA, 25 bp, Saccharomyces pastorianus
aatgcttcttccatggcttacttgg

SEQ ID NO: 73317 - DNA, 25 bp, Saccharomyces pastorianus
catggcttacttggttgtttgtcaa

SEQ ID NO: 73318 - DNA, 25 bp, Saccharomyces pastorianus
taaattcatccttaagagtttctgg

SEQ ID NO: 73319 - DNA, 25 bp, Saccharomyces pastorianus
gttgtttgtcaaatgcttagaatta

SEQ ID NO: 73320 - DNA, 25 bp, Saccharomyces pastorianus
ttcccatggatttaaacgtaggtat

SEQ ID NO: 73321 - DNA, 25 bp, Saccharomyces pastorianus
gcgaattgtcggacgatattcccat

SEQ ID NO: 73322 - DNA, 25 bp, Saccharomyces pastorianus
aattgtcggacgatattcccatgga

SEQ ID NO: 73323 - DNA, 25 bp, Saccharomyces pastorianus
aatttcaatgcttcttccatggctt

SEQ ID NO: 73324 - DNA, 25 bp, Saccharomyces pastorianus
gtaggtatgttaaattcatccttaa

SEQ ID NO: 73325 - DNA, 25 bp, Saccharomyces pastorianus
gtcttgatccagtacttcctgtact

SEQ ID NO: 73326 - DNA, 25 bp, Saccharomyces pastorianus
ttttttcaggtcttgctccatctca

SEQ ID NO: 73327 - DNA, 25 bp, Saccharomyces pastorianus
tacatggatgtcttagcgcggtcat

SEQ ID NO: 73328 - DNA, 25 bp, Saccharomyces pastorianus
cttcctgtacttttcgactatgtca

SEQ ID NO: 73329 - DNA, 25 bp, Saccharomyces pastorianus
tgtcttagcgcggtcataaacttgc

SEQ ID NO: 73330 - DNA, 25 bp, Saccharomyces pastorianus
tacagccattcgtcttgatccagta

SEQ ID NO: 73331 - DNA, 25 bp, Saccharomyces pastorianus
gactatgtcagatacgacttctgcc

SEQ ID NO: 73332 - DNA, 25 bp, Saccharomyces pastorianus
tgctccatctcacggcgctggaagg

SEQ ID NO: 73333 - DNA, 25 bp, Saccharomyces pastorianus
gcagcagggtattcttacagccatt

SEQ ID NO: 73334 - DNA, 25 bp, Saccharomyces pastorianus
gccctggaggcgtgcccatcgcaga

SEQ ID NO: 73335 - DNA, 25 bp, Saccharomyces pastorianus
agatacgacttctgccctggaggcg

SEQ ID NO: 73336 - DNA, 25 bp, Saccharomyces pastorianus
ttttgcaagacatggcgattagcga

SEQ ID NO: 73337 - DNA, 25 bp, Saccharomyces pastorianus
tacgcttcttcattcgtcgatgaca

SEQ ID NO: 73338 - DNA, 25 bp, Saccharomyces pastorianus
gatttccacataaactttcccaatt

SEQ ID NO: 73339 - DNA, 25 bp, Saccharomyces pastorianus
tggtcattgcccaagatcaaggaat

SEQ ID NO: 73340 - DNA, 25 bp, Saccharomyces pastorianus
aaagacaccgcctgagaagaccaat

SEQ ID NO: 73341 - DNA, 25 bp, Saccharomyces pastorianus
taatcaactggataccctacgcttc

SEQ ID NO: 73342 - DNA, 25 bp, Saccharomyces pastorianus
taaattttctcttccaactacactc

SEQ ID NO: 73343 - DNA, 25 bp, Saccharomyces pastorianus
agtacgacgaaaccacttcttcagg

SEQ ID NO: 73344 - DNA, 25 bp, Saccharomyces pastorianus
acttcttcaggctcaccagagagat

SEQ ID NO: 73345 - DNA, 25 bp, Saccharomyces pastorianus
gaggttactcagtgctgcaatttca

SEQ ID NO: 73346 - DNA, 25 bp, Saccharomyces pastorianus
gattcatcgtcatctgtactgaaca

SEQ ID NO: 73347 - DNA, 25 bp, Saccharomyces pastorianus
aggtatacgtacaagtaagcctact

SEQ ID NO: 73348 - DNA, 25 bp, Saccharomyces pastorianus
ttctgccgtgcccaaaggctataaa

SEQ ID NO: 73349 - DNA, 25 bp, Saccharomyces pastorianus
gaatgccctcaaagaacctattaag

SEQ ID NO: 73350 - DNA, 25 bp, Saccharomyces pastorianus
ggtgactctgagttatacaatccag

SEQ ID NO: 73351 - DNA, 25 bp, Saccharomyces pastorianus
ctgcttttgaaatgacgggtgactc

SEQ ID NO: 73352 - DNA, 25 bp, Saccharomyces pastorianus
gagatcgaaaactggctcaacagat

SEQ ID NO: 73353 - DNA, 25 bp, Saccharomyces pastorianus
gatgacgaaacagctagcacgaaat

SEQ ID NO: 73354 - DNA, 25 bp, Saccharomyces pastorianus
taagcctactacacgcacagcaaat

SEQ ID NO: 73355 - DNA, 25 bp, Saccharomyces pastorianus
ggtaagaacacgaatgccctcaaag

SEQ ID NO: 73356 - DNA, 25 bp, Saccharomyces pastorianus
gaaattacgttctgccgtgcccaaa

SEQ ID NO: 73357 - DNA, 25 bp, Saccharomyces pastorianus
aatataccgcctcgcaagagatcga

SEQ ID NO: 73358 - DNA, 25 bp, Saccharomyces pastorianus
aaagttattctactctcgatgtgaa

SEQ ID NO: 73359 - DNA, 25 bp, Saccharomyces pastorianus
ttattactataggtccgttcggcta

SEQ ID NO: 73360 - DNA, 25 bp, Saccharomyces pastorianus
gcagccgcgggtcagatatgtcaat

SEQ ID NO: 73361 - DNA, 25 bp, Saccharomyces pastorianus
gaacgctacggtgggcaacttgatc

SEQ ID NO: 73362 - DNA, 25 bp, Saccharomyces pastorianus
gtgcaagtctcttctctacaatgga

SEQ ID NO: 73363 - DNA, 25 bp, Saccharomyces pastorianus
ttacccctcgtgcaaaaattctttg

SEQ ID NO: 73364 - DNA, 25 bp, Saccharomyces pastorianus
tcaaaagacccttaatggccactcc

SEQ ID NO: 73365 - DNA, 25 bp, Saccharomyces pastorianus
gcagtacataccgttttcgtggccg

SEQ ID NO: 73366 - DNA, 25 bp, Saccharomyces pastorianus
ttgggcgacgcttcgaaacacacga

SEQ ID NO: 73367 - DNA, 25 bp, Saccharomyces pastorianus
agtccaatgatcaattacccctcgt

SEQ ID NO: 73368 - DNA, 25 bp, Saccharomyces pastorianus
gttcggctattgatccagccttatt

SEQ ID NO: 73369 - DNA, 25 bp, Saccharomyces pastorianus
cacgggcatcgtggtcgagtgccaa

SEQ ID NO: 73370 - DNA, 25 bp, Saccharomyces pastorianus
tgtggcaccgccaacagaaacacgc

SEQ ID NO: 73371 - DNA, 25 bp, Saccharomyces pastorianus
gatgccctccagagaggccgcgttg

SEQ ID NO: 73372 - DNA, 25 bp, Saccharomyces pastorianus
gcgaggccgctcgtgctgaaaaaga

SEQ ID NO: 73373 - DNA, 25 bp, Saccharomyces pastorianus
tcacgtgagcagaaccgccggcttg

SEQ ID NO: 73374 - DNA, 25 bp, Saccharomyces pastorianus
agaaacacggtcacgtgagcagaac

SEQ ID NO: 73375 - DNA, 25 bp, Saccharomyces pastorianus
ttgcagctgtggcaccgccaacaga

SEQ ID NO: 73376 - DNA, 25 bp, Saccharomyces pastorianus
tatcgcgaagcacgaacggcatggc

SEQ ID NO: 73377 - DNA, 25 bp, Saccharomyces pastorianus
gtgtgacacgatgccctccagagag

SEQ ID NO: 73378 - DNA, 25 bp, Saccharomyces pastorianus
gccggcgcagtatcgcgaagcacga

SEQ ID NO: 73379 - DNA, 25 bp, Saccharomyces pastorianus
ctggccgccgcgtcgtgtgacacga

SEQ ID NO: 73380 - DNA, 25 bp, Saccharomyces pastorianus
aaacacggccagaaccgctgcgggc

SEQ ID NO: 73381 - DNA, 25 bp, Saccharomyces pastorianus
tacgagttaaagctccgcaaacacg

SEQ ID NO: 73382 - DNA, 25 bp, Saccharomyces pastorianus
accgctgcgggcttattttggcagg

SEQ ID NO: 73383 - DNA, 25 bp, Saccharomyces pastorianus
gcaaaagtggccctgaatacgagtt

SEQ ID NO: 73384 - DNA, 25 bp, Saccharomyces pastorianus
tattttggcaggaaagaatcgcacc

SEQ ID NO: 73385 - DNA, 25 bp, Saccharomyces pastorianus
gaaagaatcgcaccagcgacacacg

SEQ ID NO: 73386 - DNA, 25 bp, Saccharomyces pastorianus
tgcgggcttattttggcaggaaaga

SEQ ID NO: 73387 - DNA, 25 bp, Saccharomyces pastorianus
tttctgcaaaagtggccctgaatac

SEQ ID NO: 73388 - DNA, 25 bp, Saccharomyces pastorianus
gtttttcaaagacatagatttctgc

SEQ ID NO: 73389 - DNA, 25 bp, Saccharomyces pastorianus
gtggccctgaatacgagttaaagct

SEQ ID NO: 73390 - DNA, 25 bp, Saccharomyces pastorianus
ttaaagctccgcaaacacggccaga

SEQ ID NO: 73391 - DNA, 25 bp, Saccharomyces pastorianus
agcggtctcttaatcatactggtcc

SEQ ID NO: 73392 - DNA, 25 bp, Saccharomyces pastorianus
agtctcatctgttcagttccctgga

SEQ ID NO: 73393 - DNA, 25 bp, Saccharomyces pastorianus
gggcgaaatcaggtcccacatcgaa

SEQ ID NO: 73394 - DNA, 25 bp, Saccharomyces pastorianus
aatcatactggtccttgtttgttcg

SEQ ID NO: 73395 - DNA, 25 bp, Saccharomyces pastorianus
ggcagcttctcggacgaacagtgta

SEQ ID NO: 73396 - DNA, 25 bp, Saccharomyces pastorianus
aacattatttctttgctcttgcaac

SEQ ID NO: 73397 - DNA, 25 bp, Saccharomyces pastorianus
ttccctggagactgaactgaagttt

SEQ ID NO: 73398 - DNA, 25 bp, Saccharomyces pastorianus
acctgaggttgaacgactcttccaa

SEQ ID NO: 73399 - DNA, 25 bp, Saccharomyces pastorianus
gagagctgaactccatccatgacga

SEQ ID NO: 73400 - DNA, 25 bp, Saccharomyces pastorianus
gtttgccatccaaaactccagggac

SEQ ID NO: 73401 - DNA, 25 bp, Saccharomyces pastorianus
tgagcatcatttgcaactcttgaaa

SEQ ID NO: 73402 - DNA, 25 bp, Saccharomyces pastorianus
ctttcctcaaaaacctcactttgat

SEQ ID NO: 73403 - DNA, 25 bp, Saccharomyces pastorianus
gcactattaaccctttgcggtaatg

SEQ ID NO: 73404 - DNA, 25 bp, Saccharomyces pastorianus
aaacaatcgtctggtacgacacccg

SEQ ID NO: 73405 - DNA, 25 bp, Saccharomyces pastorianus
gtctggtacgacacccgctgcggca

SEQ ID NO: 73406 - DNA, 25 bp, Saccharomyces pastorianus
gaaaagcactattaaccctttgcgg

SEQ ID NO: 73407 - DNA, 25 bp, Saccharomyces pastorianus
cactattaaccctttgcggtaatga

SEQ ID NO: 73408 - DNA, 25 bp, Saccharomyces pastorianus
aatcgtctggtacgacacccgctgc

SEQ ID NO: 73409 - DNA, 25 bp, Saccharomyces pastorianus
tgcggcaaattacctttcctcaaaa

SEQ ID NO: 73410 - DNA, 25 bp, Saccharomyces pastorianus
tacgacacccgctgcggcaaattac

SEQ ID NO: 73411 - DNA, 25 bp, Saccharomyces pastorianus
atggcacatcgaaaagcactattaa

SEQ ID NO: 73412 - DNA, 25 bp, Saccharomyces pastorianus
gcggtaatgaaaacaatcgtctggt

SEQ ID NO: 73413 - DNA, 25 bp, Saccharomyces pastorianus
gaattgaccagaagagctgacgtta

SEQ ID NO: 73414 - DNA, 25 bp, Saccharomyces pastorianus
gagaaatcaccgacatcaaacaatt

SEQ ID NO: 73415 - DNA, 25 bp, Saccharomyces pastorianus
gctagagaaatcaccgacatcaaac

SEQ ID NO: 73416 - DNA, 25 bp, Saccharomyces pastorianus
aatttttggaattgaccagaagagc

SEQ ID NO: 73417 - DNA, 25 bp, Saccharomyces pastorianus
tcaccgacatcaaacaatttttgga

SEQ ID NO: 73418 - DNA, 25 bp, Saccharomyces pastorianus
aattgaccagaagagctgacgttaa

SEQ ID NO: 73419 - DNA, 25 bp, Saccharomyces pastorianus
gaaatcaccgacatcaaacaatttt

SEQ ID NO: 73420 - DNA, 25 bp, Saccharomyces pastorianus
aatcaccgacatcaaacaatttttg

SEQ ID NO: 73421 - DNA, 25 bp, Saccharomyces pastorianus
attgaccagaagagctgacgttaag

SEQ ID NO: 73422 - DNA, 25 bp, Saccharomyces pastorianus
ggaattgaccagaagagctgacgtt

SEQ ID NO: 73423 - DNA, 25 bp, Saccharomyces pastorianus
tttggaattgaccagaagagctgac

SEQ ID NO: 73424 - DNA, 25 bp, Saccharomyces pastorianus
ccacggatacttgatgttcttacca

SEQ ID NO: 73425 - DNA, 25 bp, Saccharomyces pastorianus
aagggagccgcctgcagcctgactt

SEQ ID NO: 73426 - DNA, 25 bp, Saccharomyces pastorianus
aggtccagcggatgcgtcaccatag

SEQ ID NO: 73427 - DNA, 25 bp, Saccharomyces pastorianus
ttttgacaggtccagcggatgcgtc

SEQ ID NO: 73428 - DNA, 25 bp, Saccharomyces pastorianus
gtcaccatagttgcaaagattcccg

SEQ ID NO: 73429 - DNA, 25 bp, Saccharomyces pastorianus
atcttgaacagagtaggcttgggca

SEQ ID NO: 73430 - DNA, 25 bp, Saccharomyces pastorianus
atagttgcaaagattcccgccgcac

SEQ ID NO: 73431 - DNA, 25 bp, Saccharomyces pastorianus
ataccaccacggatacttgatgttc

SEQ ID NO: 73432 - DNA, 25 bp, Saccharomyces pastorianus
atgctctccagcatcttgaacagag

SEQ ID NO: 73433 - DNA, 25 bp, Saccharomyces pastorianus
agcggatgcgtcaccatagttgcaa

SEQ ID NO: 73434 - DNA, 25 bp, Saccharomyces pastorianus
gcagcctgacttttgacaggtccag

SEQ ID NO: 73435 - DNA, 25 bp, Saccharomyces pastorianus
aatctctttacaccgagacgttgaa

SEQ ID NO: 73436 - DNA, 25 bp, Saccharomyces pastorianus
attatcttctgcttcttttcaacca

SEQ ID NO: 73437 - DNA, 25 bp, Saccharomyces pastorianus
aatagcattctatctcctaatttga

SEQ ID NO: 73438 - DNA, 25 bp, Saccharomyces pastorianus
gaagtggtggtcttgcattttcgtc

SEQ ID NO: 73439 - DNA, 25 bp, Saccharomyces pastorianus
attttcgtcttcatccaactctttg

SEQ ID NO: 73440 - DNA, 25 bp, Saccharomyces pastorianus
gcccaacatttccactattgcagaa

SEQ ID NO: 73441 - DNA, 25 bp, Saccharomyces pastorianus
atgacgagtacttccactcagtttc

SEQ ID NO: 73442 - DNA, 25 bp, Saccharomyces pastorianus
gctaaggcgatccaattcaactcag

SEQ ID NO: 73443 - DNA, 25 bp, Saccharomyces pastorianus
tctaccccatctataaaccatcatg

SEQ ID NO: 73444 - DNA, 25 bp, Saccharomyces pastorianus
aacgcaaaacttaagctcgcatatg

SEQ ID NO: 73445 - DNA, 25 bp, Saccharomyces pastorianus
ttcgtattcccctgtacatgttgga

SEQ ID NO: 73446 - DNA, 25 bp, Saccharomyces pastorianus
gtaaccacaaccctatgaactctaa

SEQ ID NO: 73447 - DNA, 25 bp, Saccharomyces pastorianus
taattacaatactttccatccctcc

SEQ ID NO: 73448 - DNA, 25 bp, Saccharomyces pastorianus
gaccctgccagaaggctttatgtca

SEQ ID NO: 73449 - DNA, 25 bp, Saccharomyces pastorianus
atccctccatgcatacaaaatcttc

SEQ ID NO: 73450 - DNA, 25 bp, Saccharomyces pastorianus
ggcggcaaaccctcataattacaat

SEQ ID NO: 73451 - DNA, 25 bp, Saccharomyces pastorianus
attgatcctcaccaaacagatttgt

SEQ ID NO: 73452 - DNA, 25 bp, Saccharomyces pastorianus
agcttacatagatgaccctgccaga

SEQ ID NO: 73453 - DNA, 25 bp, Saccharomyces pastorianus
aaaccattcaagtgtccagtcattg

SEQ ID NO: 73454 - DNA, 25 bp, Saccharomyces pastorianus
gaactctaacgtaaacacggcggca

SEQ ID NO: 73455 - DNA, 25 bp, Saccharomyces pastorianus
taacaactacaaactgcctcagcaa

SEQ ID NO: 73456 - DNA, 25 bp, Saccharomyces pastorianus
gtatcatagattgcatggtcaccaa

SEQ ID NO: 73457 - DNA, 25 bp, Saccharomyces pastorianus
attctcaagggatgggcggtgtttc

SEQ ID NO: 73458 - DNA, 25 bp, Saccharomyces pastorianus
cagcacacaccttctatcttaataa

SEQ ID NO: 73459 - DNA, 25 bp, Saccharomyces pastorianus
taccactgctaccaacactttacaa

SEQ ID NO: 73460 - DNA, 25 bp, Saccharomyces pastorianus
gaattcttcttcaaatcccaacatt

SEQ ID NO: 73461 - DNA, 25 bp, Saccharomyces pastorianus
gaagtagtattgtgcctccttcagc

SEQ ID NO: 73462 - DNA, 25 bp, Saccharomyces pastorianus
cagacactactaactccgcaagata

SEQ ID NO: 73463 - DNA, 25 bp, Saccharomyces pastorianus
ggtccattagcgttggttcttggtt

SEQ ID NO: 73464 - DNA, 25 bp, Saccharomyces pastorianus
acggagagagtccatagcccattct

SEQ ID NO: 73465 - DNA, 25 bp, Saccharomyces pastorianus
ataacgtccatttgtactcgcctaa

SEQ ID NO: 73466 - DNA, 25 bp, Saccharomyces pastorianus
gactacagatttcaacggcatcaat

SEQ ID NO: 73467 - DNA, 25 bp, Saccharomyces pastorianus
aaacagtgctgtcgctgctgctgct

SEQ ID NO: 73468 - DNA, 25 bp, Saccharomyces pastorianus
gccattgttcaaaccctttcttgta

SEQ ID NO: 73469 - DNA, 25 bp, Saccharomyces pastorianus
taacagaccccaccgtgcctttgtt

SEQ ID NO: 73470 - DNA, 25 bp, Saccharomyces pastorianus
ctttcttgtaacagaccccaccgtg

SEQ ID NO: 73471 - DNA, 25 bp, Saccharomyces pastorianus
gtgcctttgtttcagcggtccctta

SEQ ID NO: 73472 - DNA, 25 bp, Saccharomyces pastorianus
tgttcaaaccctttcttgtaacaga

SEQ ID NO: 73473 - DNA, 25 bp, Saccharomyces pastorianus
tggccattgttcaaaccctttcttg

SEQ ID NO: 73474 - DNA, 25 bp, Saccharomyces pastorianus
tgtttcagcggtcccttacctgaag

SEQ ID NO: 73475 - DNA, 25 bp, Saccharomyces pastorianus
tttcagcggtcccttacctgaagaa

SEQ ID NO: 73476 - DNA, 25 bp, Saccharomyces pastorianus
ttcagcggtcccttacctgaagaaa

SEQ ID NO: 73477 - DNA, 25 bp, Saccharomyces pastorianus
tttgtttcagcggtcccttacctga

SEQ ID NO: 73478 - DNA, 25 bp, Saccharomyces pastorianus
atggccattgttcaaaccctttctt

SEQ ID NO: 73479 - DNA, 25 bp, Saccharomyces pastorianus
tatttgccgtcttggtattcctcta

SEQ ID NO: 73480 - DNA, 25 bp, Saccharomyces pastorianus
gatcttctccattcttcggtttaat

SEQ ID NO: 73481 - DNA, 25 bp, Saccharomyces pastorianus
atgttgttatcgctggatcttctcc

SEQ ID NO: 73482 - DNA, 25 bp, Saccharomyces pastorianus
aatgtgccgtgctcacagtaacaga

SEQ ID NO: 73483 - DNA, 25 bp, Saccharomyces pastorianus
tacacattcctgtcgattatcgtct

SEQ ID NO: 73484 - DNA, 25 bp, Saccharomyces pastorianus
aaggcaagttgaccccatggaagct

SEQ ID NO: 73485 - DNA, 25 bp, Saccharomyces pastorianus
atatgtatgttcctgccgttagagc

SEQ ID NO: 73486 - DNA, 25 bp, Saccharomyces pastorianus
gtatcatcactgctttcttcctaat

SEQ ID NO: 73487 - DNA, 25 bp, Saccharomyces pastorianus
agtaaagccgacttacacctggacg

SEQ ID NO: 73488 - DNA, 25 bp, Saccharomyces pastorianus
tcagtggtttgggtagcgctatctt

SEQ ID NO: 73489 - DNA, 25 bp, Saccharomyces pastorianus
tattcctctatatcgcacacagttg

SEQ ID NO: 73490 - DNA, 25 bp, Saccharomyces pastorianus
caacgtgatttatggctcgattctc

SEQ ID NO: 73491 - DNA, 25 bp, Saccharomyces pastorianus
gcaggttctaagttatcgcccagtg

SEQ ID NO: 73492 - DNA, 25 bp, Saccharomyces pastorianus
caatagcaatgcaacaccttctcga

SEQ ID NO: 73493 - DNA, 25 bp, Saccharomyces pastorianus
gagacgtactcttcaaagcttgtga

SEQ ID NO: 73494 - DNA, 25 bp, Saccharomyces pastorianus
gaggagctgaacacccaaggtcctt

SEQ ID NO: 73495 - DNA, 25 bp, Saccharomyces pastorianus
cgagtcttccgcgttggtagcacaa

SEQ ID NO: 73496 - DNA, 25 bp, Saccharomyces pastorianus
gaacgaactgataactaagctccgg

SEQ ID NO: 73497 - DNA, 25 bp, Saccharomyces pastorianus
agggttcgagtcacctttaacgcag

SEQ ID NO: 73498 - DNA, 25 bp, Saccharomyces pastorianus
taagctccggagtagcgcaggttct

SEQ ID NO: 73499 - DNA, 25 bp, Saccharomyces pastorianus
accttctcgacctattgacatacga

SEQ ID NO: 73500 - DNA, 25 bp, Saccharomyces pastorianus
tgaccttatcgattcatccaatgaa

SEQ ID NO: 73501 - DNA, 25 bp, Saccharomyces pastorianus
tttcccattcgatggtctgcttgga

SEQ ID NO: 73502 - DNA, 25 bp, Saccharomyces pastorianus
cattcgatggtctgcttggaggaga

SEQ ID NO: 73503 - DNA, 25 bp, Saccharomyces pastorianus
gtgcgcacccttggccttgtgaaag

SEQ ID NO: 73504 - DNA, 25 bp, Saccharomyces pastorianus
ggaagtccaggtattgcttaccctc

SEQ ID NO: 73505 - DNA, 25 bp, Saccharomyces pastorianus
agtgaccctggttgacggcggagta

SEQ ID NO: 73506 - DNA, 25 bp, Saccharomyces pastorianus
tacttgttttcccattcgatggtct

SEQ ID NO: 73507 - DNA, 25 bp, Saccharomyces pastorianus
gtccaggtattgcttaccctctggg

SEQ ID NO: 73508 - DNA, 25 bp, Saccharomyces pastorianus
tattgcttaccctctgggtcccaca

SEQ ID NO: 73509 - DNA, 25 bp, Saccharomyces pastorianus
gcacccttggccttgtgaaagacca

SEQ ID NO: 73510 - DNA, 25 bp, Saccharomyces pastorianus
gtaggcactgaggaagtccaggtat

SEQ ID NO: 73511 - DNA, 25 bp, Saccharomyces pastorianus
ggccttgtgaaagaccacgggcaaa

SEQ ID NO: 73512 - DNA, 25 bp, Saccharomyces pastorianus
gaggccaagccagacatcgttctgt

SEQ ID NO: 73513 - DNA, 25 bp, Saccharomyces pastorianus
aggtccgtggtatgggtctgctcac

SEQ ID NO: 73514 - DNA, 25 bp, Saccharomyces pastorianus
agtctaacggtgtcatctccgaggt

SEQ ID NO: 73515 - DNA, 25 bp, Saccharomyces pastorianus
gacgagatccaaaccggtatcggca

SEQ ID NO: 73516 - DNA, 25 bp, Saccharomyces pastorianus
accgcatgggacttgtgtctgctca

SEQ ID NO: 73517 - DNA, 25 bp, Saccharomyces pastorianus
gacccctccaagactaacggcaaga

SEQ ID NO: 73518 - DNA, 25 bp, Saccharomyces pastorianus
cggctctttcatcgccaagttgaaa

SEQ ID NO: 73519 - DNA, 25 bp, Saccharomyces pastorianus
cagaaccggtgagttactgtgctac

SEQ ID NO: 73520 - DNA, 25 bp, Saccharomyces pastorianus
tgtctgctcatgaagggccacggcc

SEQ ID NO: 73521 - DNA, 25 bp, Saccharomyces pastorianus
acatcgttctgttgggtaaggccct

SEQ ID NO: 73522 - DNA, 25 bp, Saccharomyces pastorianus
taccagtctcatgtgtgttgtcctc

SEQ ID NO: 73523 - DNA, 25 bp, Saccharomyces pastorianus
ataacaaagtgccaagccttttcaa

SEQ ID NO: 73524 - DNA, 25 bp, Saccharomyces pastorianus
ttggattgggacctcttttgtaccg

SEQ ID NO: 73525 - DNA, 25 bp, Saccharomyces pastorianus
gaatgatgtccaaggaaccccaaga

SEQ ID NO: 73526 - DNA, 25 bp, Saccharomyces pastorianus
ctcttttgtaccgttcctgtgaata

SEQ ID NO: 73527 - DNA, 25 bp, Saccharomyces pastorianus
gaagtgcttcagagaatcaacgaga

SEQ ID NO: 73528 - DNA, 25 bp, Saccharomyces pastorianus
agccttttcaaattagccgcccaat

SEQ ID NO: 73529 - DNA, 25 bp, Saccharomyces pastorianus
ctcaccagaaaacccgagcctaaat

SEQ ID NO: 73530 - DNA, 25 bp, Saccharomyces pastorianus
accaggatactgctttaccaaaggc

SEQ ID NO: 73531 - DNA, 25 bp, Saccharomyces pastorianus
tttaccaaaggcaacctcaccagaa

SEQ ID NO: 73532 - DNA, 25 bp, Saccharomyces pastorianus
tataaagacctttccaaccaagacg

SEQ ID NO: 73533 - DNA, 25 bp, Saccharomyces pastorianus
accgttcctgtgaatattatcgagc

SEQ ID NO: 73534 - DNA, 25 bp, Saccharomyces pastorianus
gttagccattgaatgtcaagccctg

SEQ ID NO: 73535 - DNA, 25 bp, Saccharomyces pastorianus
caagaagtcgtgagtactgaagata

SEQ ID NO: 73536 - DNA, 25 bp, Saccharomyces pastorianus
taaagaaggtttgagtgccactcaa

SEQ ID NO: 73537 - DNA, 25 bp, Saccharomyces pastorianus
tgtcggctctactctagaaaacaaa

SEQ ID NO: 73538 - DNA, 25 bp, Saccharomyces pastorianus
tgtcggctccatcattgccctagat

SEQ ID NO: 73539 - DNA, 25 bp, Saccharomyces pastorianus
gtggtattattgtcggctctactct

SEQ ID NO: 73540 - DNA, 25 bp, Saccharomyces pastorianus
aatcgatgacgtcatgaccgctggc

SEQ ID NO: 73541 - DNA, 25 bp, Saccharomyces pastorianus
aatgtcaagccctgagatttggttc

SEQ ID NO: 73542 - DNA, 25 bp, Saccharomyces pastorianus
gaccgctggcactgccattaatgaa

SEQ ID NO: 73543 - DNA, 25 bp, Saccharomyces pastorianus
ctaagggtcaagttgtcggctccat

SEQ ID NO: 73544 - DNA, 25 bp, Saccharomyces pastorianus
gaatcaccatatttcttcaatttag

SEQ ID NO: 73545 - DNA, 25 bp, Saccharomyces pastorianus
attgctcgggattcagcttggttaa

SEQ ID NO: 73546 - DNA, 25 bp, Saccharomyces pastorianus
gtccttcattttctggctgggaaac

SEQ ID NO: 73547 - DNA, 25 bp, Saccharomyces pastorianus
tggccatggacagtgcttgcaatga

SEQ ID NO: 73548 - DNA, 25 bp, Saccharomyces pastorianus
aaacttgcccttggccatggacagt

SEQ ID NO: 73549 - DNA, 25 bp, Saccharomyces pastorianus
agtagcttttgtccttcattttctg

SEQ ID NO: 73550 - DNA, 25 bp, Saccharomyces pastorianus
atgcattctacaaacttgcccttgg

SEQ ID NO: 73551 - DNA, 25 bp, Saccharomyces pastorianus
tgggaaactgttttgatgtcatcaa

SEQ ID NO: 73552 - DNA, 25 bp, Saccharomyces pastorianus
ctatttggaaatacgcatgtgtaca

SEQ ID NO: 73553 - DNA, 25 bp, Saccharomyces pastorianus
gtttcacagcagttaattgctcggg

SEQ ID NO: 73554 - DNA, 25 bp, Saccharomyces pastorianus
gatgcaggaaccagtagcttttgtc

SEQ ID NO: 73555 - DNA, 25 bp, Saccharomyces pastorianus
ttatccacaattttacctgggatgt

SEQ ID NO: 73556 - DNA, 25 bp, Saccharomyces pastorianus
tgttgtttcccaggccttaaaaatg

SEQ ID NO: 73557 - DNA, 25 bp, Saccharomyces pastorianus
gaaattcatgccgttttgattacga

SEQ ID NO: 73558 - DNA, 25 bp, Saccharomyces pastorianus
ttgtccttgggttccttcattagaa

SEQ ID NO: 73559 - DNA, 25 bp, Saccharomyces pastorianus
gagaccagattgaacatcagtttcg

SEQ ID NO: 73560 - DNA, 25 bp, Saccharomyces pastorianus
aatatgccctgatacaaccgaattg

SEQ ID NO: 73561 - DNA, 25 bp, Saccharomyces pastorianus
gttgagattctttaatcatcctggg

SEQ ID NO: 73562 - DNA, 25 bp, Saccharomyces pastorianus
atttggacccaaacttactagctgg

SEQ ID NO: 73563 - DNA, 25 bp, Saccharomyces pastorianus
atctcgacgaagttactaatggcca

SEQ ID NO: 73564 - DNA, 25 bp, Saccharomyces pastorianus
acaaatcttatccattgtccttggg

SEQ ID NO: 73565 - DNA, 25 bp, Saccharomyces pastorianus
acttactagctggtgttgtttccca

SEQ ID NO: 73566 - DNA, 25 bp, Saccharomyces pastorianus
catcagtttcgaattttgactcaaa

SEQ ID NO: 73567 - DNA, 25 bp, Saccharomyces pastorianus
tttaagaactcctcacaagaccatg

SEQ ID NO: 73568 - DNA, 25 bp, Saccharomyces pastorianus
gaactattcgcaaaaactccaaagg

SEQ ID NO: 73569 - DNA, 25 bp, Saccharomyces pastorianus
gaacaatctgtatgattccgtgaga

SEQ ID NO: 73570 - DNA, 25 bp, Saccharomyces pastorianus
agagaatacattacagttcgccaat

SEQ ID NO: 73571 - DNA, 25 bp, Saccharomyces pastorianus
tgatgagctttaacacaggtggaat

SEQ ID NO: 73572 - DNA, 25 bp, Saccharomyces pastorianus
gaaggaaatcttaactcaaatgctg

SEQ ID NO: 73573 - DNA, 25 bp, Saccharomyces pastorianus
aaatttgctgtccacttacaatcta

SEQ ID NO: 73574 - DNA, 25 bp, Saccharomyces pastorianus
gattccgtgagattattgtcttcta

SEQ ID NO: 73575 - DNA, 25 bp, Saccharomyces pastorianus
attttatccagccaagcaagctata

SEQ ID NO: 73576 - DNA, 25 bp, Saccharomyces pastorianus
gaccatggacctatatacttttgca

SEQ ID NO: 73577 - DNA, 25 bp, Saccharomyces pastorianus
gacagtttcaatagagacatcacgt

SEQ ID NO: 73578 - DNA, 25 bp, Saccharomyces pastorianus
actgggccacagattgaggatgatg

SEQ ID NO: 73579 - DNA, 25 bp, Saccharomyces pastorianus
gataacttggctgatctatccatta

SEQ ID NO: 73580 - DNA, 25 bp, Saccharomyces pastorianus
ttagaacctttaggtgacaccgaag

SEQ ID NO: 73581 - DNA, 25 bp, Saccharomyces pastorianus
cagagagctttggaagagtcccaga

SEQ ID NO: 73582 - DNA, 25 bp, Saccharomyces pastorianus
gatctatccattacttcgagccaag

SEQ ID NO: 73583 - DNA, 25 bp, Saccharomyces pastorianus
atacaagccgacgaaatggaccttt

SEQ ID NO: 73584 - DNA, 25 bp, Saccharomyces pastorianus
gaattgacgctgaaactgggccaca

SEQ ID NO: 73585 - DNA, 25 bp, Saccharomyces pastorianus
gagtcccagaggttacatgaaacac

SEQ ID NO: 73586 - DNA, 25 bp, Saccharomyces pastorianus
gcgctcctggaatcgcaagaagcac

SEQ ID NO: 73587 - DNA, 25 bp, Saccharomyces pastorianus
ggaatgaaaccttgaacaccgagtt

SEQ ID NO: 73588 - DNA, 25 bp, Saccharomyces pastorianus
attcagttaagaattgcgctcctgg

SEQ ID NO: 73589 - DNA, 25 bp, Saccharomyces pastorianus
gacgtccttattatcgttaccgctt

SEQ ID NO: 73590 - DNA, 25 bp, Saccharomyces pastorianus
atatagctcaagcagacccattcga

SEQ ID NO: 73591 - DNA, 25 bp, Saccharomyces pastorianus
agaccacttgctttgtatcgttgcc

SEQ ID NO: 73592 - DNA, 25 bp, Saccharomyces pastorianus
acagtggtcaattccgcatcttctc

SEQ ID NO: 73593 - DNA, 25 bp, Saccharomyces pastorianus
agaaggtgcccgtttgattcaagac

SEQ ID NO: 73594 - DNA, 25 bp, Saccharomyces pastorianus
attctctctatgacgtgttgactac

SEQ ID NO: 73595 - DNA, 25 bp, Saccharomyces pastorianus
ggcgttgtacgttactcaatgtgtc

SEQ ID NO: 73596 - DNA, 25 bp, Saccharomyces pastorianus
attgttgtcgttgttggctttaagc

SEQ ID NO: 73597 - DNA, 25 bp, Saccharomyces pastorianus
ggttaagcgcttccacagtggtcaa

SEQ ID NO: 73598 - DNA, 25 bp, Saccharomyces pastorianus
gttaccgcttactttatgatgtttt

SEQ ID NO: 73599 - DNA, 25 bp, Saccharomyces pastorianus
atcttctcttttcttggcgttgtac

SEQ ID NO: 73600 - DNA, 25 bp, Saccharomyces pastorianus
gcctttgccgaaacgtactctagta

SEQ ID NO: 73601 - DNA, 25 bp, Saccharomyces pastorianus
actacactggcgacgttttgcattt

SEQ ID NO: 73602 - DNA, 25 bp, Saccharomyces pastorianus
taaaattgtgggtgcctttgccgaa

SEQ ID NO: 73603 - DNA, 25 bp, Saccharomyces pastorianus
agggccagagccttagggatcaact

SEQ ID NO: 73604 - DNA, 25 bp, Saccharomyces pastorianus
gataacctggtgaccatcggttcct

SEQ ID NO: 73605 - DNA, 25 bp, Saccharomyces pastorianus
ggttcctccttggaccattgtaaag

SEQ ID NO: 73606 - DNA, 25 bp, Saccharomyces pastorianus
aaagtcctggatccaattccttcta

SEQ ID NO: 73607 - DNA, 25 bp, Saccharomyces pastorianus
gtcggtgaaatatttgcgtcccctt

SEQ ID NO: 73608 - DNA, 25 bp, Saccharomyces pastorianus
gatagagccttcgtggatttcgaca

SEQ ID NO: 73609 - DNA, 25 bp, Saccharomyces pastorianus
ggatcaactgtcgtgtcgctgtcat

SEQ ID NO: 73610 - DNA, 25 bp, Saccharomyces pastorianus
ttgcattttggtctatctgctgaaa

SEQ ID NO: 73611 - DNA, 25 bp, Saccharomyces pastorianus
gtccttccgttatcgagggtatact

SEQ ID NO: 73612 - DNA, 25 bp, Saccharomyces pastorianus
atgattctatggttcgtcgccacgg

SEQ ID NO: 73613 - DNA, 25 bp, Saccharomyces pastorianus
gcagtcgcgaacgattccgggtgtt

SEQ ID NO: 73614 - DNA, 25 bp, Saccharomyces pastorianus
tactgtgtgaggtctctcgtgggct

SEQ ID NO: 73615 - DNA, 25 bp, Saccharomyces pastorianus
taatcttgatagcagcatttatctg

SEQ ID NO: 73616 - DNA, 25 bp, Saccharomyces pastorianus
ggaatctacggcagtcgcgaacgat

SEQ ID NO: 73617 - DNA, 25 bp, Saccharomyces pastorianus
agaagcaacggtggcagcagcagca

SEQ ID NO: 73618 - DNA, 25 bp, Saccharomyces pastorianus
acgattccgggtgttctgctttatt

SEQ ID NO: 73619 - DNA, 25 bp, Saccharomyces pastorianus
gggtatactgtgtgaggtctctcgt

SEQ ID NO: 73620 - DNA, 25 bp, Saccharomyces pastorianus
gggcaccttgctcatgattctatgg

SEQ ID NO: 73621 - DNA, 25 bp, Saccharomyces pastorianus
aagcgagcttggaatctacggcagt

SEQ ID NO: 73622 - DNA, 25 bp, Saccharomyces pastorianus
ctgaagatagcgtggtacgtgtacc

SEQ ID NO: 73623 - DNA, 25 bp, Saccharomyces pastorianus
ttgcacacgtcgctgaagatagcgt

SEQ ID NO: 73624 - DNA, 25 bp, Saccharomyces pastorianus
aacagtctcgttaccaaatggttga

SEQ ID NO: 73625 - DNA, 25 bp, Saccharomyces pastorianus
taaaaaacagtctcgttaccaaatg

SEQ ID NO: 73626 - DNA, 25 bp, Saccharomyces pastorianus
cacgtcgctgaagatagcgtggtac

SEQ ID NO: 73627 - DNA, 25 bp, Saccharomyces pastorianus
cgtcgctgaagatagcgtggtacgt

SEQ ID NO: 73628 - DNA, 25 bp, Saccharomyces pastorianus
acagtctcgttaccaaatggttgaa

SEQ ID NO: 73629 - DNA, 25 bp, Saccharomyces pastorianus
tgcacacgtcgctgaagatagcgtg

SEQ ID NO: 73630 - DNA, 25 bp, Saccharomyces pastorianus
cacacgtcgctgaagatagcgtggt

SEQ ID NO: 73631 - DNA, 25 bp, Saccharomyces pastorianus
gaagatagcgtggtacgtgtaccgt

SEQ ID NO: 73632 - DNA, 25 bp, Saccharomyces pastorianus
aaacagtctcgttaccaaatggttg

SEQ ID NO: 73633 - DNA, 25 bp, Saccharomyces pastorianus
gtcaggcgcttatctactgctgggc

SEQ ID NO: 73634 - DNA, 25 bp, Saccharomyces pastorianus
atggcccatagtgacgcagttcctt

SEQ ID NO: 73635 - DNA, 25 bp, Saccharomyces pastorianus
aggtgatcagacacatcctgtcgaa

SEQ ID NO: 73636 - DNA, 25 bp, Saccharomyces pastorianus
gggacggtacgttcgactttgccat

SEQ ID NO: 73637 - DNA, 25 bp, Saccharomyces pastorianus
aaacttacaccagctgccaaggcta

SEQ ID NO: 73638 - DNA, 25 bp, Saccharomyces pastorianus
gttcatcactggtccacgagggaga

SEQ ID NO: 73639 - DNA, 25 bp, Saccharomyces pastorianus
atctcgattgccgtagttcatcact

SEQ ID NO: 73640 - DNA, 25 bp, Saccharomyces pastorianus
acatgatcggttcggatcgctcgga

SEQ ID NO: 73641 - DNA, 25 bp, Saccharomyces pastorianus
tcggagtgaaccctaacgtatacat

SEQ ID NO: 73642 - DNA, 25 bp, Saccharomyces pastorianus
tagaggtatagacccggcctacaat

SEQ ID NO: 73643 - DNA, 25 bp, Saccharomyces pastorianus
gagatagcgccgcatttttcgcaga

SEQ ID NO: 73644 - DNA, 25 bp, Saccharomyces pastorianus
tggtcaaggtacaggcgctacgtct

SEQ ID NO: 73645 - DNA, 25 bp, Saccharomyces pastorianus
acttgggcttctggcggagaatcta

SEQ ID NO: 73646 - DNA, 25 bp, Saccharomyces pastorianus
caagatggtggcaacaggtccgctt

SEQ ID NO: 73647 - DNA, 25 bp, Saccharomyces pastorianus
gatcgacttatggtggagcttccac

SEQ ID NO: 73648 - DNA, 25 bp, Saccharomyces pastorianus
gaacaatcaaggaaacaagtcgaac

SEQ ID NO: 73649 - DNA, 25 bp, Saccharomyces pastorianus
acttatggtggagcttccacttggg

SEQ ID NO: 73650 - DNA, 25 bp, Saccharomyces pastorianus
caacaggtccgcttggaacaatcaa

SEQ ID NO: 73651 - DNA, 25 bp, Saccharomyces pastorianus
ttccacttgggcttctggcggagaa

SEQ ID NO: 73652 - DNA, 25 bp, Saccharomyces pastorianus
gtggaactggtgacagatcgactta

SEQ ID NO: 73653 - DNA, 25 bp, Saccharomyces pastorianus
ggtacaggcgctacgtctacttggg

SEQ ID NO: 73654 - DNA, 25 bp, Saccharomyces pastorianus
gcggagaatctaatggtgctatgtc

SEQ ID NO: 73655 - DNA, 25 bp, Saccharomyces pastorianus
gaaacggttttgaagctgcgacgat

SEQ ID NO: 73656 - DNA, 25 bp, Saccharomyces pastorianus
ggtaactttaccgacgactctgaat

SEQ ID NO: 73657 - DNA, 25 bp, Saccharomyces pastorianus
ggtcgtctatattcctaactcaaaa

SEQ ID NO: 73658 - DNA, 25 bp, Saccharomyces pastorianus
acaacatcactgagcgtcttggaat

SEQ ID NO: 73659 - DNA, 25 bp, Saccharomyces pastorianus
cgacgactctgaattcttgggctgt

SEQ ID NO: 73660 - DNA, 25 bp, Saccharomyces pastorianus
ggccgagtggcgtctgtatgactta

SEQ ID NO: 73661 - DNA, 25 bp, Saccharomyces pastorianus
tgggctgtatcggttgtgctatcat

SEQ ID NO: 73662 - DNA, 25 bp, Saccharomyces pastorianus
tcaaaacttgccattagtcccacta

SEQ ID NO: 73663 - DNA, 25 bp, Saccharomyces pastorianus
atggcttttccatacgttccagatg

SEQ ID NO: 73664 - DNA, 25 bp, Saccharomyces pastorianus
gtatgacttacacctatgagcgcca

SEQ ID NO: 73665 - DNA, 25 bp, Saccharomyces pastorianus
ttaacggacctggagtacgtgccac

SEQ ID NO: 73666 - DNA, 25 bp, Saccharomyces pastorianus
ctggtcacaatagaactgtcccttc

SEQ ID NO: 73667 - DNA, 25 bp, Saccharomyces pastorianus
aagtgagtcttcctctacaagtgga

SEQ ID NO: 73668 - DNA, 25 bp, Saccharomyces pastorianus
aagcgtctcccatgtttgcatcata

SEQ ID NO: 73669 - DNA, 25 bp, Saccharomyces pastorianus
aagcttattcgtcagtttgttcaaa

SEQ ID NO: 73670 - DNA, 25 bp, Saccharomyces pastorianus
gattggatcctacatgcttttgttg

SEQ ID NO: 73671 - DNA, 25 bp, Saccharomyces pastorianus
aaactgttggttcctctggtgttat

SEQ ID NO: 73672 - DNA, 25 bp, Saccharomyces pastorianus
gccgcgctaggtgtatcgttaatta

SEQ ID NO: 73673 - DNA, 25 bp, Saccharomyces pastorianus
tatcatcaagctttttccacacgaa

SEQ ID NO: 73674 - DNA, 25 bp, Saccharomyces pastorianus
gcatcatgttttgtggtcctgccaa

SEQ ID NO: 73675 - DNA, 25 bp, Saccharomyces pastorianus
accgttactcttatagccttttcag

SEQ ID NO: 73676 - DNA, 25 bp, Saccharomyces pastorianus
atcaaaattcattcgcaagcgtctc

SEQ ID NO: 73677 - DNA, 25 bp, Saccharomyces pastorianus
atcgacttcgtcacttgggtagctg

SEQ ID NO: 73678 - DNA, 25 bp, Saccharomyces pastorianus
ggagttccatccctgttcgcaagaa

SEQ ID NO: 73679 - DNA, 25 bp, Saccharomyces pastorianus
aaatatcgacctagccgacttggcg

SEQ ID NO: 73680 - DNA, 25 bp, Saccharomyces pastorianus
tatcagggtacccaatcgacttcgt

SEQ ID NO: 73681 - DNA, 25 bp, Saccharomyces pastorianus
gagaatgcgcatccaaggcggctaa

SEQ ID NO: 73682 - DNA, 25 bp, Saccharomyces pastorianus
ggttcattggatgccgtactatcgt

SEQ ID NO: 73683 - DNA, 25 bp, Saccharomyces pastorianus
gcatctatcttgagcatgtcactgc

SEQ ID NO: 73684 - DNA, 25 bp, Saccharomyces pastorianus
cttggagtcagcagcatgggcgaat

SEQ ID NO: 73685 - DNA, 25 bp, Saccharomyces pastorianus
aaagcacgccttggacaactacgaa

SEQ ID NO: 73686 - DNA, 25 bp, Saccharomyces pastorianus
gcgaaagactactacaggctgccaa

SEQ ID NO: 73687 - DNA, 25 bp, Saccharomyces pastorianus
gggtagctgagcattgttctgcgaa

SEQ ID NO: 73688 - DNA, 25 bp, Saccharomyces pastorianus
gaggtactaccgctatttaaattct

SEQ ID NO: 73689 - DNA, 25 bp, Saccharomyces pastorianus
tacctacatttaccaacgacccaat

SEQ ID NO: 73690 - DNA, 25 bp, Saccharomyces pastorianus
aaattcttgatacctatgtgcagac

SEQ ID NO: 73691 - DNA, 25 bp, Saccharomyces pastorianus
gatgaactgtactctctgttgaata

SEQ ID NO: 73692 - DNA, 25 bp, Saccharomyces pastorianus
attttgcccaacacaggcgctataa

SEQ ID NO: 73693 - DNA, 25 bp, Saccharomyces pastorianus
actcagcaaacttgtgcacgctttt

SEQ ID NO: 73694 - DNA, 25 bp, Saccharomyces pastorianus
gatcacattaactcacaaacggcaa

SEQ ID NO: 73695 - DNA, 25 bp, Saccharomyces pastorianus
tggacgagcattttggtaggacttc

SEQ ID NO: 73696 - DNA, 25 bp, Saccharomyces pastorianus
gaacagagcctatccagtgaatttg

SEQ ID NO: 73697 - DNA, 25 bp, Saccharomyces pastorianus
gcgtttataacagatcttgcaccaa

SEQ ID NO: 73698 - DNA, 25 bp, Saccharomyces pastorianus
attcatactagctttcgctcttcaa

SEQ ID NO: 73699 - DNA, 25 bp, Saccharomyces pastorianus
agggaccaaccgcagaagttccatc

SEQ ID NO: 73700 - DNA, 25 bp, Saccharomyces pastorianus
agttccatccaaaatcctgtgttca

SEQ ID NO: 73701 - DNA, 25 bp, Saccharomyces pastorianus
gaccttctccagtgctaagcatgaa

SEQ ID NO: 73702 - DNA, 25 bp, Saccharomyces pastorianus
aggactcccatcttgggcgcgaaag

SEQ ID NO: 73703 - DNA, 25 bp, Saccharomyces pastorianus
aaagcagctttcgaagacggacctt

SEQ ID NO: 73704 - DNA, 25 bp, Saccharomyces pastorianus
gctgatcaacaggtacttgctggca

SEQ ID NO: 73705 - DNA, 25 bp, Saccharomyces pastorianus
ttgtccacggacagtttctcgtcag

SEQ ID NO: 73706 - DNA, 25 bp, Saccharomyces pastorianus
aagccgcttgatgtggcgcagacgt

SEQ ID NO: 73707 - DNA, 25 bp, Saccharomyces pastorianus
aatgcgagcgtcactggagggacca

SEQ ID NO: 73708 - DNA, 25 bp, Saccharomyces pastorianus
caagaaacccagttcgttcaggact

SEQ ID NO: 73709 - DNA, 25 bp, Saccharomyces pastorianus
accgtattcgctctattctaacaac

SEQ ID NO: 73710 - DNA, 25 bp, Saccharomyces pastorianus
agacactcgtcctgctacggtatac

SEQ ID NO: 73711 - DNA, 25 bp, Saccharomyces pastorianus
agagaatccacttcgatgctttcgt

SEQ ID NO: 73712 - DNA, 25 bp, Saccharomyces pastorianus
gacagtcttccttaggtgacacagc

SEQ ID NO: 73713 - DNA, 25 bp, Saccharomyces pastorianus
atagcggaaacttcgcccattattc

SEQ ID NO: 73714 - DNA, 25 bp, Saccharomyces pastorianus
aacgctcaaagcctaggtccagaca

SEQ ID NO: 73715 - DNA, 25 bp, Saccharomyces pastorianus
gaacgcacggcagctaatttgagaa

SEQ ID NO: 73716 - DNA, 25 bp, Saccharomyces pastorianus
atagcagtactcttattcaccaact

SEQ ID NO: 73717 - DNA, 25 bp, Saccharomyces pastorianus
ctgaattggattcgctggcagcaaa

SEQ ID NO: 73718 - DNA, 25 bp, Saccharomyces pastorianus
ccatcgtctaatcttcccaatgaaa

SEQ ID NO: 73719 - DNA, 25 bp, Saccharomyces pastorianus
tcagccaaatgatactactctccca

SEQ ID NO: 73720 - DNA, 25 bp, Saccharomyces pastorianus
attcgtcccgctccaagaagagtaa

SEQ ID NO: 73721 - DNA, 25 bp, Saccharomyces pastorianus
gcaatgagtctcatcttggattcaa

SEQ ID NO: 73722 - DNA, 25 bp, Saccharomyces pastorianus
tgcagattcagactccgacaacgac

SEQ ID NO: 73723 - DNA, 25 bp, Saccharomyces pastorianus
aaaagaggacgacatgggcccaccg

SEQ ID NO: 73724 - DNA, 25 bp, Saccharomyces pastorianus
gttatagcggccaagcgagccagaa

SEQ ID NO: 73725 - DNA, 25 bp, Saccharomyces pastorianus
ttttcattggttcagagcacgagca

SEQ ID NO: 73726 - DNA, 25 bp, Saccharomyces pastorianus
tatatcctaaggaaccacctgcccg

SEQ ID NO: 73727 - DNA, 25 bp, Saccharomyces pastorianus
cacaattcaaccactgtaccagagc

SEQ ID NO: 73728 - DNA, 25 bp, Saccharomyces pastorianus
accaccgggcccacagaatagtaag

SEQ ID NO: 73729 - DNA, 25 bp, Saccharomyces pastorianus
agtagcttcttttcctaaagccata

SEQ ID NO: 73730 - DNA, 25 bp, Saccharomyces pastorianus
tatgaagaaaggaccaccgggccca

SEQ ID NO: 73731 - DNA, 25 bp, Saccharomyces pastorianus
gggttattcctccagatttgcagat

SEQ ID NO: 73732 - DNA, 25 bp, Saccharomyces pastorianus
ggcccgcagggaataagttggcttt

SEQ ID NO: 73733 - DNA, 25 bp, Saccharomyces pastorianus
ggaaagagctttcgcttactcactg

SEQ ID NO: 73734 - DNA, 25 bp, Saccharomyces pastorianus
cactgtcgccgtgttttcctttgtt

SEQ ID NO: 73735 - DNA, 25 bp, Saccharomyces pastorianus
cgccgcgcaaaaagaggcccgcagg

SEQ ID NO: 73736 - DNA, 25 bp, Saccharomyces pastorianus
tttcgcttactcactgtcgccgtgt

SEQ ID NO: 73737 - DNA, 25 bp, Saccharomyces pastorianus
ttggctttaccggaacttcgccaga

SEQ ID NO: 73738 - DNA, 25 bp, Saccharomyces pastorianus
cccttgcattgcctggaaagagctt

SEQ ID NO: 73739 - DNA, 25 bp, Saccharomyces pastorianus
cagacaacggcggaggacccttgca

SEQ ID NO: 73740 - DNA, 25 bp, Saccharomyces pastorianus
aagagctttcgcttactcactgtcg

SEQ ID NO: 73741 - DNA, 25 bp, Saccharomyces pastorianus
gggcgcttaaatccgccgcgcaaaa

SEQ ID NO: 73742 - DNA, 25 bp, Saccharomyces pastorianus
ttaccggaacttcgccagacaacgg

SEQ ID NO: 73743 - DNA, 25 bp, Saccharomyces pastorianus
aggtgccacctacggtaagccaact

SEQ ID NO: 73744 - DNA, 25 bp, Saccharomyces pastorianus
gctagaagactaggttacaaggcca

SEQ ID NO: 73745 - DNA, 25 bp, Saccharomyces pastorianus
aagactaggttacaaggccaagcaa

SEQ ID NO: 73746 - DNA, 25 bp, Saccharomyces pastorianus
gatttaccgtgtcagggttagacgt

SEQ ID NO: 73747 - DNA, 25 bp, Saccharomyces pastorianus
gacctgttccaaaaggtgccaccta

SEQ ID NO: 73748 - DNA, 25 bp, Saccharomyces pastorianus
tgttccaaaaggtgccacctacggt

SEQ ID NO: 73749 - DNA, 25 bp, Saccharomyces pastorianus
tcgtgatttaccgtgtcagggttag

SEQ ID NO: 73750 - DNA, 25 bp, Saccharomyces pastorianus
aggtttcgtgatttaccgtgtcagg

SEQ ID NO: 73751 - DNA, 25 bp, Saccharomyces pastorianus
gtgatttaccgtgtcagggttagac

SEQ ID NO: 73752 - DNA, 25 bp, Saccharomyces pastorianus
gtttcgtgatttaccgtgtcagggt

SEQ ID NO: 73753 - DNA, 25 bp, Saccharomyces pastorianus
gagacctgttccaaaaggtgccacc

SEQ ID NO: 73754 - DNA, 25 bp, Saccharomyces pastorianus
tatcatctcctgtgctgttttgcct

SEQ ID NO: 73755 - DNA, 25 bp, Saccharomyces pastorianus
ctcgtcatctttgtatagcctcttg

SEQ ID NO: 73756 - DNA, 25 bp, Saccharomyces pastorianus
agcctcttgttctctagggtctcta

SEQ ID NO: 73757 - DNA, 25 bp, Saccharomyces pastorianus
tgttctctagggtctctatcatctc

SEQ ID NO: 73758 - DNA, 25 bp, Saccharomyces pastorianus
gtatagcctcttgttctctagggtc

SEQ ID NO: 73759 - DNA, 25 bp, Saccharomyces pastorianus
gtcctcgtcatctttgtatagcctc

SEQ ID NO: 73760 - DNA, 25 bp, Saccharomyces pastorianus
ctttgtatagcctcttgttctctag

SEQ ID NO: 73761 - DNA, 25 bp, Saccharomyces pastorianus
tcttgttctctagggtctctatcat

SEQ ID NO: 73762 - DNA, 25 bp, Saccharomyces pastorianus
gtcatctttgtatagcctcttgttc

SEQ ID NO: 73763 - DNA, 25 bp, Saccharomyces pastorianus
tctctatcatctcctgtgctgtttt

SEQ ID NO: 73764 - DNA, 25 bp, Saccharomyces pastorianus
tagggtctctatcatctcctgtgct

SEQ ID NO: 73765 - DNA, 25 bp, Saccharomyces pastorianus
aacgatgattcgtatggatcttcta

SEQ ID NO: 73766 - DNA, 25 bp, Saccharomyces pastorianus
cggttcttccaacaacgatgacact

SEQ ID NO: 73767 - DNA, 25 bp, Saccharomyces pastorianus
gaacaagtcatcttacggttcttcc

SEQ ID NO: 73768 - DNA, 25 bp, Saccharomyces pastorianus
acgatgacacttatggttcttccaa

SEQ ID NO: 73769 - DNA, 25 bp, Saccharomyces pastorianus
cgacgactcatatggatcttctaac

SEQ ID NO: 73770 - DNA, 25 bp, Saccharomyces pastorianus
aacaacgatgacacttacggctctt

SEQ ID NO: 73771 - DNA, 25 bp, Saccharomyces pastorianus
ggctcttccaacaacgacgactcat

SEQ ID NO: 73772 - DNA, 25 bp, Saccharomyces pastorianus
aagaacaagtcctcttacggctctt

SEQ ID NO: 73773 - DNA, 25 bp, Saccharomyces pastorianus
ggttcttccaacaacgatgacactt

SEQ ID NO: 73774 - DNA, 25 bp, Saccharomyces pastorianus
ggttcttccaacaacgacgactcat

SEQ ID NO: 73775 - DNA, 25 bp, Saccharomyces pastorianus
gattcgtatggatcttctaacaaga

SEQ ID NO: 73776 - DNA, 25 bp, Saccharomyces pastorianus
aaccaatacggtggcgacgacaatt

SEQ ID NO: 73777 - DNA, 25 bp, Saccharomyces pastorianus
aacgatggttcgtatggttccaaca

SEQ ID NO: 73778 - DNA, 25 bp, Saccharomyces pastorianus
gtatggttccaacaataatgattct

SEQ ID NO: 73779 - DNA, 25 bp, Saccharomyces pastorianus
gtaaccaatacggtggcgacgacaa

SEQ ID NO: 73780 - DNA, 25 bp, Saccharomyces pastorianus
ttcatctaacaatggtggccgtaac

SEQ ID NO: 73781 - DNA, 25 bp, Saccharomyces pastorianus
aatggtggccgtaaccaatacggtg

SEQ ID NO: 73782 - DNA, 25 bp, Saccharomyces pastorianus
gtggccgtaaccaatacggtggcga

SEQ ID NO: 73783 - DNA, 25 bp, Saccharomyces pastorianus
ggttcatctaacaatggtggccgta

SEQ ID NO: 73784 - DNA, 25 bp, Saccharomyces pastorianus
tatggttcatctaacaatggtggcc

SEQ ID NO: 73785 - DNA, 25 bp, Saccharomyces pastorianus
tctaacaatggtggccgtaaccaat

SEQ ID NO: 73786 - DNA, 25 bp, Saccharomyces pastorianus
ggttccaacaataatgattcttatg

SEQ ID NO: 73787 - DNA, 25 bp, Saccharomyces pastorianus
gtctataccgttgattgagctcagt

SEQ ID NO: 73788 - DNA, 25 bp, Saccharomyces pastorianus
agacttccccaatagactcattgtc

SEQ ID NO: 73789 - DNA, 25 bp, Saccharomyces pastorianus
ttatgaatttctcaaccccagcaga

SEQ ID NO: 73790 - DNA, 25 bp, Saccharomyces pastorianus
agggatccgaacacatgcaatactg

SEQ ID NO: 73791 - DNA, 25 bp, Saccharomyces pastorianus
tcttctacaacacctagggatccga

SEQ ID NO: 73792 - DNA, 25 bp, Saccharomyces pastorianus
taccctcttcgccttgtggaatgta

SEQ ID NO: 73793 - DNA, 25 bp, Saccharomyces pastorianus
ttccttaactggttcacacttcaac

SEQ ID NO: 73794 - DNA, 25 bp, Saccharomyces pastorianus
tgttgccaccgtaaagaagcttgtc

SEQ ID NO: 73795 - DNA, 25 bp, Saccharomyces pastorianus
gagctcagtcactcaagttcagcag

SEQ ID NO: 73796 - DNA, 25 bp, Saccharomyces pastorianus
aaattccattgaccagtgacgccga

SEQ ID NO: 73797 - DNA, 25 bp, Saccharomyces pastorianus
atttcttcgaatcaccaacttcctt

SEQ ID NO: 73798 - DNA, 25 bp, Saccharomyces pastorianus
gaagacccgtgtcaaggattttctc

SEQ ID NO: 73799 - DNA, 25 bp, Saccharomyces pastorianus
ggataccactgctttaaacaccgtt

SEQ ID NO: 73800 - DNA, 25 bp, Saccharomyces pastorianus
ttttctcattcattatcctcatagt

SEQ ID NO: 73801 - DNA, 25 bp, Saccharomyces pastorianus
tggcgttgttcggaggacctgaaaa

SEQ ID NO: 73802 - DNA, 25 bp, Saccharomyces pastorianus
attgagactttagccgttttcagaa

SEQ ID NO: 73803 - DNA, 25 bp, Saccharomyces pastorianus
gatagactagcttcatggcgttgtt

SEQ ID NO: 73804 - DNA, 25 bp, Saccharomyces pastorianus
gcgatctgatacgtgagcggctaaa

SEQ ID NO: 73805 - DNA, 25 bp, Saccharomyces pastorianus
gcttggtatccaatgtttcctcgga

SEQ ID NO: 73806 - DNA, 25 bp, Saccharomyces pastorianus
aaacggagcggttcttctcatcaat

SEQ ID NO: 73807 - DNA, 25 bp, Saccharomyces pastorianus
gagatacccttacacttggatatga

SEQ ID NO: 73808 - DNA, 25 bp, Saccharomyces pastorianus
aagatcgttctacctacagatttgg

SEQ ID NO: 73809 - DNA, 25 bp, Saccharomyces pastorianus
cacgatctaggttttttggcgctac

SEQ ID NO: 73810 - DNA, 25 bp, Saccharomyces pastorianus
gaacacctaagatcgtatacctaca

SEQ ID NO: 73811 - DNA, 25 bp, Saccharomyces pastorianus
aactttatgcccgactctatcttaa

SEQ ID NO: 73812 - DNA, 25 bp, Saccharomyces pastorianus
caatgagtgaatcggcttttgcatc

SEQ ID NO: 73813 - DNA, 25 bp, Saccharomyces pastorianus
gcttttgcatctttgggtccagtag

SEQ ID NO: 73814 - DNA, 25 bp, Saccharomyces pastorianus
gccacaattgctgatcttagtaaca

SEQ ID NO: 73815 - DNA, 25 bp, Saccharomyces pastorianus
gaaatagaatggttcctccggtggg

SEQ ID NO: 73816 - DNA, 25 bp, Saccharomyces pastorianus
gaatacagctgttaaccctgcacgc

SEQ ID NO: 73817 - DNA, 25 bp, Saccharomyces pastorianus
gggataatacgccagctatagctca

SEQ ID NO: 73818 - DNA, 25 bp, Saccharomyces pastorianus
tcaacatcttctggccatcaatcaa

SEQ ID NO: 73819 - DNA, 25 bp, Saccharomyces pastorianus
tttacgatatcagcaccgaactctc

SEQ ID NO: 73820 - DNA, 25 bp, Saccharomyces pastorianus
gaactatctaaactggaccgcctac

SEQ ID NO: 73821 - DNA, 25 bp, Saccharomyces pastorianus
gcggctgcagcgtatggttctatta

SEQ ID NO: 73822 - DNA, 25 bp, Saccharomyces pastorianus
ctctgatttacctgatattggcaat

SEQ ID NO: 73823 - DNA, 25 bp, Saccharomyces pastorianus
aagcggatttgatgtagcggctgca

SEQ ID NO: 73824 - DNA, 25 bp, Saccharomyces pastorianus
aaacttgagtttccattcacacagg

SEQ ID NO: 73825 - DNA, 25 bp, Saccharomyces pastorianus
gaccgcctacataactctcatgatc

SEQ ID NO: 73826 - DNA, 25 bp, Saccharomyces pastorianus
aactgtctaccttcaggattggcct

SEQ ID NO: 73827 - DNA, 25 bp, Saccharomyces pastorianus
gctggatcacgctaattctaggttt

SEQ ID NO: 73828 - DNA, 25 bp, Saccharomyces pastorianus
ggaggacagcgtgactagacattat

SEQ ID NO: 73829 - DNA, 25 bp, Saccharomyces pastorianus
gaggtatataccgagctggatcacg

SEQ ID NO: 73830 - DNA, 25 bp, Saccharomyces pastorianus
ctcctctgcaggtttagttacggtt

SEQ ID NO: 73831 - DNA, 25 bp, Saccharomyces pastorianus
aagatcataggtgcccagtgtccgg

SEQ ID NO: 73832 - DNA, 25 bp, Saccharomyces pastorianus
agaagcggatcaccgactttcggag

SEQ ID NO: 73833 - DNA, 25 bp, Saccharomyces pastorianus
gcttgttttcattcgacagcggcaa

SEQ ID NO: 73834 - DNA, 25 bp, Saccharomyces pastorianus
aacacccggtcgcagcggaagctgt

SEQ ID NO: 73835 - DNA, 25 bp, Saccharomyces pastorianus
tccagtgcctggacagagccaatgt

SEQ ID NO: 73836 - DNA, 25 bp, Saccharomyces pastorianus
agcggcaagaaggattctcaacccc

SEQ ID NO: 73837 - DNA, 25 bp, Saccharomyces pastorianus
gagccaatgttctggacgccaccga

SEQ ID NO: 73838 - DNA, 25 bp, Saccharomyces pastorianus
gtgtccggcggagaacaagaagttt

SEQ ID NO: 73839 - DNA, 25 bp, Saccharomyces pastorianus
gtccagggacgtgttcttccagtgc

SEQ ID NO: 73840 - DNA, 25 bp, Saccharomyces pastorianus
tgcgctcacagttggatcaagtact

SEQ ID NO: 73841 - DNA, 25 bp, Saccharomyces pastorianus
aagtttgaggagaactgcgctcaca

SEQ ID NO: 73842 - DNA, 25 bp, Saccharomyces pastorianus
ttcacagacggaataacgataacaa

SEQ ID NO: 73843 - DNA, 25 bp, Saccharomyces pastorianus
gatgtccttgacgaagaaccagtaa

SEQ ID NO: 73844 - DNA, 25 bp, Saccharomyces pastorianus
aacagaagccaattcacagacggaa

SEQ ID NO: 73845 - DNA, 25 bp, Saccharomyces pastorianus
gaaccagtaaagaaacagaagccaa

SEQ ID NO: 73846 - DNA, 25 bp, Saccharomyces pastorianus
gccgatgtccttgacgaagaaccag

SEQ ID NO: 73847 - DNA, 25 bp, Saccharomyces pastorianus
gacactgaaaccaagacaaatcaca

SEQ ID NO: 73848 - DNA, 25 bp, Saccharomyces pastorianus
aagagacactgaaaccaagacaaat

SEQ ID NO: 73849 - DNA, 25 bp, Saccharomyces pastorianus
agaagccaattcacagacggaataa

SEQ ID NO: 73850 - DNA, 25 bp, Saccharomyces pastorianus
gccaattcacagacggaataacgat

SEQ ID NO: 73851 - DNA, 25 bp, Saccharomyces pastorianus
tatatgggccgatgtccttgacgaa

SEQ ID NO: 73852 - DNA, 25 bp, Saccharomyces pastorianus
tctatatgggccgatgtccttgacg

SEQ ID NO: 73853 - DNA, 25 bp, Saccharomyces pastorianus
aacttgcgggttttgagcatacgac

SEQ ID NO: 73854 - DNA, 25 bp, Saccharomyces pastorianus
ggatgtggttaatctatccaacctt

SEQ ID NO: 73855 - DNA, 25 bp, Saccharomyces pastorianus
tacagtcgacggaaacctgcttcgt

SEQ ID NO: 73856 - DNA, 25 bp, Saccharomyces pastorianus
agtgatgcagatacagtttccgtaa

SEQ ID NO: 73857 - DNA, 25 bp, Saccharomyces pastorianus
gacatgatcctcctttaaacggtaa

SEQ ID NO: 73858 - DNA, 25 bp, Saccharomyces pastorianus
gaaccttcgccgtttgaagttcaat

SEQ ID NO: 73859 - DNA, 25 bp, Saccharomyces pastorianus
gtgatgatgaattcctccagagcat

SEQ ID NO: 73860 - DNA, 25 bp, Saccharomyces pastorianus
tccagagcatagcaggtgaccttgt

SEQ ID NO: 73861 - DNA, 25 bp, Saccharomyces pastorianus
taaggttggcttcgcatgctttgaa

SEQ ID NO: 73862 - DNA, 25 bp, Saccharomyces pastorianus
tttacgagacagtgcttccgacctg

SEQ ID NO: 73863 - DNA, 25 bp, Saccharomyces pastorianus
gcaggtgaccttgtttccttgacaa

SEQ ID NO: 73864 - DNA, 25 bp, Saccharomyces pastorianus
aatccttggcagtgttgtgttcttc

SEQ ID NO: 73865 - DNA, 25 bp, Saccharomyces pastorianus
atgtccttaccagcgtagtccaaga

SEQ ID NO: 73866 - DNA, 25 bp, Saccharomyces pastorianus
gtattgctcgacatcttcgtagttt

SEQ ID NO: 73867 - DNA, 25 bp, Saccharomyces pastorianus
ttcattatctccgtgatgtccttac

SEQ ID NO: 73868 - DNA, 25 bp, Saccharomyces pastorianus
aagtaacccagcaatccttggcagt

SEQ ID NO: 73869 - DNA, 25 bp, Saccharomyces pastorianus
aaacagctccagtgtcttggaagta

SEQ ID NO: 73870 - DNA, 25 bp, Saccharomyces pastorianus
gtagtccaagatgaactcctcacca

SEQ ID NO: 73871 - DNA, 25 bp, Saccharomyces pastorianus
gtacatcgctgtctttcattatctc

SEQ ID NO: 73872 - DNA, 25 bp, Saccharomyces pastorianus
ggtcacgtcataaatctttctgttc

SEQ ID NO: 73873 - DNA, 25 bp, Saccharomyces pastorianus
gttctatcactattccttacagctc

SEQ ID NO: 73874 - DNA, 25 bp, Saccharomyces pastorianus
tgtgttcttctaccgtcttcttaga

SEQ ID NO: 73875 - DNA, 25 bp, Saccharomyces pastorianus
agaaggaccaaacagcggctctagc

SEQ ID NO: 73876 - DNA, 25 bp, Saccharomyces pastorianus
ttgtcaaccacaccctgtacatgga

SEQ ID NO: 73877 - DNA, 25 bp, Saccharomyces pastorianus
gaaagctgaccttcgcagatgtcaa

SEQ ID NO: 73878 - DNA, 25 bp, Saccharomyces pastorianus
gaagcaatacgaccaacctctcgaa

SEQ ID NO: 73879 - DNA, 25 bp, Saccharomyces pastorianus
aaagcgatgccgagagtttgcccaa

SEQ ID NO: 73880 - DNA, 25 bp, Saccharomyces pastorianus
ctgctctgagacatacatccgtgtt

SEQ ID NO: 73881 - DNA, 25 bp, Saccharomyces pastorianus
gagagtttgcccaagctacaacctg

SEQ ID NO: 73882 - DNA, 25 bp, Saccharomyces pastorianus
gggccatttacaggctaagccactt

SEQ ID NO: 73883 - DNA, 25 bp, Saccharomyces pastorianus
tacaacctgccatcagcgtaagtag

SEQ ID NO: 73884 - DNA, 25 bp, Saccharomyces pastorianus
taacttcatgtacgcctacctgaac

SEQ ID NO: 73885 - DNA, 25 bp, Saccharomyces pastorianus
agcaggtcctgctgagtaacttcat

SEQ ID NO: 73886 - DNA, 25 bp, Saccharomyces pastorianus
ggacggatccatttatttcagtata

SEQ ID NO: 73887 - DNA, 25 bp, Saccharomyces pastorianus
aaaggcggcctagacgacattttcg

SEQ ID NO: 73888 - DNA, 25 bp, Saccharomyces pastorianus
ataattctcagcaattcggtggcca

SEQ ID NO: 73889 - DNA, 25 bp, Saccharomyces pastorianus
gtgcaaccagtctttgtaaatccga

SEQ ID NO: 73890 - DNA, 25 bp, Saccharomyces pastorianus
tcggtggccattgctgcacaaacag

SEQ ID NO: 73891 - DNA, 25 bp, Saccharomyces pastorianus
gatgaccagctgtgtggttacatca

SEQ ID NO: 73892 - DNA, 25 bp, Saccharomyces pastorianus
ttgagtatcctttgctcccaatata

SEQ ID NO: 73893 - DNA, 25 bp, Saccharomyces pastorianus
gaatggatcctcacgtcggagttgc

SEQ ID NO: 73894 - DNA, 25 bp, Saccharomyces pastorianus
tttacgaaccactttcccgatgatt

SEQ ID NO: 73895 - DNA, 25 bp, Saccharomyces pastorianus
tatagactacttgggcgatgcaaat

SEQ ID NO: 73896 - DNA, 25 bp, Saccharomyces pastorianus
gaagccgatactcatctgttgtaat

SEQ ID NO: 73897 - DNA, 25 bp, Saccharomyces pastorianus
cattggatatgagagctgtttcgtt

SEQ ID NO: 73898 - DNA, 25 bp, Saccharomyces pastorianus
gagccccgttccaaaggattttcat

SEQ ID NO: 73899 - DNA, 25 bp, Saccharomyces pastorianus
tccatggtttgcgacttagagctgc

SEQ ID NO: 73900 - DNA, 25 bp, Saccharomyces pastorianus
atgcctcctggtagcgaaatgacaa

SEQ ID NO: 73901 - DNA, 25 bp, Saccharomyces pastorianus
tgtttcgttatattccgttgcctat

SEQ ID NO: 73902 - DNA, 25 bp, Saccharomyces pastorianus
ggtttttaaggatgcctcctggtag

SEQ ID NO: 73903 - DNA, 25 bp, Saccharomyces pastorianus
cacttggcgcgggttgttagattac

SEQ ID NO: 73904 - DNA, 25 bp, Saccharomyces pastorianus
agtgatcatttgtccatggtttgcg

SEQ ID NO: 73905 - DNA, 25 bp, Saccharomyces pastorianus
gggtgaacctgaaatttccaattgg

SEQ ID NO: 73906 - DNA, 25 bp, Saccharomyces pastorianus
gatggcacaacttcacaactcattg

SEQ ID NO: 73907 - DNA, 25 bp, Saccharomyces pastorianus
gttgcctataaaaacgttcatccag

SEQ ID NO: 73908 - DNA, 25 bp, Saccharomyces pastorianus
gctagaccagagaatatccgggatg

SEQ ID NO: 73909 - DNA, 25 bp, Saccharomyces pastorianus
gaaagtcaacctatcacgatgctcc

SEQ ID NO: 73910 - DNA, 25 bp, Saccharomyces pastorianus
atgctccccgatatatcacttgaca

SEQ ID NO: 73911 - DNA, 25 bp, Saccharomyces pastorianus
aacagtatcgagattcgctgccgca

SEQ ID NO: 73912 - DNA, 25 bp, Saccharomyces pastorianus
gcaatttgaaaactcgctgttgggt

SEQ ID NO: 73913 - DNA, 25 bp, Saccharomyces pastorianus
ttcgctgccgcaattgactgagaga

SEQ ID NO: 73914 - DNA, 25 bp, Saccharomyces pastorianus
gaaccatacagcttctacaagatga

SEQ ID NO: 73915 - DNA, 25 bp, Saccharomyces pastorianus
agaaggttgaactcgcaaatcacaa

SEQ ID NO: 73916 - DNA, 25 bp, Saccharomyces pastorianus
gggtgaatgaactctacagaaccat

SEQ ID NO: 73917 - DNA, 25 bp, Saccharomyces pastorianus
gcagtcatcaagcacgtttgccaat

SEQ ID NO: 73918 - DNA, 25 bp, Saccharomyces pastorianus
aacgttatgttggtgttccaggaat

SEQ ID NO: 73919 - DNA, 25 bp, Saccharomyces pastorianus
gcgtagcttgcatgtgagtgtcaga

SEQ ID NO: 73920 - DNA, 25 bp, Saccharomyces pastorianus
agagcttgcgttcctttgatggtat

SEQ ID NO: 73921 - DNA, 25 bp, Saccharomyces pastorianus
gtgggatcatatgacttccattgag

SEQ ID NO: 73922 - DNA, 25 bp, Saccharomyces pastorianus
gttgcgcgaccaaattgttatagct

SEQ ID NO: 73923 - DNA, 25 bp, Saccharomyces pastorianus
ctttgatggtatttccgagcggaca

SEQ ID NO: 73924 - DNA, 25 bp, Saccharomyces pastorianus
cttgtacagcaaggcaaggtcctct

SEQ ID NO: 73925 - DNA, 25 bp, Saccharomyces pastorianus
cagagactctctgcgtaaattgcaa

SEQ ID NO: 73926 - DNA, 25 bp, Saccharomyces pastorianus
attactatgctatttctcacgggag

SEQ ID NO: 73927 - DNA, 25 bp, Saccharomyces pastorianus
gccaatttctgtggtaatagcaagc

SEQ ID NO: 73928 - DNA, 25 bp, Saccharomyces pastorianus
tggcaaggcactttggcatggcact

SEQ ID NO: 73929 - DNA, 25 bp, Saccharomyces pastorianus
gatcgacattctttatattcactgg

SEQ ID NO: 73930 - DNA, 25 bp, Saccharomyces pastorianus
gaatttgggtcgttccctcaagagt

SEQ ID NO: 73931 - DNA, 25 bp, Saccharomyces pastorianus
cattcccaagggtagttcaagcagt

SEQ ID NO: 73932 - DNA, 25 bp, Saccharomyces pastorianus
acggacccagatcattggttcctta

SEQ ID NO: 73933 - DNA, 25 bp, Saccharomyces pastorianus
aactttacgatttctgtcctggaca

SEQ ID NO: 73934 - DNA, 25 bp, Saccharomyces pastorianus
acggtatcgtgtccagaccagtcaa

SEQ ID NO: 73935 - DNA, 25 bp, Saccharomyces pastorianus
cactgcatggtttactgttgatcta

SEQ ID NO: 73936 - DNA, 25 bp, Saccharomyces pastorianus
tccaacaaggttgccacggtatcgt

SEQ ID NO: 73937 - DNA, 25 bp, Saccharomyces pastorianus
atgccgctaagaacatatctgccgt

SEQ ID NO: 73938 - DNA, 25 bp, Saccharomyces pastorianus
tagaaggtcagctgctcattcccaa

SEQ ID NO: 73939 - DNA, 25 bp, Saccharomyces pastorianus
cctcaagagtctttcgctgtggaat

SEQ ID NO: 73940 - DNA, 25 bp, Saccharomyces pastorianus
gcatacagtttctactcatctgaag

SEQ ID NO: 73941 - DNA, 25 bp, Saccharomyces pastorianus
tcccaacaatatacatgcgatcctt

SEQ ID NO: 73942 - DNA, 25 bp, Saccharomyces pastorianus
ggacccagaagtagcaatcacgccc

SEQ ID NO: 73943 - DNA, 25 bp, Saccharomyces pastorianus
tttctctgcttggacccagaagtag

SEQ ID NO: 73944 - DNA, 25 bp, Saccharomyces pastorianus
cacaaatttggaggtctttctctgc

SEQ ID NO: 73945 - DNA, 25 bp, Saccharomyces pastorianus
tatttacccatcacaaatttggagg

SEQ ID NO: 73946 - DNA, 25 bp, Saccharomyces pastorianus
tcattattcatctcttccttgcttt

SEQ ID NO: 73947 - DNA, 25 bp, Saccharomyces pastorianus
gcgatcctttgtttcatatagcgta

SEQ ID NO: 73948 - DNA, 25 bp, Saccharomyces pastorianus
atatagcgtatatttacccatcaca

SEQ ID NO: 73949 - DNA, 25 bp, Saccharomyces pastorianus
ggtccattgcgtcattattcatctc

SEQ ID NO: 73950 - DNA, 25 bp, Saccharomyces pastorianus
ccccaccaagggaatggtccattgc

SEQ ID NO: 73951 - DNA, 25 bp, Saccharomyces pastorianus
gaacatggtttctcttttattgctc

SEQ ID NO: 73952 - DNA, 25 bp, Saccharomyces pastorianus
tgaaaggcagcacaaaatccggatg

SEQ ID NO: 73953 - DNA, 25 bp, Saccharomyces pastorianus
atgtaccctctttaggatctcgacg

SEQ ID NO: 73954 - DNA, 25 bp, Saccharomyces pastorianus
ggacgatagtgaacgcaattctgct

SEQ ID NO: 73955 - DNA, 25 bp, Saccharomyces pastorianus
gacggttgacagtccttgcaagcat

SEQ ID NO: 73956 - DNA, 25 bp, Saccharomyces pastorianus
ggatctcgacggatttatcactagc

SEQ ID NO: 73957 - DNA, 25 bp, Saccharomyces pastorianus
attccttctttttgattcggacgat

SEQ ID NO: 73958 - DNA, 25 bp, Saccharomyces pastorianus
attgcatagccagtgtcgtcatctt

SEQ ID NO: 73959 - DNA, 25 bp, Saccharomyces pastorianus
tcatcttggcatttctcgactggca

SEQ ID NO: 73960 - DNA, 25 bp, Saccharomyces pastorianus
aaatccggatgcctttctaactcat

SEQ ID NO: 73961 - DNA, 25 bp, Saccharomyces pastorianus
tggcgaatggccgaattccttcttt

SEQ ID NO: 73962 - DNA, 25 bp, Saccharomyces pastorianus
gcttcgagttgcttttgcatggagg

SEQ ID NO: 73963 - DNA, 25 bp, Saccharomyces pastorianus
ttggacgatgttactgctggcacta

SEQ ID NO: 73964 - DNA, 25 bp, Saccharomyces pastorianus
gagaaggcggccagcacatcgaatt

SEQ ID NO: 73965 - DNA, 25 bp, Saccharomyces pastorianus
agtgctagcgcggatggtgtaaaca

SEQ ID NO: 73966 - DNA, 25 bp, Saccharomyces pastorianus
tactctcaatactgtgtccgtcgta

SEQ ID NO: 73967 - DNA, 25 bp, Saccharomyces pastorianus
tgatcaggatgccacacacagcgat

SEQ ID NO: 73968 - DNA, 25 bp, Saccharomyces pastorianus
tagagtctcagcgtgtcgacgacga

SEQ ID NO: 73969 - DNA, 25 bp, Saccharomyces pastorianus
ggtatttactcacaagttctgccaa

SEQ ID NO: 73970 - DNA, 25 bp, Saccharomyces pastorianus
gtgatcaccccactgttgaacggag

SEQ ID NO: 73971 - DNA, 25 bp, Saccharomyces pastorianus
aagacacattttgaccggtacggat

SEQ ID NO: 73972 - DNA, 25 bp, Saccharomyces pastorianus
gattcccatccaagagcgaacgatt

SEQ ID NO: 73973 - DNA, 25 bp, Saccharomyces pastorianus
atgacctagatctgctccctggaga

SEQ ID NO: 73974 - DNA, 25 bp, Saccharomyces pastorianus
aaaacctctacaatcgttgctctgg

SEQ ID NO: 73975 - DNA, 25 bp, Saccharomyces pastorianus
aagagaaccttccatgggtcgagaa

SEQ ID NO: 73976 - DNA, 25 bp, Saccharomyces pastorianus
gaacgaggtgatcaccacggttcgt

SEQ ID NO: 73977 - DNA, 25 bp, Saccharomyces pastorianus
agacgccatgacgaatgccgcgcag

SEQ ID NO: 73978 - DNA, 25 bp, Saccharomyces pastorianus
ggtacaccaagaacacacggttttg

SEQ ID NO: 73979 - DNA, 25 bp, Saccharomyces pastorianus
aagacttcgcctccacaagacagat

SEQ ID NO: 73980 - DNA, 25 bp, Saccharomyces pastorianus
ctggagctaaatgcatctgacgata

SEQ ID NO: 73981 - DNA, 25 bp, Saccharomyces pastorianus
aatcgttgctctggcgcgtgaaata

SEQ ID NO: 73982 - DNA, 25 bp, Saccharomyces pastorianus
aagttgccgcaccttttgttctacg

SEQ ID NO: 73983 - DNA, 25 bp, Saccharomyces pastorianus
aactactctaacatggttctggagc

SEQ ID NO: 73984 - DNA, 25 bp, Saccharomyces pastorianus
gggatacctcaacaagacggattca

SEQ ID NO: 73985 - DNA, 25 bp, Saccharomyces pastorianus
ggccgctttcaagacggtttctaag

SEQ ID NO: 73986 - DNA, 25 bp, Saccharomyces pastorianus
atcccgtgtacctgtttgtgtgcaa

SEQ ID NO: 73987 - DNA, 25 bp, Saccharomyces pastorianus
ggtgcagtcttccatcttgaacaag

SEQ ID NO: 73988 - DNA, 25 bp, Saccharomyces pastorianus
aacccgttcacgaatgaggcgcatc

SEQ ID NO: 73989 - DNA, 25 bp, Saccharomyces pastorianus
acggtttctaagtacgggctgctgc

SEQ ID NO: 73990 - DNA, 25 bp, Saccharomyces pastorianus
cagtacttgagcagcgaccgcggaa

SEQ ID NO: 73991 - DNA, 25 bp, Saccharomyces pastorianus
ctgggagctgtacacggacttcaat

SEQ ID NO: 73992 - DNA, 25 bp, Saccharomyces pastorianus
gacaggtgtacaagcccgtgctgga

SEQ ID NO: 73993 - DNA, 25 bp, Saccharomyces pastorianus
tgagcgcagtcaagtaccagccaac

SEQ ID NO: 73994 - DNA, 25 bp, Saccharomyces pastorianus
ttgtgtgcaacaaggaccccggcgt

SEQ ID NO: 73995 - DNA, 25 bp, Saccharomyces pastorianus
aggaagttcgtgtcgcaggtcaaca

SEQ ID NO: 73996 - DNA, 25 bp, Saccharomyces pastorianus
taaggctagtatgggcttttcttcg

SEQ ID NO: 73997 - DNA, 25 bp, Saccharomyces pastorianus
atgtcctttggaatcttcagttcgt

SEQ ID NO: 73998 - DNA, 25 bp, Saccharomyces pastorianus
attctcactattttgtctaggcttt

SEQ ID NO: 73999 - DNA, 25 bp, Saccharomyces pastorianus
attctcgtcattatctaaggctagt

SEQ ID NO: 74000 - DNA, 25 bp, Saccharomyces pastorianus
ggtgtttagcatccgcggtgtcatt

SEQ ID NO: 74001 - DNA, 25 bp, Saccharomyces pastorianus
cggtgtcattctcgtcattatctaa

SEQ ID NO: 74002 - DNA, 25 bp, Saccharomyces pastorianus
gtatgggcttttcttcgtctgtttc

SEQ ID NO: 74003 - DNA, 25 bp, Saccharomyces pastorianus
cagttcgttgtttatattctcacta

SEQ ID NO: 74004 - DNA, 25 bp, Saccharomyces pastorianus
tgatagggtgtttagcatccgcggt

SEQ ID NO: 74005 - DNA, 25 bp, Saccharomyces pastorianus
ctggagcaccagtagagcctaaaga

SEQ ID NO: 74006 - DNA, 25 bp, Saccharomyces pastorianus
gtttctttaacatctcctggagcac

SEQ ID NO: 74007 - DNA, 25 bp, Saccharomyces pastorianus
tgacatcattgacacggactccgaa

SEQ ID NO: 74008 - DNA, 25 bp, Saccharomyces pastorianus
acctcgctcggtgtagaatcttcag

SEQ ID NO: 74009 - DNA, 25 bp, Saccharomyces pastorianus
gataacggtgcttccggaattattg

SEQ ID NO: 74010 - DNA, 25 bp, Saccharomyces pastorianus
gaatacgattccaccttagataacg

SEQ ID NO: 74011 - DNA, 25 bp, Saccharomyces pastorianus
aaaatccattcagcgaccctataac

SEQ ID NO: 74012 - DNA, 25 bp, Saccharomyces pastorianus
gatctttccgatgaagaccaccttg

SEQ ID NO: 74013 - DNA, 25 bp, Saccharomyces pastorianus
gaagggtctatatctgcatcctcta

SEQ ID NO: 74014 - DNA, 25 bp, Saccharomyces pastorianus
accttgcaagcttgtcttcatctga

SEQ ID NO: 74015 - DNA, 25 bp, Saccharomyces pastorianus
agccgctgctactagtataactgcc

SEQ ID NO: 74016 - DNA, 25 bp, Saccharomyces pastorianus
aagccatgcattactttttgaccat

SEQ ID NO: 74017 - DNA, 25 bp, Saccharomyces pastorianus
gagcctgctaccacagaagggtcta

SEQ ID NO: 74018 - DNA, 25 bp, Saccharomyces pastorianus
attcctgaacatatgcacaaccttg

SEQ ID NO: 74019 - DNA, 25 bp, Saccharomyces pastorianus
gtttttaggtagttcatcagtatca

SEQ ID NO: 74020 - DNA, 25 bp, Saccharomyces pastorianus
gatattacattacctgcccttgtca

SEQ ID NO: 74021 - DNA, 25 bp, Saccharomyces pastorianus
tcaggcctccatctcgaatagcatt

SEQ ID NO: 74022 - DNA, 25 bp, Saccharomyces pastorianus
atagtgtttctattcaggcctccat

SEQ ID NO: 74023 - DNA, 25 bp, Saccharomyces pastorianus
atctcttcagctttccgtcatttat

SEQ ID NO: 74024 - DNA, 25 bp, Saccharomyces pastorianus
ttacgtcgtcatacagtagtttgct

SEQ ID NO: 74025 - DNA, 25 bp, Saccharomyces pastorianus
aattggtcgcaggttacgtcgtcat

SEQ ID NO: 74026 - DNA, 25 bp, Saccharomyces pastorianus
atttctgacgtactcaattggtcgc

SEQ ID NO: 74027 - DNA, 25 bp, Saccharomyces pastorianus
tggccatcttttggtctgtatgctg

SEQ ID NO: 74028 - DNA, 25 bp, Saccharomyces pastorianus
acaattgtcttgtcacccgatatta

SEQ ID NO: 74029 - DNA, 25 bp, Saccharomyces pastorianus
gattcatccatttatcgacccattg

SEQ ID NO: 74030 - DNA, 25 bp, Saccharomyces pastorianus
atgctaggcccatcctgtatttaaa

SEQ ID NO: 74031 - DNA, 25 bp, Saccharomyces pastorianus
gagatcttttttccagacgttccaa

SEQ ID NO: 74032 - DNA, 25 bp, Saccharomyces pastorianus
gatgtgcctaaagtacccggtaata

SEQ ID NO: 74033 - DNA, 25 bp, Saccharomyces pastorianus
tatcgacccattgacccgtgaaaaa

SEQ ID NO: 74034 - DNA, 25 bp, Saccharomyces pastorianus
gacaaatatcccttggttggcatgg

SEQ ID NO: 74035 - DNA, 25 bp, Saccharomyces pastorianus
agtgcagcacttggtctttatgttg

SEQ ID NO: 74036 - DNA, 25 bp, Saccharomyces pastorianus
acgttccaagcctcgcggtattgta

SEQ ID NO: 74037 - DNA, 25 bp, Saccharomyces pastorianus
tggccaggattctctagctttgcta

SEQ ID NO: 74038 - DNA, 25 bp, Saccharomyces pastorianus
aaggctcgggaaggcgcttttgaca

SEQ ID NO: 74039 - DNA, 25 bp, Saccharomyces pastorianus
agtcatcgatttcatgccagctggc

SEQ ID NO: 74040 - DNA, 25 bp, Saccharomyces pastorianus
gaagacttcccaaatttcggttatg

SEQ ID NO: 74041 - DNA, 25 bp, Saccharomyces pastorianus
ctgcaactaaggctaacagcggtaa

SEQ ID NO: 74042 - DNA, 25 bp, Saccharomyces pastorianus
tcatgagtagatccaacaacgaatc

SEQ ID NO: 74043 - DNA, 25 bp, Saccharomyces pastorianus
gattctgtcagcaacctcatcaaag

SEQ ID NO: 74044 - DNA, 25 bp, Saccharomyces pastorianus
attgctccaatactatttgggcgac

SEQ ID NO: 74045 - DNA, 25 bp, Saccharomyces pastorianus
gagatgccacaacagaaatgacaga

SEQ ID NO: 74046 - DNA, 25 bp, Saccharomyces pastorianus
accgcgttttgtctaggagattcat

SEQ ID NO: 74047 - DNA, 25 bp, Saccharomyces pastorianus
aaggtaaccatatactgcaactaag

SEQ ID NO: 74048 - DNA, 25 bp, Saccharomyces pastorianus
aatctgtatgcaccaattttcaaac

SEQ ID NO: 74049 - DNA, 25 bp, Saccharomyces pastorianus
ttgcactgagcatgaccgcgttttg

SEQ ID NO: 74050 - DNA, 25 bp, Saccharomyces pastorianus
tcggttatggattgaattcggattc

SEQ ID NO: 74051 - DNA, 25 bp, Saccharomyces pastorianus
gctcttcttcttactgatcacgttg

SEQ ID NO: 74052 - DNA, 25 bp, Saccharomyces pastorianus
atcacgttggtgtctgttattgtca

SEQ ID NO: 74053 - DNA, 25 bp, Saccharomyces pastorianus
ttcccgtaacggcagatttttcaga

SEQ ID NO: 74054 - DNA, 25 bp, Saccharomyces pastorianus
gacaattttggtagttccaccctca

SEQ ID NO: 74055 - DNA, 25 bp, Saccharomyces pastorianus
gcctgtacactggttgttacgccaa

SEQ ID NO: 74056 - DNA, 25 bp, Saccharomyces pastorianus
agctggatcactctgttcttcatga

SEQ ID NO: 74057 - DNA, 25 bp, Saccharomyces pastorianus
aaacgaagtggtctctactcctgtc

SEQ ID NO: 74058 - DNA, 25 bp, Saccharomyces pastorianus
gcagtttcgcttccactaagatgac

SEQ ID NO: 74059 - DNA, 25 bp, Saccharomyces pastorianus
tgggcaatgcttttgatcgcgctct

SEQ ID NO: 74060 - DNA, 25 bp, Saccharomyces pastorianus
taaaggcatttcaccaccaggatcg

SEQ ID NO: 74061 - DNA, 25 bp, Saccharomyces pastorianus
agtcatggcggctacgtacaggaaa

SEQ ID NO: 74062 - DNA, 25 bp, Saccharomyces pastorianus
gtttctgactcaggtgtatcgtcgg

SEQ ID NO: 74063 - DNA, 25 bp, Saccharomyces pastorianus
aatgaggaccatatcctgctaggaa

SEQ ID NO: 74064 - DNA, 25 bp, Saccharomyces pastorianus
gattccccgattagtaaggctttat

SEQ ID NO: 74065 - DNA, 25 bp, Saccharomyces pastorianus
atgaacgttctttggcattactaag

SEQ ID NO: 74066 - DNA, 25 bp, Saccharomyces pastorianus
gcgaacccaaccaacttgcagaaaa

SEQ ID NO: 74067 - DNA, 25 bp, Saccharomyces pastorianus
gataatgcaagtaccttacctaatg

SEQ ID NO: 74068 - DNA, 25 bp, Saccharomyces pastorianus
gaaaaaagctttaccgtcagacagt

SEQ ID NO: 74069 - DNA, 25 bp, Saccharomyces pastorianus
atcaagctgtgacttgcgaacccaa

SEQ ID NO: 74070 - DNA, 25 bp, Saccharomyces pastorianus
tattggaccaatactcaaccaccac

SEQ ID NO: 74071 - DNA, 25 bp, Saccharomyces pastorianus
gtaatttcgtcttcgattccccgat

SEQ ID NO: 74072 - DNA, 25 bp, Saccharomyces pastorianus
tgtaatcaaggcaccgttccaattc

SEQ ID NO: 74073 - DNA, 25 bp, Saccharomyces pastorianus
gccgataaagaagctcgcggtttga

SEQ ID NO: 74074 - DNA, 25 bp, Saccharomyces pastorianus
gaatcgaccttggttcaaactcctg

SEQ ID NO: 74075 - DNA, 25 bp, Saccharomyces pastorianus
gaaagaagcatgttggaccatctct

SEQ ID NO: 74076 - DNA, 25 bp, Saccharomyces pastorianus
gaattactaagccacgaatcgacct

SEQ ID NO: 74077 - DNA, 25 bp, Saccharomyces pastorianus
ttgggccatatcttacctatccgat

SEQ ID NO: 74078 - DNA, 25 bp, Saccharomyces pastorianus
gtttgcaaagaccagacatcatcag

SEQ ID NO: 74079 - DNA, 25 bp, Saccharomyces pastorianus
tgattcgaacttaatccctccattg

SEQ ID NO: 74080 - DNA, 25 bp, Saccharomyces pastorianus
tttggttgacgcttgttgggccata

SEQ ID NO: 74081 - DNA, 25 bp, Saccharomyces pastorianus
ggaccatctctaatattacggcagg

SEQ ID NO: 74082 - DNA, 25 bp, Saccharomyces pastorianus
atccctccattggtcaaactgttgg

SEQ ID NO: 74083 - DNA, 25 bp, Saccharomyces pastorianus
ggtaacaccgaacaaatccaagcag

SEQ ID NO: 74084 - DNA, 25 bp, Saccharomyces pastorianus
gttttacactttcaagagcaagggc

SEQ ID NO: 74085 - DNA, 25 bp, Saccharomyces pastorianus
atcgacgccaacaaagtcatatatg

SEQ ID NO: 74086 - DNA, 25 bp, Saccharomyces pastorianus
ggccgatcacggaaatgtaactttg

SEQ ID NO: 74087 - DNA, 25 bp, Saccharomyces pastorianus
gagtggtgtgtctaatcgttaccaa

SEQ ID NO: 74088 - DNA, 25 bp, Saccharomyces pastorianus
ttcgctaccccatatcactgatata

SEQ ID NO: 74089 - DNA, 25 bp, Saccharomyces pastorianus
ccccattaatatcttcgaggatgaa

SEQ ID NO: 74090 - DNA, 25 bp, Saccharomyces pastorianus
atcgttaccaagacaattcgttcaa

SEQ ID NO: 74091 - DNA, 25 bp, Saccharomyces pastorianus
tgtcttcgaatagcacttcgctacc

SEQ ID NO: 74092 - DNA, 25 bp, Saccharomyces pastorianus
gggcagctgacttcgtttcagaaat

SEQ ID NO: 74093 - DNA, 25 bp, Saccharomyces pastorianus
gagcaagggcagctgacttcgtttc

SEQ ID NO: 74094 - DNA, 25 bp, Saccharomyces pastorianus
agatttgttgaaggacgatacggtc

SEQ ID NO: 74095 - DNA, 25 bp, Saccharomyces pastorianus
tatcagccgcatgattgacctggca

SEQ ID NO: 74096 - DNA, 25 bp, Saccharomyces pastorianus
tggtcttcagcaattatcttcgcct

SEQ ID NO: 74097 - DNA, 25 bp, Saccharomyces pastorianus
gaaacgcagcatattatcagccgca

SEQ ID NO: 74098 - DNA, 25 bp, Saccharomyces pastorianus
tgacgagtcgcactctccagaaaaa

SEQ ID NO: 74099 - DNA, 25 bp, Saccharomyces pastorianus
tgatccaccttcttatgacgagtcg

SEQ ID NO: 74100 - DNA, 25 bp, Saccharomyces pastorianus
tcagggcgtgattgtgactccttga

SEQ ID NO: 74101 - DNA, 25 bp, Saccharomyces pastorianus
agatggcctagcgttcaaagtggtt

SEQ ID NO: 74102 - DNA, 25 bp, Saccharomyces pastorianus
gaggacccttggattcgtagcatta

SEQ ID NO: 74103 - DNA, 25 bp, Saccharomyces pastorianus
tgacctggcacctgcatgtagagga

SEQ ID NO: 74104 - DNA, 25 bp, Saccharomyces pastorianus
gactccttgagtagcttggtaacga

SEQ ID NO: 74105 - DNA, 25 bp, Saccharomyces pastorianus
ggaccacaacgactattgcattcat

SEQ ID NO: 74106 - DNA, 25 bp, Saccharomyces pastorianus
gcttattgcaggcagctggacttcc

SEQ ID NO: 74107 - DNA, 25 bp, Saccharomyces pastorianus
agagagacatcaacactgctaaagt

SEQ ID NO: 74108 - DNA, 25 bp, Saccharomyces pastorianus
gagcctgttaccagaaagagcacat

SEQ ID NO: 74109 - DNA, 25 bp, Saccharomyces pastorianus
cttccactgttcattttgcaacgac

SEQ ID NO: 74110 - DNA, 25 bp, Saccharomyces pastorianus
aaatcattcaactagcgaacctcaa

SEQ ID NO: 74111 - DNA, 25 bp, Saccharomyces pastorianus
atccaaaaagacgttcggctcctct

SEQ ID NO: 74112 - DNA, 25 bp, Saccharomyces pastorianus
ggcgtatatcaagagcctgttacca

SEQ ID NO: 74113 - DNA, 25 bp, Saccharomyces pastorianus
ggtgatacgaagattccgtcacaaa

SEQ ID NO: 74114 - DNA, 25 bp, Saccharomyces pastorianus
gttgctggaacaagaagcgtcttct

SEQ ID NO: 74115 - DNA, 25 bp, Saccharomyces pastorianus
gagcaactatgagccagagtggtat

SEQ ID NO: 74116 - DNA, 25 bp, Saccharomyces pastorianus
ttgcaacgacgatttctgctccaag

SEQ ID NO: 74117 - DNA, 25 bp, Saccharomyces pastorianus
tcctcaaggccccaagggaggtaat

SEQ ID NO: 74118 - DNA, 25 bp, Saccharomyces pastorianus
atcctacaagcgtgaaatgccttca

SEQ ID NO: 74119 - DNA, 25 bp, Saccharomyces pastorianus
acagtagtagcaatcgtagacccaa

SEQ ID NO: 74120 - DNA, 25 bp, Saccharomyces pastorianus
aacaaacgccatcctacaagcgtga

SEQ ID NO: 74121 - DNA, 25 bp, Saccharomyces pastorianus
gcaatacacaggctcttcctcaagg

SEQ ID NO: 74122 - DNA, 25 bp, Saccharomyces pastorianus
gatagcggtagcaacttcagtgcaa

SEQ ID NO: 74123 - DNA, 25 bp, Saccharomyces pastorianus
gcgtgaaatgccttcagagaatgat

SEQ ID NO: 74124 - DNA, 25 bp, Saccharomyces pastorianus
gtagacccaatgaaacccaaagata

SEQ ID NO: 74125 - DNA, 25 bp, Saccharomyces pastorianus
gaagcaaatttcagagacaagacta

SEQ ID NO: 74126 - DNA, 25 bp, Saccharomyces pastorianus
gcaacttcagtgcaaataacagtag

SEQ ID NO: 74127 - DNA, 25 bp, Saccharomyces pastorianus
aagaacacatcctaccaacaaacgc

SEQ ID NO: 74128 - DNA, 25 bp, Saccharomyces pastorianus
tgaggtatcgaataaccgcagaact

SEQ ID NO: 74129 - DNA, 25 bp, Saccharomyces pastorianus
agagcgttgcccagtgtgtggtctt

SEQ ID NO: 74130 - DNA, 25 bp, Saccharomyces pastorianus
aactctacgtctgggttcttcatta

SEQ ID NO: 74131 - DNA, 25 bp, Saccharomyces pastorianus
aacgcagagcgttgcccagtgtgtg

SEQ ID NO: 74132 - DNA, 25 bp, Saccharomyces pastorianus
aaccgcagaactctacgtctgggtt

SEQ ID NO: 74133 - DNA, 25 bp, Saccharomyces pastorianus
cccagtgtgtggtcttcttcaacaa

SEQ ID NO: 74134 - DNA, 25 bp, Saccharomyces pastorianus
ttcattatgatgtaacgcagagcgt

SEQ ID NO: 74135 - DNA, 25 bp, Saccharomyces pastorianus
gtgtggtcttcttcaacaatctgga

SEQ ID NO: 74136 - DNA, 25 bp, Saccharomyces pastorianus
cgaataaccgcagaactctacgtct

SEQ ID NO: 74137 - DNA, 25 bp, Saccharomyces pastorianus
tggtcttcttcaacaatctggaaag

SEQ ID NO: 74138 - DNA, 25 bp, Saccharomyces pastorianus
acgtctgggttcttcattatgatgt

SEQ ID NO: 74139 - DNA, 25 bp, Saccharomyces pastorianus
ggtctaaatactaatccatacgatt

SEQ ID NO: 74140 - DNA, 25 bp, Saccharomyces pastorianus
actatcgctatacttctaccttgtt

SEQ ID NO: 74141 - DNA, 25 bp, Saccharomyces pastorianus
gctatacttctaccttgttgtttgg

SEQ ID NO: 74142 - DNA, 25 bp, Saccharomyces pastorianus
atactaatccatacgattctgaaac

SEQ ID NO: 74143 - DNA, 25 bp, Saccharomyces pastorianus
atcgctatacttctaccttgttgtt

SEQ ID NO: 74144 - DNA, 25 bp, Saccharomyces pastorianus
gattctgaaactatcgctatacttc

SEQ ID NO: 74145 - DNA, 25 bp, Saccharomyces pastorianus
accttgttgtttggatatgagtatt

SEQ ID NO: 74146 - DNA, 25 bp, Saccharomyces pastorianus
aaactatcgctatacttctaccttg

SEQ ID NO: 74147 - DNA, 25 bp, Saccharomyces pastorianus
gagtattttcattgttacacgtttt

SEQ ID NO: 74148 - DNA, 25 bp, Saccharomyces pastorianus
tcaccaattggtctaaatactaatc

SEQ ID NO: 74149 - DNA, 25 bp, Saccharomyces pastorianus
acttctaccttgttgtttggatatg

SEQ ID NO: 74150 - DNA, 25 bp, Saccharomyces pastorianus
tcctggaaatcccatttggaattgt

SEQ ID NO: 74151 - DNA, 25 bp, Saccharomyces pastorianus
gatttcccggtaatagtcgctataa

SEQ ID NO: 74152 - DNA, 25 bp, Saccharomyces pastorianus
agaccttcaagttcaataagaccaa

SEQ ID NO: 74153 - DNA, 25 bp, Saccharomyces pastorianus
ttcccggtaatagtcgctataaata

SEQ ID NO: 74154 - DNA, 25 bp, Saccharomyces pastorianus
tcttattaggaatcggttgggccgt

SEQ ID NO: 74155 - DNA, 25 bp, Saccharomyces pastorianus
agcatatattttgttgacggtctta

SEQ ID NO: 74156 - DNA, 25 bp, Saccharomyces pastorianus
gtcgctataaatataagaccttcaa

SEQ ID NO: 74157 - DNA, 25 bp, Saccharomyces pastorianus
ctggaaatcccatttggaattgttt

SEQ ID NO: 74158 - DNA, 25 bp, Saccharomyces pastorianus
caataagaccaatgaacccgaatat

SEQ ID NO: 74159 - DNA, 25 bp, Saccharomyces pastorianus
gttgacggtcttattaggaatcggt

SEQ ID NO: 74160 - DNA, 25 bp, Saccharomyces pastorianus
ttagatttcccggtaatagtcgcta

SEQ ID NO: 74161 - DNA, 25 bp, Saccharomyces pastorianus
tggtggattccacgtcgaactcgaa

SEQ ID NO: 74162 - DNA, 25 bp, Saccharomyces pastorianus
tgtatacagaccagcgcgaggcttc

SEQ ID NO: 74163 - DNA, 25 bp, Saccharomyces pastorianus
gcagggtacccctggtgcaaatatc

SEQ ID NO: 74164 - DNA, 25 bp, Saccharomyces pastorianus
cgacgttatggaccagttctctcaa

SEQ ID NO: 74165 - DNA, 25 bp, Saccharomyces pastorianus
ggcaggtggacaacaccgacgttat

SEQ ID NO: 74166 - DNA, 25 bp, Saccharomyces pastorianus
aactcgaactcggacagcagggtac

SEQ ID NO: 74167 - DNA, 25 bp, Saccharomyces pastorianus
aacaaggaacgggtcgcatcctctc

SEQ ID NO: 74168 - DNA, 25 bp, Saccharomyces pastorianus
gttcaccaccaagggctacatacat

SEQ ID NO: 74169 - DNA, 25 bp, Saccharomyces pastorianus
tgactctcacataacgcacgatagc

SEQ ID NO: 74170 - DNA, 25 bp, Saccharomyces pastorianus
ggcagtaagcgggttcaccaccaag

SEQ ID NO: 74171 - DNA, 25 bp, Saccharomyces pastorianus
tacatacatgcgttggtggattcca

SEQ ID NO: 74172 - DNA, 25 bp, Saccharomyces pastorianus
accgggtgatgttgtcattaccata

SEQ ID NO: 74173 - DNA, 25 bp, Saccharomyces pastorianus
gaaaccacggatgctgactgctatt

SEQ ID NO: 74174 - DNA, 25 bp, Saccharomyces pastorianus
gtacaagtcacaaccagctcatagt

SEQ ID NO: 74175 - DNA, 25 bp, Saccharomyces pastorianus
ggatcctaaattccaagtcactgat

SEQ ID NO: 74176 - DNA, 25 bp, Saccharomyces pastorianus
gactggagcctgaaaatgccttgaa

SEQ ID NO: 74177 - DNA, 25 bp, Saccharomyces pastorianus
agtcactgttcagccaggtacaagt

SEQ ID NO: 74178 - DNA, 25 bp, Saccharomyces pastorianus
atcaagctcgatatcatacctggtg

SEQ ID NO: 74179 - DNA, 25 bp, Saccharomyces pastorianus
gcccaattgcttcaagactgtcgaa

SEQ ID NO: 74180 - DNA, 25 bp, Saccharomyces pastorianus
ggtgaagtacttaagcccaattgct

SEQ ID NO: 74181 - DNA, 25 bp, Saccharomyces pastorianus
ggattcggtcatctgtacgtcaaat

SEQ ID NO: 74182 - DNA, 25 bp, Saccharomyces pastorianus
aatgccagggccttggtttcatcaa

SEQ ID NO: 74183 - DNA, 25 bp, Saccharomyces pastorianus
tgttacatcttctaccgaggccaaa

SEQ ID NO: 74184 - DNA, 25 bp, Saccharomyces pastorianus
aaggaaggctcttactgctcttacg

SEQ ID NO: 74185 - DNA, 25 bp, Saccharomyces pastorianus
gctaacttctcaggtcccaatgaaa

SEQ ID NO: 74186 - DNA, 25 bp, Saccharomyces pastorianus
ttggttccagaatcttccgctgtta

SEQ ID NO: 74187 - DNA, 25 bp, Saccharomyces pastorianus
gggacttcttctgcggtttcttcaa

SEQ ID NO: 74188 - DNA, 25 bp, Saccharomyces pastorianus
gatcaatgggtggtctgctatgtaa

SEQ ID NO: 74189 - DNA, 25 bp, Saccharomyces pastorianus
tcgactacttcttcaagcggaacca

SEQ ID NO: 74190 - DNA, 25 bp, Saccharomyces pastorianus
agacggtactattgcctgtagccaa

SEQ ID NO: 74191 - DNA, 25 bp, Saccharomyces pastorianus
gtcatcgtcgattccaatggccaaa

SEQ ID NO: 74192 - DNA, 25 bp, Saccharomyces pastorianus
tacgcttgtcaaccgggcatgtcta

SEQ ID NO: 74193 - DNA, 25 bp, Saccharomyces pastorianus
gacacttctactggtggctcatgta

SEQ ID NO: 74194 - DNA, 25 bp, Saccharomyces pastorianus
caatcctccctatattcgaaagcgt

SEQ ID NO: 74195 - DNA, 25 bp, Saccharomyces pastorianus
tattaacttcaacccctagcaatgt

SEQ ID NO: 74196 - DNA, 25 bp, Saccharomyces pastorianus
aaattctaccttcacagccattgat

SEQ ID NO: 74197 - DNA, 25 bp, Saccharomyces pastorianus
gccaaagttggtccatcggcttgaa

SEQ ID NO: 74198 - DNA, 25 bp, Saccharomyces pastorianus
gttcgaaccgaaactagcactagtg

SEQ ID NO: 74199 - DNA, 25 bp, Saccharomyces pastorianus
gagactcctttgcatatttgtgata

SEQ ID NO: 74200 - DNA, 25 bp, Saccharomyces pastorianus
aaacaattcaacactcttcaaccat

SEQ ID NO: 74201 - DNA, 25 bp, Saccharomyces pastorianus
gcaatgttcctccacttcatataga

SEQ ID NO: 74202 - DNA, 25 bp, Saccharomyces pastorianus
acctctgtaaggctgttcgaaccga

SEQ ID NO: 74203 - DNA, 25 bp, Saccharomyces pastorianus
tagacatacttactggcaatcctcc

SEQ ID NO: 74204 - DNA, 25 bp, Saccharomyces pastorianus
aaaccgattccttcttttatgagat

SEQ ID NO: 74205 - DNA, 25 bp, Saccharomyces pastorianus
aatgaagattctactgccgttgaga

SEQ ID NO: 74206 - DNA, 25 bp, Saccharomyces pastorianus
gaaccgttgacgactatagacttta

SEQ ID NO: 74207 - DNA, 25 bp, Saccharomyces pastorianus
tgcggttgccgtccaaaaactacaa

SEQ ID NO: 74208 - DNA, 25 bp, Saccharomyces pastorianus
aacacgtcattgtgcggttgccgtc

SEQ ID NO: 74209 - DNA, 25 bp, Saccharomyces pastorianus
gaaccgccattgtctactaaggaaa

SEQ ID NO: 74210 - DNA, 25 bp, Saccharomyces pastorianus
atcagtctctgttgaattatctaac

SEQ ID NO: 74211 - DNA, 25 bp, Saccharomyces pastorianus
ggaactgaagcccaatacttctata

SEQ ID NO: 74212 - DNA, 25 bp, Saccharomyces pastorianus
gatagtcatagtgaaccgccattgt

SEQ ID NO: 74213 - DNA, 25 bp, Saccharomyces pastorianus
tttggtgccttcgaagtaaacgaca

SEQ ID NO: 74214 - DNA, 25 bp, Saccharomyces pastorianus
aaaagcttccataacaagaccgtat

SEQ ID NO: 74215 - DNA, 25 bp, Saccharomyces pastorianus
cagtagtgccaccaatcagaatttg

SEQ ID NO: 74216 - DNA, 25 bp, Saccharomyces pastorianus
gatagaatcttattggatgccccat

SEQ ID NO: 74217 - DNA, 25 bp, Saccharomyces pastorianus
acactggttgtgtttttgctaatga

SEQ ID NO: 74218 - DNA, 25 bp, Saccharomyces pastorianus
ggtaagaagttccatcctagtgtaa

SEQ ID NO: 74219 - DNA, 25 bp, Saccharomyces pastorianus
gatgctcgtgagttcccaaaagtta

SEQ ID NO: 74220 - DNA, 25 bp, Saccharomyces pastorianus
taagaccacctacatatctgccatg

SEQ ID NO: 74221 - DNA, 25 bp, Saccharomyces pastorianus
cgatgggttctttgttgccaaattc

SEQ ID NO: 74222 - DNA, 25 bp, Saccharomyces pastorianus
gttgactgcaactccaaacacggtg

SEQ ID NO: 74223 - DNA, 25 bp, Saccharomyces pastorianus
gtcgaaactggtttggccatcggta

SEQ ID NO: 74224 - DNA, 25 bp, Saccharomyces pastorianus
gatcaatctgttaaggtttcccgta

SEQ ID NO: 74225 - DNA, 25 bp, Saccharomyces pastorianus
gtattttggatatggctgctgcacc

SEQ ID NO: 74226 - DNA, 25 bp, Saccharomyces pastorianus
ttttatccgctattgactccgttga

SEQ ID NO: 74227 - DNA, 25 bp, Saccharomyces pastorianus
gacgacgatgtcttcgaactggaaa

SEQ ID NO: 74228 - DNA, 25 bp, Saccharomyces pastorianus
agtttgggaatgtctcttccgacaa

SEQ ID NO: 74229 - DNA, 25 bp, Saccharomyces pastorianus
aaagcgcggtgttcaatgacggcaa

SEQ ID NO: 74230 - DNA, 25 bp, Saccharomyces pastorianus
cagaggctgacacggtagttgaact

SEQ ID NO: 74231 - DNA, 25 bp, Saccharomyces pastorianus
ggcggtgttatcgtcggagcaatta

SEQ ID NO: 74232 - DNA, 25 bp, Saccharomyces pastorianus
gaaatttttcctgaccatctttgcc

SEQ ID NO: 74233 - DNA, 25 bp, Saccharomyces pastorianus
ggaaaatcttgctgtagtacaatct

SEQ ID NO: 74234 - DNA, 25 bp, Saccharomyces pastorianus
tccccaaagtagaaggcggtgttat

SEQ ID NO: 74235 - DNA, 25 bp, Saccharomyces pastorianus
atctttgccgatgttctttttgaaa

SEQ ID NO: 74236 - DNA, 25 bp, Saccharomyces pastorianus
cgtgtgggacgctatttctgatgca

SEQ ID NO: 74237 - DNA, 25 bp, Saccharomyces pastorianus
gttgaactagccgtagtgctggtta

SEQ ID NO: 74238 - DNA, 25 bp, Saccharomyces pastorianus
acagtttcgattggcttttccgtca

SEQ ID NO: 74239 - DNA, 25 bp, Saccharomyces pastorianus
agtttcgattggcttttccgtcagg

SEQ ID NO: 74240 - DNA, 25 bp, Saccharomyces pastorianus
ttcttcgtcaaagacagtttcgatt

SEQ ID NO: 74241 - DNA, 25 bp, Saccharomyces pastorianus
acaaagtggagattggcgaagccaa

SEQ ID NO: 74242 - DNA, 25 bp, Saccharomyces pastorianus
aatgctttacggacttttcaaacag

SEQ ID NO: 74243 - DNA, 25 bp, Saccharomyces pastorianus
ttttcaatgctttacggacttttca

SEQ ID NO: 74244 - DNA, 25 bp, Saccharomyces pastorianus
tgctttacggacttttcaaacagtt

SEQ ID NO: 74245 - DNA, 25 bp, Saccharomyces pastorianus
tttccgtcagggaagcatgtccgaa

SEQ ID NO: 74246 - DNA, 25 bp, Saccharomyces pastorianus
ggaagcatgtccgaaaacactgacg

SEQ ID NO: 74247 - DNA, 25 bp, Saccharomyces pastorianus
tccgtcagggaagcatgtccgaaaa

SEQ ID NO: 74248 - DNA, 25 bp, Saccharomyces pastorianus
ttcgattggcttttccgtcagggaa

SEQ ID NO: 74249 - DNA, 25 bp, Saccharomyces pastorianus
tgtcctctttcaaaataacgtgttc

SEQ ID NO: 74250 - DNA, 25 bp, Saccharomyces pastorianus
taaactctctagaacaaacttcttt

SEQ ID NO: 74251 - DNA, 25 bp, Saccharomyces pastorianus
ttaccaactcagacaattcttcgtt

SEQ ID NO: 74252 - DNA, 25 bp, Saccharomyces pastorianus
tctttaataaatggtgttccaccat

SEQ ID NO: 74253 - DNA, 25 bp, Saccharomyces pastorianus
tatccataaactctctagaacaaac

SEQ ID NO: 74254 - DNA, 25 bp, Saccharomyces pastorianus
caaaataacgtgttccatggtatcc

SEQ ID NO: 74255 - DNA, 25 bp, Saccharomyces pastorianus
aaatggtgttccaccattcttaaca

SEQ ID NO: 74256 - DNA, 25 bp, Saccharomyces pastorianus
gtttttaccaactcagacaattctt

SEQ ID NO: 74257 - DNA, 25 bp, Saccharomyces pastorianus
aattcttcgttattgtcctctttca

SEQ ID NO: 74258 - DNA, 25 bp, Saccharomyces pastorianus
tcttcgttattgtcctctttcaaaa

SEQ ID NO: 74259 - DNA, 25 bp, Saccharomyces pastorianus
atggtttttaccaactcagacaatt

SEQ ID NO: 74260 - DNA, 25 bp, Saccharomyces pastorianus
ggaagatcgaggtcaccattcggaa

SEQ ID NO: 74261 - DNA, 25 bp, Saccharomyces pastorianus
gcaacgcatcgaatccttagggctg

SEQ ID NO: 74262 - DNA, 25 bp, Saccharomyces pastorianus
accattcggaatgctttcgctagtg

SEQ ID NO: 74263 - DNA, 25 bp, Saccharomyces pastorianus
gctttttctattaacgtgtccaact

SEQ ID NO: 74264 - DNA, 25 bp, Saccharomyces pastorianus
gtgtccaactcacctggcgtactga

SEQ ID NO: 74265 - DNA, 25 bp, Saccharomyces pastorianus
ctgacccttctagaccttaagacat

SEQ ID NO: 74266 - DNA, 25 bp, Saccharomyces pastorianus
cagaaatctctaatgctatgggaag

SEQ ID NO: 74267 - DNA, 25 bp, Saccharomyces pastorianus
ttctactgactatccatcaatttgg

SEQ ID NO: 74268 - DNA, 25 bp, Saccharomyces pastorianus
aatccttagggctgacccttctaga

SEQ ID NO: 74269 - DNA, 25 bp, Saccharomyces pastorianus
aatgctttcgctagtggctttttct

SEQ ID NO: 74270 - DNA, 25 bp, Saccharomyces pastorianus
ggcgtactgacggacattctgtttt

SEQ ID NO: 74271 - DNA, 25 bp, Saccharomyces pastorianus
aattcatgaagaacgacgacgacga

SEQ ID NO: 74272 - DNA, 25 bp, Saccharomyces pastorianus
catctcatagtctccaatgttgggt

SEQ ID NO: 74273 - DNA, 25 bp, Saccharomyces pastorianus
aacttttggcagcaataccgacgaa

SEQ ID NO: 74274 - DNA, 25 bp, Saccharomyces pastorianus
ggatctcaatagttgcaatgacgat

SEQ ID NO: 74275 - DNA, 25 bp, Saccharomyces pastorianus
gataactcagagtgggatctcaata

SEQ ID NO: 74276 - DNA, 25 bp, Saccharomyces pastorianus
cgggcaagctatcaagcagagtcat

SEQ ID NO: 74277 - DNA, 25 bp, Saccharomyces pastorianus
aatacaccatcaaacgccaattcag

SEQ ID NO: 74278 - DNA, 25 bp, Saccharomyces pastorianus
tcagacacagaatccacagaacaga

SEQ ID NO: 74279 - DNA, 25 bp, Saccharomyces pastorianus
aagaagcgacctcatctcatagtct

SEQ ID NO: 74280 - DNA, 25 bp, Saccharomyces pastorianus
gaaacagtttggtcgagataactca

SEQ ID NO: 74281 - DNA, 25 bp, Saccharomyces pastorianus
taccgacgaagccaatcccaagaag

SEQ ID NO: 74282 - DNA, 25 bp, Saccharomyces pastorianus
gatgttgcaagtgaactctgagttc

SEQ ID NO: 74283 - DNA, 25 bp, Saccharomyces pastorianus
gtgtatgtcactacttatctcccat

SEQ ID NO: 74284 - DNA, 25 bp, Saccharomyces pastorianus
gtgcccgctccatggaagttgagaa

SEQ ID NO: 74285 - DNA, 25 bp, Saccharomyces pastorianus
tcctccatctccaacgtatctatga

SEQ ID NO: 74286 - DNA, 25 bp, Saccharomyces pastorianus
aagtatcttgtttccttggcatcct

SEQ ID NO: 74287 - DNA, 25 bp, Saccharomyces pastorianus
gatgactgtcaattttcttctttaa

SEQ ID NO: 74288 - DNA, 25 bp, Saccharomyces pastorianus
tatggtgtcgaggttcatcgtgata

SEQ ID NO: 74289 - DNA, 25 bp, Saccharomyces pastorianus
atgttctagcgcttgatgactgtca

SEQ ID NO: 74290 - DNA, 25 bp, Saccharomyces pastorianus
ctgagttccgtgtacagagtatcat

SEQ ID NO: 74291 - DNA, 25 bp, Saccharomyces pastorianus
tttcgatataataggtgcccgctcc

SEQ ID NO: 74292 - DNA, 25 bp, Saccharomyces pastorianus
gttttttctgcggttgatttggaca

SEQ ID NO: 74293 - DNA, 25 bp, Saccharomyces pastorianus
gaaccaccctatacctggagagcta

SEQ ID NO: 74294 - DNA, 25 bp, Saccharomyces pastorianus
agtttagcggtctccatcatatcta

SEQ ID NO: 74295 - DNA, 25 bp, Saccharomyces pastorianus
ggtctggacctaatacttacatgcc

SEQ ID NO: 74296 - DNA, 25 bp, Saccharomyces pastorianus
gattttggtcctatgtcatgctcaa

SEQ ID NO: 74297 - DNA, 25 bp, Saccharomyces pastorianus
ggagtggacccaatccttagattaa

SEQ ID NO: 74298 - DNA, 25 bp, Saccharomyces pastorianus
aacgtggttccaatactaggtctat

SEQ ID NO: 74299 - DNA, 25 bp, Saccharomyces pastorianus
aattccagctcggtttcttgtagaa

SEQ ID NO: 74300 - DNA, 25 bp, Saccharomyces pastorianus
atcattttgtctatcctgtggttct

SEQ ID NO: 74301 - DNA, 25 bp, Saccharomyces pastorianus
atatgtctcctatctcgcagttgta

SEQ ID NO: 74302 - DNA, 25 bp, Saccharomyces pastorianus
ctgctttcgtaactttggcttctga

SEQ ID NO: 74303 - DNA, 25 bp, Saccharomyces pastorianus
tatttctcgcaaccacatatgtctc

SEQ ID NO: 74304 - DNA, 25 bp, Saccharomyces pastorianus
ggcacattatgcgttgggcgactat

SEQ ID NO: 74305 - DNA, 25 bp, Saccharomyces pastorianus
tgagtcccttaatagccaaaaccgt

SEQ ID NO: 74306 - DNA, 25 bp, Saccharomyces pastorianus
ctgatccccgtataggtattggttt

SEQ ID NO: 74307 - DNA, 25 bp, Saccharomyces pastorianus
ggcgactatcgcaaatcattcatta

SEQ ID NO: 74308 - DNA, 25 bp, Saccharomyces pastorianus
gaataatccagttttgttgacgtta

SEQ ID NO: 74309 - DNA, 25 bp, Saccharomyces pastorianus
gaacacaagcgcctcaatcttggta

SEQ ID NO: 74310 - DNA, 25 bp, Saccharomyces pastorianus
gtcctttcggaatcttcattctggt

SEQ ID NO: 74311 - DNA, 25 bp, Saccharomyces pastorianus
atcttcattctggtgtggtagggca

SEQ ID NO: 74312 - DNA, 25 bp, Saccharomyces pastorianus
ggcagagagctcttcaaatcaattc

SEQ ID NO: 74313 - DNA, 25 bp, Saccharomyces pastorianus
gttatcaaccctgtgttacaacctg

SEQ ID NO: 74314 - DNA, 25 bp, Saccharomyces pastorianus
gtgagtttcataattctctaaccga

SEQ ID NO: 74315 - DNA, 25 bp, Saccharomyces pastorianus
gcgtggaaacttgcgattcgtcttc

SEQ ID NO: 74316 - DNA, 25 bp, Saccharomyces pastorianus
acgccaccgctgtccattttttaat

SEQ ID NO: 74317 - DNA, 25 bp, Saccharomyces pastorianus
gaaacttgcgattcgtcttcatcta

SEQ ID NO: 74318 - DNA, 25 bp, Saccharomyces pastorianus
ttttggtctctaccggtgtattttg

SEQ ID NO: 74319 - DNA, 25 bp, Saccharomyces pastorianus
tctaccggtgtattttgttgctcat

SEQ ID NO: 74320 - DNA, 25 bp, Saccharomyces pastorianus
attttgttgctcattctgcgtggaa

SEQ ID NO: 74321 - DNA, 25 bp, Saccharomyces pastorianus
gtggtttctgcaaatggcacagttg

SEQ ID NO: 74322 - DNA, 25 bp, Saccharomyces pastorianus
tccattttttaatctcgaatctttt

SEQ ID NO: 74323 - DNA, 25 bp, Saccharomyces pastorianus
tcaacggctatatcccacgaccaga

SEQ ID NO: 74324 - DNA, 25 bp, Saccharomyces pastorianus
gctcattctgcgtggaaacttgcga

SEQ ID NO: 74325 - DNA, 25 bp, Saccharomyces pastorianus
catggttccataatgtggtttctgc

SEQ ID NO: 74326 - DNA, 25 bp, Saccharomyces pastorianus
ggaattcgtgcatcgagatctgctt

SEQ ID NO: 74327 - DNA, 25 bp, Saccharomyces pastorianus
gataagggcttggaattcgtgcatc

SEQ ID NO: 74328 - DNA, 25 bp, Saccharomyces pastorianus
ttggaattcgtgcatcgagatctgc

SEQ ID NO: 74329 - DNA, 25 bp, Saccharomyces pastorianus
ggcttggaattcgtgcatcgagatc

SEQ ID NO: 74330 - DNA, 25 bp, Saccharomyces pastorianus
tggaattcgtgcatcgagatctgct

SEQ ID NO: 74331 - DNA, 25 bp, Saccharomyces pastorianus
gcttggaattcgtgcatcgagatct

SEQ ID NO: 74332 - DNA, 25 bp, Saccharomyces pastorianus
taagggcttggaattcgtgcatcga

SEQ ID NO: 74333 - DNA, 25 bp, Saccharomyces pastorianus
ataagggcttggaattcgtgcatcg

SEQ ID NO: 74334 - DNA, 25 bp, Saccharomyces pastorianus
gaaaaatatcgataagggcttggaa

SEQ ID NO: 74335 - DNA, 25 bp, Saccharomyces pastorianus
agggcttggaattcgtgcatcgaga

SEQ ID NO: 74336 - DNA, 25 bp, Saccharomyces pastorianus
aagggcttggaattcgtgcatcgag

SEQ ID NO: 74337 - DNA, 25 bp, Saccharomyces pastorianus
gattctattgccgagtgctgcgatc

SEQ ID NO: 74338 - DNA, 25 bp, Saccharomyces pastorianus
ggcatgacacgtgatgatttgttta

SEQ ID NO: 74339 - DNA, 25 bp, Saccharomyces pastorianus
gtgttcctagaaagccaggcatgac

SEQ ID NO: 74340 - DNA, 25 bp, Saccharomyces pastorianus
gccaactgggcgattctattgccga

SEQ ID NO: 74341 - DNA, 25 bp, Saccharomyces pastorianus
ctccaaggtctttgtgcttgtcatt

SEQ ID NO: 74342 - DNA, 25 bp, Saccharomyces pastorianus
aacgcttctatcgttgttatccctg

SEQ ID NO: 74343 - DNA, 25 bp, Saccharomyces pastorianus
agtgctgcgatctctccaaggtctt

SEQ ID NO: 74344 - DNA, 25 bp, Saccharomyces pastorianus
ccgcaggcggcattcaaaactgttt

SEQ ID NO: 74345 - DNA, 25 bp, Saccharomyces pastorianus
gatttgtttaacgtgaatgccggta

SEQ ID NO: 74346 - DNA, 25 bp, Saccharomyces pastorianus
gttatccctgcaggtgttcctagaa

SEQ ID NO: 74347 - DNA, 25 bp, Saccharomyces pastorianus
atgccggtatcattagccaactggg

SEQ ID NO: 74348 - DNA, 25 bp, Saccharomyces pastorianus
acttgtggctttggtagcggcatct

SEQ ID NO: 74349 - DNA, 25 bp, Saccharomyces pastorianus
gtctcctaatatttttcacggactt

SEQ ID NO: 74350 - DNA, 25 bp, Saccharomyces pastorianus
gatgctgtcattttgtctcctaata

SEQ ID NO: 74351 - DNA, 25 bp, Saccharomyces pastorianus
gtagcactaatatatctcttgggtt

SEQ ID NO: 74352 - DNA, 25 bp, Saccharomyces pastorianus
gacggacaaactcatttcctcgaaa

SEQ ID NO: 74353 - DNA, 25 bp, Saccharomyces pastorianus
tgcatttcatttatcacttcgtcaa

SEQ ID NO: 74354 - DNA, 25 bp, Saccharomyces pastorianus
tatttgatacctttgttccccacca

SEQ ID NO: 74355 - DNA, 25 bp, Saccharomyces pastorianus
aacagttttcttcatttcggtatca

SEQ ID NO: 74356 - DNA, 25 bp, Saccharomyces pastorianus
atatctcttgggttcgatgctgtca

SEQ ID NO: 74357 - DNA, 25 bp, Saccharomyces pastorianus
atcagtagtgtgttgttccttgcca

SEQ ID NO: 74358 - DNA, 25 bp, Saccharomyces pastorianus
ggaacgagtcactagtagcactaat

SEQ ID NO: 74359 - DNA, 25 bp, Saccharomyces pastorianus
ccaggatgccaaatacacaccgaga

SEQ ID NO: 74360 - DNA, 25 bp, Saccharomyces pastorianus
gaaagccagactgtgggtccacgta

SEQ ID NO: 74361 - DNA, 25 bp, Saccharomyces pastorianus
aacaggctctgtgctcccaggatgc

SEQ ID NO: 74362 - DNA, 25 bp, Saccharomyces pastorianus
gagattcatcaactctttgttagaa

SEQ ID NO: 74363 - DNA, 25 bp, Saccharomyces pastorianus
tctgatgctgtacctgaggaagcag

SEQ ID NO: 74364 - DNA, 25 bp, Saccharomyces pastorianus
aggatagcgacagggctcagttgaa

SEQ ID NO: 74365 - DNA, 25 bp, Saccharomyces pastorianus
acttgcaggcattcgtggagcacgc

SEQ ID NO: 74366 - DNA, 25 bp, Saccharomyces pastorianus
tggtcgacaggagcgatctgatgct

SEQ ID NO: 74367 - DNA, 25 bp, Saccharomyces pastorianus
gagacacgactacaacaggctctgt

SEQ ID NO: 74368 - DNA, 25 bp, Saccharomyces pastorianus
cacgctggccgagatgtggtcgaca

SEQ ID NO: 74369 - DNA, 25 bp, Saccharomyces pastorianus
gtgggtccacgtagagacacgacta

SEQ ID NO: 74370 - DNA, 25 bp, Saccharomyces pastorianus
gttcgactgcttcgtctttttacca

SEQ ID NO: 74371 - DNA, 25 bp, Saccharomyces pastorianus
tttactatcttgctacttttactat

SEQ ID NO: 74372 - DNA, 25 bp, Saccharomyces pastorianus
attatctgtgatcttcctgttcgac

SEQ ID NO: 74373 - DNA, 25 bp, Saccharomyces pastorianus
ttttaccagaagcagggccgccttt

SEQ ID NO: 74374 - DNA, 25 bp, Saccharomyces pastorianus
gtctttttaccagaagcagggccgc

SEQ ID NO: 74375 - DNA, 25 bp, Saccharomyces pastorianus
tgatcttcctgttcgactgcttcgt

SEQ ID NO: 74376 - DNA, 25 bp, Saccharomyces pastorianus
cttgctacttttactattatctgtg

SEQ ID NO: 74377 - DNA, 25 bp, Saccharomyces pastorianus
gactgcttcgtctttttaccagaag

SEQ ID NO: 74378 - DNA, 25 bp, Saccharomyces pastorianus
atctgtgatcttcctgttcgactgc

SEQ ID NO: 74379 - DNA, 25 bp, Saccharomyces pastorianus
agcagggccgccttttgaggctaac

SEQ ID NO: 74380 - DNA, 25 bp, Saccharomyces pastorianus
gctaacctttactatcttgctactt

SEQ ID NO: 74381 - DNA, 25 bp, Saccharomyces pastorianus
attagttgcaactcaggcagtgcgc

SEQ ID NO: 74382 - DNA, 25 bp, Saccharomyces pastorianus
gagtgacaattctccagtgactaca

SEQ ID NO: 74383 - DNA, 25 bp, Saccharomyces pastorianus
gcaggttttggtgtttggaccccat

SEQ ID NO: 74384 - DNA, 25 bp, Saccharomyces pastorianus
gattctactaccatcaccaagagtg

SEQ ID NO: 74385 - DNA, 25 bp, Saccharomyces pastorianus
agttcactaatgaccagttcccgct

SEQ ID NO: 74386 - DNA, 25 bp, Saccharomyces pastorianus
atttcggcaactacgcaggtggcag

SEQ ID NO: 74387 - DNA, 25 bp, Saccharomyces pastorianus
aacagcgtgatttccagttcactaa

SEQ ID NO: 74388 - DNA, 25 bp, Saccharomyces pastorianus
aggcagtgcgcaaggcgtctttatt

SEQ ID NO: 74389 - DNA, 25 bp, Saccharomyces pastorianus
ccagttcccgctaaagtctatcaag

SEQ ID NO: 74390 - DNA, 25 bp, Saccharomyces pastorianus
gactacaggcgattatgcggcacag

SEQ ID NO: 74391 - DNA, 25 bp, Saccharomyces pastorianus
aataaatgccaatgacgtcgtctac

SEQ ID NO: 74392 - DNA, 25 bp, Saccharomyces pastorianus
aaagcctgccaatgttccgaaaatc

SEQ ID NO: 74393 - DNA, 25 bp, Saccharomyces pastorianus
ggcaccatcataccttcaaatctag

SEQ ID NO: 74394 - DNA, 25 bp, Saccharomyces pastorianus
gggaaagctcacatgtgcgtcgtta

SEQ ID NO: 74395 - DNA, 25 bp, Saccharomyces pastorianus
caaatctagcgtccaacccgttgaa

SEQ ID NO: 74396 - DNA, 25 bp, Saccharomyces pastorianus
ccgagcacccacagcaagatttgaa

SEQ ID NO: 74397 - DNA, 25 bp, Saccharomyces pastorianus
aaggcacattacttcctatttgcat

SEQ ID NO: 74398 - DNA, 25 bp, Saccharomyces pastorianus
gtcgttagtaaagagccgggctcct

SEQ ID NO: 74399 - DNA, 25 bp, Saccharomyces pastorianus
ggagcacaaagctgctgaccaagct

SEQ ID NO: 74400 - DNA, 25 bp, Saccharomyces pastorianus
aagctgatgaatcgtctccactctt

SEQ ID NO: 74401 - DNA, 25 bp, Saccharomyces pastorianus
gaatattctgaattacttccaggag

SEQ ID NO: 74402 - DNA, 25 bp, Saccharomyces pastorianus
aatcgtggacgagtctgatgtcttt

SEQ ID NO: 74403 - DNA, 25 bp, Saccharomyces pastorianus
tagtggccgatcctgatcttttaca

SEQ ID NO: 74404 - DNA, 25 bp, Saccharomyces pastorianus
aacactgtcatgaggaccatcctat

SEQ ID NO: 74405 - DNA, 25 bp, Saccharomyces pastorianus
gtgcgcccttcaaggttacagtgat

SEQ ID NO: 74406 - DNA, 25 bp, Saccharomyces pastorianus
catccctcatcaatttttaccaaac

SEQ ID NO: 74407 - DNA, 25 bp, Saccharomyces pastorianus
tgtaagggccatctcgtgtctaaaa

SEQ ID NO: 74408 - DNA, 25 bp, Saccharomyces pastorianus
gaattgcattcccatatcttcgagc

SEQ ID NO: 74409 - DNA, 25 bp, Saccharomyces pastorianus
ggaatccaatgtggcgcactatctg

SEQ ID NO: 74410 - DNA, 25 bp, Saccharomyces pastorianus
ggactctgccgtgtcaattgtacat

SEQ ID NO: 74411 - DNA, 25 bp, Saccharomyces pastorianus
ttgtacatttgaaacgtgcgccctt

SEQ ID NO: 74412 - DNA, 25 bp, Saccharomyces pastorianus
aattgctatcctcctatgttactga

SEQ ID NO: 74413 - DNA, 25 bp, Saccharomyces pastorianus
attgacctgccccataatctagtgg

SEQ ID NO: 74414 - DNA, 25 bp, Saccharomyces pastorianus
gttctactcaagacgatgtttcctt

SEQ ID NO: 74415 - DNA, 25 bp, Saccharomyces pastorianus
aacatgtttgtgtgcggcccggaca

SEQ ID NO: 74416 - DNA, 25 bp, Saccharomyces pastorianus
ggtcttcgacatctcccaagggaag

SEQ ID NO: 74417 - DNA, 25 bp, Saccharomyces pastorianus
ctcaaccagttcttcgaccatggaa

SEQ ID NO: 74418 - DNA, 25 bp, Saccharomyces pastorianus
tcgtccaacatggtccttgcagaaa

SEQ ID NO: 74419 - DNA, 25 bp, Saccharomyces pastorianus
agaccttcgaagtgctcatgaccga

SEQ ID NO: 74420 - DNA, 25 bp, Saccharomyces pastorianus
ttcgagagtaacatcccggtcttcg

SEQ ID NO: 74421 - DNA, 25 bp, Saccharomyces pastorianus
acaccttgcatgtgaccccggagaa

SEQ ID NO: 74422 - DNA, 25 bp, Saccharomyces pastorianus
aagacaacctgaacgtcctcttgca

SEQ ID NO: 74423 - DNA, 25 bp, Saccharomyces pastorianus
aagctcgacgacatctacctgaact

SEQ ID NO: 74424 - DNA, 25 bp, Saccharomyces pastorianus
gaaagagctattccgtgggcagaaa

SEQ ID NO: 74425 - DNA, 25 bp, Saccharomyces pastorianus
agaaaatataccgtgcgctgtaaca

SEQ ID NO: 74426 - DNA, 25 bp, Saccharomyces pastorianus
atttgggcatcgttgtgggccaagc

SEQ ID NO: 74427 - DNA, 25 bp, Saccharomyces pastorianus
aaacctcacggatttttcagtggat

SEQ ID NO: 74428 - DNA, 25 bp, Saccharomyces pastorianus
gcaacagcaagaatcatcttcccca

SEQ ID NO: 74429 - DNA, 25 bp, Saccharomyces pastorianus
gtattttccgcagatgatgacttat

SEQ ID NO: 74430 - DNA, 25 bp, Saccharomyces pastorianus
gaaaaacgtcatcaaggcactcaca

SEQ ID NO: 74431 - DNA, 25 bp, Saccharomyces pastorianus
aacggtttactggtctgtatattcg

SEQ ID NO: 74432 - DNA, 25 bp, Saccharomyces pastorianus
ggcactcacattacttgacctaatt

SEQ ID NO: 74433 - DNA, 25 bp, Saccharomyces pastorianus
ttacctatcagagtggcaaaccata

SEQ ID NO: 74434 - DNA, 25 bp, Saccharomyces pastorianus
gaaaccatacctattgttcagccaa

SEQ ID NO: 74435 - DNA, 25 bp, Saccharomyces pastorianus
gatgttatgctaaacctcacggatt

SEQ ID NO: 74436 - DNA, 25 bp, Saccharomyces pastorianus
atttgcctcctcttctttgatattg

SEQ ID NO: 74437 - DNA, 25 bp, Saccharomyces pastorianus
gagcaatttctaattctcccgtgtg

SEQ ID NO: 74438 - DNA, 25 bp, Saccharomyces pastorianus
aaatgcgtggtaacagtcgtcgaac

SEQ ID NO: 74439 - DNA, 25 bp, Saccharomyces pastorianus
agttcctgtatctgggtggcgagtt

SEQ ID NO: 74440 - DNA, 25 bp, Saccharomyces pastorianus
gtggctgatttatccatatcgtgta

SEQ ID NO: 74441 - DNA, 25 bp, Saccharomyces pastorianus
tatgcagtggccctgttagagccag

SEQ ID NO: 74442 - DNA, 25 bp, Saccharomyces pastorianus
cgagttgtcttggtggtccatacta

SEQ ID NO: 74443 - DNA, 25 bp, Saccharomyces pastorianus
tactattacctttgtcgccacggaa

SEQ ID NO: 74444 - DNA, 25 bp, Saccharomyces pastorianus
gtggcaacaaagtcagttcttcctt

SEQ ID NO: 74445 - DNA, 25 bp, Saccharomyces pastorianus
gacgagattcttcctaaaacacgag

SEQ ID NO: 74446 - DNA, 25 bp, Saccharomyces pastorianus
gtcatcctgctcaaaaatggcttca

SEQ ID NO: 74447 - DNA, 25 bp, Saccharomyces pastorianus
gaagccttattagcaagtctttcta

SEQ ID NO: 74448 - DNA, 25 bp, Saccharomyces pastorianus
acattggtttcgagttggcttctgc

SEQ ID NO: 74449 - DNA, 25 bp, Saccharomyces pastorianus
atctgttgtggcctcttctgctgtt

SEQ ID NO: 74450 - DNA, 25 bp, Saccharomyces pastorianus
aagtctttctacttctgctgtcact

SEQ ID NO: 74451 - DNA, 25 bp, Saccharomyces pastorianus
tcagaagttgacttcgctgccgtcg

SEQ ID NO: 74452 - DNA, 25 bp, Saccharomyces pastorianus
gttgctgccacctcatctgttgtgg

SEQ ID NO: 74453 - DNA, 25 bp, Saccharomyces pastorianus
gctgactacatattgttatctcaag

SEQ ID NO: 74454 - DNA, 25 bp, Saccharomyces pastorianus
tggtactcctccagattagaacctg

SEQ ID NO: 74455 - DNA, 25 bp, Saccharomyces pastorianus
aagatccaacttctggtttctcctt

SEQ ID NO: 74456 - DNA, 25 bp, Saccharomyces pastorianus
aatcgctttactagcagctctcgca

SEQ ID NO: 74457 - DNA, 25 bp, Saccharomyces pastorianus
ttagaacctgagattgaagccttat

SEQ ID NO: 74458 - DNA, 25 bp, Saccharomyces pastorianus
ttcccgcttttttcgtccctgcgct

SEQ ID NO: 74459 - DNA, 25 bp, Saccharomyces pastorianus
tttttcgtccctgcgcttcccgcgg

SEQ ID NO: 74460 - DNA, 25 bp, Saccharomyces pastorianus
tggcgggtacccctcgctcgcgggt

SEQ ID NO: 74461 - DNA, 25 bp, Saccharomyces pastorianus
ttcccgcggctacgcgcagtggcga

SEQ ID NO: 74462 - DNA, 25 bp, Saccharomyces pastorianus
ttctgtggcgggtacccctcgctcg

SEQ ID NO: 74463 - DNA, 25 bp, Saccharomyces pastorianus
cgggctacggccgtttctgtggcgg

SEQ ID NO: 74464 - DNA, 25 bp, Saccharomyces pastorianus
gctacgcgcagtggcgagccgggct

SEQ ID NO: 74465 - DNA, 25 bp, Saccharomyces pastorianus
ggctacggccgtttctgtggcgggt

SEQ ID NO: 74466 - DNA, 25 bp, Saccharomyces pastorianus
acgcgcagtggcgagccgggctacg

SEQ ID NO: 74467 - DNA, 25 bp, Saccharomyces pastorianus
cgagccgggctacggccgtttctgt

SEQ ID NO: 74468 - DNA, 25 bp, Saccharomyces pastorianus
ggcgagccgggctacggccgtttct

SEQ ID NO: 74469 - DNA, 25 bp, Saccharomyces pastorianus
gtttgaggcagactcccaaatggtg

SEQ ID NO: 74470 - DNA, 25 bp, Saccharomyces pastorianus
atcgctgaaagactatgggcatccg

SEQ ID NO: 74471 - DNA, 25 bp, Saccharomyces pastorianus
atggttgcacagagctgcctgttca

SEQ ID NO: 74472 - DNA, 25 bp, Saccharomyces pastorianus
aggtgaagcgttagccatcgatggc

SEQ ID NO: 74473 - DNA, 25 bp, Saccharomyces pastorianus
catcgatggctacgcatggttgcac

SEQ ID NO: 74474 - DNA, 25 bp, Saccharomyces pastorianus
agctgcctgttcatgcgcttatgaa

SEQ ID NO: 74475 - DNA, 25 bp, Saccharomyces pastorianus
tattgcaaacttaacggtatccgtt

SEQ ID NO: 74476 - DNA, 25 bp, Saccharomyces pastorianus
gggtattcagggtcttcttccacaa

SEQ ID NO: 74477 - DNA, 25 bp, Saccharomyces pastorianus
aaacccggtgtcattacgtagatat

SEQ ID NO: 74478 - DNA, 25 bp, Saccharomyces pastorianus
gggaaagccgactgacaaatatctt

SEQ ID NO: 74479 - DNA, 25 bp, Saccharomyces pastorianus
ggtatccgttacattgtggccccgt

SEQ ID NO: 74480 - DNA, 25 bp, Saccharomyces pastorianus
gagatttgagcccatatgacttcca

SEQ ID NO: 74481 - DNA, 25 bp, Saccharomyces pastorianus
agtttcaaagggtcttctgccctat

SEQ ID NO: 74482 - DNA, 25 bp, Saccharomyces pastorianus
gcagtcatggcgtttcagtttcaaa

SEQ ID NO: 74483 - DNA, 25 bp, Saccharomyces pastorianus
gacatagaccatcatttgcatctga

SEQ ID NO: 74484 - DNA, 25 bp, Saccharomyces pastorianus
gcaaagagtggatcatgctcccaaa

SEQ ID NO: 74485 - DNA, 25 bp, Saccharomyces pastorianus
ttgcatctgaaaatcgctcaaggag

SEQ ID NO: 74486 - DNA, 25 bp, Saccharomyces pastorianus
tacgaagcggcagtcatggcgtttc

SEQ ID NO: 74487 - DNA, 25 bp, Saccharomyces pastorianus
acgggatccccaaagtaggcttgat

SEQ ID NO: 74488 - DNA, 25 bp, Saccharomyces pastorianus
atgacttccaccaacctttagcgaa

SEQ ID NO: 74489 - DNA, 25 bp, Saccharomyces pastorianus
aggcgataacaacggcacggaagtt

SEQ ID NO: 74490 - DNA, 25 bp, Saccharomyces pastorianus
tgctcccaaaattgtagccaacttt

SEQ ID NO: 74491 - DNA, 25 bp, Saccharomyces pastorianus
tgataggcatctccaaccttttacg

SEQ ID NO: 74492 - DNA, 25 bp, Saccharomyces pastorianus
tatgatccctctactttctttttat

SEQ ID NO: 74493 - DNA, 25 bp, Saccharomyces pastorianus
aaccctatattttccatcccaaatg

SEQ ID NO: 74494 - DNA, 25 bp, Saccharomyces pastorianus
gaagacaaacttggccgatttctgg

SEQ ID NO: 74495 - DNA, 25 bp, Saccharomyces pastorianus
tcgctgcttcgaaacttcttagtga

SEQ ID NO: 74496 - DNA, 25 bp, Saccharomyces pastorianus
ctgatgacccaattgcgacgactgt

SEQ ID NO: 74497 - DNA, 25 bp, Saccharomyces pastorianus
ttattcctcagatacctcgaaggcc

SEQ ID NO: 74498 - DNA, 25 bp, Saccharomyces pastorianus
aggcgctatgccgttttcaatgcat

SEQ ID NO: 74499 - DNA, 25 bp, Saccharomyces pastorianus
caagtcccgagttgtacgctttaat

SEQ ID NO: 74500 - DNA, 25 bp, Saccharomyces pastorianus
ctattaccggttatacgagcttcct

SEQ ID NO: 74501 - DNA, 25 bp, Saccharomyces pastorianus
gactgtcacacatacaatctccatt

SEQ ID NO: 74502 - DNA, 25 bp, Saccharomyces pastorianus
tccaggcgtcaaacagggtccggtt

SEQ ID NO: 74503 - DNA, 25 bp, Saccharomyces pastorianus
aattcacttatcagccctatgacat

SEQ ID NO: 74504 - DNA, 25 bp, Saccharomyces pastorianus
gagtttccgcatttgccgaatgagt

SEQ ID NO: 74505 - DNA, 25 bp, Saccharomyces pastorianus
aggtaagctgccattctctagtatc

SEQ ID NO: 74506 - DNA, 25 bp, Saccharomyces pastorianus
ctattcttttgaaactccaggcgtc

SEQ ID NO: 74507 - DNA, 25 bp, Saccharomyces pastorianus
gggaaagctatacctagaccctctt

SEQ ID NO: 74508 - DNA, 25 bp, Saccharomyces pastorianus
accgccttacaattgctcttgacag

SEQ ID NO: 74509 - DNA, 25 bp, Saccharomyces pastorianus
ctatattggcgttggtgtgcggtcc

SEQ ID NO: 74510 - DNA, 25 bp, Saccharomyces pastorianus
aagatggctgcaccaacttcctaag

SEQ ID NO: 74511 - DNA, 25 bp, Saccharomyces pastorianus
gaagcaataccgaaatccccaatga

SEQ ID NO: 74512 - DNA, 25 bp, Saccharomyces pastorianus
ggtactggaatagtgaccgccttac

SEQ ID NO: 74513 - DNA, 25 bp, Saccharomyces pastorianus
tacgagcatactagtcaatggacgt

SEQ ID NO: 74514 - DNA, 25 bp, Saccharomyces pastorianus
gttcccaaggttgttcgcgatgatg

SEQ ID NO: 74515 - DNA, 25 bp, Saccharomyces pastorianus
atccgccattttttgcctattttga

SEQ ID NO: 74516 - DNA, 25 bp, Saccharomyces pastorianus
atggacgttagattatccgccattt

SEQ ID NO: 74517 - DNA, 25 bp, Saccharomyces pastorianus
gttcgcgatgatggctgtttggaca

SEQ ID NO: 74518 - DNA, 25 bp, Saccharomyces pastorianus
ttatcccagtttgttcccaaggttg

SEQ ID NO: 74519 - DNA, 25 bp, Saccharomyces pastorianus
taaactccctatgagcgaatggtat

SEQ ID NO: 74520 - DNA, 25 bp, Saccharomyces pastorianus
gacgtcaaaggttaccgcatccgag

SEQ ID NO: 74521 - DNA, 25 bp, Saccharomyces pastorianus
gattcctgattattttagcaccgac

SEQ ID NO: 74522 - DNA, 25 bp, Saccharomyces pastorianus
aatctaagcgctattcgttatggaa

SEQ ID NO: 74523 - DNA, 25 bp, Saccharomyces pastorianus
ttagcaccgactttgatgttcatag

SEQ ID NO: 74524 - DNA, 25 bp, Saccharomyces pastorianus
tcgttggagatggtcgacacttcaa

SEQ ID NO: 74525 - DNA, 25 bp, Saccharomyces pastorianus
gcgtctttaagcgtaagtgaaccta

SEQ ID NO: 74526 - DNA, 25 bp, Saccharomyces pastorianus
gcatccactgatgaattctctggca

SEQ ID NO: 74527 - DNA, 25 bp, Saccharomyces pastorianus
cacaaccggatcaggcgctattaat

SEQ ID NO: 74528 - DNA, 25 bp, Saccharomyces pastorianus
ggcggtattgatgctgagtcacaca

SEQ ID NO: 74529 - DNA, 25 bp, Saccharomyces pastorianus
aagtagggcgtacacaaccggatca

SEQ ID NO: 74530 - DNA, 25 bp, Saccharomyces pastorianus
gaagacgcagccgatgtattgaaaa

SEQ ID NO: 74531 - DNA, 25 bp, Saccharomyces pastorianus
gaaatagtcttgctgcatccactga

SEQ ID NO: 74532 - DNA, 25 bp, Saccharomyces pastorianus
atatcgtttacgtcgctacctaagt

SEQ ID NO: 74533 - DNA, 25 bp, Saccharomyces pastorianus
gctctttgcaagaaacgttgactat

SEQ ID NO: 74534 - DNA, 25 bp, Saccharomyces pastorianus
tttcttctgttcttaaccagtgata

SEQ ID NO: 74535 - DNA, 25 bp, Saccharomyces pastorianus
gcatacattttctgatcaacattcg

SEQ ID NO: 74536 - DNA, 25 bp, Saccharomyces pastorianus
gagagatatcccgacttggcaccaa

SEQ ID NO: 74537 - DNA, 25 bp, Saccharomyces pastorianus
gatataccaagaacgaaccctcata

SEQ ID NO: 74538 - DNA, 25 bp, Saccharomyces pastorianus
tggtgtctcaccaaactgctagaac

SEQ ID NO: 74539 - DNA, 25 bp, Saccharomyces pastorianus
atctttgggccattagacatcctgc

SEQ ID NO: 74540 - DNA, 25 bp, Saccharomyces pastorianus
atgacttagtcacaccgtttttcga

SEQ ID NO: 74541 - DNA, 25 bp, Saccharomyces pastorianus
tacggaatatttaccgccttctcaa

SEQ ID NO: 74542 - DNA, 25 bp, Saccharomyces pastorianus
atccccttgtatcagttcaaatccg

SEQ ID NO: 74543 - DNA, 25 bp, Saccharomyces pastorianus
acatcctgccagtgggtacgtgcaa

SEQ ID NO: 74544 - DNA, 25 bp, Saccharomyces pastorianus
aaggacccttctacatatatgacag

SEQ ID NO: 74545 - DNA, 25 bp, Saccharomyces pastorianus
gtacaaactagcttgcaacggatat

SEQ ID NO: 74546 - DNA, 25 bp, Saccharomyces pastorianus
aaattcgacgactctgatgaagaag

SEQ ID NO: 74547 - DNA, 25 bp, Saccharomyces pastorianus
gacacaggattctaaagcattgcca

SEQ ID NO: 74548 - DNA, 25 bp, Saccharomyces pastorianus
ttcgacgactctgatgaagaagaag

SEQ ID NO: 74549 - DNA, 25 bp, Saccharomyces pastorianus
tttgataaattcgacgactctgatg

SEQ ID NO: 74550 - DNA, 25 bp, Saccharomyces pastorianus
gagggaagttcaaaattcagttact

SEQ ID NO: 74551 - DNA, 25 bp, Saccharomyces pastorianus
ggattctaaagcattgccaccaaag

SEQ ID NO: 74552 - DNA, 25 bp, Saccharomyces pastorianus
attcagttactaccaacgacacagg

SEQ ID NO: 74553 - DNA, 25 bp, Saccharomyces pastorianus
aagaagaagaagtagccaaagccat

SEQ ID NO: 74554 - DNA, 25 bp, Saccharomyces pastorianus
gccaaagccataaaggcacgaaaga

SEQ ID NO: 74555 - DNA, 25 bp, Saccharomyces pastorianus
gttactaccaacgacacaggattct

SEQ ID NO: 74556 - DNA, 25 bp, Saccharomyces pastorianus
taccaacgacacaggattctaaagc

SEQ ID NO: 74557 - DNA, 25 bp, Saccharomyces pastorianus
aaatacgcatggatagtgacgaaga

SEQ ID NO: 74558 - DNA, 25 bp, Saccharomyces pastorianus
aagtagtgcacagaagttgtcttca

SEQ ID NO: 74559 - DNA, 25 bp, Saccharomyces pastorianus
gaacgatgagcaaatacgcatggat

SEQ ID NO: 74560 - DNA, 25 bp, Saccharomyces pastorianus
gaggccataaggtcggaacaatcac

SEQ ID NO: 74561 - DNA, 25 bp, Saccharomyces pastorianus
taaggtcggaacaatcacagttgaa

SEQ ID NO: 74562 - DNA, 25 bp, Saccharomyces pastorianus
gaaggactgcactctgggaaaaatg

SEQ ID NO: 74563 - DNA, 25 bp, Saccharomyces pastorianus
gaactccccgaagaactactagata

SEQ ID NO: 74564 - DNA, 25 bp, Saccharomyces pastorianus
agagacaattgctgaactccccgaa

SEQ ID NO: 74565 - DNA, 25 bp, Saccharomyces pastorianus
aaggatgacatgcaggtaatatcaa

SEQ ID NO: 74566 - DNA, 25 bp, Saccharomyces pastorianus
gcaaaatgaactttacgctaagcag

SEQ ID NO: 74567 - DNA, 25 bp, Saccharomyces pastorianus
tagaatcacgttttactgaaaggga

SEQ ID NO: 74568 - DNA, 25 bp, Saccharomyces pastorianus
agcaccggcccgtggcggcgatggg

SEQ ID NO: 74569 - DNA, 25 bp, Saccharomyces pastorianus
gatgggcgccgccacggaaacggaa

SEQ ID NO: 74570 - DNA, 25 bp, Saccharomyces pastorianus
cgtcgcccacgaagaagcagcagca

SEQ ID NO: 74571 - DNA, 25 bp, Saccharomyces pastorianus
gaagaagcagcagcaccggcccgtg

SEQ ID NO: 74572 - DNA, 25 bp, Saccharomyces pastorianus
tgtcgtcgcccacgaagaagcagca

SEQ ID NO: 74573 - DNA, 25 bp, Saccharomyces pastorianus
acgaagaagcagcagcaccggcccg

SEQ ID NO: 74574 - DNA, 25 bp, Saccharomyces pastorianus
gaaacggaagccgaagccgagaccg

SEQ ID NO: 74575 - DNA, 25 bp, Saccharomyces pastorianus
gtcgtcgcccacgaagaagcagcag

SEQ ID NO: 74576 - DNA, 25 bp, Saccharomyces pastorianus
tgctgctgtcgtcgcccacgaagaa

SEQ ID NO: 74577 - DNA, 25 bp, Saccharomyces pastorianus
agaagcagcagcaccggcccgtggc

SEQ ID NO: 74578 - DNA, 25 bp, Saccharomyces pastorianus
gctgtcgtcgcccacgaagaagcag

SEQ ID NO: 74579 - DNA, 25 bp, Saccharomyces pastorianus
cgaactgcactagcctcagggataa

SEQ ID NO: 74580 - DNA, 25 bp, Saccharomyces pastorianus
gcgaaccgaggccatacgacaagat

SEQ ID NO: 74581 - DNA, 25 bp, Saccharomyces pastorianus
atttgtactctttgaaacccgctgt

SEQ ID NO: 74582 - DNA, 25 bp, Saccharomyces pastorianus
gaaaatatctcgcacttgcacgata

SEQ ID NO: 74583 - DNA, 25 bp, Saccharomyces pastorianus
gctgggctcgctggtgaaagaacaa

SEQ ID NO: 74584 - DNA, 25 bp, Saccharomyces pastorianus
aaaaaccagtccttacagcaatcgt

SEQ ID NO: 74585 - DNA, 25 bp, Saccharomyces pastorianus
aaatagggcgcatccacacggcagt

SEQ ID NO: 74586 - DNA, 25 bp, Saccharomyces pastorianus
gtgaacgcgatttttcaccagctgg

SEQ ID NO: 74587 - DNA, 25 bp, Saccharomyces pastorianus
aaaactctcaggtgacttcaggaac

SEQ ID NO: 74588 - DNA, 25 bp, Saccharomyces pastorianus
acagactccgttgctgcacgaagaa

SEQ ID NO: 74589 - DNA, 25 bp, Saccharomyces pastorianus
agtccagctatatctccatcaaagt

SEQ ID NO: 74590 - DNA, 25 bp, Saccharomyces pastorianus
agtccactttgaccgattccttggt

SEQ ID NO: 74591 - DNA, 25 bp, Saccharomyces pastorianus
gctcgtttcaccgataccagaaagg

SEQ ID NO: 74592 - DNA, 25 bp, Saccharomyces pastorianus
cactttgaccgattccttggtccaa

SEQ ID NO: 74593 - DNA, 25 bp, Saccharomyces pastorianus
gtaagtccactttgaccgattcctt

SEQ ID NO: 74594 - DNA, 25 bp, Saccharomyces pastorianus
ccgataccagaaaggatgaacaaga

SEQ ID NO: 74595 - DNA, 25 bp, Saccharomyces pastorianus
gtgaagctcgtttcaccgataccag

SEQ ID NO: 74596 - DNA, 25 bp, Saccharomyces pastorianus
ctttgaccgattccttggtccaaag

SEQ ID NO: 74597 - DNA, 25 bp, Saccharomyces pastorianus
aagctcgtttcaccgataccagaaa

SEQ ID NO: 74598 - DNA, 25 bp, Saccharomyces pastorianus
gaagctcgtttcaccgataccagaa

SEQ ID NO: 74599 - DNA, 25 bp, Saccharomyces pastorianus
gtttcaccgataccagaaaggatga

SEQ ID NO: 74600 - DNA, 25 bp, Saccharomyces pastorianus
aagtccactttgaccgattccttgg

SEQ ID NO: 74601 - DNA, 25 bp, Saccharomyces pastorianus
gagtatgaagtctccagaacggtca

SEQ ID NO: 74602 - DNA, 25 bp, Saccharomyces pastorianus
aaacgccagccccaattcaggaatg

SEQ ID NO: 74603 - DNA, 25 bp, Saccharomyces pastorianus
atagataaccacatgctgccgaagt

SEQ ID NO: 74604 - DNA, 25 bp, Saccharomyces pastorianus
caatttagcggccattgttcagcca

SEQ ID NO: 74605 - DNA, 25 bp, Saccharomyces pastorianus
agaacggtcatcgagttcctcatca

SEQ ID NO: 74606 - DNA, 25 bp, Saccharomyces pastorianus
agacatctacatgctcttaccacaa

SEQ ID NO: 74607 - DNA, 25 bp, Saccharomyces pastorianus
gtagttgttcctgaaatggccattg

SEQ ID NO: 74608 - DNA, 25 bp, Saccharomyces pastorianus
gactcgaacaatttcatcctgcagc

SEQ ID NO: 74609 - DNA, 25 bp, Saccharomyces pastorianus
gaacctttagttccattagcattat

SEQ ID NO: 74610 - DNA, 25 bp, Saccharomyces pastorianus
gttcagccatcaatactttctcatc

SEQ ID NO: 74611 - DNA, 25 bp, Saccharomyces pastorianus
gcacgcttccgacataataccaaat

SEQ ID NO: 74612 - DNA, 25 bp, Saccharomyces pastorianus
tgagactgtgtatcttcccgtggaa

SEQ ID NO: 74613 - DNA, 25 bp, Saccharomyces pastorianus
tggcttaccagtgtatcttccgatg

SEQ ID NO: 74614 - DNA, 25 bp, Saccharomyces pastorianus
tagaaatttccggaccgataccatc

SEQ ID NO: 74615 - DNA, 25 bp, Saccharomyces pastorianus
atcaccttcgatgaatgagactgtg

SEQ ID NO: 74616 - DNA, 25 bp, Saccharomyces pastorianus
gacggtagacaaaaaccttctcgag

SEQ ID NO: 74617 - DNA, 25 bp, Saccharomyces pastorianus
cttctcgaggtgtttcttagaaaag

SEQ ID NO: 74618 - DNA, 25 bp, Saccharomyces pastorianus
ttattcgctcctgctaatgctgctg

SEQ ID NO: 74619 - DNA, 25 bp, Saccharomyces pastorianus
atggaaggttgcttgacggtagaca

SEQ ID NO: 74620 - DNA, 25 bp, Saccharomyces pastorianus
tcccgtggaaggatctggcttacca

SEQ ID NO: 74621 - DNA, 25 bp, Saccharomyces pastorianus
taatgctgctgtgcgtattctcacc

SEQ ID NO: 74622 - DNA, 25 bp, Saccharomyces pastorianus
gtaatatgttattcgctcctgctaa

SEQ ID NO: 74623 - DNA, 25 bp, Saccharomyces pastorianus
cggatggagaccaccatatcaagtc

SEQ ID NO: 74624 - DNA, 25 bp, Saccharomyces pastorianus
atcaagtcgtgcaacgagtcgtcct

SEQ ID NO: 74625 - DNA, 25 bp, Saccharomyces pastorianus
tactgaaccgctccacgggcttgat

SEQ ID NO: 74626 - DNA, 25 bp, Saccharomyces pastorianus
gtggccagggctttactgaaccgct

SEQ ID NO: 74627 - DNA, 25 bp, Saccharomyces pastorianus
ttcaactgcctcacaaaactcgtga

SEQ ID NO: 74628 - DNA, 25 bp, Saccharomyces pastorianus
acgggcttgatcatgaaggacagac

SEQ ID NO: 74629 - DNA, 25 bp, Saccharomyces pastorianus
tatgcttgaagtacgtggccagggc

SEQ ID NO: 74630 - DNA, 25 bp, Saccharomyces pastorianus
aagtacgtggccagggctttactga

SEQ ID NO: 74631 - DNA, 25 bp, Saccharomyces pastorianus
aggacagaccggatggagaccacca

SEQ ID NO: 74632 - DNA, 25 bp, Saccharomyces pastorianus
aaactcgtgatattggtatgcttga

SEQ ID NO: 74633 - DNA, 25 bp, Saccharomyces pastorianus
caacgagtcgtcctccaggatctgg

SEQ ID NO: 74634 - DNA, 25 bp, Saccharomyces pastorianus
aatgtttctctcacgtgccttatga

SEQ ID NO: 74635 - DNA, 25 bp, Saccharomyces pastorianus
aagagaagggcttcctcgcgcatca

SEQ ID NO: 74636 - DNA, 25 bp, Saccharomyces pastorianus
ttagaattcaataacccggatgcac

SEQ ID NO: 74637 - DNA, 25 bp, Saccharomyces pastorianus
ggaaaagagcaaccccaccaagatc

SEQ ID NO: 74638 - DNA, 25 bp, Saccharomyces pastorianus
tatgaaaacgcaaaccacggcccgt

SEQ ID NO: 74639 - DNA, 25 bp, Saccharomyces pastorianus
gcgatatcgagagcctcaagcacat

SEQ ID NO: 74640 - DNA, 25 bp, Saccharomyces pastorianus
cagaccgcttagtttccaggacgaa

SEQ ID NO: 74641 - DNA, 25 bp, Saccharomyces pastorianus
gacgaaactctcacccatttgaagg

SEQ ID NO: 74642 - DNA, 25 bp, Saccharomyces pastorianus
gcatagctccggtattttcaagaag

SEQ ID NO: 74643 - DNA, 25 bp, Saccharomyces pastorianus
gcagctctatccctgaatgtttctc

SEQ ID NO: 74644 - DNA, 25 bp, Saccharomyces pastorianus
gtgtcgcacgaccatactagcaacg

SEQ ID NO: 74645 - DNA, 25 bp, Saccharomyces pastorianus
gacgcttgtgtcacgaatttcaaga

SEQ ID NO: 74646 - DNA, 25 bp, Saccharomyces pastorianus
ttgaaagcagagaaaacccaatttt

SEQ ID NO: 74647 - DNA, 25 bp, Saccharomyces pastorianus
aaaagcctccagatggcaattgatc

SEQ ID NO: 74648 - DNA, 25 bp, Saccharomyces pastorianus
taaaacgttactcaacatgaacaat

SEQ ID NO: 74649 - DNA, 25 bp, Saccharomyces pastorianus
aaacgattatgcacaacaagtcaaa

SEQ ID NO: 74650 - DNA, 25 bp, Saccharomyces pastorianus
gaacgcctagaaagagcacttcaga

SEQ ID NO: 74651 - DNA, 25 bp, Saccharomyces pastorianus
acttcagatgccaattattactcca

SEQ ID NO: 74652 - DNA, 25 bp, Saccharomyces pastorianus
aacaatctagagcaacagttacttg

SEQ ID NO: 74653 - DNA, 25 bp, Saccharomyces pastorianus
agaacgtggtagacgcttgtgtcac

SEQ ID NO: 74654 - DNA, 25 bp, Saccharomyces pastorianus
ggcaattgatcatttgctgatagta

SEQ ID NO: 74655 - DNA, 25 bp, Saccharomyces pastorianus
gggattactataaacttcaagaacg

SEQ ID NO: 74656 - DNA, 25 bp, Saccharomyces pastorianus
aagatattcattatgttacggccaa

SEQ ID NO: 74657 - DNA, 25 bp, Saccharomyces pastorianus
attcattatgttacggccaactaca

SEQ ID NO: 74658 - DNA, 25 bp, Saccharomyces pastorianus
aaattatcaccatggaaaagaatac

SEQ ID NO: 74659 - DNA, 25 bp, Saccharomyces pastorianus
aactacaacaaaacggttaatgctg

SEQ ID NO: 74660 - DNA, 25 bp, Saccharomyces pastorianus
gctgatatcgatgaattcaaattta

SEQ ID NO: 74661 - DNA, 25 bp, Saccharomyces pastorianus
acaaaacggttaatgctgatatcga

SEQ ID NO: 74662 - DNA, 25 bp, Saccharomyces pastorianus
ttcattatgttacggccaactacaa

SEQ ID NO: 74663 - DNA, 25 bp, Saccharomyces pastorianus
atattcattatgttacggccaacta

SEQ ID NO: 74664 - DNA, 25 bp, Saccharomyces pastorianus
caactcgtggaaagatattcattat

SEQ ID NO: 74665 - DNA, 25 bp, Saccharomyces pastorianus
cattatgttacggccaactacaaca

SEQ ID NO: 74666 - DNA, 25 bp, Saccharomyces pastorianus
aaaacggttaatgctgatatcgatg

SEQ ID NO: 74667 - DNA, 25 bp, Saccharomyces pastorianus
gatacgacaagctgggttaagccca

SEQ ID NO: 74668 - DNA, 25 bp, Saccharomyces pastorianus
gaaagcaaggttcgtctcctcgaat

SEQ ID NO: 74669 - DNA, 25 bp, Saccharomyces pastorianus
ttatcaccttttcatgactaccttc

SEQ ID NO: 74670 - DNA, 25 bp, Saccharomyces pastorianus
aaagattccagttgtcgtcgagcct

SEQ ID NO: 74671 - DNA, 25 bp, Saccharomyces pastorianus
gtcgagcctgcttctcaaacagatg

SEQ ID NO: 74672 - DNA, 25 bp, Saccharomyces pastorianus
gcagctgtccactcaacattgaatt

SEQ ID NO: 74673 - DNA, 25 bp, Saccharomyces pastorianus
agatgcagccatgtcgccgaaggaa

SEQ ID NO: 74674 - DNA, 25 bp, Saccharomyces pastorianus
tgctttggctaacgacaccgccaga

SEQ ID NO: 74675 - DNA, 25 bp, Saccharomyces pastorianus
tcgaatcccactctttcaaggtttt

SEQ ID NO: 74676 - DNA, 25 bp, Saccharomyces pastorianus
gaatacaagcagctgtccactcaac

SEQ ID NO: 74677 - DNA, 25 bp, Saccharomyces pastorianus
gataaacttgaaaatgctacccctc

SEQ ID NO: 74678 - DNA, 25 bp, Saccharomyces pastorianus
tacgcagtgctgaagttacggaatt

SEQ ID NO: 74679 - DNA, 25 bp, Saccharomyces pastorianus
gcagtgtcgctgtaagcaacaatca

SEQ ID NO: 74680 - DNA, 25 bp, Saccharomyces pastorianus
gatgaagccaagatacgcagtgctg

SEQ ID NO: 74681 - DNA, 25 bp, Saccharomyces pastorianus
tagcagtactagtagcagtgtcgct

SEQ ID NO: 74682 - DNA, 25 bp, Saccharomyces pastorianus
gaatcttgtctctctacaaaatgaa

SEQ ID NO: 74683 - DNA, 25 bp, Saccharomyces pastorianus
gaagaattcaagacatggcataaca

SEQ ID NO: 74684 - DNA, 25 bp, Saccharomyces pastorianus
gtaacatccaagcagaacacattaa

SEQ ID NO: 74685 - DNA, 25 bp, Saccharomyces pastorianus
gatgatgagcatattaagtcgttag

SEQ ID NO: 74686 - DNA, 25 bp, Saccharomyces pastorianus
gagaatcttcatgagaatcttgtct

SEQ ID NO: 74687 - DNA, 25 bp, Saccharomyces pastorianus
atcgtcggacagaataacaatacta

SEQ ID NO: 74688 - DNA, 25 bp, Saccharomyces pastorianus
aatgaactgggcatatcgtcggaca

SEQ ID NO: 74689 - DNA, 25 bp, Saccharomyces pastorianus
gaattcatcaccctttcttataaag

SEQ ID NO: 74690 - DNA, 25 bp, Saccharomyces pastorianus
tataccatttgcatcctagttttaa

SEQ ID NO: 74691 - DNA, 25 bp, Saccharomyces pastorianus
gcttctttgtagacgatgccggaaa

SEQ ID NO: 74692 - DNA, 25 bp, Saccharomyces pastorianus
agacactacagtttccgatttggat

SEQ ID NO: 74693 - DNA, 25 bp, Saccharomyces pastorianus
atggtattgagcgaccctgcagtac

SEQ ID NO: 74694 - DNA, 25 bp, Saccharomyces pastorianus
aactacccgatgaactgctaatgaa

SEQ ID NO: 74695 - DNA, 25 bp, Saccharomyces pastorianus
aacgcagtcgaaaaccatcctagaa

SEQ ID NO: 74696 - DNA, 25 bp, Saccharomyces pastorianus
taaaaccctaactttcattgacgag

SEQ ID NO: 74697 - DNA, 25 bp, Saccharomyces pastorianus
tccgatttggatgcgactagttttc

SEQ ID NO: 74698 - DNA, 25 bp, Saccharomyces pastorianus
agaggaatcgctccgtatggctgat

SEQ ID NO: 74699 - DNA, 25 bp, Saccharomyces pastorianus
gatggagctgctgaactagacacta

SEQ ID NO: 74700 - DNA, 25 bp, Saccharomyces pastorianus
agaaagaggctactggacccatttt

SEQ ID NO: 74701 - DNA, 25 bp, Saccharomyces pastorianus
gagtctattgccattgcatgctgtc

SEQ ID NO: 74702 - DNA, 25 bp, Saccharomyces pastorianus
gccagcaatagtacccctgattttg

SEQ ID NO: 74703 - DNA, 25 bp, Saccharomyces pastorianus
ttcatctgtctatcctgcatcaaag

SEQ ID NO: 74704 - DNA, 25 bp, Saccharomyces pastorianus
tgacgtgaccgctgcagtcattaaa

SEQ ID NO: 74705 - DNA, 25 bp, Saccharomyces pastorianus
tggaattttttgtcggacctgacgt

SEQ ID NO: 74706 - DNA, 25 bp, Saccharomyces pastorianus
tgcatcaaaggttgctggccatatg

SEQ ID NO: 74707 - DNA, 25 bp, Saccharomyces pastorianus
agtggcggtgctactgccagcaata

SEQ ID NO: 74708 - DNA, 25 bp, Saccharomyces pastorianus
aagcaaggcccggatgcaatttcat

SEQ ID NO: 74709 - DNA, 25 bp, Saccharomyces pastorianus
ggccagacacacttacaagctgttg

SEQ ID NO: 74710 - DNA, 25 bp, Saccharomyces pastorianus
gaagcggctgattgcatttcattag

SEQ ID NO: 74711 - DNA, 25 bp, Saccharomyces pastorianus
gtatctttttaatgactgcagcggt

SEQ ID NO: 74712 - DNA, 25 bp, Saccharomyces pastorianus
gtaaatccacttttaactgccgctg

SEQ ID NO: 74713 - DNA, 25 bp, Saccharomyces pastorianus
gtcacgtcaggtccgacaaaaaatt

SEQ ID NO: 74714 - DNA, 25 bp, Saccharomyces pastorianus
actgccgctggtatctttttaatga

SEQ ID NO: 74715 - DNA, 25 bp, Saccharomyces pastorianus
gccgctggtatctttttaatgactg

SEQ ID NO: 74716 - DNA, 25 bp, Saccharomyces pastorianus
tttaactgccgctggtatcttttta

SEQ ID NO: 74717 - DNA, 25 bp, Saccharomyces pastorianus
aatccacttttaactgccgctggta

SEQ ID NO: 74718 - DNA, 25 bp, Saccharomyces pastorianus
atgactgcagcggtcacgtcaggtc

SEQ ID NO: 74719 - DNA, 25 bp, Saccharomyces pastorianus
ttaatgactgcagcggtcacgtcag

SEQ ID NO: 74720 - DNA, 25 bp, Saccharomyces pastorianus
gctattgtattttcgtgtaaatcca

SEQ ID NO: 74721 - DNA, 25 bp, Saccharomyces pastorianus
agcggtcacgtcaggtccgacaaaa

SEQ ID NO: 74722 - DNA, 25 bp, Saccharomyces pastorianus
atggaactccatcgtcagactgcag

SEQ ID NO: 74723 - DNA, 25 bp, Saccharomyces pastorianus
ggaacaccatcgtaactctgtctaa

SEQ ID NO: 74724 - DNA, 25 bp, Saccharomyces pastorianus
ggcaataacttccatcgacgtgttg

SEQ ID NO: 74725 - DNA, 25 bp, Saccharomyces pastorianus
gtttctgttagaacccgtggaccag

SEQ ID NO: 74726 - DNA, 25 bp, Saccharomyces pastorianus
gaggctcttgtatcccagattaacg

SEQ ID NO: 74727 - DNA, 25 bp, Saccharomyces pastorianus
tgccagcgctccaaacgttttgaaa

SEQ ID NO: 74728 - DNA, 25 bp, Saccharomyces pastorianus
gaactatcacaatcaatgcctctcg

SEQ ID NO: 74729 - DNA, 25 bp, Saccharomyces pastorianus
acttactggtggctactgcatccaa

SEQ ID NO: 74730 - DNA, 25 bp, Saccharomyces pastorianus
gttacatcccaatctaccgatagtg

SEQ ID NO: 74731 - DNA, 25 bp, Saccharomyces pastorianus
gcattcgatctactgaactactcca

SEQ ID NO: 74732 - DNA, 25 bp, Saccharomyces pastorianus
gatagtgttcgtagccacggaccat

SEQ ID NO: 74733 - DNA, 25 bp, Saccharomyces pastorianus
gatatcattccattcgctatcttca

SEQ ID NO: 74734 - DNA, 25 bp, Saccharomyces pastorianus
gagggtgcacgctcaggtatcacac

SEQ ID NO: 74735 - DNA, 25 bp, Saccharomyces pastorianus
acgctcaggtatcacacctttggct

SEQ ID NO: 74736 - DNA, 25 bp, Saccharomyces pastorianus
cacacctttggctcttaagatatca

SEQ ID NO: 74737 - DNA, 25 bp, Saccharomyces pastorianus
tatcattccattcgctatcttcaga

SEQ ID NO: 74738 - DNA, 25 bp, Saccharomyces pastorianus
gtgcacgctcaggtatcacaccttt

SEQ ID NO: 74739 - DNA, 25 bp, Saccharomyces pastorianus
aggtatcacacctttggctcttaag

SEQ ID NO: 74740 - DNA, 25 bp, Saccharomyces pastorianus
ggctcttaagatatcattccattcg

SEQ ID NO: 74741 - DNA, 25 bp, Saccharomyces pastorianus
gacctgaaacattggctcgttttgc

SEQ ID NO: 74742 - DNA, 25 bp, Saccharomyces pastorianus
gtatcacacctttggctcttaagat

SEQ ID NO: 74743 - DNA, 25 bp, Saccharomyces pastorianus
cgagttctgctgtgggtgagggtgc

SEQ ID NO: 74744 - DNA, 25 bp, Saccharomyces pastorianus
ttgaagagcctggagccaatcacga

SEQ ID NO: 74745 - DNA, 25 bp, Saccharomyces pastorianus
taatgtgaatgccactgcgacctca

SEQ ID NO: 74746 - DNA, 25 bp, Saccharomyces pastorianus
tggtctctcaagcaagtacacacag

SEQ ID NO: 74747 - DNA, 25 bp, Saccharomyces pastorianus
gaaacctatggtctctcaagcaagt

SEQ ID NO: 74748 - DNA, 25 bp, Saccharomyces pastorianus
taggtctaaggcctatcccggtcgg

SEQ ID NO: 74749 - DNA, 25 bp, Saccharomyces pastorianus
ccactactgttcatattgccactaa

SEQ ID NO: 74750 - DNA, 25 bp, Saccharomyces pastorianus
gccatacgggcaaaattaggtctaa

SEQ ID NO: 74751 - DNA, 25 bp, Saccharomyces pastorianus
atgccactgcgacctcaatattaaa

SEQ ID NO: 74752 - DNA, 25 bp, Saccharomyces pastorianus
acgactgctcgtggctgaataatgt

SEQ ID NO: 74753 - DNA, 25 bp, Saccharomyces pastorianus
agagaacgacgtgggcaatgaatca

SEQ ID NO: 74754 - DNA, 25 bp, Saccharomyces pastorianus
tgccactaaggcagatgcacttcga

SEQ ID NO: 74755 - DNA, 25 bp, Saccharomyces pastorianus
gaacatgccaacaactaaatctcca

SEQ ID NO: 74756 - DNA, 25 bp, Saccharomyces pastorianus
gagaaagactcgctcacagacattc

SEQ ID NO: 74757 - DNA, 25 bp, Saccharomyces pastorianus
aacgtttccagtttagatattgaag

SEQ ID NO: 74758 - DNA, 25 bp, Saccharomyces pastorianus
atatcgctcctaaaatggaagctgt

SEQ ID NO: 74759 - DNA, 25 bp, Saccharomyces pastorianus
actaaatctccaaaactgctaacag

SEQ ID NO: 74760 - DNA, 25 bp, Saccharomyces pastorianus
attcctctaacgattggagcagaac

SEQ ID NO: 74761 - DNA, 25 bp, Saccharomyces pastorianus
gaaaacgcaaaatcaaggactcaaa

SEQ ID NO: 74762 - DNA, 25 bp, Saccharomyces pastorianus
tggtggagactttaagccggtaaag

SEQ ID NO: 74763 - DNA, 25 bp, Saccharomyces pastorianus
ctcacagacattcctctaacgattg

SEQ ID NO: 74764 - DNA, 25 bp, Saccharomyces pastorianus
gaggatgaatttaaacgtttccagt

SEQ ID NO: 74765 - DNA, 25 bp, Saccharomyces pastorianus
agaacagggaatcatgaacatgcca

SEQ ID NO: 74766 - DNA, 25 bp, Saccharomyces pastorianus
tagaaccacgtgctgaagttaccca

SEQ ID NO: 74767 - DNA, 25 bp, Saccharomyces pastorianus
tggcctttaatatacgcattcgtca

SEQ ID NO: 74768 - DNA, 25 bp, Saccharomyces pastorianus
ggcactgccattttaaacactgggt

SEQ ID NO: 74769 - DNA, 25 bp, Saccharomyces pastorianus
atcacacgaatggtttggcgatttt

SEQ ID NO: 74770 - DNA, 25 bp, Saccharomyces pastorianus
aaacggcgtaactagtagcagcgat

SEQ ID NO: 74771 - DNA, 25 bp, Saccharomyces pastorianus
aagttacccagcgattgcctttcaa

SEQ ID NO: 74772 - DNA, 25 bp, Saccharomyces pastorianus
ttcgtccattggttttatcacattg

SEQ ID NO: 74773 - DNA, 25 bp, Saccharomyces pastorianus
agttccacgcaaagttttccattcg

SEQ ID NO: 74774 - DNA, 25 bp, Saccharomyces pastorianus
gaagctagtcctgcaaacggcgtaa

SEQ ID NO: 74775 - DNA, 25 bp, Saccharomyces pastorianus
aagacgcacatgtacctgttacgga

SEQ ID NO: 74776 - DNA, 25 bp, Saccharomyces pastorianus
agacggtggtgcttatgaggacaac

SEQ ID NO: 74777 - DNA, 25 bp, Saccharomyces pastorianus
agtttcttgacccaggattctccat

SEQ ID NO: 74778 - DNA, 25 bp, Saccharomyces pastorianus
atcaccttgtcaccaccggaatttc

SEQ ID NO: 74779 - DNA, 25 bp, Saccharomyces pastorianus
atggaggcaaaagggtacagtttct

SEQ ID NO: 74780 - DNA, 25 bp, Saccharomyces pastorianus
gatgagcaaatccattttccctcta

SEQ ID NO: 74781 - DNA, 25 bp, Saccharomyces pastorianus
gtacagtttcttgacccaggattct

SEQ ID NO: 74782 - DNA, 25 bp, Saccharomyces pastorianus
gtagactccttaatcatcaccttgt

SEQ ID NO: 74783 - DNA, 25 bp, Saccharomyces pastorianus
caaatccattttccctctaacgaat

SEQ ID NO: 74784 - DNA, 25 bp, Saccharomyces pastorianus
acaaaggctcctcgagaacgatgga

SEQ ID NO: 74785 - DNA, 25 bp, Saccharomyces pastorianus
ggattctccatcctattgatgagca

SEQ ID NO: 74786 - DNA, 25 bp, Saccharomyces pastorianus
ggaatttctccttcgcccacaaagg

SEQ ID NO: 74787 - DNA, 25 bp, Saccharomyces pastorianus
tgtgcctgtggcgtagactccttaa

SEQ ID NO: 74788 - DNA, 25 bp, Saccharomyces pastorianus
gtttctcacgatgttagtcttctca

SEQ ID NO: 74789 - DNA, 25 bp, Saccharomyces pastorianus
atcgatgttgttggtctcgtttctc

SEQ ID NO: 74790 - DNA, 25 bp, Saccharomyces pastorianus
tgttcacgggcggaaaggaccttca

SEQ ID NO: 74791 - DNA, 25 bp, Saccharomyces pastorianus
agagacctgacaatggccttgggct

SEQ ID NO: 74792 - DNA, 25 bp, Saccharomyces pastorianus
aggaccttcaaacgcatcttgttgg

SEQ ID NO: 74793 - DNA, 25 bp, Saccharomyces pastorianus
tcggccttcaactggatttccttag

SEQ ID NO: 74794 - DNA, 25 bp, Saccharomyces pastorianus
aactccttcttggtctcttcgaata

SEQ ID NO: 74795 - DNA, 25 bp, Saccharomyces pastorianus
aatatcccgtccagtgattgttcac

SEQ ID NO: 74796 - DNA, 25 bp, Saccharomyces pastorianus
aatcaaatcagcgtctctctcaaga

SEQ ID NO: 74797 - DNA, 25 bp, Saccharomyces pastorianus
aagatgggcttgtacttgtccctgt

SEQ ID NO: 74798 - DNA, 25 bp, Saccharomyces pastorianus
gatttgctgcgatagcgtggccttc

SEQ ID NO: 74799 - DNA, 25 bp, Saccharomyces pastorianus
gttaatcactataatgccttgggca

SEQ ID NO: 74800 - DNA, 25 bp, Saccharomyces pastorianus
atgccttgggcactagagttgtcct

SEQ ID NO: 74801 - DNA, 25 bp, Saccharomyces pastorianus
gctacagtggtcctgagcaactcaa

SEQ ID NO: 74802 - DNA, 25 bp, Saccharomyces pastorianus
ggttaatgctttgaaacgctatttg

SEQ ID NO: 74803 - DNA, 25 bp, Saccharomyces pastorianus
gagcaactcaatgcctgataaggat

SEQ ID NO: 74804 - DNA, 25 bp, Saccharomyces pastorianus
agagttgtcctctacagcggctaca

SEQ ID NO: 74805 - DNA, 25 bp, Saccharomyces pastorianus
aggatcaggatttagcagcttcttc

SEQ ID NO: 74806 - DNA, 25 bp, Saccharomyces pastorianus
agcttcttcaataaacactgtagta

SEQ ID NO: 74807 - DNA, 25 bp, Saccharomyces pastorianus
gttcttacggagtattgtagctgtt

SEQ ID NO: 74808 - DNA, 25 bp, Saccharomyces pastorianus
gtttaggaatctcaggtaccgttgt

SEQ ID NO: 74809 - DNA, 25 bp, Saccharomyces pastorianus
gtaccgttgtttcccaagtgactga

SEQ ID NO: 74810 - DNA, 25 bp, Saccharomyces pastorianus
tataaattgcttttcggtagccttt

SEQ ID NO: 74811 - DNA, 25 bp, Saccharomyces pastorianus
tacactgcagcgacataaatcccaa

SEQ ID NO: 74812 - DNA, 25 bp, Saccharomyces pastorianus
aatagttcactaccgtattgaccaa

SEQ ID NO: 74813 - DNA, 25 bp, Saccharomyces pastorianus
aacttgagactcaattgtacctgca

SEQ ID NO: 74814 - DNA, 25 bp, Saccharomyces pastorianus
gaacaacggtatcctttcagagcat

SEQ ID NO: 74815 - DNA, 25 bp, Saccharomyces pastorianus
ggatcctccgtcattaacttgagac

SEQ ID NO: 74816 - DNA, 25 bp, Saccharomyces pastorianus
tttcagagcattggatcctccgtca

SEQ ID NO: 74817 - DNA, 25 bp, Saccharomyces pastorianus
ggtagcctttttcttagacttcaca

SEQ ID NO: 74818 - DNA, 25 bp, Saccharomyces pastorianus
gatacccaagtaccaagaacaacgg

SEQ ID NO: 74819 - DNA, 25 bp, Saccharomyces pastorianus
ctgcaacacccagtccaatggatat

SEQ ID NO: 74820 - DNA, 25 bp, Saccharomyces pastorianus
aaatgtgctcgatgcatacactgca

SEQ ID NO: 74821 - DNA, 25 bp, Saccharomyces pastorianus
ggcattagtggccattacatctagt

SEQ ID NO: 74822 - DNA, 25 bp, Saccharomyces pastorianus
ggactcgtggtatctggtctgatta

SEQ ID NO: 74823 - DNA, 25 bp, Saccharomyces pastorianus
ttcgtgctaccgcaacgctggaagt

SEQ ID NO: 74824 - DNA, 25 bp, Saccharomyces pastorianus
aaagttgccatccaaacacactcta

SEQ ID NO: 74825 - DNA, 25 bp, Saccharomyces pastorianus
tggaagtgccaactctacattcggg

SEQ ID NO: 74826 - DNA, 25 bp, Saccharomyces pastorianus
atcaactgattctcgttatctggac

SEQ ID NO: 74827 - DNA, 25 bp, Saccharomyces pastorianus
tgcgaagtccgcctctaataaggat

SEQ ID NO: 74828 - DNA, 25 bp, Saccharomyces pastorianus
gggccactaagcgtcaaagacctca

SEQ ID NO: 74829 - DNA, 25 bp, Saccharomyces pastorianus
gaccggtgggcaaggcatattatct

SEQ ID NO: 74830 - DNA, 25 bp, Saccharomyces pastorianus
tcaccatattagcttcaggccctaa

SEQ ID NO: 74831 - DNA, 25 bp, Saccharomyces pastorianus
gcgtcgattctttaacttctttggt

SEQ ID NO: 74832 - DNA, 25 bp, Saccharomyces pastorianus
gttatgaaggcgacaacgacgatga

SEQ ID NO: 74833 - DNA, 25 bp, Saccharomyces pastorianus
gggatcaacgccaccaagtgcatca

SEQ ID NO: 74834 - DNA, 25 bp, Saccharomyces pastorianus
cagaaaccagggttccaaggcggat

SEQ ID NO: 74835 - DNA, 25 bp, Saccharomyces pastorianus
gcacggtaacgaccatgacgaacgt

SEQ ID NO: 74836 - DNA, 25 bp, Saccharomyces pastorianus
tgacgaacgttatgaaggcgacaac

SEQ ID NO: 74837 - DNA, 25 bp, Saccharomyces pastorianus
agagagttcagaaaccagggttcca

SEQ ID NO: 74838 - DNA, 25 bp, Saccharomyces pastorianus
cagcgatcaaaaccagggaactttc

SEQ ID NO: 74839 - DNA, 25 bp, Saccharomyces pastorianus
aaggcggatccctacagcgatcaaa

SEQ ID NO: 74840 - DNA, 25 bp, Saccharomyces pastorianus
caccaagtgcatcaacagagagagt

SEQ ID NO: 74841 - DNA, 25 bp, Saccharomyces pastorianus
aaactgcacggtaacgaccatgacg

SEQ ID NO: 74842 - DNA, 25 bp, Saccharomyces pastorianus
aacgacgatgagacccgggatcaac

SEQ ID NO: 74843 - DNA, 25 bp, Saccharomyces pastorianus
taagtcctgtggtgtcgacgccatg

SEQ ID NO: 74844 - DNA, 25 bp, Saccharomyces pastorianus
tgacagagctaagtcctgtggtgtc

SEQ ID NO: 74845 - DNA, 25 bp, Saccharomyces pastorianus
gagctaagtcctgtggtgtcgacgc

SEQ ID NO: 74846 - DNA, 25 bp, Saccharomyces pastorianus
cgttaacttcttggtctctttgttg

SEQ ID NO: 74847 - DNA, 25 bp, Saccharomyces pastorianus
agaagatgttttggctaaccaaatt

SEQ ID NO: 74848 - DNA, 25 bp, Saccharomyces pastorianus
catgtctctttgtatcttcggtgat

SEQ ID NO: 74849 - DNA, 25 bp, Saccharomyces pastorianus
aagaccaaacatgtctctttgtatc

SEQ ID NO: 74850 - DNA, 25 bp, Saccharomyces pastorianus
tggtgtcgacgccatgtccgttgat

SEQ ID NO: 74851 - DNA, 25 bp, Saccharomyces pastorianus
gtccgttaacttcttggtctctttg

SEQ ID NO: 74852 - DNA, 25 bp, Saccharomyces pastorianus
tgatgtccgttaacttcttggtctc

SEQ ID NO: 74853 - DNA, 25 bp, Saccharomyces pastorianus
ggctaaccaaattttgatgtccgtt

SEQ ID NO: 74854 - DNA, 25 bp, Saccharomyces pastorianus
attagccactttacaaccaacatgg

SEQ ID NO: 74855 - DNA, 25 bp, Saccharomyces pastorianus
gatagattagccactttacaaccaa

SEQ ID NO: 74856 - DNA, 25 bp, Saccharomyces pastorianus
cgacttgggcggtcacattcaagct

SEQ ID NO: 74857 - DNA, 25 bp, Saccharomyces pastorianus
aacgatagattagccactttacaac

SEQ ID NO: 74858 - DNA, 25 bp, Saccharomyces pastorianus
agaacgatagattagccactttaca

SEQ ID NO: 74859 - DNA, 25 bp, Saccharomyces pastorianus
agttcacaactttcgacttgggcgg

SEQ ID NO: 74860 - DNA, 25 bp, Saccharomyces pastorianus
tcgacttgggcggtcacattcaagc

SEQ ID NO: 74861 - DNA, 25 bp, Saccharomyces pastorianus
gattagccactttacaaccaacatg

SEQ ID NO: 74862 - DNA, 25 bp, Saccharomyces pastorianus
ggcaatcggtaatatcaagttcaca

SEQ ID NO: 74863 - DNA, 25 bp, Saccharomyces pastorianus
aatcggtaatatcaagttcacaact

SEQ ID NO: 74864 - DNA, 25 bp, Saccharomyces pastorianus
aacttctgaagaattggcaatcggt

SEQ ID NO: 74865 - DNA, 25 bp, Saccharomyces pastorianus
tttaggcttattgaacaccactggt

SEQ ID NO: 74866 - DNA, 25 bp, Saccharomyces pastorianus
cattgctgaattgaaagatgttcca

SEQ ID NO: 74867 - DNA, 25 bp, Saccharomyces pastorianus
gaagcccgtgttgagttagatgccc

SEQ ID NO: 74868 - DNA, 25 bp, Saccharomyces pastorianus
agatgttccatttgtcatccttggt

SEQ ID NO: 74869 - DNA, 25 bp, Saccharomyces pastorianus
gaacaccactggttcccaaagaatt

SEQ ID NO: 74870 - DNA, 25 bp, Saccharomyces pastorianus
ctggttcccaaagaattgagggtca

SEQ ID NO: 74871 - DNA, 25 bp, Saccharomyces pastorianus
gaagctgaattacgttctgctttag

SEQ ID NO: 74872 - DNA, 25 bp, Saccharomyces pastorianus
gagttagatgccctgttcaacattg

SEQ ID NO: 74873 - DNA, 25 bp, Saccharomyces pastorianus
tgctccaaatgctgtttctgaagct

SEQ ID NO: 74874 - DNA, 25 bp, Saccharomyces pastorianus
gctgtttctgaagctgaattacgtt

SEQ ID NO: 74875 - DNA, 25 bp, Saccharomyces pastorianus
gatgccctgttcaacattgctgaat

SEQ ID NO: 74876 - DNA, 25 bp, Saccharomyces pastorianus
tgcgcccatgcgacaaaggaggttt

SEQ ID NO: 74877 - DNA, 25 bp, Saccharomyces pastorianus
tttatttactggttggtcgggtcat

SEQ ID NO: 74878 - DNA, 25 bp, Saccharomyces pastorianus
attataactgctgtttcttgtgggt

SEQ ID NO: 74879 - DNA, 25 bp, Saccharomyces pastorianus
cgctccatcccatatacacaggaaa

SEQ ID NO: 74880 - DNA, 25 bp, Saccharomyces pastorianus
gaggagctcaatcagcttcatagta

SEQ ID NO: 74881 - DNA, 25 bp, Saccharomyces pastorianus
aatggaacattgctcctatctaccg

SEQ ID NO: 74882 - DNA, 25 bp, Saccharomyces pastorianus
aagggccctctgaagacgatgcgat

SEQ ID NO: 74883 - DNA, 25 bp, Saccharomyces pastorianus
ggtcgggtcattgtcattataactg

SEQ ID NO: 74884 - DNA, 25 bp, Saccharomyces pastorianus
aacgggtcttattttcacacaggtg

SEQ ID NO: 74885 - DNA, 25 bp, Saccharomyces pastorianus
gatggattcgaatggttcaccttta

SEQ ID NO: 74886 - DNA, 25 bp, Saccharomyces pastorianus
cttggatatcgacagagcctctttg

SEQ ID NO: 74887 - DNA, 25 bp, Saccharomyces pastorianus
gaggctgcatatcttaatgctcagg

SEQ ID NO: 74888 - DNA, 25 bp, Saccharomyces pastorianus
gaagctcttgaactaccgaaggcat

SEQ ID NO: 74889 - DNA, 25 bp, Saccharomyces pastorianus
aagcttgctaaaaacctattcagag

SEQ ID NO: 74890 - DNA, 25 bp, Saccharomyces pastorianus
tctcaaggcatgacagtatcgctgt

SEQ ID NO: 74891 - DNA, 25 bp, Saccharomyces pastorianus
ggcacactgcaggacaaaacttcaa

SEQ ID NO: 74892 - DNA, 25 bp, Saccharomyces pastorianus
gcggcatgaattactttatccttta

SEQ ID NO: 74893 - DNA, 25 bp, Saccharomyces pastorianus
gaggatatccttacgaagctcttga

SEQ ID NO: 74894 - DNA, 25 bp, Saccharomyces pastorianus
aaaccgtcatcttttctcaaggcat

SEQ ID NO: 74895 - DNA, 25 bp, Saccharomyces pastorianus
ggcatattgattacacggcacactg

SEQ ID NO: 74896 - DNA, 25 bp, Saccharomyces pastorianus
aagagcattttttgagaagcggcat

SEQ ID NO: 74897 - DNA, 25 bp, Saccharomyces pastorianus
gaaagacgcattttctcttggagaa

SEQ ID NO: 74898 - DNA, 25 bp, Saccharomyces pastorianus
ggtgaacctatactttatcctcata

SEQ ID NO: 74899 - DNA, 25 bp, Saccharomyces pastorianus
gaagtcgcttttcaatattgcgtct

SEQ ID NO: 74900 - DNA, 25 bp, Saccharomyces pastorianus
ggtacgaatcctgtgtccaaaaact

SEQ ID NO: 74901 - DNA, 25 bp, Saccharomyces pastorianus
gtgcctggtgtcattgcggaaagat

SEQ ID NO: 74902 - DNA, 25 bp, Saccharomyces pastorianus
tgaagttcgtcactgtgccttgtct

SEQ ID NO: 74903 - DNA, 25 bp, Saccharomyces pastorianus
catcggttctcattcaggtgtcaag

SEQ ID NO: 74904 - DNA, 25 bp, Saccharomyces pastorianus
aaggctataaagtcatcggttctca

SEQ ID NO: 74905 - DNA, 25 bp, Saccharomyces pastorianus
ttggcatgctcttctaagtgtgttt

SEQ ID NO: 74906 - DNA, 25 bp, Saccharomyces pastorianus
attcgccaaggcgtttgaagttcgt

SEQ ID NO: 74907 - DNA, 25 bp, Saccharomyces pastorianus
gaattaacgccttctttggcatgct

SEQ ID NO: 74908 - DNA, 25 bp, Saccharomyces pastorianus
gccttgtctcttgttggtgaaccta

SEQ ID NO: 74909 - DNA, 25 bp, Saccharomyces pastorianus
agacacctgaatgggctttatttgg

SEQ ID NO: 74910 - DNA, 25 bp, Saccharomyces pastorianus
tgggtttgcaccaggcaacgtaaga

SEQ ID NO: 74911 - DNA, 25 bp, Saccharomyces pastorianus
cgttcagtggttcatccgatgggaa

SEQ ID NO: 74912 - DNA, 25 bp, Saccharomyces pastorianus
cgcggatccccatgttttattgaag

SEQ ID NO: 74913 - DNA, 25 bp, Saccharomyces pastorianus
tatattacgacattgctgccgagca

SEQ ID NO: 74914 - DNA, 25 bp, Saccharomyces pastorianus
gtgacgtcagtgcatatgctgactt

SEQ ID NO: 74915 - DNA, 25 bp, Saccharomyces pastorianus
aaggcatttacagcggagttacaga

SEQ ID NO: 74916 - DNA, 25 bp, Saccharomyces pastorianus
gagcatgcacactccaactgtttac

SEQ ID NO: 74917 - DNA, 25 bp, Saccharomyces pastorianus
aaggagctacgttcagtggttcatc

SEQ ID NO: 74918 - DNA, 25 bp, Saccharomyces pastorianus
atgctgacttggttcaacgcggatc

SEQ ID NO: 74919 - DNA, 25 bp, Saccharomyces pastorianus
aactgtttactgattgctgatacta

SEQ ID NO: 74920 - DNA, 25 bp, Saccharomyces pastorianus
gagagatatcgccttccggcgtcag

SEQ ID NO: 74921 - DNA, 25 bp, Saccharomyces pastorianus
ttccggcgtcagctacttagttcat

SEQ ID NO: 74922 - DNA, 25 bp, Saccharomyces pastorianus
atacatcgagagatatcgccttccg

SEQ ID NO: 74923 - DNA, 25 bp, Saccharomyces pastorianus
gcgtcagctacttagttcatggact

SEQ ID NO: 74924 - DNA, 25 bp, Saccharomyces pastorianus
cgtcagctacttagttcatggactt

SEQ ID NO: 74925 - DNA, 25 bp, Saccharomyces pastorianus
agatatcgccttccggcgtcagcta

SEQ ID NO: 74926 - DNA, 25 bp, Saccharomyces pastorianus
cggcgtcagctacttagttcatgga

SEQ ID NO: 74927 - DNA, 25 bp, Saccharomyces pastorianus
gccttccggcgtcagctacttagtt

SEQ ID NO: 74928 - DNA, 25 bp, Saccharomyces pastorianus
acatcgagagatatcgccttccggc

SEQ ID NO: 74929 - DNA, 25 bp, Saccharomyces pastorianus
atcgagagatatcgccttccggcgt

SEQ ID NO: 74930 - DNA, 25 bp, Saccharomyces pastorianus
tccggcgtcagctacttagttcatg

SEQ ID NO: 74931 - DNA, 25 bp, Saccharomyces pastorianus
gaaggaagtttctcccaatccccat

SEQ ID NO: 74932 - DNA, 25 bp, Saccharomyces pastorianus
gaaacatctaccacatctactaaga

SEQ ID NO: 74933 - DNA, 25 bp, Saccharomyces pastorianus
aatccccatggcaatgaaacatcta

SEQ ID NO: 74934 - DNA, 25 bp, Saccharomyces pastorianus
gtcttatccgaccaacctgttgttg

SEQ ID NO: 74935 - DNA, 25 bp, Saccharomyces pastorianus
gacttttccaatttcggaacatcga

SEQ ID NO: 74936 - DNA, 25 bp, Saccharomyces pastorianus
actaagccggagactatcagattaa

SEQ ID NO: 74937 - DNA, 25 bp, Saccharomyces pastorianus
aaccgttcggaaggcaaactcaatg

SEQ ID NO: 74938 - DNA, 25 bp, Saccharomyces pastorianus
gaaaagagtccaggtcttatccgac

SEQ ID NO: 74939 - DNA, 25 bp, Saccharomyces pastorianus
gacttgaaatccttgagcctgttta

SEQ ID NO: 74940 - DNA, 25 bp, Saccharomyces pastorianus
aacctgttgttgaaatcacctcgaa

SEQ ID NO: 74941 - DNA, 25 bp, Saccharomyces pastorianus
gagcgcatgacaaatccttattacc

SEQ ID NO: 74942 - DNA, 25 bp, Saccharomyces pastorianus
gttaccgacctgaccctggatgaag

SEQ ID NO: 74943 - DNA, 25 bp, Saccharomyces pastorianus
taagcggttggcctttgtccatctg

SEQ ID NO: 74944 - DNA, 25 bp, Saccharomyces pastorianus
atctggtcgagcctcgtgttaccga

SEQ ID NO: 74945 - DNA, 25 bp, Saccharomyces pastorianus
gttgcacccagatgccgtcaaagaa

SEQ ID NO: 74946 - DNA, 25 bp, Saccharomyces pastorianus
atcgcttacggcagattcttcattg

SEQ ID NO: 74947 - DNA, 25 bp, Saccharomyces pastorianus
actccatttggaaaggccctattgt

SEQ ID NO: 74948 - DNA, 25 bp, Saccharomyces pastorianus
gacagaacgttgatcgcttacggca

SEQ ID NO: 74949 - DNA, 25 bp, Saccharomyces pastorianus
acgatttcgcttactccatttggaa

SEQ ID NO: 74950 - DNA, 25 bp, Saccharomyces pastorianus
taaagccggtaactttgcgttgcac

SEQ ID NO: 74951 - DNA, 25 bp, Saccharomyces pastorianus
tgctcaatacgcttatgtcttgggc

SEQ ID NO: 74952 - DNA, 25 bp, Saccharomyces pastorianus
gaaggtagcaacgatttcgcttact

SEQ ID NO: 74953 - DNA, 25 bp, Saccharomyces pastorianus
taagaatgccgttttcttggccggc

SEQ ID NO: 74954 - DNA, 25 bp, Saccharomyces pastorianus
tagagacgggctgcgctacgattct

SEQ ID NO: 74955 - DNA, 25 bp, Saccharomyces pastorianus
atctggtctgacgagcaggttgctc

SEQ ID NO: 74956 - DNA, 25 bp, Saccharomyces pastorianus
gtggaagaacatcctcttggccatc

SEQ ID NO: 74957 - DNA, 25 bp, Saccharomyces pastorianus
agtactaccgtcagcgtgcgcagag

SEQ ID NO: 74958 - DNA, 25 bp, Saccharomyces pastorianus
aaagtcctttgcctgggtgcaactg

SEQ ID NO: 74959 - DNA, 25 bp, Saccharomyces pastorianus
aaggagtacgtacacgccgctaaga

SEQ ID NO: 74960 - DNA, 25 bp, Saccharomyces pastorianus
gagtacggcgggtccattgaaaaca

SEQ ID NO: 74961 - DNA, 25 bp, Saccharomyces pastorianus
atggctacttgctgaaccagttctt

SEQ ID NO: 74962 - DNA, 25 bp, Saccharomyces pastorianus
ggttggcttgaggtttgtctcccta

SEQ ID NO: 74963 - DNA, 25 bp, Saccharomyces pastorianus
ggcaccatgatcatcaccgagggta

SEQ ID NO: 74964 - DNA, 25 bp, Saccharomyces pastorianus
agaatggtcctgttgcaacacgctc

SEQ ID NO: 74965 - DNA, 25 bp, Saccharomyces pastorianus
gtcaacaagctttctcagtgtcaaa

SEQ ID NO: 74966 - DNA, 25 bp, Saccharomyces pastorianus
gatttacttcacagtctactctcag

SEQ ID NO: 74967 - DNA, 25 bp, Saccharomyces pastorianus
gtacgcaagttgcatcccaacagtg

SEQ ID NO: 74968 - DNA, 25 bp, Saccharomyces pastorianus
aatcgctacctgaagtgctggcatc

SEQ ID NO: 74969 - DNA, 25 bp, Saccharomyces pastorianus
ggcacactagaaacgtctcttttga

SEQ ID NO: 74970 - DNA, 25 bp, Saccharomyces pastorianus
aagacctcaagaagcttcccatgaa

SEQ ID NO: 74971 - DNA, 25 bp, Saccharomyces pastorianus
taggaccttcgtcacacaagatttg

SEQ ID NO: 74972 - DNA, 25 bp, Saccharomyces pastorianus
gtgcagatctgctattatgttcgga

SEQ ID NO: 74973 - DNA, 25 bp, Saccharomyces pastorianus
gtcaaaatccattccaatgcgctca

SEQ ID NO: 74974 - DNA, 25 bp, Saccharomyces pastorianus
gatcgtaccgaagctgacttattca

SEQ ID NO: 74975 - DNA, 25 bp, Saccharomyces pastorianus
atatggacgaagacctcgcacgcgg

SEQ ID NO: 74976 - DNA, 25 bp, Saccharomyces pastorianus
gaagacggcctcgacggctttgtat

SEQ ID NO: 74977 - DNA, 25 bp, Saccharomyces pastorianus
ttacccttgtacagccagtccacgg

SEQ ID NO: 74978 - DNA, 25 bp, Saccharomyces pastorianus
gccaaactggtacggccactactgc

SEQ ID NO: 74979 - DNA, 25 bp, Saccharomyces pastorianus
gtcaagttcgacttctcgttatttg

SEQ ID NO: 74980 - DNA, 25 bp, Saccharomyces pastorianus
ttccatcgccgtcagtcaagttcga

SEQ ID NO: 74981 - DNA, 25 bp, Saccharomyces pastorianus
accacctttggtgcagaggcagatg

SEQ ID NO: 74982 - DNA, 25 bp, Saccharomyces pastorianus
tcgcacgcggcttgctgttgctgtt

SEQ ID NO: 74983 - DNA, 25 bp, Saccharomyces pastorianus
gaaagggccgcattcgatatggacg

SEQ ID NO: 74984 - DNA, 25 bp, Saccharomyces pastorianus
gcaagttctcagtgcctgatccaaa

SEQ ID NO: 74985 - DNA, 25 bp, Saccharomyces pastorianus
ttgctgttgttgctactgtccacca

SEQ ID NO: 74986 - DNA, 25 bp, Saccharomyces pastorianus
gatggcagactcaaagaaacaaaca

SEQ ID NO: 74987 - DNA, 25 bp, Saccharomyces pastorianus
cacgccgatggcagactcaaagaaa

SEQ ID NO: 74988 - DNA, 25 bp, Saccharomyces pastorianus
aagaaaaggaacacgccgatggcag

SEQ ID NO: 74989 - DNA, 25 bp, Saccharomyces pastorianus
ttccttcctatctttttcatcctct

SEQ ID NO: 74990 - DNA, 25 bp, Saccharomyces pastorianus
ggaacacgccgatggcagactcaaa

SEQ ID NO: 74991 - DNA, 25 bp, Saccharomyces pastorianus
gccgatggcagactcaaagaaacaa

SEQ ID NO: 74992 - DNA, 25 bp, Saccharomyces pastorianus
tcttcccttattacagcgaaaagaa

SEQ ID NO: 74993 - DNA, 25 bp, Saccharomyces pastorianus
ttcctcttcttcccttgcgtttcta

SEQ ID NO: 74994 - DNA, 25 bp, Saccharomyces pastorianus
aaggaacacgccgatggcagactca

SEQ ID NO: 74995 - DNA, 25 bp, Saccharomyces pastorianus
cctcttcccttattacagcgaaaag

SEQ ID NO: 74996 - DNA, 25 bp, Saccharomyces pastorianus
ttttccttcctatctttttcatcct

SEQ ID NO: 74997 - DNA, 25 bp, Saccharomyces pastorianus
cctgtcgcttttcaacgggttggag

SEQ ID NO: 74998 - DNA, 25 bp, Saccharomyces pastorianus
ttctacgcgcctgcacaagataaag

SEQ ID NO: 74999 - DNA, 25 bp, Saccharomyces pastorianus
gctccgggcccctgaggaaatacaa

SEQ ID NO: 75000 - DNA, 25 bp, Saccharomyces pastorianus
gtggtcttcaccaatgtcatggatt

SEQ ID NO: 75001 - DNA, 25 bp, Saccharomyces pastorianus
aaaagtgctcgcctttactctctag

SEQ ID NO: 75002 - DNA, 25 bp, Saccharomyces pastorianus
gaatacgccgtttgatgtggtgaaa

SEQ ID NO: 75003 - DNA, 25 bp, Saccharomyces pastorianus
gtggcactgtcggatgtctattgaa

SEQ ID NO: 75004 - DNA, 25 bp, Saccharomyces pastorianus
aaaagtaatggtctgtccggcctca

SEQ ID NO: 75005 - DNA, 25 bp, Saccharomyces pastorianus
gtccgaaagatcttgccggcggcta

SEQ ID NO: 75006 - DNA, 25 bp, Saccharomyces pastorianus
acgacatgattgctggtgccatcgg

SEQ ID NO: 75007 - DNA, 25 bp, Saccharomyces pastorianus
atcctcgtctactacgtctacatta

SEQ ID NO: 75008 - DNA, 25 bp, Saccharomyces pastorianus
atggcgatcaaatgcaaggcttttt

SEQ ID NO: 75009 - DNA, 25 bp, Saccharomyces pastorianus
ggaacaaatcgaatctgcgctaagt

SEQ ID NO: 75010 - DNA, 25 bp, Saccharomyces pastorianus
ggtatgtaccaccttttaggagaag

SEQ ID NO: 75011 - DNA, 25 bp, Saccharomyces pastorianus
aactggacacgttcgctattttgaa

SEQ ID NO: 75012 - DNA, 25 bp, Saccharomyces pastorianus
aaatgtttgtacctatggattcgct

SEQ ID NO: 75013 - DNA, 25 bp, Saccharomyces pastorianus
gaaagctacagaggcgtcattcgtt

SEQ ID NO: 75014 - DNA, 25 bp, Saccharomyces pastorianus
tgataaaacttactccctggaacaa

SEQ ID NO: 75015 - DNA, 25 bp, Saccharomyces pastorianus
acatggtacgtgcatcagcacaata

SEQ ID NO: 75016 - DNA, 25 bp, Saccharomyces pastorianus
aacgatatcgttcctagcgttgata

SEQ ID NO: 75017 - DNA, 25 bp, Saccharomyces pastorianus
gaggcgtcattcgtttatccaatat

SEQ ID NO: 75018 - DNA, 25 bp, Saccharomyces pastorianus
tatggattcgcttgccattcgaaca

SEQ ID NO: 75019 - DNA, 25 bp, Saccharomyces pastorianus
gaagggctttttggacagacacaac

SEQ ID NO: 75020 - DNA, 25 bp, Saccharomyces pastorianus
agacacaacacctctgttcgattta

SEQ ID NO: 75021 - DNA, 25 bp, Saccharomyces pastorianus
tgttcgatttatgacaacccctcgt

SEQ ID NO: 75022 - DNA, 25 bp, Saccharomyces pastorianus
ggccaacatgtttctaattaagtat

SEQ ID NO: 75023 - DNA, 25 bp, Saccharomyces pastorianus
actatagactttgacgcactggcca

SEQ ID NO: 75024 - DNA, 25 bp, Saccharomyces pastorianus
gacgcactggccaacatgtttctaa

SEQ ID NO: 75025 - DNA, 25 bp, Saccharomyces pastorianus
tttagttcgttcaaaccagttggca

SEQ ID NO: 75026 - DNA, 25 bp, Saccharomyces pastorianus
atggacgtgctacctgacggaaata

SEQ ID NO: 75027 - DNA, 25 bp, Saccharomyces pastorianus
gatttatgacaacccctcgtggcac

SEQ ID NO: 75028 - DNA, 25 bp, Saccharomyces pastorianus
tacctgacggaaatactatagactt

SEQ ID NO: 75029 - DNA, 25 bp, Saccharomyces pastorianus
caaaccagttggcagaagggctttt

SEQ ID NO: 75030 - DNA, 25 bp, Saccharomyces pastorianus
atctatgggcattcaagggcccaat

SEQ ID NO: 75031 - DNA, 25 bp, Saccharomyces pastorianus
gtgaacaagcgtttgatcagccgta

SEQ ID NO: 75032 - DNA, 25 bp, Saccharomyces pastorianus
aatgtggatctgttgaggtctatga

SEQ ID NO: 75033 - DNA, 25 bp, Saccharomyces pastorianus
ggtgtaacttattcactttgattct

SEQ ID NO: 75034 - DNA, 25 bp, Saccharomyces pastorianus
gatgggtccatgttgattcttgtga

SEQ ID NO: 75035 - DNA, 25 bp, Saccharomyces pastorianus
attttgcaaaacgagctgcccagag

SEQ ID NO: 75036 - DNA, 25 bp, Saccharomyces pastorianus
aatgtcacgaggttcccacgctata

SEQ ID NO: 75037 - DNA, 25 bp, Saccharomyces pastorianus
gatcagccgtatatctactcggtta

SEQ ID NO: 75038 - DNA, 25 bp, Saccharomyces pastorianus
gatggtgttgttgacgtcagtaaaa

SEQ ID NO: 75039 - DNA, 25 bp, Saccharomyces pastorianus
gaatgtaaccagtgtcgcaatgtca

SEQ ID NO: 75040 - DNA, 25 bp, Saccharomyces pastorianus
gatccaatcaagctgttacaaacca

SEQ ID NO: 75041 - DNA, 25 bp, Saccharomyces pastorianus
agatttggctgtcttggctttggtc

SEQ ID NO: 75042 - DNA, 25 bp, Saccharomyces pastorianus
gaaagtccgtcagaggtgccattgt

SEQ ID NO: 75043 - DNA, 25 bp, Saccharomyces pastorianus
aaagtccgtcagaggtgccattgtt

SEQ ID NO: 75044 - DNA, 25 bp, Saccharomyces pastorianus
tgaacaagaattggaaggtctaact

SEQ ID NO: 75045 - DNA, 25 bp, Saccharomyces pastorianus
ccagatttggctgtcttggctttgg

SEQ ID NO: 75046 - DNA, 25 bp, Saccharomyces pastorianus
aagagaaagtccgtcagaggtgcca

SEQ ID NO: 75047 - DNA, 25 bp, Saccharomyces pastorianus
aagaattggaaggtctaactgacac

SEQ ID NO: 75048 - DNA, 25 bp, Saccharomyces pastorianus
atttggctgtcttggctttggtcat

SEQ ID NO: 75049 - DNA, 25 bp, Saccharomyces pastorianus
agtccgtcagaggtgccattgttgg

SEQ ID NO: 75050 - DNA, 25 bp, Saccharomyces pastorianus
aagtccgtcagaggtgccattgttg

SEQ ID NO: 75051 - DNA, 25 bp, Saccharomyces pastorianus
gagaaagtccgtcagaggtgccatt

SEQ ID NO: 75052 - DNA, 25 bp, Saccharomyces pastorianus
ggcagcccacacattgtttattatc

SEQ ID NO: 75053 - DNA, 25 bp, Saccharomyces pastorianus
ggtaatggcaaattttctgttcctt

SEQ ID NO: 75054 - DNA, 25 bp, Saccharomyces pastorianus
aaagggttccatcgattttgccaca

SEQ ID NO: 75055 - DNA, 25 bp, Saccharomyces pastorianus
atcgttgctgctgtgctgatcaata

SEQ ID NO: 75056 - DNA, 25 bp, Saccharomyces pastorianus
ccacctgtcgttcttgaatttttga

SEQ ID NO: 75057 - DNA, 25 bp, Saccharomyces pastorianus
aaaaggaatgactctggcagcccac

SEQ ID NO: 75058 - DNA, 25 bp, Saccharomyces pastorianus
gaagaagcgacatctataccacctg

SEQ ID NO: 75059 - DNA, 25 bp, Saccharomyces pastorianus
gaaatcacgacgaggctcttcgttt

SEQ ID NO: 75060 - DNA, 25 bp, Saccharomyces pastorianus
aatgtaccactttcagagcaaccag

SEQ ID NO: 75061 - DNA, 25 bp, Saccharomyces pastorianus
ggcagattcagacgtagtattccat

SEQ ID NO: 75062 - DNA, 25 bp, Saccharomyces pastorianus
gctcttcgtttagccttgagcaaga

SEQ ID NO: 75063 - DNA, 25 bp, Saccharomyces pastorianus
ttgctaaaccaatcgctgcgtcgag

SEQ ID NO: 75064 - DNA, 25 bp, Saccharomyces pastorianus
tattcgacttcttgatgccagggtt

SEQ ID NO: 75065 - DNA, 25 bp, Saccharomyces pastorianus
ctggtgtactagctttagaggcatt

SEQ ID NO: 75066 - DNA, 25 bp, Saccharomyces pastorianus
ataatctgtcctccatcgttgactg

SEQ ID NO: 75067 - DNA, 25 bp, Saccharomyces pastorianus
gatgtcgctagaaatgacctcgcag

SEQ ID NO: 75068 - DNA, 25 bp, Saccharomyces pastorianus
gaattcgaccaatatgctccgtttt

SEQ ID NO: 75069 - DNA, 25 bp, Saccharomyces pastorianus
gagaccacagttgaaagatgccgac

SEQ ID NO: 75070 - DNA, 25 bp, Saccharomyces pastorianus
gcggtccaactgtcagatcaacttt

SEQ ID NO: 75071 - DNA, 25 bp, Saccharomyces pastorianus
tgattttaaccggtactcctattca

SEQ ID NO: 75072 - DNA, 25 bp, Saccharomyces pastorianus
gctccgtttttgaaggttgtcattt

SEQ ID NO: 75073 - DNA, 25 bp, Saccharomyces pastorianus
ttgtcatttatgctggcggtccaac

SEQ ID NO: 75074 - DNA, 25 bp, Saccharomyces pastorianus
gtctgcacgaactacccaggacaat

SEQ ID NO: 75075 - DNA, 25 bp, Saccharomyces pastorianus
gttgtacgaccagtttccacaaggt

SEQ ID NO: 75076 - DNA, 25 bp, Saccharomyces pastorianus
gcaagccgatattccaagatctgtg

SEQ ID NO: 75077 - DNA, 25 bp, Saccharomyces pastorianus
ggacctgcaacgagaagcttgttca

SEQ ID NO: 75078 - DNA, 25 bp, Saccharomyces pastorianus
tttacaaccgttcaagtgccaatac

SEQ ID NO: 75079 - DNA, 25 bp, Saccharomyces pastorianus
aatatggcggtaacagtctgcacga

SEQ ID NO: 75080 - DNA, 25 bp, Saccharomyces pastorianus
tagcgtagatatacccctgcaaact

SEQ ID NO: 75081 - DNA, 25 bp, Saccharomyces pastorianus
attgctagccgcgagttggaacaaa

SEQ ID NO: 75082 - DNA, 25 bp, Saccharomyces pastorianus
gtgaatccctataccagaagccgag

SEQ ID NO: 75083 - DNA, 25 bp, Saccharomyces pastorianus
gaagtacgacctatagttgacagac

SEQ ID NO: 75084 - DNA, 25 bp, Saccharomyces pastorianus
agaagccgagggtttcggccatctt

SEQ ID NO: 75085 - DNA, 25 bp, Saccharomyces pastorianus
accagatcgaaacggcgctcgcctc

SEQ ID NO: 75086 - DNA, 25 bp, Saccharomyces pastorianus
gctcgcctcatctccatgggaaaaa

SEQ ID NO: 75087 - DNA, 25 bp, Saccharomyces pastorianus
tccatgggaaaaaagctggcagcaa

SEQ ID NO: 75088 - DNA, 25 bp, Saccharomyces pastorianus
ctcgcctcatctccatgggaaaaaa

SEQ ID NO: 75089 - DNA, 25 bp, Saccharomyces pastorianus
cgcgccgcggagctgtgagaagata

SEQ ID NO: 75090 - DNA, 25 bp, Saccharomyces pastorianus
catctccatgggaaaaaagctggca

SEQ ID NO: 75091 - DNA, 25 bp, Saccharomyces pastorianus
aagctggcagcaaagagaagaacga

SEQ ID NO: 75092 - DNA, 25 bp, Saccharomyces pastorianus
gcctcatctccatgggaaaaaagct

SEQ ID NO: 75093 - DNA, 25 bp, Saccharomyces pastorianus
aaaagagggtggccgcgccgcggag

SEQ ID NO: 75094 - DNA, 25 bp, Saccharomyces pastorianus
tcgcctcatctccatgggaaaaaag

SEQ ID NO: 75095 - DNA, 25 bp, Saccharomyces pastorianus
gaagaacgagctcaaatcaaaagcc

SEQ ID NO: 75096 - DNA, 25 bp, Saccharomyces pastorianus
ggtagacggaagtttaactggccag

SEQ ID NO: 75097 - DNA, 25 bp, Saccharomyces pastorianus
tgaagaaccccaagaaagtcacgga

SEQ ID NO: 75098 - DNA, 25 bp, Saccharomyces pastorianus
gtttaactggccaggaggcagagtt

SEQ ID NO: 75099 - DNA, 25 bp, Saccharomyces pastorianus
cagagcgtttgagaacagcaggcga

SEQ ID NO: 75100 - DNA, 25 bp, Saccharomyces pastorianus
gacacgaagagtggcagcagctgca

SEQ ID NO: 75101 - DNA, 25 bp, Saccharomyces pastorianus
gcagctgcagcattaggagtccggt

SEQ ID NO: 75102 - DNA, 25 bp, Saccharomyces pastorianus
gcaggcgagagtacgtctgtagcta

SEQ ID NO: 75103 - DNA, 25 bp, Saccharomyces pastorianus
tctgtagctagagcgtcgtacccga

SEQ ID NO: 75104 - DNA, 25 bp, Saccharomyces pastorianus
agaggaagttccagccgttgaagaa

SEQ ID NO: 75105 - DNA, 25 bp, Saccharomyces pastorianus
ggctgtgtcagagcgtttgagaaca

SEQ ID NO: 75106 - DNA, 25 bp, Saccharomyces pastorianus
gtcgtacccgactggagatgtggaa

SEQ ID NO: 75107 - DNA, 25 bp, Saccharomyces pastorianus
agttccaggcagtccatacaggtga

SEQ ID NO: 75108 - DNA, 25 bp, Saccharomyces pastorianus
tccagtgtgggctcgagtgcaaatg

SEQ ID NO: 75109 - DNA, 25 bp, Saccharomyces pastorianus
aacgcacagatttgggccctgcaga

SEQ ID NO: 75110 - DNA, 25 bp, Saccharomyces pastorianus
ggtgccaccggctacagaaataaaa

SEQ ID NO: 75111 - DNA, 25 bp, Saccharomyces pastorianus
aagcccatgatgacgccctacggtt

SEQ ID NO: 75112 - DNA, 25 bp, Saccharomyces pastorianus
gagtggcacagcttccgccgggaaa

SEQ ID NO: 75113 - DNA, 25 bp, Saccharomyces pastorianus
taacactggcgccaactacgggaag

SEQ ID NO: 75114 - DNA, 25 bp, Saccharomyces pastorianus
gtgaacgacttttcggactcgccat

SEQ ID NO: 75115 - DNA, 25 bp, Saccharomyces pastorianus
gaaccgctacataatgtctccgtat

SEQ ID NO: 75116 - DNA, 25 bp, Saccharomyces pastorianus
gtatgatgaccgcaatgaaccctta

SEQ ID NO: 75117 - DNA, 25 bp, Saccharomyces pastorianus
gaaggctcaggcaactccagtgtgg

SEQ ID NO: 75118 - DNA, 25 bp, Saccharomyces pastorianus
atagtagcttcaacaacagtaccgt

SEQ ID NO: 75119 - DNA, 25 bp, Saccharomyces pastorianus
ttttcaatttggtgggatcacggca

SEQ ID NO: 75120 - DNA, 25 bp, Saccharomyces pastorianus
agcttcaacaacagtaccgtatcta

SEQ ID NO: 75121 - DNA, 25 bp, Saccharomyces pastorianus
aacttaggcttaccctttagcatag

SEQ ID NO: 75122 - DNA, 25 bp, Saccharomyces pastorianus
gcagctccatggcatattcctaatg

SEQ ID NO: 75123 - DNA, 25 bp, Saccharomyces pastorianus
taatgattaacttaggcttaccctt

SEQ ID NO: 75124 - DNA, 25 bp, Saccharomyces pastorianus
cttaccctttagcatagagtcttca

SEQ ID NO: 75125 - DNA, 25 bp, Saccharomyces pastorianus
tgggatcacggcagctccatggcat

SEQ ID NO: 75126 - DNA, 25 bp, Saccharomyces pastorianus
cagtaccgtatctaccaaaaatctt

SEQ ID NO: 75127 - DNA, 25 bp, Saccharomyces pastorianus
gctccatggcatattcctaatgatt

SEQ ID NO: 75128 - DNA, 25 bp, Saccharomyces pastorianus
aatttggtgggatcacggcagctcc

SEQ ID NO: 75129 - DNA, 25 bp, Saccharomyces pastorianus
gggctccattgttcgtcttgaaaac

SEQ ID NO: 75130 - DNA, 25 bp, Saccharomyces pastorianus
tggtggcgacatgccaggctcacaa

SEQ ID NO: 75131 - DNA, 25 bp, Saccharomyces pastorianus
aaactgtcgaggaagaccacccaat

SEQ ID NO: 75132 - DNA, 25 bp, Saccharomyces pastorianus
tacaatgctgaaaggctgggtctag

SEQ ID NO: 75133 - DNA, 25 bp, Saccharomyces pastorianus
gtatccaaaggccaaagatgctctt

SEQ ID NO: 75134 - DNA, 25 bp, Saccharomyces pastorianus
taacgaggctaggaacctgggtttg

SEQ ID NO: 75135 - DNA, 25 bp, Saccharomyces pastorianus
gatgctcttaccaagtacaaggtct

SEQ ID NO: 75136 - DNA, 25 bp, Saccharomyces pastorianus
caggctcacaactggctgattttgt

SEQ ID NO: 75137 - DNA, 25 bp, Saccharomyces pastorianus
taccgctatcgtcgagtctccagaa

SEQ ID NO: 75138 - DNA, 25 bp, Saccharomyces pastorianus
ctgtctctaagaaggttaccgctat

SEQ ID NO: 75139 - DNA, 25 bp, Saccharomyces pastorianus
tgacgccgttggtatcgccaaggaa

SEQ ID NO: 75140 - DNA, 25 bp, Saccharomyces pastorianus
attagcttccctggcacaacaggca

SEQ ID NO: 75141 - DNA, 25 bp, Saccharomyces pastorianus
gaggcaccactgcagagaagactct

SEQ ID NO: 75142 - DNA, 25 bp, Saccharomyces pastorianus
gcatcgtatgactgccctagatccg

SEQ ID NO: 75143 - DNA, 25 bp, Saccharomyces pastorianus
ttcgaggcgatccacctattggaga

SEQ ID NO: 75144 - DNA, 25 bp, Saccharomyces pastorianus
ctataccatgagaggacttccccat

SEQ ID NO: 75145 - DNA, 25 bp, Saccharomyces pastorianus
ggacttccccatttatatcactgga

SEQ ID NO: 75146 - DNA, 25 bp, Saccharomyces pastorianus
tagatccgctgtttatcaccgtcac

SEQ ID NO: 75147 - DNA, 25 bp, Saccharomyces pastorianus
aaaacattttggcacttcgaggcga

SEQ ID NO: 75148 - DNA, 25 bp, Saccharomyces pastorianus
tacgcagtcgatttagtccgctaca

SEQ ID NO: 75149 - DNA, 25 bp, Saccharomyces pastorianus
gtcgccgcctatcctgaaggacatt

SEQ ID NO: 75150 - DNA, 25 bp, Saccharomyces pastorianus
gaagactggctagattcacaatcaa

SEQ ID NO: 75151 - DNA, 25 bp, Saccharomyces pastorianus
tctgcacaaaagaacatgggtttaa

SEQ ID NO: 75152 - DNA, 25 bp, Saccharomyces pastorianus
cacaaaagaacatgggtttaaatct

SEQ ID NO: 75153 - DNA, 25 bp, Saccharomyces pastorianus
aatctgcacaaaagaacatgggttt

SEQ ID NO: 75154 - DNA, 25 bp, Saccharomyces pastorianus
aaatctgcacaaaagaacatgggtt

SEQ ID NO: 75155 - DNA, 25 bp, Saccharomyces pastorianus
gcacaaaagaacatgggtttaaatc

SEQ ID NO: 75156 - DNA, 25 bp, Saccharomyces pastorianus
catgggtttaaatctttaattaatg

SEQ ID NO: 75157 - DNA, 25 bp, Saccharomyces pastorianus
aaaatctgcacaaaagaacatgggt

SEQ ID NO: 75158 - DNA, 25 bp, Saccharomyces pastorianus
tgcacaaaagaacatgggtttaaat

SEQ ID NO: 75159 - DNA, 25 bp, Saccharomyces pastorianus
atctgcacaaaagaacatgggttta

SEQ ID NO: 75160 - DNA, 25 bp, Saccharomyces pastorianus
ctgcacaaaagaacatgggtttaaa

SEQ ID NO: 75161 - DNA, 25 bp, Saccharomyces pastorianus
gaaggacttgcttcgactttttgat

SEQ ID NO: 75162 - DNA, 25 bp, Saccharomyces pastorianus
gatattttcaatcactcaaagcgga

SEQ ID NO: 75163 - DNA, 25 bp, Saccharomyces pastorianus
gtccaaacgaagcaatcccgagcta

SEQ ID NO: 75164 - DNA, 25 bp, Saccharomyces pastorianus
acaaccgtaccaatagatcctttca

SEQ ID NO: 75165 - DNA, 25 bp, Saccharomyces pastorianus
gcacgttctcgctaggtacagtaac

SEQ ID NO: 75166 - DNA, 25 bp, Saccharomyces pastorianus
gagaaaattcgtaggcccactcata

SEQ ID NO: 75167 - DNA, 25 bp, Saccharomyces pastorianus
atagatcctttcaaagaccccaggc

SEQ ID NO: 75168 - DNA, 25 bp, Saccharomyces pastorianus
ttgatggtctatccggcgccaagag

SEQ ID NO: 75169 - DNA, 25 bp, Saccharomyces pastorianus
caaacaccgaactctagtcaatctc

SEQ ID NO: 75170 - DNA, 25 bp, Saccharomyces pastorianus
ggcccactcataccaacaatttgtt

SEQ ID NO: 75171 - DNA, 25 bp, Saccharomyces pastorianus
tggcattcaagatagcacgttctcg

SEQ ID NO: 75172 - DNA, 25 bp, Saccharomyces pastorianus
ttctcgtctcccatcagcggcatga

SEQ ID NO: 75173 - DNA, 25 bp, Saccharomyces pastorianus
agcggcatgatcgtctgctgctcaa

SEQ ID NO: 75174 - DNA, 25 bp, Saccharomyces pastorianus
agtttctctctttcctccgcgctag

SEQ ID NO: 75175 - DNA, 25 bp, Saccharomyces pastorianus
gcgctaggctcatcagggaacctcg

SEQ ID NO: 75176 - DNA, 25 bp, Saccharomyces pastorianus
atcagggaacctcgccagcagcgtg

SEQ ID NO: 75177 - DNA, 25 bp, Saccharomyces pastorianus
aacctcgccagcagcgtgtggaagt

SEQ ID NO: 75178 - DNA, 25 bp, Saccharomyces pastorianus
atgatcgtctgctgctcaatctcct

SEQ ID NO: 75179 - DNA, 25 bp, Saccharomyces pastorianus
ctccgcgctaggctcatcagggaac

SEQ ID NO: 75180 - DNA, 25 bp, Saccharomyces pastorianus
ctcgccagcagcgtgtggaagtact

SEQ ID NO: 75181 - DNA, 25 bp, Saccharomyces pastorianus
tgctgctcaatctccttcagccggg

SEQ ID NO: 75182 - DNA, 25 bp, Saccharomyces pastorianus
aacgtggccagtttctctctttcct

SEQ ID NO: 75183 - DNA, 25 bp, Saccharomyces pastorianus
tattcattcagtggcaacctatagg

SEQ ID NO: 75184 - DNA, 25 bp, Saccharomyces pastorianus
attttgcttgcagtttttcttgtta

SEQ ID NO: 75185 - DNA, 25 bp, Saccharomyces pastorianus
gaaacatcccaagtggtctaagtat

SEQ ID NO: 75186 - DNA, 25 bp, Saccharomyces pastorianus
gagaattaggtgctctcgttgtgat

SEQ ID NO: 75187 - DNA, 25 bp, Saccharomyces pastorianus
agaagagcttggacgggtcccacta

SEQ ID NO: 75188 - DNA, 25 bp, Saccharomyces pastorianus
tacaaccgtcaagatgcacgagaat

SEQ ID NO: 75189 - DNA, 25 bp, Saccharomyces pastorianus
aagaagaacatacaaccgtcaagat

SEQ ID NO: 75190 - DNA, 25 bp, Saccharomyces pastorianus
agcctcatttaatatattcattcag

SEQ ID NO: 75191 - DNA, 25 bp, Saccharomyces pastorianus
ccactatacccatttctctttggtg

SEQ ID NO: 75192 - DNA, 25 bp, Saccharomyces pastorianus
tcttgttatatgtttctttagcctc

SEQ ID NO: 75193 - DNA, 25 bp, Saccharomyces pastorianus
catttctctttggtgccgcactgat

SEQ ID NO: 75194 - DNA, 25 bp, Saccharomyces pastorianus
ccaccactagcgatcagacttacta

SEQ ID NO: 75195 - DNA, 25 bp, Saccharomyces pastorianus
gaacactcaattgtaccagatgcaa

SEQ ID NO: 75196 - DNA, 25 bp, Saccharomyces pastorianus
taccagatgcaatattttttacttt

SEQ ID NO: 75197 - DNA, 25 bp, Saccharomyces pastorianus
acttttgtatttgaacatcctgaga

SEQ ID NO: 75198 - DNA, 25 bp, Saccharomyces pastorianus
gacttactaccaaagcaatgagatg

SEQ ID NO: 75199 - DNA, 25 bp, Saccharomyces pastorianus
aaggatgaagctcctccaccactag

SEQ ID NO: 75200 - DNA, 25 bp, Saccharomyces pastorianus
agagaaggatgaagctcctccacca

SEQ ID NO: 75201 - DNA, 25 bp, Saccharomyces pastorianus
gctaaagtcactatcacagagaagg

SEQ ID NO: 75202 - DNA, 25 bp, Saccharomyces pastorianus
tagcgatcagacttactaccaaagc

SEQ ID NO: 75203 - DNA, 25 bp, Saccharomyces pastorianus
ggtgaaaatgctcgaacactcaatt

SEQ ID NO: 75204 - DNA, 25 bp, Saccharomyces pastorianus
atgctcgaacactcaattgtaccag

SEQ ID NO: 75205 - DNA, 25 bp, Saccharomyces pastorianus
gaaatcccagcgggtacccggcgcg

SEQ ID NO: 75206 - DNA, 25 bp, Saccharomyces pastorianus
atatagtgcacgtgcttttaggccc

SEQ ID NO: 75207 - DNA, 25 bp, Saccharomyces pastorianus
gtgcacgtgcttttaggcccgctgg

SEQ ID NO: 75208 - DNA, 25 bp, Saccharomyces pastorianus
tatagtgcacgtgcttttaggcccg

SEQ ID NO: 75209 - DNA, 25 bp, Saccharomyces pastorianus
agtgcacgtgcttttaggcccgctg

SEQ ID NO: 75210 - DNA, 25 bp, Saccharomyces pastorianus
cacgtgcttttaggcccgctggcag

SEQ ID NO: 75211 - DNA, 25 bp, Saccharomyces pastorianus
tagtgcacgtgcttttaggcccgct

SEQ ID NO: 75212 - DNA, 25 bp, Saccharomyces pastorianus
agagagataatagcggtgggaaaac

SEQ ID NO: 75213 - DNA, 25 bp, Saccharomyces pastorianus
atagtgcacgtgcttttaggcccgc

SEQ ID NO: 75214 - DNA, 25 bp, Saccharomyces pastorianus
tgcacgtgcttttaggcccgctggc

SEQ ID NO: 75215 - DNA, 25 bp, Saccharomyces pastorianus
gatatagtgcacgtgcttttaggcc

SEQ ID NO: 75216 - DNA, 25 bp, Saccharomyces pastorianus
atcattggagtcacactgggcgtta

SEQ ID NO: 75217 - DNA, 25 bp, Saccharomyces pastorianus
gcagcccagctcacaactaaatggt

SEQ ID NO: 75218 - DNA, 25 bp, Saccharomyces pastorianus
ttacatccccggtgtgacaagcgca

SEQ ID NO: 75219 - DNA, 25 bp, Saccharomyces pastorianus
gatcacatatcacgttgggctcatc

SEQ ID NO: 75220 - DNA, 25 bp, Saccharomyces pastorianus
gcagccggcgacattagatcacata

SEQ ID NO: 75221 - DNA, 25 bp, Saccharomyces pastorianus
taatatcctgcccattgcttacatc

SEQ ID NO: 75222 - DNA, 25 bp, Saccharomyces pastorianus
gcgcacaagggcctctaatatcctg

SEQ ID NO: 75223 - DNA, 25 bp, Saccharomyces pastorianus
agttgcagtcaaagctacgttcgag

SEQ ID NO: 75224 - DNA, 25 bp, Saccharomyces pastorianus
attacaccaagttcaatgcgccatt

SEQ ID NO: 75225 - DNA, 25 bp, Saccharomyces pastorianus
atagaagttctacatccactacgcg

SEQ ID NO: 75226 - DNA, 25 bp, Saccharomyces pastorianus
aagcgcactgactgctgagaagttg

SEQ ID NO: 75227 - DNA, 25 bp, Saccharomyces pastorianus
tgattactggtacttctcaagctga

SEQ ID NO: 75228 - DNA, 25 bp, Saccharomyces pastorianus
tggtaagtctaccactaccggtcat

SEQ ID NO: 75229 - DNA, 25 bp, Saccharomyces pastorianus
gtattgacaagagaaccatcgaaaa

SEQ ID NO: 75230 - DNA, 25 bp, Saccharomyces pastorianus
aagttaccgttattgatgctccagg

SEQ ID NO: 75231 - DNA, 25 bp, Saccharomyces pastorianus
accactaccggtcatttgatttaca

SEQ ID NO: 75232 - DNA, 25 bp, Saccharomyces pastorianus
gtcgttatcggtcatgtcgattctg

SEQ ID NO: 75233 - DNA, 25 bp, Saccharomyces pastorianus
cggtcatgtcgattctggtaagtct

SEQ ID NO: 75234 - DNA, 25 bp, Saccharomyces pastorianus
gtgtcggtgaattcgaagccggtat

SEQ ID NO: 75235 - DNA, 25 bp, Saccharomyces pastorianus
gtaagggttctttcaagtacgcttg

SEQ ID NO: 75236 - DNA, 25 bp, Saccharomyces pastorianus
gatgctccaggtcacagagatttca

SEQ ID NO: 75237 - DNA, 25 bp, Saccharomyces pastorianus
gctttgtggaagttcgaaactccaa

SEQ ID NO: 75238 - DNA, 25 bp, Saccharomyces pastorianus
ccagttcgacttaataatgtgtttg

SEQ ID NO: 75239 - DNA, 25 bp, Saccharomyces pastorianus
gtttgaaacagcctggcacacagat

SEQ ID NO: 75240 - DNA, 25 bp, Saccharomyces pastorianus
acagcctggcacacagataggcctt

SEQ ID NO: 75241 - DNA, 25 bp, Saccharomyces pastorianus
gataggccttctttgcgaaaaatgt

SEQ ID NO: 75242 - DNA, 25 bp, Saccharomyces pastorianus
acacagataggccttctttgcgaaa

SEQ ID NO: 75243 - DNA, 25 bp, Saccharomyces pastorianus
cctggcacacagataggccttcttt

SEQ ID NO: 75244 - DNA, 25 bp, Saccharomyces pastorianus
aatgtgtttgaaacagcctggcaca

SEQ ID NO: 75245 - DNA, 25 bp, Saccharomyces pastorianus
ggcacacagataggccttctttgcg

SEQ ID NO: 75246 - DNA, 25 bp, Saccharomyces pastorianus
acagataggccttctttgcgaaaaa

SEQ ID NO: 75247 - DNA, 25 bp, Saccharomyces pastorianus
cgccaccagttcgacttaataatgt

SEQ ID NO: 75248 - DNA, 25 bp, Saccharomyces pastorianus
taggccttctttgcgaaaaatgtga

SEQ ID NO: 75249 - DNA, 25 bp, Saccharomyces pastorianus
tataattgtcaagggcaagggtccc

SEQ ID NO: 75250 - DNA, 25 bp, Saccharomyces pastorianus
gggactgctgacgtcaacttattag

SEQ ID NO: 75251 - DNA, 25 bp, Saccharomyces pastorianus
gtatcaagggacttccagaggaatt

SEQ ID NO: 75252 - DNA, 25 bp, Saccharomyces pastorianus
gatacttctagatacgtaccgcacg

SEQ ID NO: 75253 - DNA, 25 bp, Saccharomyces pastorianus
gagtgtgttcatcccgaagtacgag

SEQ ID NO: 75254 - DNA, 25 bp, Saccharomyces pastorianus
taacggactcctacttaaaacatca

SEQ ID NO: 75255 - DNA, 25 bp, Saccharomyces pastorianus
tacaaacgccaatatcccaggatag

SEQ ID NO: 75256 - DNA, 25 bp, Saccharomyces pastorianus
gaagtacctgttagttttagcgaga

SEQ ID NO: 75257 - DNA, 25 bp, Saccharomyces pastorianus
tgccgcggactgtgtcgaaccagtg

SEQ ID NO: 75258 - DNA, 25 bp, Saccharomyces pastorianus
gatacgtaccgcacgggactgctga

SEQ ID NO: 75259 - DNA, 25 bp, Saccharomyces pastorianus
ttaactttaagcacgcttctgccgc

SEQ ID NO: 75260 - DNA, 25 bp, Saccharomyces pastorianus
acagaagatgactcccatgtacagg

SEQ ID NO: 75261 - DNA, 25 bp, Saccharomyces pastorianus
gacgagtattctgctttcaacaaca

SEQ ID NO: 75262 - DNA, 25 bp, Saccharomyces pastorianus
caggtctctgattttgactggttca

SEQ ID NO: 75263 - DNA, 25 bp, Saccharomyces pastorianus
gaagccaagttcacaagtaacatcg

SEQ ID NO: 75264 - DNA, 25 bp, Saccharomyces pastorianus
caagagataagttggccgcagccgc

SEQ ID NO: 75265 - DNA, 25 bp, Saccharomyces pastorianus
attggcacatgctttggctttgaaa

SEQ ID NO: 75266 - DNA, 25 bp, Saccharomyces pastorianus
gaagcctcgcccaaaatgagcaggt

SEQ ID NO: 75267 - DNA, 25 bp, Saccharomyces pastorianus
aataagcacaccaacatcgatgaag

SEQ ID NO: 75268 - DNA, 25 bp, Saccharomyces pastorianus
tggagaacgccaacgcaaccatggg

SEQ ID NO: 75269 - DNA, 25 bp, Saccharomyces pastorianus
gactggttcaaacaacgtcgtatca

SEQ ID NO: 75270 - DNA, 25 bp, Saccharomyces pastorianus
gggaactctttattggcacatgctt

SEQ ID NO: 75271 - DNA, 25 bp, Saccharomyces pastorianus
caacatcttctttcaatctcgatgc

SEQ ID NO: 75272 - DNA, 25 bp, Saccharomyces pastorianus
aaagactcgtccttgttgttcagca

SEQ ID NO: 75273 - DNA, 25 bp, Saccharomyces pastorianus
tttcaatctcgatgcaatgatatcc

SEQ ID NO: 75274 - DNA, 25 bp, Saccharomyces pastorianus
atgcaggtaggatttttttctccta

SEQ ID NO: 75275 - DNA, 25 bp, Saccharomyces pastorianus
tctggtaaaggttttctttgcttcg

SEQ ID NO: 75276 - DNA, 25 bp, Saccharomyces pastorianus
agaagtttatcagcaaaatgtctaa

SEQ ID NO: 75277 - DNA, 25 bp, Saccharomyces pastorianus
gactcgtccttgttgttcagcaaca

SEQ ID NO: 75278 - DNA, 25 bp, Saccharomyces pastorianus
aatgtctaaagactcgtccttgttg

SEQ ID NO: 75279 - DNA, 25 bp, Saccharomyces pastorianus
gtccttgttgttcagcaacatcttc

SEQ ID NO: 75280 - DNA, 25 bp, Saccharomyces pastorianus
atcttctttcaatctcgatgcaatg

SEQ ID NO: 75281 - DNA, 25 bp, Saccharomyces pastorianus
tctcctactctggtaaaggttttct

SEQ ID NO: 75282 - DNA, 25 bp, Saccharomyces pastorianus
gaattcattgatccttcactggcca

SEQ ID NO: 75283 - DNA, 25 bp, Saccharomyces pastorianus
gaattctttgatttcatcctagcag

SEQ ID NO: 75284 - DNA, 25 bp, Saccharomyces pastorianus
gaatgtgctgctcggtctaatattg

SEQ ID NO: 75285 - DNA, 25 bp, Saccharomyces pastorianus
actgtaaatttcatgttcgccgagg

SEQ ID NO: 75286 - DNA, 25 bp, Saccharomyces pastorianus
aatgacccttgcgatggccaaagat

SEQ ID NO: 75287 - DNA, 25 bp, Saccharomyces pastorianus
gatatcaagctttacggccacgaag

SEQ ID NO: 75288 - DNA, 25 bp, Saccharomyces pastorianus
gttgttgcgctaccattgattctaa

SEQ ID NO: 75289 - DNA, 25 bp, Saccharomyces pastorianus
aagtcgccggactagaccaattgag

SEQ ID NO: 75290 - DNA, 25 bp, Saccharomyces pastorianus
aacacagtcaggaagcccagttcga

SEQ ID NO: 75291 - DNA, 25 bp, Saccharomyces pastorianus
gttcgatggcgacagcgtgttcaat

SEQ ID NO: 75292 - DNA, 25 bp, Saccharomyces pastorianus
ttggaagccctgtcagcagtgctgt

SEQ ID NO: 75293 - DNA, 25 bp, Saccharomyces pastorianus
gagaagtcagcagaaccatcgtcat

SEQ ID NO: 75294 - DNA, 25 bp, Saccharomyces pastorianus
tgatagggtcctttctgtcatatgc

SEQ ID NO: 75295 - DNA, 25 bp, Saccharomyces pastorianus
gtattctagcttttctgtttcagtt

SEQ ID NO: 75296 - DNA, 25 bp, Saccharomyces pastorianus
ttttcggctagcatttcctttttgg

SEQ ID NO: 75297 - DNA, 25 bp, Saccharomyces pastorianus
ctgtcatatgccttcaagtgcgatg

SEQ ID NO: 75298 - DNA, 25 bp, Saccharomyces pastorianus
gtcatgcttacttttcttcgatttc

SEQ ID NO: 75299 - DNA, 25 bp, Saccharomyces pastorianus
gaataatatcccgttttctagcttt

SEQ ID NO: 75300 - DNA, 25 bp, Saccharomyces pastorianus
agcacttttttatttctggccatga

SEQ ID NO: 75301 - DNA, 25 bp, Saccharomyces pastorianus
tgacatttccagattttccttctcc

SEQ ID NO: 75302 - DNA, 25 bp, Saccharomyces pastorianus
gtttcagtttgtttcagcacttttt

SEQ ID NO: 75303 - DNA, 25 bp, Saccharomyces pastorianus
ttcctttttggccttgtattctagc

SEQ ID NO: 75304 - DNA, 25 bp, Saccharomyces pastorianus
tcctatcggcgtttggtgtggtgat

SEQ ID NO: 75305 - DNA, 25 bp, Saccharomyces pastorianus
ctttccgtgattgctcatatgttta

SEQ ID NO: 75306 - DNA, 25 bp, Saccharomyces pastorianus
gattctttccgtgattgctcatatg

SEQ ID NO: 75307 - DNA, 25 bp, Saccharomyces pastorianus
gtggtgattctttccgtgattgctc

SEQ ID NO: 75308 - DNA, 25 bp, Saccharomyces pastorianus
gtgattgctcatatgtttaacacaa

SEQ ID NO: 75309 - DNA, 25 bp, Saccharomyces pastorianus
gctcatatgtttaacacaaaccatg

SEQ ID NO: 75310 - DNA, 25 bp, Saccharomyces pastorianus
cggcgtttggtgtggtgattctttc

SEQ ID NO: 75311 - DNA, 25 bp, Saccharomyces pastorianus
atgaaacctgttgtatccactggca

SEQ ID NO: 75312 - DNA, 25 bp, Saccharomyces pastorianus
ttggtgtggtgattctttccgtgat

SEQ ID NO: 75313 - DNA, 25 bp, Saccharomyces pastorianus
aacctgttgtatccactggcaaggc

SEQ ID NO: 75314 - DNA, 25 bp, Saccharomyces pastorianus
gaaacctgttgtatccactggcaag

SEQ ID NO: 75315 - DNA, 25 bp, Saccharomyces pastorianus
ttatatcctttcttataccctttct

SEQ ID NO: 75316 - DNA, 25 bp, Saccharomyces pastorianus
ctgttttcgttaccttccacgatct

SEQ ID NO: 75317 - DNA, 25 bp, Saccharomyces pastorianus
tgttttcgttaccttccacgatctc

SEQ ID NO: 75318 - DNA, 25 bp, Saccharomyces pastorianus
ttctgttttcgttaccttccacgat

SEQ ID NO: 75319 - DNA, 25 bp, Saccharomyces pastorianus
atatcctttcttataccctttctgt

SEQ ID NO: 75320 - DNA, 25 bp, Saccharomyces pastorianus
tctgttttcgttaccttccacgatc

SEQ ID NO: 75321 - DNA, 25 bp, Saccharomyces pastorianus
tatcctttcttataccctttctgtt

SEQ ID NO: 75322 - DNA, 25 bp, Saccharomyces pastorianus
tatatcctttcttataccctttctg

SEQ ID NO: 75323 - DNA, 25 bp, Saccharomyces pastorianus
tgttatatcctttcttatacccttt

SEQ ID NO: 75324 - DNA, 25 bp, Saccharomyces pastorianus
atgttatatcctttcttataccctt

SEQ ID NO: 75325 - DNA, 25 bp, Saccharomyces pastorianus
gttttcgttaccttccacgatctct

SEQ ID NO: 75326 - DNA, 25 bp, Saccharomyces pastorianus
aactagaagttggaagcagctctaa

SEQ ID NO: 75327 - DNA, 25 bp, Saccharomyces pastorianus
gatgatcatttacaattcttcttga

SEQ ID NO: 75328 - DNA, 25 bp, Saccharomyces pastorianus
gaagaaaaatttagcggctcaaggt

SEQ ID NO: 75329 - DNA, 25 bp, Saccharomyces pastorianus
gaaacttggagacgctgagactatc

SEQ ID NO: 75330 - DNA, 25 bp, Saccharomyces pastorianus
ttatcaatatcaagagtacgtactc

SEQ ID NO: 75331 - DNA, 25 bp, Saccharomyces pastorianus
aatggcgaagagacaagcaagcttg

SEQ ID NO: 75332 - DNA, 25 bp, Saccharomyces pastorianus
gaagcagctctaagttatcccaaat

SEQ ID NO: 75333 - DNA, 25 bp, Saccharomyces pastorianus
gttagtagaacaattgtccaagaca

SEQ ID NO: 75334 - DNA, 25 bp, Saccharomyces pastorianus
gctcaaggtgaaagattcgccaaat

SEQ ID NO: 75335 - DNA, 25 bp, Saccharomyces pastorianus
agactatcaaggaagaactgcggga

SEQ ID NO: 75336 - DNA, 25 bp, Saccharomyces pastorianus
gagtacgtactcagaatggtaatat

SEQ ID NO: 75337 - DNA, 402 bp, Saccharomyces pastorianus
atggcaggtgaagtagtttcggaacacacaccagattcgcaggaagtaacagtaactagcgtagtttgttgcttcgattctgtggtggaaataggacaccatgttgtgtattctgtggtaacgtcgttaatagtagcagtgcttgtagacacaatggctggagaagcagtcttagagcatatgtcagattcacaagaagaaattgtaactactgtggtttgttttgttgtttctgtggtttgctctgttgtccccttggtttgctttgttgtctccgtagtttgctttgttatctctgtggtagaaatagggcaccatgtggtatactctgttgtgacgccgctaacagtaacggtggccgtggaaacaatcgcagaggagatggattcagtacacacatga

SEQ ID NO: 75338 - DNA, 1254 bp, Saccharomyces pastorianus
atgagagccttagagtatttcggtaaaggtaacatcagattcaccaaccatttaaaggagccacgtattgtggcgcccgatgagcttgtgattgatatcgcatggtgtggtatttgcggtacggacctgcatgagtacacagatggtcctatctttttcccagaggatggacacacacatgagattagtcataacccattgccacaggcgatgggccacgaaatggctggtaccgttttggaagtgggccctggtgtgaaaaacttgaaagtgggagacaaggtagttgtcgagcccacaggtacatgcagagaccggtatcgctggcccctgtcgccaaacgttgacaaggaatggtgcgctgcttgcaaaaagggctactataacatttgttcatatttggggctttgtggtgcgggtgtgcagagcggtggatttgcagaaggtgttgtgatgaacgaatctcactgctacaaagtaccggacttcgtgctcttagacgttgcagctttgattcaaccgttggctgtgtgctggcatgcaattagagtctgcgagttcaaagcaggctctacggctttgatcattggtgctggccccatcggactgggcacgatactggcgttgaacgctgcaggttgcaaggacatcgtcgtttcagagcctgccaaggtaagaagagaactggctgaaaaaatgggtgccagggtttacgacccaacagcgcacgctgccaaggagagcattgattatctgaggtcgattgctgatggtggagacggcttcgattacacatttgattgctccgggttggaagtcacattgaatgctgctattcagtgtctcactttcagaggcactgcagtgaacttggccatgtggggccatcacaagatacagttttctccgatggacatcacattgcatgaaagaaagtacacagggtccatgtgctacacacaccacgattttgaggcagtaatagaagctttggaagaaggcaggattgacattgatagagcaagacatatgataacgggcagagtcaacattgaggacggccttgacggcgccatcatgaagctgataaacgagaaggagtctacgatcaagattattctgactccaaacaatcacggagagttgaacagggaagccgataatgagaagaaagaaatttccgagctgagcagtcggaaagatcaagaaagactacgagaatcaataaacgaggctaaactgcgtcacacatga

SEQ ID NO: 75339 - DNA, 1149 bp, Saccharomyces pastorianus
atgagagctttggcatatttcaagaagggtgatattcacttcactaatgatatccctaggccagaaatccaaaccgacgatgaggttattatcgacgtctcttggtgtgggatttgtggctcggatcttcacgagtacttggatggtccaatcttcatgcctaaagatggagagtgccataaattatccaacgctgctttacctctggcaatgggccatgagatgtcacgaattgtttccaaggttggtcctaaagtgacaaaggtgaaggttggcgaccacgtggtcgttgatgctgccagcagttgtgcagacctgcattgctggccacactccaaattttacaattccaagccatgcgatgcttgtcagaggggcagtgaaaatctatgtacccacgccggttttgtggggctaggtgtgatcagtggtggctttgctgaacaagtcgtagtctctcaacatcacattatccccgttccaaaggaaattcctctagatgtggctgctttaattgagcctctttctgtcacctggcatgctgttaagatttctggtttcaaaaaaggcagttcagtcttagttcttggtgcaggccccattgggttgtgtaccattttggtacttaagggaatgggggccagtaaaattgtagtgtctgaagttgcagagagaagaatagaaatggccaagaaactgggcgttgaggtgttcaatccctccaagcacggtcataaatctatagagatactacgtggtttgaccaagagccatgatgggtttgattacagttatgattgttctggtattcaagtcactttcgaaacctctttgaaggcattaacattcagggggacagccaccaacattgcagtttggggtccaaaacctgtgccattccaaccaatggatgtgactctccaagagaaagttatgactggttcgatcggctatgttgtcgaagactttgaagaagttgttcgtgccatccacaacggagacatcgccatggaagattgtaagcaactaatcactggtaagcaaaggattgaggacggttgggaaaagggattccaagagttgatggatcacaaggaatccaacgttaagattctattgacgcctaacaatcacggtgaaatgaagtaa

SEQ ID NO: 75340 - DNA, 423 bp, Saccharomyces pastorianus
atgtacttggcacgagaaatagacttggcaattttaccgtccagacgattggtaaaattcaaggccttcactaaacgatccctgtccatggatgaaatagagttggccagtttgtcttccagagcctttttatttaacttcttgcccctcttacttttattggctttcttagatatctttgcttccagcaatgcctcattcttggctgctgttctaatcaaaatattagtcaaatcggttttttcagctctaggtagttcacttaaatcctttacttctggctcaagagcatccgattgtctagcagctcttgaattctttgatattttcttggccatgctttgctttagacgatatcttaccagtatagtcaaggaaaaaactaccttttgtcatctttgttcccacattcaatacttctaa

SEQ ID NO: 75341 - DNA, 351 bp, Saccharomyces pastorianus
atgttaaccatctataaaagagaagccgttgtggtgcgattattgagaccatgttataaactaacacttgtccactatgtaaatactacacaacaaagaaccgacgtcgtcaagagcacgacggccgcagtaagcacaaatttcagaggttgctctaagatgcgatctataatgcggtcaaatggattaggggattctctttcgttatggaaagttgtttgtagatttcctagtctgctattcatgaatttgcgttctgtggggccatcggagcctctaaacgcacggtctctcatcagccaagtcttattcccaataatttgcgcctctgttacatttttaccaacataa

SEQ ID NO: 75342 - DNA, 543 bp, Saccharomyces pastorianus
atgccaccaccatcaagaagtagaataaacaaaacaagaacattaggaatagtgggtacagctatagcagtgttggtcacatcctactatatatatcaaaaggtgacaagtgcaaaggaagataatggggcacgacctccagagggtgattcagtaaaagaggacaaaaaggcaaggaagagcaaatgtattataatgagcaagtcgatacaaggactgcccataaagtgggaggagtacgccgctgatgaagtggttttgctggtacctacgagccacactgatggatcaatgaaacaagccattgaggatgcctttcgcaagacgaaaaacgaacacaaaatcatatactgcgatagcatggatggattatggtcttgtgtaaaacggctaggtaaatttcagtgcatattaaactccagggacttcacaagtagtggtggtagcgatgcggcagttgttcctgaagatataggcaggtttgtcaaatttgttgttgatagcgatatagaggatgtgctgattgacactttatgcaattaa

SEQ ID NO: 75343 - DNA, 2142 bp, Saccharomyces pastorianus
atgtcgccctctgccgtacaatcatcaaaactagaagaacagtcaagtgaaattgacaagttgaaagcaaaaatgtcccagtctgcctccactgcgcagcagaagaaggaacatgagtatgaacatttgacctcggtcaagatcgtgccacaacggcccatctcagatagactgcagcccgcaattgctacccactattctccacacttggacgggttgcaggactatcagcgcttgcacaaggagtctattgaagaccctgctaagttcttcggttctaaagctacccaatttttaaactggtctaagccattcgataaggtgttcatcccagaccctaaaacgggtaggccctccttccagaacaatgcatggttcctcaacggccaattaaacgcctgttacaactgtgttgacagacatgccttgaagacccctaacaagaaagccattattttcgaaggtgacgagcctggccaaggctattccattacctacaaggaactacttgaagaagtttgtcaagtggcacaagtgctgacttactctatgggcgttcgcaagggcgatactgttgccgtgtacatgcctatggtcccagaagcaatcataaccttgttggccatttcccgtatcggcgccattcactccgtagtctttgccgggttttcttccaactccttgagagatcgtatcaacgatggggactctaaagttgtcatcactacagatgaatccaacagaggtggtaaagtcattgagactaaaagaattgttgatgacgcgctaagagagaccccaggcgtgagacacgtcttggtttatagaaagaccaacaatccatctgttgctttccatgcccccagagatttggattgggcaacagaaaagaagaaatacaagacctactatccatgcacacccgttgattctgaggatccattattcttgttgtatacgtctggttctactggtgcccccaagggtgttcaacattctaccgcaggttacttgctgggagctttgttgaccatgcgctacacttttgacactcaccaagaagacgttttcttcacagctggagacattggctggattacaggccacacttatgtggtttatggtcccttactatatggttgtgccactttggtctttgaagggactcctgcatacccaaattactcccgttattgggatattattgatgaacacaaagtcacccaattttatgttgccccaactgctttgcgtttgttgaaaagagctggtgattcctacatcgaaaatcattccttaaaatctttgcgttgcttgggttcggtcggtgaaccaattgctgctgaagtttgggagtggtactctgaaaaaataggtaaaaatgaaatccccattgtagacacctactggcaaacagaatctggttcgcatctggtcaccccgctggctggtggtgtcacaccaatgaaaccgggttctgcctcattccccttcttcggtattgatgcagttgttcttgaccctaacactggtgaagaacttaataccagccacgcagagggtgtccttgccgtcaaagctgcatggccatcatttgcaagaactatttggaaaaatcatgataggtatctagacacttatttgaacccttaccctggctactatttcactggtgatggtgctgcaaaggataaggatggttatatctggattttgggtcgtgtagacgatgtggtgaacgtctctggtcaccgtctgtctaccgctgaaattgaggctgctattatcgaagatccaattgtggccgagtgtgctgttgtcggattcaacgatgacttgactggtcaagcagttgctgcatttgtggtgttgaaaaacaaatctagttggtccaccgcaacagatgatgaattacaagatatcaagaagcatttggtctttactgttagaaaagacatcgggccatttgccgcaccaaaattgatcattttagtggatgacttgcccaagacaagatctggcaaaattatgagacgtattttaagaaaaatcctagcaggagaaagtgaccaactaggcgacgtttctacattgtcaaaccctggcattgttagacatctaattgattcggtcaagttgtaa

SEQ ID NO: 75344 - DNA, 741 bp, Saccharomyces pastorianus
atggcatctaatcaacctggcaagtgttgctttgaaggagtttgtcacgatggaacacccaagggtcgtcgtgaagaaatcttcggtttagatacttatgcagcaggctctacatctcccaaggaaaaagttatagttatcttgacagatgtgtatggcaataaattcaacaatgttttattaacggccgacaaatttgctagtgctgggtacatggtctttgttcccgatattttattcggcgatgctatctcatcggacaaaccaattgatcgtgatgcctggtttcaaagacattctcctgaagtcaccaagaaaattgttgatggattcatgaagttgttaaaacttgaatatgacccaaagtttattggcgttgtgggttactgttttggtgcaaagtttgccgtccaacacattagtggcgacggaggtcttgccaatgctgcagccattgcacatccatctttcgtcagcatcgaggaaattgaagcaattgatagcaagaaaccaatattgatttcagcagcggaagaggatcacatctttccggcaaacttaagacacttaacggaggaaaaattaaaggataatcacgctacttaccagttagacctcttcagtggtgtggctcacgggtttgccgcaagaggcgatatatccatatctgccgtaaaatatgcgaaggagaaagtcttgctcgaccaaatatactggttcaatcatttttcgaatgtttaa

SEQ ID NO: 75345 - DNA, 1989 bp, Saccharomyces pastorianus
atgaccaaagaaacgattcgggtagttatttgcggtgatgaaggggtgggtaaatccagtctgattgtatcattaacaaaagctgaattcataccgaccatacaggacgtactgccacccatcagtataccaagagatttctcatcatcacctacatattctcctaagaatacagtacttatagacacttcagattcggacctcatagctttagaccatgagttgaagtccgccgacgtaatttggcttgtgtattgcgatcacgaatcgtatgaccatgtctctctcttttggttgcctcatttcaggtctctggggttgaatattcctgtcattctctgcaaaaataaatgtgattccatatcgaatgttaatgccaatgcaatggtcgtgtcagagaacagtgatgatgatatcgataccaaagtggaggatgaagaatttatcccaatattaatggagtttaaagagatcgacacttgcattaagacaagtgccaagacacagtttgatcttaaccaagcgttttatctttgccaaagggccataacacacccaatatcacctttatttgatgccatggtaggtgaattaaagccattggctgtcatggccttaaaaagaatttttcttttaagcgatttaaaccaggactcatatttagatgacaacgaaatcttgggcttacaaaaaaagtgcttcaataagagtatcgatgtaaacgaactgaattttattaaagatttgcttttggatatttccaagcacgatcaagagtacattaaccgcaagctatacgtaccgggaaaaggcatcaccaaagatggtttccttgtactgaacaaaatatacgcagaaagggggagacacgaaactacatgggctatcctaagaactttccattacacagattccttgtgtattaatgacaaaattcttcatccgaagttggtcgtccctgacacttccagtgtggaattgagccccaagggctacagatttcttgtagatatttttttgaagtttgatatcgacaatgatggtggtttgaataatcaagaattacatcgtctatttaagtgcacaccagggctgcctaaactatggacctcaacgaatttccccttctccactgtcgtaaacaacaagggttgcatcaccttacaaggctggctagcacaatggagtatgacgactttcttgaactatagcacaactaccgcttacttggtgtattttggctttcaagaagatgcaagactagccctacaagtaaccaagccaaggaaaatgagacgccgttccgggaaactttacagatccaatatcaatgacagaaaagtgttcaattgctttgtcattggaaagccatgttgcggcaaaagctctttgctagaggccttcttgggcagatctttctcggaggagtattctccgacaatcaaaccaagaattgcagtcaatagtttagaactcaaaggtgggaaacagtactatttgattttgcaagaacttggagaacaagaatacgccatactagagaataaggataagttaaaagaatgtgacgtaatctgtctaacatacgattccagcgacccagaatcattctcctacttagtctcgcttctagacaaattcacccatttacaagatctaccgttggtatttgtagcttctaaggcagatttggataagcagcaacaaaggtgtcaaatccaaccagatgaactggcagacgagctatttgtgaaccacccactgcacatatcatccagatggctaagttccctcaatgaattgttcattaaaatcacagaagctgctcttgatcctggaaaaaacactccaggattgccagaagaaacagcagcaaaagatgtcgactacagacaaacggctctcatttttgggtccactgttggattcgtggcactatgctcttttacgttaatgaaattattcaaatcatccaaattctcaaaataa

SEQ ID NO: 75346 - DNA, 330 bp, Saccharomyces pastorianus
atgaggtccgaatctgaagtgtctataagtactgtattcttaggagaatatgtaggtgatgatgagaaatctcttggtatactgatgggtggcagtacgtcctgtatggtcggtatgaattcagcttttgttaatgatacaatcagactggatttacccaccccttcatcaccgcaaataactacccgaatcgtttctttggtcattgtgttgttcaacacactagtatttagaagtccgctatttttgttttcaatttttatttgtttaatatacaaatttcattcttgttttgagggtaaaccactataccaaatgttgaagatctaa

SEQ ID NO: 75347 - DNA, 1869 bp, Saccharomyces pastorianus
atggtacgtcgatggattcctagtggcaggcatcttcgcaataatgacaacactggtgatgatgacgacagtgagttcacaaactcgatggattctgggatgtccataccatcactcagggactccatgaccacgaggtcatctcataacgatcccatcaagcctgctctgatgaacgattccaacaaagtcaaaaatttggagaaggagttgactaatgccaaaatcaagattcaagtactctatgaatacattcgcagaatccctaataaagacggcaatgcaccatcgctgggcaatgacactgattttagaaattcgattatcgagggtctaaatcttgaaataaacaaattgaaacaggatttaaaggcgaaggaagtcgagtaccaagatacgctacaattcgttcaagagaatttagaaaattcggaaagtatcgtgaatacgatcaatcacctattgtcctttatattgacgcattttaatgagcaagatgaaaatgctcatcttcttgataaagaagagagggagaccctggaggaaactttagagctgagctcggattatgttcttgaaaaaatggatactttgtccaagttcatcatccaattcttgcaggactttttgcattccaaaagtcgagcggaatcaaagcaggacaaggaagaatttctttcactggcccagtcctcaccagcaggatcacagttcgaaagtagggactcaccatcaagtaaagaggagaatgctgatggtggataccagaatgacgaaattcatgacagtaacaaccacattgatacagaaaatgtaatggcaaacagtacttccttaccaatttcagccgccgagtctcgttttgagaaaaccttagacactcaattagagattgtcatagaaaatttgcacaaagaatatgatcaatttataaattccattagattgaaattcgagaaatcgcaaaaattagaaaaaataatagcgtccaaactaagtgagcagtctcatctactagatttcttagaattggaagaaaattctagttccgttatagaaaaacaggatcatttgatttcccaactgaaggaaaagatcgaatcgcaatctgtcttgataaacaatttggaaaaattgaaggaagacatcattaaaatgaaacaaaatgagaaagttttaaccaaagaactggaaactcagaccaaaatcaataaactaaaggaaaataattgggacagctacatcaatgacttggaaaaacaaatcaatgaccttcaaatcgatagatcagaggaattccacgtaatacaaaatcagttagacaaattagacttggagaattaccaattgaaaaatcagttaaatactttggacaaccaaaagttaatactatcccaatatgaaagcaattttatcaaatttaatcagaaccttttactacaccttgacagtattttcaatattctgcagaaaatcttacaagaaagttctattgcccaatttgacaggaaaatgaaatccataaaatctttaccaaatgcgttgaaaaacttgaatttgattcagcccaaactagaatcgctctacacttttatagagaccgcattagagtccataataaactcatatatctcttcactgattgccatggaaaccccagagcagccacatcaacagggcaatgaactaacggcaactccaaataaagaactaaccttacgaatagaggagttacaaagaagatggatatccgaaagagaaagacggaagctcgatgctaacgcttcagaagctcgaatcaaggctttagaacaggaaaatgagtcattgagatcgaaacttttcaacctatcaatcaacaatccctaa

SEQ ID NO: 75348 - DNA, 357 bp, Saccharomyces pastorianus
atgaagctcccacagaccatgctacgttctatatctgtgaagcatgtccggtggccaaggattctgacgggctcaaagctttggtactcaacgcagatggcaatgactccggaggagaagatgatcaccgataaactacaacaggaactggaacctgaagtatgtaaagtgcaagacgtttccggtggctgcggatccatgtttgctatcaacataacaagcaagaagtttaacggactgagtctcatcaagcagcaccagctggtgaacagaattttgagggacgatatttccagatggcatggcctacaattgatcactaagaagtcaactgggaagggtccagcatcatcatga

SEQ ID NO: 75349 - DNA, 309 bp, Saccharomyces pastorianus
atggataccgttcgcctgagccatctcgtcttgcaagagggaataaaccatacgatggcgttgtggaagtttcaggccttcgaactttttactgaccatctcaatccggaaatgtgtctcagcagaggcatttccctgtacaccagcatggcccttatgcttgtgagaatcgttgtagaggccaaacgcaaagttcttgtaatctggaaagccgcattccagtctcttcaggatggtacgtgccacgggaccatctgtgctcattgctctcttgaacattattctctttccactttcgtttgctgctaa

SEQ ID NO: 75350 - DNA, 333 bp, Saccharomyces pastorianus
atgttcaagagagcaatgagcacagatggtcccgtggcacgtaccatcctgaagagactggaatgcggctttccagattacaagaactttgcgtttggcctctacaacgattctcacaagcataagggccatgctggtgtacagggaaatgcctctgctgagacacatttccggattgagatggtcagtaaaaagttcgaaggcctgaaacttccacaacgccatcgtatggtttattccctcttgcaagacgagatggctcaggcgaacggtatccatgctttacaattgtcactaaagaccccacaggagtatgaatccaaagcgaaatag

SEQ ID NO: 75351 - DNA, 534 bp, Saccharomyces pastorianus
atgaagcataccacatcgacaatgttacgcactactagactatggaccacccgcatgcccactgtgagcaaattgtttttgagaaacagctccggcaatgccctaaacaagaataaactaccatttttgtactcatcccaaggacctcaagccgtgaggtacacttcccaacatgagtggatagctgtgcatcaggacaagactgcctttgtcggaattacaaaatacgccactgatgccttaggggacgctacctatgttgagttgccagaagtgggcactgagattgcccaaggtgagtcgctagggtccattgagtccgtcaagtcagcctccgagatctaccagcctgccgatggtaccgtagaggaaattaacactaatcttgaggaaaatccaggtgtggtgaacgaagatcctatgggtgacggctggctagtcaaaatgaagcttggtgagggcgttaatgtggaacaggtcgagggtctaatgtccttagaacagtacgaaaagacactggttcatgatgactga

SEQ ID NO: 75352 - DNA, 2358 bp, Saccharomyces pastorianus
atgtcatctgcagagatggaacaattgttacaggccaagacactggccatgcacaacaatccaacggagatgctgcccaaggtgctcgaaactacggcatccatgtaccacaacggtaatctcagcaagctgaagttgcccttggccaagttttttacacagttagttctagacgtggtgtcgatggactctccaattgcgaatactgagagaccgtttattgctgctcaatatctgccactacttcttgctatggcgcaatccaccgcggacgtactggtgtacaagaatatcgtgcttattatgtgcgcttcatacccgctggtgttggatctggttgctaagacatcaaaccaggaaatgtttgatcagttgtgtatgctgaagaagttcgtgctctcgcactggagaactgcatatcctttgcgtgccaccgttgacgatgaaacggatgtcgaacaatggctggcgcagattgaccaaaatatcggcgtgaaattagcgaccatcaagttcatatctgaggccgtgctgtcgcaaactaaatcacccagcggcaacgagattaattcatctaccatcccggataaccaccctgtgttgaacaaaccggctttggagagcgaggctaagagacttcttgatatgttgctaaactacctaattgaagaacagtacatggtctcgtccgttttcattggtatcatcaattctttatccttcgtcatcaaaagaaggccgcagacaacaataagaattctttccgggctgttgcgtttcaacgtcgacgccaagtttcccctagaaggcaagtctgacttgaactacaaactatccaagagatttgttgaaagagcgtacaagaactttgtgcaatttgggctaaaaaatcaaatcattacaaaatccctctcatccggatcagggtcatcgatctactccaagctgaccaagatttctcaaactttacacgttattggcgaagagaccaagagcaagggaattttgaacttcgacccttccaagggcaatagcaagaaaacgttgtccaggcaggacaaactaaagtacatctcgctatggaaaaggcaattatccgcgttattgtctactctaggggtgtccacaaagacccccacgcctgtgtccgcacctgcaacgggctcttcaaccgaaaacatgcttgatcaactgaagatattgcaaaaatacaccctcaacaaggcttcacaccagggcaatacttttttcaacaactcacccaaaccaatcagcaacacctactcatctgtgtactcattgatgaacagttcgaactccaaccaggatgtgacccagctacccaatgacatacttatcaagctgtccacagaggccatcttgcaaatggacaccacgaaactgatcaccggattgtctatcgttgcttcgaggtacacggatttaatgaatacgtacatcaattctgtaccgtcctcgtcatcatcaaagaggaaatccgacgatgatgacgacggcaacgacaatgaagaagttggaaacgatggcccaacggccaatagcaagaaaatcaaaatagaaacagaaccactagcggaggaaccagaggagcccgaagacgatgaccgaatgcagaagatgcttcaagaagaggaaagtgcccaagaaatctcaggagatgccaacaaatcaacttctgccatgaaggagatcgcacccccctttgaacctgactcattgacgcaggatgaaaaactaaagtacctctcaaagctgaccaagaaactgtttgaattatccggtcgccaggatactacccgggcaaaatcttcgtcttcctcctccatattactggacgatgacgactcctcgtcatggttacacgtcttaatcagattggttacgagaggaatcgaagcacaagaggccagtgacctgattcgtgaagaactgcttggcttcttcatccaggatttcgaacaacgtgtcagtctgatcattgaatggctcaatgaagaatggttcttccaaacctcgctgcatcaagatccctctaactacaaaaaatggtccttaagagttctcgagtctctgggtccattccttgaaaacaaacacagacgattcttcatcagacttatgagcgaactgcccagtcttcaaagcgatcatcttgaggcactgaagcctatctgcctggatccggcaagaagttcccttggttttcaaacgctaaagtttctcattatgtttagacctccagtgcaggacactgttcgcgacctgctgcatcagctaaagcaagaagatgaaggcttacacaagcagtgcgattcactgcttgacaggctaaaatga

SEQ ID NO: 75353 - DNA, 378 bp, Saccharomyces pastorianus
atgtctagttgcatctctccagagtcgtccataatatcgagattcaccaggtcacatggcatcgatggaaatgtcacatccatattaagctccagctttgcgtgtcggtcacggtccaccaccaattgtggccttgttaccacagaattgaactgtccccactcgttcaccagcagaaataacgtggtcaagatgcacgataaagtgatcagcccgccggccctggtgcggactcgtacgtcctcttcggtcttagcgaatgcgtccagcgacagcaacgtggaccttttcatgatgtctattgtgtctagctatgtgtgttatatcactgtcctactccgcatgtatacgagacataaaactagctttcctttataa

SEQ ID NO: 75354 - DNA, 1248 bp, Saccharomyces pastorianus
atgaaaaggtccacgttgctgtcgctggacgcattcgctaagaccgaagaggacgtacgagtccgcaccagggccggcgggctgatcactttatcgtgcatcttgaccacgttatttctgctggtgaacgagtggggacagttcaattctgtggtaacaaggccacaattggtggtggaccgtgaccgacacgcaaagctggagcttaatatggatgtgacatttccatcgatgccatgtgacctggtgaatctcgatattatggacgactctggagagatgcaactagacattcttgacgcagggttcacgatgtctaggttgaatagcgagggtcgccccgtgggagatgctactgagttgcatgtgggtgggaacggcgacggaaccgctccggttaataacgatcctaactattgtgggccatgttacggtgccaaagatcagtcgcagaatgagaatctagcacaggaagagaaggtttgctgccaagactgtgatgcagtgagatcagcatacttggaggcaggctgggcttttttcgacgggaagaatatcgagcagtgtgaaagagagggctatgtcagcaagattaacgagcacttgaatgaaggctgcaggatcaaaggttctgcacaaattaacagaattcaggggaatcttcactttgcccctggaaaaccctaccagaatgcatatggacattttcatgatacttctttgtacgacaagacttcgaatttgaacttcaaccacatcatcaatcatttgagctttgggaagccgatccagtcccacagtaagttgttaggaaacgataagcgccacggcggcgccgtagttgccacttctcccttggacggacgccaggtgttcccggacaggaacacacactttcaccagttctcgtattttgccaagattgtccccaccagatatgagtacttggataatgttgtcattgagaccgcgcagttcagcgccacttttcactcccgacctcttgccggtggaagggacaaggatcatccaaacacacttcacgctaggggtggtatccctggtatgttcgtctttttcgaaatgtctccattgaaagtcatcaataaggaacagcacgggcagacttggtcgggcttcatcttgaattgtatcaccagcattggtggtgtcctagctgtgggcactgtcatggacaagctattctacaaagcacagagatcgatctggggcaagaagagccagtag

SEQ ID NO: 75355 - DNA, 1743 bp, Saccharomyces pastorianus
atggccatattgaaggataccataattagatacgctaatgcaagctatgctaccgctagtggcacttccaccgccactgccgcctctgtcagcgctgcctcatgtcctaatttgcccttgctcttgcaaaagaggcgggccattgctagtgcaaagtctaaaaaccctaatctcgttaaaagagaattgcaagcacatcactcagcgatcagcgaatacaataatgatcaattggaccactattttcgtctctcccacacagaaaggccgctgtacaacctgactaacttcaactctcagccacaagttaatccgaagatgcgtttcttgatctttgacttcatcatgtactgtcacacaagactcaatctatcaacctcgactttgttccttactttcactatcttggacaagtattcctcgcggttcattatcaagagttacaactaccagctcttgtccttgaccgcgctttggatttcgtccaaattttgggactccaagaatagaatggccactttgaaagtcttgcaaaacttgtgttgcaatcaatattctataaagcaattcacgactatggaaatgcatcttttcaaatcactcgattggtccatctgtcagtcggcaacattcgactcctacatcgacatcttcttgttccaatctacgtccccgttatcgcctggcgttgtcctttctgcccctttggaagctttcattcaacagaaactggccttattaaataacgctgctggtactgctattaataaatcgtcctcttctcaaggcccctctttgaacatcaacgagatcaaattgggtgccattatgttgtgcgagttagcttccttcaatctcgaattatcatttaaatatgatcgttcactaattgcgctgggtgcaattaacctcatcaaattatctttgaactactataattcaaacctttgggaaaatatcaatctggctttggaggaaaactgccaagacctagatattaaattgtcagaaatctctaatactttattggatatagcaatggaccaaaattctttcccctccagtttcaaatcaaaatatttgaatagcaataagacatctttagcaaaatctctcttagacgcattacaaaactattgtattcaattgaaactggaagaattctaccgttcacaagaattggaaaccatgtacaatactatctttgctcagtcctttgacagcgattcattgacttgtgtttactcaaatgctactactccaaagagcgctacggtttcatctgcggccacagactatttctcggatcacactcatttaagaaggttgaccaaagatagcacttctccaccatttgccttcactccaacctcatcttcatcctctccatctccattcaattccccttacaagacttcaagttcaatgacgaccccagactctgcatcacaccattcacattcaggttcgttctcttctacccaaaactcttttaaaaggtcactgagcatcccacagaattcaagcattttttggccaagcccactaactcccaccaccccatctctaatgtcaaatagaaaattattacaaaatttatctgtgcgttcgaaaagattatttcctgtgagacccatggccactgctcatccatgctctgcccccacccaactgaaaaagagatcaacttcctctgtggattgtgattttaatgatagtagtaacctcaagaaaactcgctga

SEQ ID NO: 75356 - DNA, 354 bp, Saccharomyces pastorianus
atggcagcagtgcacttgtacataatttcatttacagcattaatgatatcatcaacaagcgagatgggcggatatcccaaatgctctgtcaatattgaggtggatctcatagtgggagcagacatggttgttttgatcgtcttaacccagtttcaacgtgttattactcaacttcctaataaatgccaacttatattcaatgcctcttatttaccttttttgtttacgcgtactataaaaatttccaaggttgaaagacagcaaggtgaaagaagtaaaatggcaatgaaaagtaagatagaattgaaactaatacacaaaggttcacatttttatatacaattacctatttaa

SEQ ID NO: 75357 - DNA, 870 bp, Saccharomyces pastorianus
atgtctgctcccactatgagatccacctcaatattgacagagcatttgggatatccgcccatctcgcttgttgatgatatcattaatgctgtaaatgaaattatgtacaagtgcactgctgccatggaaaaatatctgctatccaagagcaaaatcggcgaggaagattatggagaagagatcaaaagtggagttgctaagttggagtcacttttggaaaactccgtggataagaattttgacaaactagaactatatgttttgaggaacgtccttcgaatccctgaagagtatttggacgccaatgtttttagattggagaaccaaaaggacctggtcattgtagatgagaatgagttaaagaaaagtgaggagaaacttcgagagaaagtgaacgacgtggagttagcgttcaaaaagaatgaaatgctattgaaaagagttacaaaagtgaaaagactgttgtttacgataagaggattcaaacaaaagctaaacgagttactgaaatgcaaagacgatgtacaattgcagaaaattttggagtcgttaaaacctatagatgacacaatgactctactgactgattcattacgtaaactatatgttgatagtgaaagtaccagttcaacagaggaggtagaggcactactgcagagattgaagaccaacgggaagcaaaataataaggatttcagaacacgatatatcgatataaggacgaataatgtcctacgaaaattggggctactaggtgataaagaggacgaaaaacagtctgccaagccggatgcgaggacgcaagcaggggatatagttagtatagatattgaagagcctcaattggatttacttgatgatgtgttataa

SEQ ID NO: 75358 - DNA, 522 bp, Saccharomyces pastorianus
atggtacgtttaaaaagtagatatatcctttttgaaattatattcccacctacagacaccaacgttgaggaatctgtgtcgaaaacagacatcttgctttcgcatcacagagcatcgcctgcggatgtgtccataaagtcgatactccaagagatacgacgctcgctgtcgttgaatctgggcgactatgggtctgcaaaatgtaactctctcttgcagttgaaatacttttcaaataagacgtctacggggataatccgatgccatcgagaggattgcgaccttgttatcatggcattgatgttgatgtcgaaaattggcgacgtcgatggactgatcgtgaaccccgtcaaggtaagtgggaccatcaagaaaatagagcagtttgctatgagaaggaattctaaaattctgaacataatcaagtgtagtcaatcatcacacctcagcgataatgactttattatcaatgatttcaagaaaattggaagggaaaacgaaaacgaaaacgaggacgattag

SEQ ID NO: 75359 - DNA, 1140 bp, Saccharomyces pastorianus
atgtttagtaacagactaccacctccaaaacattctcaaggacgagtttcgacggctttgagctcagatcgcgttgagccggcaatattgactgaccaaatcgctaaaaacgttaagctcgatgattttattccaaagagacagtctaatttcgaactatcggttcctttgccaacgaaagcagaaatccaagaatgtacagcaagaaccaagtcatacattcagcggcttgtgaatgcgaaactagccaactcaaataacagggcatcatcaaggtacgtcaccgaaacacatcaggcacccgcgaatctattattgaacaacagccaccatattgaggtagtgtccaagcaaatggatccattgttgccaaggttcgttgggaagaaggcgagaaaggttgtagcacccacagaaaacgacgaagtcgtgcctgttctccatatggatggcagcaatgataggggagaagctgatccaaatgagtggaagatacctgcagctgtgtcaaactggaaaaatccaaatggttataccgtggccttggaaagacgtgtaggtaaagctcttgacaacgaaaataataccatcaacgatgggtttatgaagctctccgaagcgttagaaaacgctgacaagaaggcaagacaagagatcaggtccaaaatggaattgaagcggcttgctatggaacaggaaatgcttgctaaagaatctaaattgaaagaattgagccaacgagccagataccacaacgggactccgcagacgggagcaatagttaagcccaaaaagcaaacgagcacagtggccagactaaaagagctggcgtactctcaaggaagagacgtatccgaaaagataattctgggcgcagcaaagcgttcagaacaaccggatctgcagtacgattcaagatttttcacaagaggggcaaatgcctccgccaaaaggcatgaagaccaggtttatgacaacccactgttcgtccaacaagatattgaaagcatatacaagaccaactacgaaaagctggacgaagcggtcaatgttaagagtgaaggtgccagtggttctcacggccccattcagtttactaaagctgaatccgatgataaatcggataactatggcgcctag

SEQ ID NO: 75360 - DNA, 2283 bp, Saccharomyces pastorianus
atggtagatgtgcaaaagagaaaaaagttgctagccaaagctgctgccagcgcttctattccggcaatcaaaggttctgttccgttggactcgtatgatataaaaatcattcaatataagaacgctctttacaagctgaatgaactgaataggctactaaacgttctggtaccgcatttgaagaagaaaagagacaatgacgagtcctacaaaattattcccctcgttaatttcatcttattactttgtgagggtcctatatttaatgtaagccccgtattggctaagaggtaccatttgctctgtcgattccagctgataaagctaagcgaagtgcagcagagattatcaactaattttattgatgtagagggctggatgtttcccgaggaggtacccctagatcactataaatcgtgcatatacaataattctctacaatggaagattttaaattcgctgtcttgcattgctcaaaatgctataaaaatttataatgccaagttgagacagattttattggaaagggatgcgtacaaagctcggtcacttccatttgacacttcaataattgaagacttgttaaatccagttgaaatgacattgattctagatttagccgttttgattaatgatccagtaagggataagtccacccattccttttacaaattgcaatggcaagtgatggagaaactgaactcctgtgttcattcgaaaatcttccccattctaaggacatattacaaccaattgcagaaattttcggaaacaagacctacttcactgtcaaatttacagaaggatctaccacattgggaatggactctacacaggatatacactttccacttgcgggttttttctgtcttgtgtgttattatcagtttctctaggcaaattttcctaccgaataaacaacatttcttggacatcaagacaagattatccagcgaaaacgtgtaccattacgatttgataatttgtgagctgatggctttgctctctccagaatgtgatgatgtcacagctttattcgaactgcaggagaatttaaaattttggactcaaacggcgcgtaccgataacaattcctcaagaactcccattttccaccttcaacctggtttagttgtggaattgtttaataatcatatctgcaagattataccgaaattgaggtccattatgggattattatccaattggatggattgctggaaatatattgagaaaaattataaaaccttcgatgaaaccaatgacttgcgggagaatttgaaagaaaagctagaaagagataaggctctgtatttagaggttaaaaacgcgaagagtaagctaaagaagaagccgtcaataacaaagctgccagcctcttcttctccacccccctcacccacatcttcagcaagcccatcaagacaggcctctttagagagcataagaacaagggcaagggcgcatttagcctcaaattcttctaggtctccctcagtatcgcctgtaaggaccactttcaacaataaaaacgcagaaacgaagaaaagcatggtgtctccggagaaaagaaaactgatcaacggcagaaggcctagatcctcatctttgcaatcctatacaaacaaacaacaaacctcatatttgaattctacaagacatccgtcaatagctccaccttcaaagctcaacaatcaaaggtccaattctttgcagtcctcaaccatgacgttaaatcaaaaaatcgtccaagatacagtgcggcatttgatgaacaaaagtgcatctacacccaatccttctgcatcttcatcgttagcgccttcaccaaaagtatccagtataaacaacacctcctcaggaaaatcatcaagtaccctgattgccaatagtagtgatactttggctatagagacattaactctagatccggagtcaaactccagtgaattgtccatcaaaagggtgagatttgctggtgtaccgccaatgacagaggcagaaaatcctaaaccaacaaaggtgggttggtacaagaagccggctgtgctacattatacgccaatacctgcttcggcaatgatcaagccgctacagcataagtccaaatataacacgctgagacaagaagaagggtttacctttcgaaaaagtcttcgagatggattagagttggaaaatggcgaatctggctccgaaactaccatgatgccgtttgggatcgaaatcaaagagtcgaccgggcatagaatagcttctaaaatcagaagcaaattgagataa

SEQ ID NO: 75361 - DNA, 2280 bp, Saccharomyces pastorianus
atgtcctcgtcttcgtctaccgggtacagcaaaaacaatgccgcccacattaagcaagagaatacactgagacaaagagaatcgtcttccatcagcgtcagtgaggaactttcgagcgctgatgagagagacgcggaagatttctcgaaggaaaagcccgctgcacaaagctcactgttacgcctggaatccgttgtaatgccggtgatctttactgcattggcgttgtttaccaggatgtacaaaatcggcatcaacaaccatgttgtttgggatgaggcgcactttggtaaatttggttcttattacttgagacacgaattttaccacgatgtccatcctcccctaggaaaaatgctggtcgggttgtctggttatttggcaggctacaacggttcttgggacttcccttctggggaaatttacccagactatttggattatgttaaaatgagactgttcaacgcgtcattttccgcgctctgtgtgccattggcctacttcactgccaaagctattggattttctttaccaacagtttggctgatgaccgtgttggttttgtttgaaaactcgtatagcactttgggcaggttcattcttttggactccatgctacttttcttcactgtcgcatcgttctttagttttgttatgttccacaaccagaggtccaagccgttctctagaaagtggtggaaatggctgttgatcactggtatttctttgggttgcactatttccgtcaaaatggtgggtctatttatcatcactatggtcggtatctatactgtgattgacttatggacctttttggcagataaatccatgtcatggaaaacctatattaaccactggttggcaagaatatttggtcttattatcgtccccttctgcattttcctattgtgcttcaaaatacattttgacctattatcgcattctggtacaggtgatgctaacatgccatctcttttccaagcaagattagtgggttctgacgtcggacaaggtccccgtgacattgctctaggttcctccgttgtttccatcaaaaaccaagctcttggaggatctctattgcactcacatatacaaacttatccagatgggtccaaccaacaacaagtaacctgttatggttacaaagatgctaacaacgaatggtttttcaacagagaaagaggcttaccatcatggtcagaaaacgaaactgacatcgagtatttgaagccaggtacctcctatagattggtacacaaaagcacgggcagaaacttgcacacccacccagttgctgcaccagtgtcaaagacacaatgggaggtttctggttacggtgacaatgttgttggtgacaacaaagacaattgggttattgagatcatggaccaaagaggagatgaagaccctgagaagttgcacacattgaccacctctttccgtatcaagaacttggagatgagctgttacttggctcaaaccggtaacagtttgcccgaatggggtttcagacaacaagaggttgtctgcatgaaaaacccattcaagagggacaagaggacctggtggaacatcgagacccacgaaaatgaaaggttgccaccaagacccgaagattttcaatacccaaagaccaacttcttaaaagacttcattcatttaaatctagccatgatggccactaataacgctttggtgccagatccagacaaatttgattacttagcttcctcagcatggcaatggccaactttgaatgtgggtttgagactatgtggctggggtgatgataatccaaaatacttcctattgggtaccccagcttccacgtgggcttctagtgttgccgtcctcgcattcatggccacggtcgttatcttactgatcagatggcaaagacaatatgtggacctaagaaatccatctaactggaacgttttcttaatgggcgggttctacccactactagcttggggcctacactacatgccattcgttatcatgtctagagtcacctacgttcatcattacttgcctgccttgtattttgcactgatcattttggcgtactgtttcgacgccggtttgcaaaaatggtccagatctaagtgcggccgtatcatgcggttcgtcctatacgccggattcatggcacttgtaattggttgcttctggtacttctccccaatatcatttggtatggagggaccaagtagtaacttccgctacttaaactggttttccacttgggacattgccgacaagcaagaagcatga

SEQ ID NO: 75362 - DNA, 1554 bp, Saccharomyces pastorianus
atgagtactagtgcggacactgataccatcaagaagccaatccttgcggtgccagagcctgcactggccgatacgcattcagaggagatatcacgctctggagaagaacatgaatcagagaacaacgagcactcagatgaagaaggcgataattattctgaaagagagcaatctgtgtcaaccgaaccactggatacattgccgttaagaaaaaagttgaaaaatctttcctatattacatttttcgccataggaataggtcttttatggccgtggaactgtattctcagtgcctcgcagtattttaagcacgatattttcaaagacacttccatttgggcaaagatcttcacaagctctatgatgtccttttctaccatatcgtcaatgctgttcaacatctacttggccaaaaggcagtacaaatactcgagaagggtcataaacgggcttgtgtgggagattattgtctttactgtcatgtgcttctttacaattttgcatttccttttacctaaatggttcaatttcatgtttataatggtgcttgtagtgatcagttccatggggacagccatgacacagaatggtatcatggccatagccaacgtcttcggttccgagtacagtcaaggcgtcatggtggggcaagccgttgctggtgtcctgccctccctagtgctttttgccctagccttcatcgagaactcgtctgtgtctactacgggcgggattcttctatacttttttaccacaacactcatggtcaccatttgtgtggtcatgttcagcgtgagcaaaatcagtcggaaagtgaacgagaattggaatgtggaagacggacatatcactgatgtgttgttagggtctctgcgctccaatgaggaggaaatccgtattgttggccgcattgaccaaatggaggatgaagaccaccgccgcaccaacggcactcgcgacgacaacgacgaaggtgaggaactccaactaaaagtgcctttcgaggtcttatttgccaaactaaagtacctggttctttccatattcaccacgtttgtcgtaactcttgtttttcctgtatttgcgtctgccacctacgtgacagggcttcctttaagcaacgcacagtacatacctctcatattcatgctgtggaacctaggcgacctttacggaagagtcattgccgactggcccatgttccgtgaccagaaatttacgccacgcaaaaccttcatctactcattgttgcgggtggccgcaataccactgttcttgatgttcacagccatcacctcctcttcaagcggcgatgaagagcacaatggctccgtaatcgttgacttgtgttacatgctactgcagttccttttcggcgtaaccaacgggcacgtcatctctatgagtttcatgaaggtgccagagcaactggacaacgacgacgagaaggaagcggccggtggattcactaatattttcgtttctacaggactagctctgggcagcatcataagctacgtattcgtcttcataattgactttattatcaggtag

SEQ ID NO: 75363 - DNA, 2523 bp, Saccharomyces pastorianus
atgaacgacccttctttactaggctaccctaatctgggcccgcagcagcaacagcaacagcagcaacagcagcatgccgggctactaggaaagggtacaccaaacgctctacagcagcagctacacatgaaccagctcaccgggatacctccgccgggactcatgaacaacagcgatgtacacacttccagcaacaacaactcgcgccagttgctcgacaaattggccaatgggaacgcgaacatgctcaatatgaacatggataacaacaataacaacaataacaacaataacaacaacaacaacaacaacaacaacggcggtggaagcggggtgatgatgaatgcctccacagccgcagtaaattctatagggatggttcctaccgttggtacgcctgtgaacatcaatgtgaacgccagcaaccctttattacacccgcacttggatgacccttctttactaaacaatccgatctggaagcttcaattgcatctggctgcagtgtccgcacaatctctggggcaacccaacatttatgctagacaaaacgctatgaagaagtatttggctacacaacaggctcagcaagctcagcaacaagcgcagcaacaggcacagcagcaggtcccgggcccatttggccccggacctcaggctgcaccaccagctttgcagcccaccgatttccagcaatctcacattgcagaagcctccaaatcactggtagactgcacaaagcaagccttgatggaaatggccgacactctcaccgacagcaagacagcaaagaaacaacaacctacgggagatagcactccctcaggcacggcaactaacagtgcagtttctacaccattgactcccaagatagagctgtttgctaatggcaaggacgaagccaaccaggcgctcttacaacacaagaaactgtctcagtacagcatcgacgaagatgacgacattgaaaacagaatggtcatgcccaaggactccaaatacgacgaccaattatggcacgcgctagatttgtccaacttgcaaatcttcaatatcagcgccaacatcttcaagtacgattttctaacgagactatatttgaatggcaatagcctcacggaactgccagcggagatcaagaacctaagcaacctacgcgttttggacctgtcgcataataggttaacatctctaccagcggaactaggctcatgtttccaattgaaatacttatacttttttgataacatgatcaccacattaccatgggagtttgggaacctgtgtaaccttcagtttcttggtgtagaaggaaaccccttagaaaaacagtttttaaagatccttacagaaaaatctgtcacgggattgattttctacctaagagacaacagaccagagattcccttaccgcatgaacgtaggttcatcgaaatcaataccgatggggaaccacagagggagtacgattctttgcagcaatccaccgagcatctggccaccgatttagccaagaggacgttcaccgtcttatcctacaacaccttatgtcaacactatgccaccccaaaaatgtaccgttacacaccgtcgtgggcgttaagttgggattacaggcgcaataaattaaaggagcaaattctctcgtacgacagtgatctgttgtgtttacaagaagtggagtctaagacttttgaagagtattgggtgcccttattggacaagcacggttatacaggcatcttccatgcaaaggcaagagccaagaccatgcattccaaggactctaagaaagtggacgggtgttgcatttttttcaaaagggaccaattcaagttgatcaccaaagacgccatggatttcagcggtgcttggatgaaacacaagaagttccaaagaactgaagattatttaaaccgtgcaatgaacaaagacaacgttgcactgttcttaaagctacaacacatccctagtggcgacaccatatgggcggtcaccacgcatttgcactgggatccaaaattcaatgatgtcaagacattccaagtaggtgtcctgttagatcatctggaaacgctgctaaaggaggagacatcgcacaattttagacaggacattaagaagtttcctgtgctcatttgtggtgacttcaattcatacatcaactccgccgtatacgaattgataagtacaggccgtgtccaaatacatcaagagggaaatggtagagatttcggttacatgtcggagaaaaatttctcacataacttggctctcaaatcaagttataattgtatcggagaactaccattcaccaatttcacaccgtcattcacagatgttatcgactatatatggttttctacacatgctctaagggtgcgtggcctattgggtgaagtggaccctgaatacgtgagtaagtttatcgggttccccaacgacaaattccccagtgaccatataccattgttagcaagatttgaatttatgaagacaaacacaggcagtaggaaagtataa

SEQ ID NO: 75364 - DNA, 1002 bp, Saccharomyces pastorianus
atgagttgtgtgtatgcgtttgggtccaatgggcaaaggcaactgggactggggcacgatgaggatatggataccccacagaggtctgtgccaggagatgatggagcaatagtcaggaagatagcgtgcggtgggaaccacagcgtgatgctgacaaatgacgggaatctggtaggatgtggagataacagacggggagaactggatagtgcgcaagcactgcggcaggtgcatgactggaggcccgtggaagtaccgtcacccgtggtggatgtggcgtgcggctgggacacgacagttattgtggatgctgatggccgtgtatggcagagaggaggcggttgctacgagttcactgagcaacatgtgccattgaattccaacgatgggcgcatcgcagtatacggatgtttccagaactttgtggtggtgcaaggcacccgagtatacggctggggcagcaacacaaagtgtcaattgcaagagcccaaatcccgatcactgaaagagcccgtattggtgtacgataccgggtctgtggccgtagactacgtggccatgggcaaggacttcatggtcatagtggacgagggcggccgcatagtgcacgcatccggtcgcctgcccactgggttcgagctcaaacaacagcaaaaaagacacaatctagtggtactgtgcatgtggacctcgatccacctgtggaatacgcgcctcaatacggtggagtcgtttggtaggggcacacattcccaactgttcccgcaagagcgcctagacttccctattgtcggtgttgcaaccgggagtgagcacggtattctaactactgctaatcaagaaggcaagtctcactgttacaatgtatactgctggggctggggagagcatggcaactgcggcccgcaaaagggctcccagcctggactgcagctcgtgggccaatactctggaaaacctcgcgtgtttggcggatgtgccaccacgtggatcgtgctctag

SEQ ID NO: 75365 - DNA, 3396 bp, Saccharomyces pastorianus
atgagtggtccgcattcaaatgatgaggatgacgtagtgcaagtgcccgagacgtcctctcccaccaaggtagcatcgtcgtctcccttaaagcctacttcgccaacagttccggatgcaagtgtggcgtctttgagaagcaggtttactttcaagccttcagatcccagcgaaggagctcatacttcgaagccgctcccatctgggagtcctgaggtagcactggttaaccttgcgagagagttccctgatttctctcaaactctggtgcaggctgttttcaaatctaactcttttaacttacagtctgccagggaacgtcttacaagattgaggcagcaaagacaaaattggacatggaacaagaacgcatctcccaagaagtcagaaaccccgccacctgtcaagaagtcattaccactggcaaacacaggccgtttatcatctatccatggcaatatcaacaacaaatcctccaagattaccgtggccaaacagaaaacgtccatttttgaccgttactcaaacgtcatcaaccagaaacaatacacttttgagctgccaactaacttgaacatagactcggaggcactcagcaagttgcccgtgaactacaacaaaaagagaaggctggtaagggcagatcagcatccaattggcaagtcttatgagtcatccgctacacaactaggttctgcaagagagaaactactggcgaaccgcaaatacggtcgtcatgcaaacgacaacgatgaagaggaggaagagagtatgatgacggacgatgacgatgcaagtggcgacgactacacagaatccacgccgcagataaatctggatgaacaagttttacagtttattaatgattctgatattgtcgatctctcggacctctcagataccacgatgcataaggctcaactcatagcctcacataggccatattcttctttaaatgcctttgtaaacacaaatttcaatgataaggacactgaggagaacgcatcgaacaagagaaaaagacgtgcggctgcatccgccaatgagagtgagaggctactcgataaaatcacccaaagcataagaggttacaatgcaattgagtctgtgatcaagaagtgttcttcctacggtgatttggtcacttcgcaaatgaagaaatggggtgtgcaagtggaaggcgataactctgagttggacctgatgaaccttggggaagacgatgacgacgacaatgatgatggcaataacgataataataatagcaacaataacaataccgctggcgcagacgccactagcaaggaaaaagaagatacaaaggccgtagtggaaggttttgatgaaactagcgcagaacctactccagcaccagcaccagcaccagtggaaagagaaacaaaacgaactagaaatacaaccaagccaaaagtggtcgaagatgaagatgacgatgtagatttggaggcaatcgatgacgaattgccgcagtctgagcatgaagatgatgactatgaagaggaggacgaagactataacgatgaggaagaagatgtggaatatgatgatggtgacgatgatgacgatgatgatgatgaatttgtcgccaccagaaaaaacacacacgtggtctccaccacgagcagaaatggccgtaaacctattgtcaagttcttcaagggcaaacccagactgttaagcccggaaatttcactaaaagactaccaacaaacgggtataaactggttgaatctgctataccaaaacaagatgtcatgtatccttgcagacgacatgggtctaggtaaaacatgtcaagtcatttcatttttcgcatatttgaaacaaataaacgaaccgggtcctcacttggttgttgtgccatcatcgacgctagaaaattggttaagggagttccagaaattcgcaccagctttgaagattgaaccctactatggctctttacaagaaagggaagaattgcgtgatatcctggaaaggaacgctgggaaatatgatgttatcgtgaccacgtataacttggctgcaggtaataaatacgacgtttcgtttttgaaaaatagaaacttcaatgttgtggtttatgatgaaggtcatatgttgaaaaattccacttcagagagatttgccaaactgatgaaaattcgtgccaatttccgccttttattaactggtacgccattacaaaataacttgaaggaactaatgtcgctgttggaatttatcatgccaaatcttttcatttccaaaaaggaatcatttgacgcaatcttcaaacaacgtgccaagaccacagacgataacaaaaatcacaacccgctattagcgcaagaagccattacaagagctaaaacgatgatgaagccatttattttgagaagacgtaaggatcaagtgttgaaacatttgccaccaaagcacacgcatattcagtattgtgaattgaacgcaatacaaaaaaaaatatatgataaggaaatacaaatcgtgttagaacataagagaatgattaaagatggtgaattgccaaaagatgcaaaagaaaagtctaaattacaatcttccagttctaaaaatttaataatggcattgcgaaaggcctctctgcatccacttttgttcagaaatatctataatgataaaatcatcactaaaatgagtgatgccatattggatgaacctgcttatgctgaaaacggtaacaaagagtatattaaggaagatatgagttatatgacagattttgagttgcacaaactatgctgcaatttcccgaacacgttatccaaataccaacttcataatgacgagtggatgcaatctgggaagatagacgctttgaaaaaattgctgaaaacaatcattgttgacaaacaggaaaaggtgctgatattttccttattcactcaagtcctggatattctagagatggttttgtccaccttagattataaatttttaagattagatggttccacgcaagtgaatgatagacaactattaatagataagttttatgaagataaggatattcccattttcatcttatcaacaaaggcaggtggattcggtattaatttggtgtgcgcaaataatgttattatattcgatcaaagttttaacccacatgatgacagacaagctgctgatagggcacatcgtgtgggacaaacaaaggaagttaatataaccactttaattaccaaggattccatagaggaaaagattcatcaactggccaaaaataaactagctttagattcgtatatcagtgaagataaaaaatctcaagatgtgttggaaagtaaagttagtgatatgttggaggatataatttatgatgaaaactcgaaaccgaagggaaccaaagaataa

SEQ ID NO: 75366 - DNA, 978 bp, Saccharomyces pastorianus
atgagttttacaggttcattagcgctggcaggtattggtggtttggtgtacaagtttggcggaggccaatcgtatgaaaaattgccatatgtcaacatccccttcaatcagtacttggataaagtttacaagaagcacttcagcaaagttatgagccgtaccagatacgtgctaatgaactttttcaaagacgcatttacaggaggtgcattcatgtacccgttcaaagggtttttagagttcaacaccaataagagcagttactcaacgactatgttaggtatattatcgagttacttgataatgtttgccctggtaagctttgtgtattgggctacaattacgccaatgtacacagcttttttgattgtgctgggccctattgggcttttcattgccatttttcattcctttttgcaagcaaatgttttcactttattgtttatgagactcagtcattttaataatcatttagtggaggtgtgcttagagaagaatggtttagaggagaatttgagtgaagtcaaaccaatcaagtactatgtacctattaactcgatatatttctgggcttactatttcccattcaagttggtcaagtacatgttaggcctgtcggttctttttgtgctgttggttatatcttttttcccacttattggaccaatcctttttcatattttaatttctcctttcatcactcaaatttacttcacgaaggttttacgtttacaaaatttcgacaacatacaaagacgtgaaaatatttatctccacgctggccaatatgcctcatttggtttcttggccggtttgatcgagtccgtgcccattttagcgggctttgccatttctacaaatactattggtagcgttttatttaaccttgatcatccaatggtccctgaaaatttagtagaaactcaagctgaaattgaagcagcaccacaagatatcaatcaacaaccgaatcaataa

SEQ ID NO: 75367 - DNA, 768 bp, Saccharomyces pastorianus
atggatgtgttgaagctgggttatgaactggaccagctctctgatctggtcgaagaaagaacaaggctagtgtcggtgttgaagctcgccccgacctcaaacgataacgttactttgaaacggcaattgggctcaatattggagttattgcagaaatgtgcgcccaatgatgaactgatatcccgatacaataccatactggacaaaattcctgatacggcggttgacaaggagttgtataggttccaacagcaggtggcaagcaatactgatgaggtgtccaaagagtctttgaaaaaagtgcggttcaagaatgatgacgagcttacggtcatgtataaggatgacgatgaacaagacgaggagtcgccgctgccttcgacgcatactccatacaaggatgaaccattgcaatcgcagttacagtcacagtcacagccacagccaccacaacccatggtttccaaccaagaactatttattaaccagcaacagcagttgttagagcaagattcccacttgggcgcactgtctcagtctattgggaggactcatgacatttcgctggaccttaataatgagatcgtttctcagaacgactcgctgctggttgatttagaaaacctgattgataataatggtaggaatttgaacagggcctctcggtccatgcatggctttaacaattctaggttcaaggataacggcaactgcgtgattattcttgtgctgatagtggtgctcctgttgcttctattagtattataa

SEQ ID NO: 75368 - DNA, 780 bp, Saccharomyces pastorianus
atggagccagagagcataggcgatgtggggaaccatgcccaggatgatagtgccagtatagtgtccgggcctcgcaggcgttctactagcaagacatctagtgcgaagaatatacggaactccagtaatatctctccagcatcgatgattttcaggaatttgttgatactggaggatgatttaagacgccaagctcacgaacaaaagatactgaagtggcaattcactttgttcttagcgtctatggccggtgtaggcgcatttaccttctacgaactttatttcacttcagattatgtcaagggcttccatagggttattttgcaattcactctttctttcatttccattactgtagttctttttcatatcagtggacaatatagaagaactatcgtcattccaagaagattttttacctctactaataaagggattaggcagtttaatgtgaagctagttaaagtacaatctacgtgggacgagaaatacacagattcagtaagatttgtgagtcgaacaattgcttattgtaatatttattgtttgaaaaaatttctgtggcttaaagacgataatgccattgtgaaattttggaaaagtgtcacgatacaatcccaaccgaggatcggagctgtggatgtgaaattagtcctcaaccccagagcatttagtgcagagattagagaaggatgggagatttatagagacgagttttgggccagggaaggtgctagaagacgcaaacaagcgcacgaactccgacctaaatcagaatga

SEQ ID NO: 75369 - DNA, 597 bp, Saccharomyces pastorianus
atgactttggcttttaatatgcaacggttggtgtttcgtaatttgaatgttgggaagcgcatgttcaagaacgtccccttatggaggtttaatgtcgccaataaattaggaaagcccttaactcgctctgtagggttaggcggtgctggcatagttgctggtggcttttacttgatgaatcgccagccttctaagttgatattcaatgattctttaggggcagctgtcaaacaagagggtcccttggaaccaaatgtgggcaacagtacggcaattaccgaggaaaggaggaacaaaataagtagtcacaagcagatgtttttgggatcattattcggtgttgttttaggagttacggtggctaagatatcaattttgtttatgtatgtcggtattacaagcatgcttctttgtgaatggttgcggtacaagggatggattcgcattaatttgaaaaatatcaaatctgtaattgttttgaaagatgtagacttgaagaaactgcttattgatgggttattgggtacagaatacatgggttttaaagtattctttacattgagtttcgtattagcaagtttaaatgctaacaaatga

SEQ ID NO: 75370 - DNA, 648 bp, Saccharomyces pastorianus
atgatcaaatctacaattgctctaccctctttcttcattgttttaattttggcgttggtcaattcagtggctgcatcttccagttatgcaccagttgctatcagtttaccagcattcagcaaagaatgcctgtactacgatatggttactgaggatgattccctggctgtgggttaccaagttctaaccggtggtaattttgagattgattttgatattactgctcctgatggatctgtgattactagtgagaaacaaaagaagtactcagactttttattaaaatcgtttggagtggggaagtataccttttgtttttccaataactatggtacagcgttgaaaaaggtagaaattacactagaaaaggaaaaaactttgactgacgagcatgaagctgatgtcaataacgatgacattattgccaataacgccgtggaggaaatagatagaaacttgaacaaaatcacgaagactttgaactatttgagagccagagaatggagaaacatgtctaccgtcaattccaccgaatcaaggttgacttggttatctatattgattatcattatcattgccgttataagtattgcccaagttctacttattcaattcctcttcactggtcgtcaaaaaaattacgtttaa

SEQ ID NO: 75371 - DNA, 1929 bp, Saccharomyces pastorianus
atgtcaaaagctgtcggtattgatttaggtacaacatactcgtgtgttgctcactttgctaatgatcgtgtggacattattgccaacgatcaaggtaacagaaccactccatcttttgtcgctttcactgacactgaaagattgattggtgatgctgctaagaatcaagctgctatgaatccttcgaataccgttttcgacgctaagcgtttgatcggtagaaacttcaacgacccagaagtgcagggtgatatgaagcacttcccattcaagttgatcgatgttgacggtaagccacaaattcaagttgaatttaagggtgaaaccaagaactttaccccagaacaaatctcctccatggtcttgggtaagatgaaggaaactgccgaatcttacttgggtgccaaggtcaatgacgctgtcgtcactgtcccagcttacttcaacgattctcaaagacaagctaccaaggatgctggtaccattgctggtttgaatgtcttgcgtattattaacgaacctaccgccgctgccattgcttacggtttggacaagaagggtaaggaagaacacgtcttgattttcgacttgggtggtggtactttcgatgtctctttgttgtccattgaagacggtatctttgaagttaaggccaccgctggtgacacccatttgggtggtgaagattttgacaacagattggtcaaccacttcatccaagaattcaagagaaagaacaagaaggacttgtctaccaaccaaagagctttgagaagattaagaactgcttgtgaaagagccaagagaactttgtcttcctccgctcaaacttccgttgaaattgactctttgttcgaaggtatcgatttctacacttccatcaccagagccagattcgaagaattgtgtgctgacttgttcagatctactttggacccagttgaaaaggtcttgagagatgctaaattggacaaatctcaggtcgatgaaattgtcttggtcggtggttctaccagaattccaaaggtccaaaaattggtcactgactacttcaacggtaaggaaccaaacagatctatcaacccagatgaagctgttgcttacggtgctgctgttcaagctgctattttgactggtgacgaatcttccaagactcaagatctattgttgttggatgtcgctccattatccttgggtattgaaactgctggtggtgtcatgaccaagttgattccaagaaactctaccattccaacaaagaagtccgagatcttttccacttatgctgataaccaaccaggtgtcttgattcaagtctttgaaggtgaaagagccaagactaaggacaacaacttgttgggtaagttcgaattgagtggtattccaccagctccaagaggtgtcccacaaattgaagtcactttcgatgtcgactctaacggtattttgaatgtttccgccgtcgaaaagggtactggtaagtctaacaagatcactattaccaacgacaagggtagattgtccaaggaagatatcgaaaagatggttgctgaagccgaaaaattcaaggaagaagatgaaaaggaatctcaaagaattgcttccaagaaccaattggaatccattgcttactctttgaagaacaccatttctgaagctggtgacaaattggaacaatctgacaaggacaccgtcaccaagaaggctgaagagactatttcttggttagacagcaacactactgccagcaaggaagaattcgatgacaagttgaaggagttgcaagacattgccaacccaatcatgtctaagttgtaccaagctggtggtgctccaggtggcgctgcaggtggtgctccaggcggtttcccaggtggtgctcctccagctccagaggctgaaggtccaaccgttgaagaagttgattaa

SEQ ID NO: 75372 - DNA, 648 bp, Saccharomyces pastorianus
atgggtgtcaccagcggtggccttaacttcaaagataccgtcttcaatggacaacaaagagacatcgaaagtaccaccacccaagtcgaaaatcaagacgtgttcttccttacccttcttgtccaaaccgtaagcaatggcagcggcggtaggttcgttaataatacgcaagacattcaaaccagcaatggtaccagcatccttggtagcttgtctttgagaatcgttgaagtaagctgggacagtgacgacagcgtcattgaccttggcacccaagtaagattcggcagtttccttcatcttacccaagaccatggaggagatttgttctggggtaaagttcttggtttcacccttaaattcaacttgaatttgtggcttaccgtcaacatcgatcaacttgaatgggaagtgcttcatatcaccctgcacttctgggtcgttgaagtttctaccgatcaaacgcttagcgtcgaaaacggtattcgaaggattcatagcagcttgattcttagcagcatcaccaatcaatctttcagtgtcagtgaaagcgacaaaagatggagtggttctgttaccttgatcgttggcaataatgtccacacgatcattagcaaagtgagcaacacacgagtatgttgtacctaa

SEQ ID NO: 75373 - DNA, 1620 bp, Saccharomyces pastorianus
atgcatcgtaaatcattaaggagggctagcgctattgtgccttccgctccctatcgaaagcagattattagcaatgcacgcaataaaccaagccttttctctaaaattaaaactttctttacccaaaaagattcagccagagtgagtccaaggaataatgttgctaataaacaaccacgcaatgagtcttttaacagaagaatctcaagtatgcctggaggttatttccattctgagatatccccagattctactgtaaaccgttccgtagttgtttctgcagtgggtgaagccagaaacgacattgagaataaagaagaggagtatgatgaaacacatgaaactaacatctccaatgcaaagcttgcaaacttttttagtaaaaaaggtaatgagcctttatcagaaattgaaatagagggtgtgatgtcattgttacaaaaatcaagcaagtccatgataacttcggaaagagaacaaaaatcagccgaaggtaataatatcgaccagtcgcttatcttgaaggagtcaggaagtacaccaatcagcatatctaatgcgccgaccttcaacccaaaatatgatacttcaaatgcgtcaatgaatacgactttgggaagcattggttcaagaaaatacagtttcaattattctagcctgccctcaccatacaaagcaaccgtttatagatatagtgcagcgaaaaagatccctgatacatacacagccaacacatctgctcaaagtatagcatctgctaaatcggtaagaagtggtgtttcaaagtcagctcctagtaagaaaataagtaatacagctgcggcattggtctcactattagatgaaaatgacagtaagaagaataatgcagcttcagaacttgctaatccatactcctcttctgtaagccaaatacgcaaacataagagagtttctccaaatgctgcaccaaggcaagagatcagtgaagaagaaactactgttaagccattatttcaaaacgttcctgaacaaggcgaagaaccaatgaaacaactgaacgccaccaaaatttcaccatctgcgccaagcaaagattcttttactaaatacaaacctgcaaggtcctcatccttacgctcaaatgtcgtcgtagctgaaacctcacctgaaaagaaggatggtggagataaacctccatcctctgcttttaacttctcgtttaatacttcaagaaacgttgaacctactgagaatgcttataagagcgagaacgcaccatctgcatcatcaaaggaattcaattttaccaacctacaggcgaagccgttagttggaaagccaaaaaccgaacttacaaagggcgattctactcccgtccaaccagatctttcggttactcctcaaaaaagttcatcgaaaggctttgtttttaatagtgttcaaaagaaatcacggtccaatctttcacaagaaaacgataatgaaggtaaacatatcagcgccccaattgataacgacttttcggaggaaaaggcggaagagtttgatttcaatgttcccgtggtgtctaagcagctaggaaatggcttggttgatgaaaataaagttgaggctttcaagtccctatataccttttga

SEQ ID NO: 75374 - DNA, 660 bp, Saccharomyces pastorianus
atgcttttaacctctcttttacaggtttttgcctgctgtctagttttaccagctcaagttactgcgttctattattatacttctggtgctgaacgtaagtgcttccacaaggaattgtctaaaggtactttgttccaagcaacttacaaggcacaaatttacgatgaccaattacaaaattacagagacgctggtgcgcaagattttggtgtcttgattgatattgaggaaacttttgatgataaccacctggttgttcatcagaaaggttcagcaagtggtgatttaactttccttgcgtctgattcgggtgaacataaaatctgtattcagcccgaagctggtggctggttgattaaggctaaaacgaagattgacgttgaattccaagtaggctctgatgaaaagttagattctaagggtaaagccactattgacattctacatgccaaggttaacgtcctaaactccaagatcggcgaaattagaagagagcaaaaattgatgagagatcgtgaagctacctttagagacgcctctgaagctgttaattctcgtgctatgtggtggattgtcattcaattaattgttctcgctgttacttgtggctggcaaatgaaacacctgggcaaatttttcgttaagcaaaaaattttatga

SEQ ID NO: 75375 - DNA, 1281 bp, Saccharomyces pastorianus
atgaacatccttttacaggatccattcgctgttcttaaggaacatcctgagaagctcacacatacgattgagaaccctttacgcactgaatgtctccagttcagtccttgcggtgattacctggctcttgggtgtgccaatggagcacttgttatttacgatatggatacgttcaggcctatttgtgtcccaggaaatatgttgggagcacatgttcgacccattacatctatcgcatggtctccagatggtagattgttgcttacaagctctagagactggtcaataaaactgtgggatctttcaaagccaagtaagcctttgaaagaaatacgattcgattctccaatttggggttgccaatggctggatgctaaaaggcggctttgtgtagctacgatatttgaggaaagtgacgcatatgttattgacttcagcaatgatccggtcgcaagccttctcagtaaatcagacgaaaaacaattgagttcgacacctgatcatggatatgttcttgtttgtacagtacataccaaacatccaaatattattattgtgggaacttcaaaaggttggctagacttctataaattccattctctatatcaaacagaatgtattcattcccttaaaatcacgagttctaatatcaaacatttaattgtctcgcaaaatggtgaaagattagctattaactgctccgatagaacaataagacaatacgaaataagtattgatgatgaaaactctgcggttgagttgaccttagagcataagtaccaggatgtgattaataaattacagtggaactgtatcctctttagtaataatactgccgaatacttagtcgcttctacacatggttcttctgcacatgaactatacatctgggaaacgactagtggaacgttggtgagagtcctggaaggggctgaagaggagttgatagatataaattgggacttctatagtatgagtatagtgagtaatggttttgaatctgggaacgtgtatgtgtggtctgttgttattccgccaaagtggagtgctttggcgccagattttgaagaagtagaagagaatgtcgactatttggagaaggaagatgaatttgatgaggtcgatgaggcagaacagcagcaaggactagaacaagaggaagaaatagcgatcgatcttcggacgagagagcaatatgatgttagaggtaataacttgcttgtagaacggttcacaatccctacagattatacgaggataattaagatgcagtcatcatag

SEQ ID NO: 75376 - DNA, 1866 bp, Saccharomyces pastorianus
atgagcagtgttcaactttcgaagggcgattttcatagcatcttcaccaataagcaaaggtacgataatcccaccggtggcgtttatcaagtttataacaccaggaaatctgatggagctaacagcaacagaaagaatttgatcatgatttccgatggtatttaccatatgaaggctctgttgagaaaccaagctgcatccaagttccagtcaatggaactacaaaggggtgatatcattcgcgtgataattgcagaacctgctattgtcagggaaaggaagaaatacgttcttttagtagatgactttgagttggtccagtcgcgtgctgatatggtcaaccaaactagtacttttttggataactatttctcagagcatccaaatgaaaccttaaaagacgaagatataactgacagtggtaatgttgccaatcaaacaaacgccagcaatgctggtgtccctgatatgctgcattcaaactcaaacttgaatgcaaatgagagaaaattcgccaatgaaaaccctaactcgcaaaaaaccagaccaatttttgccatcgaacaactgtctccataccaaaacgtttggactatcaaagcaagagtttcctacaagggagaaattaaaacgtggcacaatcaaagaggtgatggtaaactattcaatgtcaacttcttggatacctctggagaaatccgagccaccgcgtttaatgattttgctacaaaatttaacgaaattttacaagaaggcaaagtatactatgtatcaaaggcaaaactccaaccagctaagccccaatttactaatctaacacacccttatgaactgaatttggatagagacactgttatagaagaatgtttcgatgaaagtaatgttccgaaaacccatttcaatttcatcaaactagatgctattcagaaccaggaagtaaattccaacgtagacgtcctcggtattatccaaactataaacccacattttgagctaacttcaagggctgggaagaaattcgatcgtcgtgacatcacaattgttgacgactctgggttttctatctctgttggcctatggaatcagcaagcccttgatttcaaccttcctgaaggttctgttgctgccattaaaggtgttcgtgtgacggattttggtggcaaatctttgtctatgggattttctagtaccttgattccgaatccagaaattcctgaggcatatgccttaaagggttggtatgattccaagggccgcaacgcaaacttcatcactctaaaacaagaacccggtatgggtggtcaatcggctgctagcttaacaaaattcattgctcagcgtattactattgctagagctcaagctgaaaatctaggaagaagcgagaaaggtgacttttttagtgttaaagctgctataagtttcttaaaagttgataattttgcatatcctgcctgttctaatgagaattgtaataagaaagttttggaacagcctgatggtacctggagatgtgagaagtgcgacaccaataatgcaaggccaaattggagatacatcttgacaatatcaattattgacgaaaccaatcaactatggctcactttatttgacgaccaagctaaacaattattgggtgttgatgctaatacattaatgtctttgaaggaggaagaccccaacgaattcacaaaaattactcaaagtatccaaatgaacgaatatgactttaggattagagcgcgtgaggatacatacaatgatcaaagcagaattagatatactgttgctaacctacacagcttgaattacagggctgaagccgactatcttgccgatgagttatccaaggctttgttagcttaa

SEQ ID NO: 75377 - DNA, 921 bp, Saccharomyces pastorianus
atgtcaattacgaagactgaactggacggtatattgccattggtggccagaggtaaagttagagacatatatgaggtagacgctggtacgttgctgtttgtcgctacggatcgtatctctgcatatgacgttattatggaaaacagcattcctgaaaaggggatcctattgaccaaactgtcagagttctggttcaagttcctgtccaacgatgttcgtaatcatttggtcgacatcgccccaggtaagactattttcgattacctacctgcaaaattgagcgaatcaaagtacaaaacgcaactagaagaccgctctctattggttcacaaacataaactaattccattggaagtaattgtcagaggctatatcaccggatctgcttggaaagagtacgtaaaaacaggtactgtgcatggtttgaaacaacctcaaggacttaaagaatctcaggagttcccagaaccaatcttcaccccatcgaccaaggctgaacaaggtgaacatgatgaaaacatctctcctgcccaggccgctgagctggtgggtgaagatttgtcacgtagagtggcagaactggctgtaaaactgtactccaagtgcaaagattatgccaaggagaagggcatcatcatcgcagacaccaaattcgaattcggtattgacgaaaagaccaatgaaattattctagtggacgaggtgctaacgccagactcctctagattctggaacggtgcctcttataaggtaggagaatcccaagattcttacgataagcaatttttaagagactggcttactgctaataagttgaacggtgttaacggcgtcgaaatgccccaagacattgtcgacaggacaagggccaaatatatagaggcttatgaaacattgacagggtctaaatggtctcattaa

SEQ ID NO: 75378 - DNA, 1308 bp, Saccharomyces pastorianus
atgcatagacgacagtttttccaagaataccgtagtcctcagcagcagcagggacacccaccaaggtcagaataccaagttctcgaagaaattgggagaggttcatttgggtctgtacgaaaagtcatccatatacctaccaagaaacttttggttagaaaggatatcaaatatggccatatgaatagcaaagagagacaacagctgatcgctgaatgtagcattctatcgcagttgaagcatgaaaatattgtagaattttataactgggacttcgatgaacaaaaagaagtgttatacctttatatggaatactgttccaggggtgatttatcccagatgattaagcactacaaacaggagcataaatatataccagaaaaaattgtgtggggtatcctggcccaattattgactgcgctctataaatgtcattatggtgttgaattgccaactttgaccacaatatatgaccggatgaaaccaccggtaaaaggcaaaaacatcgttatccatcgtgatctgaaaccaggaaatatattcttaagctatgatgatagcgattacaatattaatgaacaagtagacggtcacgaggaagtgaatagtaattattacagagaccatagagtgaattcagggaaaagggggagccctatggactatagtcaagttgtggtaaagttaggtgattttgggttagccaaatctctggaaactagtattcaatttgccacaacatacgtcggtacaccatattacatgtcgcctgaagtgttgatggaccaaccatactccccactatccgacatctggtcactaggttgtgttatttttgagatgtgttcgttgcaccccccatttcaggcaaaaaattatctcgagctacaaactaagattaaaaacaggaaatgtgacaccgtccctgagtattactctagagggcttaatgccataatacattcaatgatagatgtgaacttaagaaccaggccttccacttttgaattactgcaagatattcagatacgaactgcaagaaagtcgttgcaattagagagatttgaaaggaagttactggactatgaaaatgagctgacaaacattgaaaaaatcctcgagaagcaagctattgaatatgaaagagaactgagtcagttgaaggaacaatttacccaggcagtggaggagcgagccagggaagtaattagcggtaagaaagttggtaaggttccagaatctataaacggatattatggtaaaaaatttgccaaacctgcataccactggcaaacaagatatcgataa

SEQ ID NO: 75379 - DNA, 708 bp, Saccharomyces pastorianus
atgcaaaccccttcagaaaataccgacgtcaagttggatactctcgacgaacccagtgcacatttaatcgaggaaaatgtggctcttccagaggatacattcaattcgtaccggagttatatacttaatgaaatcgctcgttgtaaaccgctaatgattatgttcctaatacctgtgtgtttggttttattgattacgttttttcatgatatcaaaggtatccttgtgtttttagtgatttctcttatcctctctattatcattttattgatcggtataactgccttcgtgtctgagaccttgaataagggttccataattaagcttttagtagaagtcattacacgtaaaccagcagtaggggggaaggaatggagaataatcgcatataatatgaaccagtatctgtttgaccatgggatatggcatactccgtattactttttttgtgaacataggtgccatgaatttttcaaaagccttatcgaacagacaaggtcgaatgcacatttgaattcaccaacgaacggtgcagagaatacgcagtcaaacacaccagcaaaagaggtttcaaatgagatggtaaaaccttatatctttagttctgatccagttttagaagcttaccttattaaagctgcggaaattgacaaagaagctgaatttgagtattggagaaagcaatacccagaggttgatttgccttag

SEQ ID NO: 75380 - DNA, 705 bp, Saccharomyces pastorianus
atgcaaaccccttcagaaaataccgacgttaagatggatactctcgacgaacccagtgcacatttaatcgaagagaatgtagctcttcccgaagacacattcagttcacatctgagttatgtactttatgaaattgctcattgtaaaccgatcatgtttatgatcatcataatcgtgagtttgatctcattgattgtgctttttcatgataacgacgggtgcactgtgatcttagtgatgtcccttatagtagcctccatggctttagtggtggttgcagcattcacattcgggaaagcgatcactgaacaggagttcatgataaagcttttagtggaggtgatcgcacgcaagcctgcggggaaggaatggggtactgtcgcatataatatgaaccaatatctattcatgaagagactatggtataccccgtactatttctatagcggcaagaagtgccatgagttcttcaccactcttatcaaggaagtgaattctggttcgcactcggattcctcatcgaatagtgccgaggatacacaatcacctgtctcagcagggaagacttcaaatggtctaaacaactttgatagtattagatcagaccctattttgatggcatatgttttgaaggcaacacaaatagaaaaggaggctcaaagtgaatactggagaaagcaatatcctgacgctgatttaccttga

SEQ ID NO: 75381 - DNA, 225 bp, Saccharomyces pastorianus
atgaataaatatctatttgaccataaaatatggagtactccttactacttttattgcgaagaagattgccaccgtctttttctaagttttattgagggaagaactttcgagaagccaacaagcaacgctgaggaaaatgtacaggagactgaagctggcgaatctttcacattaaatcccggagaagattttcaaaattgctttccaagacagcggatattgtag

SEQ ID NO: 75382 - DNA, 2064 bp, Saccharomyces pastorianus
atgccaaacttaaagagactacccctcccgccactgcaggacacgctcaaccgctacctggcacgcgtggaacccctgcaggacgagcgccaaaaccgccgtacgcgccgcactgtgctctccgcagaaaacctggacgcattgaacacgctgcacgagcggctgctagaatacgacgcacggctcgccgaaagcaacccagagtcctcatacatcgagcagttctggtatgacgcatacttgctatatgatgcaactgtcgttctcaacgtcaacccgtacttccaactgcaggacgacccaaccatcaaagacacaccagagacggcggcacagggcccctatggcgcacacacggtgcaggtacgtcgtgccgcacgactcaccacctctattctcaagttcatccgccagattcgccacggcacgctccgcacagacaccgtgcgcggcaaaacgccgctgtcgatggaccagtatgagcggctattcggctccagtagaatccctccgggtcccggcgagccctcttgccacttgcaaacagacgccacgtcgcatcacgtggtggcgatgtatcgtggccagttctactggttcgacgtgctggacacacgcaacgagcccatcttcgccaccccagaacaactggagtggaacctctactcgatcatcatggacgcggaatccgccggaagcggatccgcgccctttggcgtgttcaccacagagtcgcgccgggtgtggtccaacatcagggactatctgttccatgcggacgactgcaccaactggcgcaatctcaagctgatcgactccgcgctgttcgtggtctgtctcgacgacgtggcgtttgccgccgatcagcaggacgagctcacgcgttcgatgctgtgcgggacttctaccatcaatctcgacccccaccaacaccagccgccattgaacgtgcagacaggcacctgtctcaaccgctggtacgacaagttacaactgatcgtgaccaagaacggtaaggcgggcatcaacttcgaacacaccggtgtggacggccacactgtgctgcggctcgccacagacatctacacagactcgatcctgagcttcgcacgcggtgtcaccaagaacgtcgtcgacatctttagcgacgacgatggaaaaccatcgtcgtcgtcgttggcctcggcggctcactccgccaacttgatcaccatccctcgtaaactggaatggcgcactgacaatttcctgcaatcgtcgctgcactttgccgagacgcgcatctcggacttgatctcgcaatacgagtttgttaatcttgacttctccaactacggcgcgtcccatatcaagacagtgttcaagtgctcgccagacgccttcgtgcagcaggtgttccaggtcgcatacttcgcgttgtacggccgcttcgagaccgtgtacgagcctgccatgaccaaggcgttccaaaacggccgcacagaggccatccgctccgtcacggcccaatccaagctctttgtcaagtcactactggaccaggatgcctcggacgccaccaagattcagctcttgcacgacgcctgtacggcgcactcgcaaatcacaagggaatgctcccagggtctcggccaggaccgtcacttgtatgcgctctactgcctctggaaccaatggtacaaggacaagttggagctcccacccatcttccgcgacaagtcctggactaccatgcagaacaacgtcttgagcacctccaactgcggtaacccctgcctcaagagcttcgggttcgggcctgtcaccgccaacggcttcggcatcggctacatcatcagagaccactccgtctctgtggtggtgtcctcaaggcatcgccagactgctcggtttgcgtcgctcatggaaaagtcgctgctggagatcgaccgcatcttcaaacggcaacaagctcgcgcagcaaaacccgctgccagagccactgctagcgccaacaccaaatcggaagacatgaaatacctgttgtccggctacgattacttcgacgtgagcgtgtccggttga

SEQ ID NO: 75383 - DNA, 81 bp, Saccharomyces pastorianus
atgagattaaattacagtcgctgctattatagtagccagcggcggcgccagtcacttccaaagcgttttcctcttatttag

SEQ ID NO: 75384 - DNA, 306 bp, Saccharomyces pastorianus
atggagatgctcttgtttctgaacgaatcatacatctttcataggtttcgtatgtggagtattgttttatggcactcatgtgtattcgtatgcgcagaatgtgggaatgcctattataggggtgccggggggtgccttgaaaaacccttttgcgcgcctgttaagtttccgttttcagtcaaaaagaatatccgaattttagatttggaccctcgttcagaagcttactgtctaagccatcatttggtgtgtcctaaacggtttccatgcaaagcaacatctttgttactcattcctgaaggttga

SEQ ID NO: 75385 - DNA, 591 bp, Saccharomyces pastorianus
atggttgataataggcgtacgtttacggcaccccaaagcttacttgaaacaaatcttacttttccgaatgatgaaccgtcacttactacaatcacagttacgcgagaaagatgtgttgatccaagcttgatagattcatttttgaggtttctaaggcatggaagtgatgatataataagacaaaaattaaacaactataggaaaggctctattaatggaaaaaataagtgtaaggaatttttgaagcaagaactatatccgaactggcaaatacggaataatataatttcattttgcgaaaaagaggcagcagagatgaagaacgagaccgatcagcagtgcggtaataataaaaagattactgcggaaccacttatagacgcaagaattgatccttacgctgcaagagaaagagcagagaaacaggaagctcaatataaggattggacgaaggtgacagagtgggtggcaaataatagaaaaatagaacaaattttaacttctacaacagagggcattttaaggcaaaactgcgagcaaaataatgactacttgaaggagtttacgcaattctgcaaggacaacagttga

SEQ ID NO: 75386 - DNA, 3033 bp, Saccharomyces pastorianus
atgtttaagaaaagcaggcatttgaagaatgtgtcaaatgctatcaaatccgcgagagttcatgacgtctcaaatggtattaactccaaatttttcgatactaagaaaatatgcacatacggcataaatggacgaatcactgttaccacattcgactatactcaaagccttttggcagttgcaactactgctggggagatacatgtttatgggcaaaagcaaatagaggtcgtatttacgttaaaaaatcgacctcaaattaaacacatgcggtttattaaaggaatttatctgatagctgtagatgagaagagcaacataatagttctttcagtacactcgaaacagattctaactactgttttctgtccaaacagcatcacttgtattgagactgatccgtccttggattggatgctgattggcctcgagagtggatccatattgatctatgatgtggatagaaatcaaatgtccaaattgaaaattgaaaacttccagaaaagcgtgtttttgccaaaagagaggctatcaccggttatttctatccaatggaatcctagagacataggaacgatacttatatcatatgagcatattacagtcatatattctttcattgactacaaagtcaagcaacattttttttaccaattagaaccgtatgctccgggcggtgatctatccacaaacatagaaaagaaacgcactccaaaggtcattcagtcactttatcacccaaattccttacatatattaactgtccatgaagataattccttggtattttgggatgtcaatagcggtaaactgattcaagctagaagtatatttgaaacacatgtgaattttccaaatcctgccttgaaagactgttcctttacagaaacacccgctatctttaaagtaagctggctttgccagcgtaatcctgagtatacatcgttgttgattgcaacaaaagctacagaaaatccctgtttacctcaggaaataaccatgattgacttaggcggcacaccaatgtattctgtgacatcatttgacgcaatgagcaagtactatgctaaaccggttcaacaaaaactattttcgttgattggcaaagctccactaataaattttctacccttgccgaaggcttctccatattttggtggatgccatgacacaaacctcattttattacttttagaagatggcgaacttgaaacattgatatacccagcaggctcttttagttccaaggcctccattttccctcggagcttagcatgggttcgaccaacggttactacttgtatagcgcaatcagttcaaaaaaatctttggctggggatgatgacaatcgctcaaagtgaatcgtttttaaaaggtggtattcctgccaccagaaatattagaaggcatgagaccagatctgctttactaactgggcatagtaatggttcagtcagaatatgggatgcttcacacagtgaagtaactgacaacgctgtatttgaagtgaatactgctaaagtacttaacagagctactaacctggccataaaaaatatctcctttgcatcggaaacattggaattggcggtatcatctgaggttggggatgttattcttttcaaattcgaaacaaacaagttttacggacaacttcccaaaagcgatgcattgcaattgaagtttagcagattttcattggatgattcaaaaactattttagttgatgtttcggatagagggcctacgaacgttaaacaaggctttataccaagtacggtaatacatgctaaaaaaggtgcggtgtccgcaatcatgaatagtaatatcgggttcgttgccgttggtttcattgaaggaaccttaataatattggacagaagaggcccggctataatcttcaatgaaaatattagggtcatttctaaaactggtagctcttacgtttcaaccgttcacttttgcgtcatggaatatggagatgatgggttctctagtattttgatgctatgtggaacggatatcggggaattgatgactttcaaaatactgcctgcaactaatggaagatttgaggttaaattcactgatgcaacaaagaccaacaatcaaggaacaattctaggaataaattcttttgccaaagatactggctacagttgttctgctactatatcaaagatgcagggtttaagcaagggtatcgcaatacctggatttgttactatcagtggcgcaaatgacattcgtttagtatcaccaggtaaatctaaggacactcatgcgcttttcaagtatccaattgccactagtggattatcatttattcccattattgacggtaaaggagaaagaaagctttcaactattatgatcgttttgctaattaatggagatattaaagttttgacagtacctgagcttaaggaagtcaaaaatctacgctgcccggtccctctaagcgctcaatacgttgaaaattcatctatattagaaaatggtgacattgtcattcgcacagggaaattccaagcctctttgatttcagtacttaatgaaagtgccaccggaacgaatcatactgctgacatatcacaacatactcctattgataccttgtacaatcctgatttaaagattggttataggcctcaagtgaattccttacaatgggctagaggaactatttattgcacaccatatcaacttgatgagctactgggcggtatagaaaggcccgaatcgaagtatgaggaaagcgcaattgctcgaggatgcatatcttccagtagtagtaatgcagccagaaagttacctcccggtacggaagatcacaggtatgccagacctgtaagaagctctggaagaagtaatggatatggtgtccttaaaagtgtttctagggcaattgaaactcgtttagacacggtagaaaccactattaatgactatgcaaccacaatgggacaaaccatgaatgacgcaatggaagaaacgggaagggatatgatgaagagcgctgtaggtttttag

SEQ ID NO: 75387 - DNA, 3456 bp, Saccharomyces pastorianus
atgagtttttcacaattggagcagaacattaaaaaaaagatagccgtcgaagaaaatattattcggggagcttctgccctcaagaaaaagactagcaatgttatggtcattcagaaatgtaatacgaatattagagaggcacgtcaaaatcttgagtacttggaggatagcttaaaaaaattacggttgaagaccgctcaacaaagtcagggtgaaaatggcagcgaagataatgagcgatgcaattcgaaggaatacgggtttctttctaccaaatcgccaaatgaacacatattttctcgtttggatttagtaaaatatgattgcccttctttggcgcaaagaatccaatacatgttgcaacaattagaattcaaattacaggtggaaaagcaataccaagaagccaatactaaattgactaaattgtatcaaattgacggtgatcaacgtagtagttctgcggcagaagggggtgctatggaatccaaatacaggattcaaatgcttaacaaagctttgaagaaatatcaagctattaacgttgactttgatcaatttaaacaccaacccaatgacataatggataatcaacaaccgaaattccgaagaaaacaactgactggcgttctaacaattggaataactgctgctagagatgttgaccatatacaatcaccgatgtttgccaggaagccagagagctacgttactataaaaatcgatgatacgatcaaagccagaacgaagccttctagaaatgacaggtggagtgaagattttcaaattccagttgaaaaagggaatgaaatcgagattaccgtatatgataaggtgaacgactcgctcattccagtggctataatgtggttactgctttccgatatcgctgaagaaattcgtaagaagaaagccggacaaacaaatgaacaacaaggatgggtcaatgcttcaaacattaatggtggttcttctctcgctagcgaagagggaagcacattgacttctacatactcaaactcagccattcagtctacttcagcaaagaatgtgcaaggcgaaaatacatcaactagtcaaatcagtacgaattcatggtttgtcttagaaccatccgggcagattttgttaacactaggattccacaagtcttctcaaatagaaaggaagcagttgatgggtggactacatcgtcatggtgctattatcaataggaaagaagagatattcgaacagcatggccaccactttgtacaaaaatcattttacaacattatgtgctgtgcatattgtggtgatttcctccggtatactggattccaatgtcaagattgtaaatttttatgtcacaaaaaatgttacaccaatgttgttactaagtgtattgctaaaacttctactgatacggatccggacgaggcaaagttgaaccaccgtattcctcatagattcctgcctacttcaaaccgtggtactaaatggtgctgtcactgtggttatattttaccatggggtagacataaagtacgcaaatgttctgaatgtggtataatgtgtcatgctcaatgtgctcatttggttcccgatttctgtggcatgtcgatggaaatggctaataaaattctgaaaacgattcaagacacaaaacgtaatcaagagaaaaagaagaggacagttccgtcggcacagttggggtcatctattggtactgccaatggtagtgatctttccccatccaaattagctgaaagggcaaacgctcctttgcctcctcagccaagaaaacatgataaaactccttcgcctcagaaggtaggaagagattctccaactaagcagcatgatcctattattgataaaagaatttcactacaaacgcacgggcgtgagaaactaaataaatttatcgatgaaaatgaggcctatttaaattttacagaaggtgcacaacaaaccgccgaattttcatcaccagagaaaacactggatccaacgtcgaatagacgttccttgggactcactgatttatctattgagcatagtcaaacttgggaatctaaagatgatttaatgagagatgaacttgaactgtggaaagcacaacgtgaggaaatggaacttgaaataaaacaagatagtggggaaatccaagaggatctagaagttgatcacattgatctagagacaaaacagaaactagactgggagaacaaaaatgatttccgtgaagctgatttgacaatagattccacacacacaaatccattccgcgatatgaatagtgaaacctttcaaattgaacaagaccatgcttcaaaggaagtactacaagaaacagtgtccttggctcctacaagtactcatgcctccagaaccactgatcaacaatctccgcagaaatcacaaaccagcacaagcgcaaagcataaaaagagagcggctaaacgtcgtaaggtttcattagataatttcgttttactcaaagttcttggtaaaggtaattttggtaaagttattttatctaaatcaaagaatactgacaggctttgtgccataaaagttctgaagaaagataatattattcaaaatcatgacatcgagagtgcaagagcagaaaagaaagtatttttgttagccacaaaaactaaacacccattcttaaccaatctatactgctcttttcaaactgaaaaccgtatatattttgctatggagtttattgggggcggtgacttaatgtggcatgttcaaaaccaaagactatctgtaagaagggccaaattttatgccgccgaggtcttactggctctgaaatattttcatgataatggtgtaatataccgtgatttgaagttggaaaacattctattaactccagaaggtcatataaaaattgccgattatggtttgtgtaaagatgaaatgtggtatggtaatagaacttctacattttgtggcacaccagaatttatggctccagaaattttaaaagagcaagaatataccaaagctgtcgattggtgggcatttggggtgctgctatatcaaatgctactgtgccaatctccattctcaggagatgacgaagatgaagtttttaacgctatccttaccgatgaacccttatacccaatagatatggcaggtgagattgtacaaatattccaaggcctattaacaaaagatcctgaaaagaggttgggtgctggtcccagggacgcagatgaagttatggaagaacctttcttccgtaacatcaactttgacgatatcttaaaccttcgcgtgaaaccaccctacatcccagaaattaaatctccggaagatacatcatatttcgagcaagaattcacctctgcgccacccacacttacacctctgccctctgttttgacaacgagccagcaagaagagtttagaggattttcctttatgccagatgatttggatttatga

SEQ ID NO: 75388 - DNA, 1461 bp, Saccharomyces pastorianus
atgatgaacaataacgaaagtgaggctgagaaccaacgtctactggacgaattaatgaaccagacaaaagtcctccaggaaactttagatttttcgttagtgacacccattccacaccacaatgatgattacaagatacacggaagtgcctacccaggtggtgagactcctgcccaacagcatgaaaaactctcatacatcaatacgcacaactctaacgataataataacttaatgggcagtcaagcgaggtccaattcacaaactcctacagcttcgaccatatatgaggaagcagaatcgcaaccgtcttacctggatgatatgtttagaacaagccaaggcggtagacctgtcactcaaaattccatatcttccatagggcagggtcccttgagatcatcttattctatggcttacgactcacctgtggatagagcaatgaatactccattacagcaacaagaaggcttaaaagctgagttaccacatgactttttatttcagcatggcaccgatgacacaatgtataacttaactgatgatttgagctcctctttatcttctagcatcaattctgatatgatgacaccaaacacatattcatcatcattttcttataatccacaaagcttgggcccagcatccgtatcttccacatattccccaaaggtaagatcaccatcatcgtcatttcgtgcaggaagtttcctttcatcttcttttaggcatggtagcataaacacacccagaacaagacacacttcaataagtagcaatatgactgaaaatataggacctggaagtgttccaaagattttaggcgtgttaacttctgatgagaaactgaggcgcaaaagagagtttcataatgccgtcgaaaggagaagaagagaattaataaagcaaaagataaaagaactcggccagttggttccaccatctttattgaattacgatgacctaggtaaacaaatcaaaccaaataagggtatcattttggatagaacggtcgaatatttacaatacctggccgaaattttagaaatacaagcacgaaaaaagaaggcgttattggcgaagataaaagaattggaagagaagaaaagttatgtcgcagcgttatctccttttaccaataaccaccatgccagttcggggcaaaataatagcgagaatagtgaggaaagaattatagatattagatctgtcccaaatgctttgatgaatgaacaaaatactaaggctgaattgcataattgggagccaccgttatatgattcggtcggtaaccacaatcatgctggcactatggagagtcatccacatacaaacattcatgaagaattaaaggagttcttatcaggcgatttgattgaagccgaagataatgcaaaattaatgtttggagatgacaactctaatccagctgactatcttttagaatttggttcggggtag

SEQ ID NO: 75389 - DNA, 648 bp, Saccharomyces pastorianus
atgagcgaggaaccaccttctgaccaggtcaatagtctccgtgactcattgaatcgatggaatcaaacaagacagcagaactcgcagggttttaatgaatctgcgaagacactgttctcaagctgggcggattctctcaataccagggcccaggatatatatcagacgttgcctgtatctagacaggacttggtgcaagaccaggagccgtcgtggttccaattgtcaagaacggaaagaatggtactttttgtctgttttcttttgggtgcaacagcctgtttcactctttgtactttccttttccccgttctagccgctaaaccaagaaagtttggtttactatggacaatggggtccctactatttgttcttgcgtttggggtacttatgggaccactcgcgtacttaaaacatttgactgcaagggaaaggctgcctttttcgatgttctttttcgccacatgcttcatgacgatttatttcgcagccttttccaagaacacggtgctgactattacatgtgctcttcttgaattagttgccgtcatttattatgctatttcatatttcccattcggtgcaacaggtttgaggatgttaagctctgctggtgtcaattcggcaagaggtgttctgcgcatctga

SEQ ID NO: 75390 - DNA, 3354 bp, Saccharomyces pastorianus
atgccgtttataacatcaagaccggtggcgaaaaattcatcccactctttatcagaaacagatttaaaccagtctaaaggacagccgtttcaaccctctcccaccaagaaattagggtccatgcaacaacgaagaagatcctccaccattaggcacgcgctatcatctttacttggtggcgctaatgttcactcacctgccgtcttgaacaacacaacgaaaggcggcaataataacggcaacatcagaagcagcaatacagacgcccaactccttggcaaaaaacagaacaaacagccgctgccagacgcaaggcgacacagtaccactgccatacagggctctatcagcgatagtgctactacgactccgagatcctcgacttccgacaccaaccgtcgcacttcgggaagattgtcggtagaccaagagcccagaatctctggggggcgctattcacagattgaggaggatagcacagtactagattttgatgatgaccataactcatcagctgtagtgtcaagcgatttatcatcaacttctctaacaaggttggcaaactcgaaaaagtttaacgagcaatttctcatagaatatttaaccgctagaggtctcctgggcccaaaaaccgttctatccaatgagtacttgaagatttctatttctacaagcggtgaaagcgttttcttaccaacgatatcctcgaatgacgatgagtatctgtccagactaaacggactcaatgatggtacggacgatgctgaggcggatttttttatggatggtatagaccagcaagaaggtaacactccatctcttgctacaacggcagcggctaccgaaagtggtggcagcataaatgaaaatagagacacactcctgagagaaaataattcaggagaccatccaggctccggctcggaacttaatacaaggtctgttgaaatcgacagttccatggtctcttacagcatagcagttatagtatccgttaaaaaaccaacccgatttacggacatgcaattggaattatgttcaagggttaaagtgttttggaatacaggtgttcctcctacaaagacgtttaatgaagaattttataatgctgcatcaatgaaatggaatttgaatgatgaaaatttcgatttgtttgtaccattaagcatatccccagatgatcaaatgattgaaaacaactccaacgatcgtcaaatgaggttgttcaagaatattcctacagaggagagactgtatttggacaagactaaaacaaaagccagccttttaaacgccatagacgtaaataagactcatctttaccaacctggagactatgtattcttagttccagtggttttctctaatcatattccggagactatctatttaccctctgcacgtgttagttacagactaaggcttgcaacaaaggcaatcaatagaaagggtttctatcgtcaagattcaaactctccgcaacccattgtgtcgccagactcttcttcatcactaagctccactacatcttctttaaaacttaccgaaacagaatccgctcaggcccataggaggataagcaacactttgtttagtaaagttaaaaatcatctacacatgagctcacatcaactgaaaaatgaagaatcaggagaagaggacattttcgcagagtatccaataaaagttattagaactccaccgcccgttgccgtatccactgcgaataaaccaatctatattaatagggtttggacagattctttgtcatacgagatttcctttgctcagaaatacgtgtcactaaacagtgaagtcccaatcaagataaaattggcaccgatatgcaaaaacgtttgtgttaaacgtattcatgtcagtattactgaaagagtcacatttgttagtaaaggttatgaatatgagtatgatcaaacagatcccgttgctaaagacccttataatccgtattatttagatttcgcctccaagagaagaaaggaaagaagtgtatcattatttgaaatcagaactaaggagaagggcacgagagctctaagggaggaaattgttgaaaattcattcaatgacaatctcttatcttatagtccttttgatgacgacagcgattcaaaaggtaatccgaaagaaaggctcggtataacggaaccaataattattgaaacaaaattgaagttccccaaatacgaagatttggataaaagaaccgcaaagataataccaccttatggtatcgatacatacacgagtatccccaatcccgaacatgccgtagccaatggaccctcacaccgtcgtcctagtgtaataggctttttatccggtcataaaggctcgaaaagtcatgaagaaaatgaaaaacctgtttatgatccaaaattccatcaaacaataatcaaatccaattctggtttgcccgtgaaaacacataccagattaaacacaccgaaaagaggcttgtacttggatagtttacacttcagtaatgtttactgtagacataagctggaaattatgctacgaatcagtaaacctgatcctgagtgtccgtccaaattaagacattatgaggttctaatcgatacgcccatattcctgctgtctgaacagtgcaacagtggtaatatggagttacccacatatgatatggccacaatggaaggcaaaggcaaccaggttcctctaagtatgaacagcgacttttttggtaacacatgtccacctccgccaacttttgaagaagccatatccgttccagcttctcccattgtctcaccgatgggatcacctaatatcatggcctcgtatgactctgatttactatctattcgacaattgaacttatcaagaactacgtcagttagtgggccatccggatacagcgatgatgccggtgtgccaaatgttaatcggaacagtatttcaaatgccaacgccatgaacggcagtatttcgaattccgcatttgtttcgggcaatagtggccaaggtgttgctagagcaagagcaacgtcagtgaatgacaggtcaagattcaataatctcgataaattattgagcactccatcgcccgtcaatagatctcacaattcatcaccaacaaatggcttatcacaagcaaatggtactgtgaggattccaaacgctaccactgaaaactctaaggacaaacagaacgaatttttcaaaaagggttacactttagcgaatgtaaaagataatgaagaacaagaaggaatagtaagttcgagctccgcagattcgctactctctcatggtaacgagcctccgcgttatgacgaaataatgcctttgatgagtgatgaagaatga

SEQ ID NO: 75391 - DNA, 120 bp, Saccharomyces pastorianus
atgagtcgttctattttttttttctcgtccctttttttgtcccctcttaacaaaattagaaatataggcgggaaagtggagaacccttggaagagtcagatcagagattgggaaaattaa

SEQ ID NO: 75392 - DNA, 1638 bp, Saccharomyces pastorianus
atgttggctcgtactgctgctattcgttctctatcgagaactctaattaactctaccaaggccgcaagacctgccgctgctgctttggcttccaccagaagattggcttccaccaaggcacaacccacagaagtttcctccatcttagaggaaagaattaagggtgtgtccgacgaggccaatttgaacgaaactggtagagttcttgcagtcggtgatggtattgctcgtgtttttggtttgaacaacattcaggctgaagaattggtcgagttctcctctggtgttaaaggtatggctttgaacttggagcctggtcaagtcggtatcgttcttttcggttccgatagactggttaaagaaggtgaattagtcaagagaaccggtaatattgttgatgttccagtcggtccaggccttttgggtagagttgtcgacgctttaggtaaccctattgatggtaaaggtcctattgacgctgccggtcgttcaagagctcaagtcaaagcaccaggtattttgccaagaagatctgtccatgaaccagttcaaaccggtttgaaagccgttgacgctttggtccctatcggtagaggtcaaagagagttgattattggtgatcgtcaaacaggtaagactgctgtcgccttagacaccatcttgaatcaaaagagatggaataacggtagtgacgaatccaagaaactttactgtgtttacgttgccgttggacaaaaaagatctaccgttgctcaattggtccaaactttggaacaacatgacgccatgaagtactctattattgttgcagctactgcatctgaagccgctcctctacaatacttggctccatttactgccgcatccattggtgaatggttcagagataatggaaagcacgctttgatcgtctatgacgatttgtccaagcaagccgtggcataccgtcaattatctttgttgttgagacgtcctcctggtcgtgaagcctaccctggtgatgtcttttacttgcattcaagattgctagaaagagccgctaagctttctgaaaaggaaggttctggttctttaactgctttgcctgttattgaaacccaaggtggtgatgtctccgcttatattccaaccaatgttatttccattaccgatggtcaaattttcttggaagctgaattattctacaagggtatcagacctgccattaacgttggtttgtctgtttctcgtgtcggttccgctgctcaagttaaggctttgaagcaagtcgctggttccttgaaattgtttttggctcaatacagagaagtcgctgcttttgctcaattcggttccgatttagatgcctccaccaagcaaactttggttagaggtgaaagattgactcaattgttgaagcaaaaccaatattctcctttggctacagaagaacaggttccattgatttatgccggtgttaatggtcatttggatggtattgaactatcaagaattggtgaatttgagtcctcctttttgtcctatctaaaatccaatcacaatgagcttttgaccgaaattagagaaaagggtgaattgtctaaagaattgttggcatctctaaagagtgctactgaatcatttgttgccactttttaa

SEQ ID NO: 75393 - DNA, 813 bp, Saccharomyces pastorianus
atgtccagaactattccatttctatttaaattagtcaacagggcagtaattttacctacggcaggttttacgttaggagttggtgcgtttgtaaaggcgtggcccgatgatgccggtgttctatcattgaatgatccgcaaacgccagcggagttgattagtgcgaccaagagccgccaacctatggagctgcagagggttgacatcctcgctcaaatcgagaaaagcgaggtttacaacaagttggcccaggatgagaagatgcaccatgtcttattcagtgagaaaataccaagcgggcatagggaatatcatgtaggacaaggcctcttgttcggcaaggggaagcttgaaattgatcctttggtgttccatgatgtgaatcacggtgaattaaccgtgatttatcacttaggtgctgagttagggaatcgagacggtaacgtccataagggcttgttgtcattgttgctggatgaagcattgtgctattgtggcttccctttgttgcctagtaaaagaggtgtaactgcaaggctgtcgctagagttttttgaggacattcctgtagatactacgattatactaaaagcaaacgtcaaagagattaaaggcagaaagtgtatcattgagggacacttggaacagtttccgttggaagtttcttctcgaaatggaactagaagttggaacttaccacatatttggggtttcaaccataagcaggagatagcaaaaaaatttgccaaggccaactgtattctcgttgaacctacttggttcaaatattttaaatggcttgatatgttttga

SEQ ID NO: 75394 - DNA, 333 bp, Saccharomyces pastorianus
atgctttttcaaaacatatcaagccatttaaaatatttgaaccaagtaggttcaacgagaatacagttggccttggcaaatttttttgctatctcctgcttatggttgaaaccccaaatatgtggtaagttccaacttctagttccatttcgagaagaaacttccaacggaaactgttccaagtgtccctcaatgatacactttctgcctttaatctctttgacgtttgcttttagtataatcgtagtatctacaggaatgtcctcaaaaaactctagcgacagccttgcagttacacctcttttactaggcaacaaagggaagccacaatag

SEQ ID NO: 75395 - DNA, 663 bp, Saccharomyces pastorianus
atggcttctagagtagacgaaactacagtcccctcatactactattacgtggatccggaaactacatatacgtaccaacaaccaaatcctctacaggacttgatatcggtgtatggcttggatgacatctccaggcaagtggcaagaacaaatttggacggcactaaagccgtgaagctaagaaaatcttacaagaaccagatagcagatctttcaggtaaattctccaccataccgaccagagaaaatggtaaaggtggtcaaatagcacatattcttttccaaaataacccagacatgatgatacaaccacctcagcagggtcaaaacatgtcagagcaacaatggcgcgaacagctgcgcaatagagacatagcattgtttcagcctccaaatttcgattgggacctttgctcttcggtactatcgcagtttgaaaggtcatatccaagcgagttcgcaaaccagaaccaagggggagcccaagcgccgtttgatatagacgacttggcgtttgatctagacggtacaggaaaaagccaatccggctcaaattcaggtaacaatagtaagaaaaggaagaacaaatctagtggaagttcgatggctacaccaacacatagtgacagtcatgaggatatgaaaagaaggaggctggagtag

SEQ ID NO: 75396 - DNA, 393 bp, Saccharomyces pastorianus
atggcctccttacctcacccaaagattgtcaagaagcacaccaagaagttcaagcgtcatcactctgaccgttaccacagagttgctgaaaactggagaaagcaaaagggtattgactctgttgttagaagaagattcagaggtaacatctctcaaccaaagatcggttacggttctaacaagaagaccaagtttttgtcaccatctggtcacaagactttcttagtcgctaacgttaaggatttggaaaccttgaccatgcacaccaagacttacgccgctgaaattgctcacaacatctccgctaagaacagagttgtcattttggctagagctaaggctttgggtatcaaggtcaccaacccaaagggtcgtttggctttggaagcttaa

SEQ ID NO: 75397 - DNA, 300 bp, Saccharomyces pastorianus
atggaccaaaaacgagacaaattcttgatcgttacacttcctatcccggcagcttaccaaaacgtggaggatggcgagctgttgtccgattggcctaatctggaagagcagtacaaagatgacatagtcttcaagaagatcaaagtatttcactccgtgttaccgaaaagaaaaccgtctggaaaccacgatgcagaatcagcaagagcgccatcagcaggtaacgggcaaagtctgagttccagagcattgcttatcatcgccgttatcgcattgctcgtcggctggatatactactga

SEQ ID NO: 75398 - DNA, 1266 bp, Saccharomyces pastorianus
atgacagacgctgaaatagaaaattcccctgcttctgatttaaaagaattgaatttggagaatgaaggcgttgaacagcaagaccaggcaaaagctgacgagtcagacccagtagaaagcaaaaagaagaagaacaagaaaaagaagaagaagaaaagcaatgtgaagaagattgaattactgtttccagatggaaagtacccagaaggtgcgtggatggactatcatcaagatttcaatctgcaaagaaccacggatgaagaatcacgttatttgaaaagggatctggaaagggccgaacattggaatgatgtcagaaagggtgctgagatacatcgtcgtgtgagaagggccatcaaggacagaatcgttcctgggatgaagttaatggatatcgcagacatgatcgaaaatactacaagaaagtatacaggtgccgaaaatttattagcgatggaggatcccaaatctcaaggtattgggtttccaacgggtctctctctcaaccattgtgctgcacatttcacacccaatgcaggcgacaaaaccgttctgaaatacgaagacgtgatgaaggtagattatggtgtgcaggtaaacggtaacatcattgattctgcctttactgtttcctttgatccacaatacgataacctgttagccgctgtaaaggacgctacttacacgggtattaaagaagcgggtatcgatgtgagattaaccgacatcggtgaagccatccaagaagttatggaatcctacgaagtggaaatcaatggtgagacttaccaggttaaaccttgtcgtaatctatgtggccacagtatcgcaccatatcgtatccacggcggtaaatccgttcccatcgtcaaaaatggggacactacaaaaatggaggaaggtgagcactttgccattgaaacttttggttctactggtagaggttatgttactgccggtggggaagtttctcattatgccagatctgctgaagaccatcaggtaatgcccacgttggacagcgccaagaacttgttaaaaacgatagaccgcaactttgggactttaccgttctgtcgccgatacctagacagacttggccaagagaaatacttatttgcgttgaataacttggttagacacggtttagtacaggattatccaccattgaacgatatccccggatcctacactgcacaattcgaacacaccatcttgttgcatgctcacaaaaaggaagtcgtttcgaaaggtgatgactactga

SEQ ID NO: 75399 - DNA, 534 bp, Saccharomyces pastorianus
atgttgaagagcacgctgaggctttcaagaatctctctcagaagaggtttcacaacgatcgattgtttacgccaacaaaattcggatatcgataaaatcatactaaatccaatcaaattagctcagggaagcaacagcgatcgtggccaaacctctaaaagcaaaactgataatgcagatattttatcaatggaaattccaatagacatgatgcaatctgctgggagaataaacaagagggagcttctatccgaggcggaaattgctagaagtagcgtggagaatgcacaaatgagattcaattctggaaaatctataatcgtgaataagaacaaccctgcagaatcattcaagagattaaacaggatcatgtttgagaacaatattcccggagataaaagaagtcaacggttttacatgaagccggggaaagtggctgaattgaagagatctcaaaggcataggaaggaattcatgatgggcttcaagaggttgattgaaattgttaaagatgccaagaggaaaggatactaa

SEQ ID NO: 75400 - DNA, 1530 bp, Saccharomyces pastorianus
atgcgtaactatttagttaaatttttgtatattttttattctatgacttcacttatccattatttccatcgtcagaaaaaggaaataaatactgttgctcgaacgaacagcaagataaagtggaaacgaaaagtaagcagcttcctcaatatgccgtcaaacgtacgttcgggagtcttgactttgctccatacagcatgtggagcaggcgtacttgcaatgccgtttgcattcaagccatttgggttaatgcctggtctgataacgctaacattttgcggaatatgttccttatgtgggctgctattacagactcgaatagcgaagtacgtacctaaatctgagaacgcctcgtttgctaaactcacccaactaatcaatccgtcaataagtgtagtgttcgattttgccattgctgttaaatgttttggcgttggtgtatcttacttaattattgttggtgacttagtgccacagatagtgcagtcaattttttatcgtaacgatgataacatgagtggttcgcaagagcatcacatgttcttagacaggcgtttgtatataactctgatcatggtgtttgttatctcccctttatgctttaaaagaagtttgaattctctacgatatgcttctatgattgccattgttagtgtcgcatatttatctggtttgattatttaccattttgtaaatcggcatcagctagagagagggcaagtatattttatggtacctcacggagattctcagtctcattctcccctgactacattgccaatttttgtgtttgcttacacttgtcaccacaatatgttcagtgtaattaatgagcaagtggataagagcttcaaggtaatcaggaggattccgatttttgccatcgtgttggcctattttttatacatcataattggtggtacaggttatatgacatttggtgagaatattgtaggaaatatcctcactttatacccgaattccatctccaccaccatcgggaggttagcaatgctgctattagttatgttagcatttccattgcaatgccatccttgcagatcatcggtaaaaaacataattatattcattgaaaatttcagaaaaggtaagttatacgataacagagctagctttattccattggacaactttaatagtgaagatccgcaggaggagccaacccaacaaaacaacgaagagccaaatctgcgtagtgagtctttacggcatatcaatattatcaccctttgtatcttactgttctcatatctactggctatttcaattacgtctctagcaaaagtcctagcaatagttggtgccacgggatctacgtcgatttctttcattttgccaggcctttttggttataaattaattggctcagaatttatgggcacgaatgaaagagtaccgacaagcataaaaatattcaaatacttaagtttatctctattcatctggggaatagcagtaatggtagcttcactatcagcgattgtatttttgggcacatcatcgcattga

SEQ ID NO: 75401 - DNA, 8364 bp, Saccharomyces pastorianus
atggaggatcatgggattgtagaaactttaaactttctatcatcaacaaaaatcaaagagagaaacaatgctttagatgagctaacaacaattttaaaagaagatccggaaaggataccaaccaaggccctatctacaacggcagaagctttggtagagttacttgcatctgaacacacaaaatactgtgagcttcttcgaaacttgacagtgtcaacgacaaacaagctatcacttagtgagaacagactctccacgatatcgtacgttttaagattatttgtagaaaaatcatgtgagagatttaaagtgaaaacgttgaagttacttttagcagtagtacctgaattaatggtcaaagatggttccaaaagtttattggatgccgtttcagtacatttatcgtttgctttggatgccctaattaaaagtgaccctttcaaactgaaattcatgatacaccaatggatatccttagtcgataaaatttgcgagtactttcaaagccaaatgaaattatctatggtagacaaaacattgaccaatttcatatcgatcctcctgaatttattggcgttagacacagttggtatatatcaagtgacaaggacaattacttggaccgtaatagattttttgaggctcagcaaaaaagaaaatggaaatacgagattaataatgtcattaataaatcaattaattttgaagtgccattgttttagtgttattgatacgctaatgcttataaaagaagcatggagttacaacctgacaattggctgtacttccaatgagctagtacaagaccaattatcactgtttgatgttatgtcaagtgaactaatgaaccataaacttccttatatgattggtcaagagaattatgttgaagagcttcggtccgaatctcttgtatctctataccgtgagtacattctactgcgcttaagtaattataagcctcaattatttaccgtaaaccatgtggaattctcatatattcgaggttcaagggataaaaattcatggtttgcattacctgattttagacttagagataggggaggcagatcggtgtggttaaaaatactcggaattaccaaatcattgttaacatattttgcattgaacagaaaaaatgaaaattactcattattatttaaaagaagaaaatgtgattcggatataccttctatcctacggatttctgacgatatggacacatttcttattcatcttttagaggagaacagctcacatgagtttgaagtgctaggattacaattgtgctcattttatggaactttacaagacttcactaaaagttttgcagaacagctgaaagaacttctgttttcaaaattcgaaaaaatccaatgctttaattgggtttgtttttcttttattcctttattatcccaaaaagaatgcgaattaagcaatggcgacatggcacgcctatttaaagtttgcttaccattagtaaaatcaaatgaatcttgccagttaagttgtcttttattagccaactccataaagttttcaaagcagcttttatccgatgagaaaactatcaatcagatatatgatctttacgaattatccgatattttgggtcccatattagttactaatgaatcgttcatgctatggggataccttcagtacgttggtaaagacttccaatctatgaacggtatatcgtccgctgatagaatttttgagtggctaaaatcaaagtggaaccagttgcgcggaactgatgctaaacaggatcagttctgcaattttatatcctggttaggtaacaaatatgacccagagaaccctttcaacgataaaaaaggcgaaggagctaatcctgtctcactatgttgggatgaaagccacaagatttggcaacattttcaagagcagagggaatttcttttaggcgtaaaaccagaagaaaagtcagaatgttttaacactcccttttttaatttaccaaaagtttccttagacctcacacgttataatgaaattctttacagattactggaaaatattgaaagtgatgcattttcgtctccactacaaaaatttacttgggtagcaaaattaatacaaatagttgataatctttgtggagattccactttttctgagtttattgcagcatataagagaacaaccttaataactattccacaacttagttttgatagcaaaaactcctaccaatcattttttgaggaggttttatcgatacggaccataaatgtagaccatttagtgcttgacaaaattaatatgaaggaaatcgttaatgattttatcaggatgcaaaaaaacaaatctcaaacaggaacttctgccatcaattacttcgaagcctcttcagaagacactacccagaataatagtccttacacaattggaggtagatttcagaagcctcagcactccactatagataaagcagtgcgagcttacctatggtcttcaagaaataaatccatttcagagcgtttggtagccatattggaattttctgattgcgttagcacagatgtatttatatcttatcttggcactgtttgccagtggttaaaacaagcaatcggggagaaatcttcttacaacaaaatcctggaagaattcactgaagtcttgggtgaaaaattgctttgcaaccactatagttcttccaatcaagctatgcttttacttacatcttatatcgaagcaataagacctcaatggttatcttaccccgagcagcctttgaattcggactgcaatgatatcctggactggatcatatcaagatttgaggacaattctttcactggtgtggcccctacggtcaacctttctatgctgctgcttagcctacttcaaaatcatgatctttcccacggatcaatcagaggtgggaagcagagagtctttgcaacttttattaaatgcctgcaaaagctagactcctccaatattattaacataatgaacagtatttcgagttatatggcccaagtgagctataagaatcaaagtatcatattttatgagattaagagcttatttggtccgcctcagcaaagtattgaaaagtccgctttctactctcttgcaatgtccatgttgtctttggtgtcttacccaagcttagttttttctttggaggatatgatgacatactctggcttcaatcatactcgtgcgtttatccaacaagctctgaacaaaattacggtcgcttttcgctaccaaaaccttacagagctcttcgaatattgtaagtttgatttgattatgtactggtttaacagaacaaaagtccctacttctaaattggagaaagaatgggatatatctctttttggatttgccgatattcatgaatttttaggaagatactttgtagaaatttctgcaatctacttttctcaaggtttcaaccaaaaatggatcttagacatgttacacgcgattactggaaacggtgatgcttatctggtggataacagctattacttgtgtattccacttgcctttatcagtggcggtgtgaatgaactaatatttgatatattgccccaaatatcaggtaaaacaacagtaaaataccataaaaaataccgtctactgatgttaaagtggatcataagatttactgatttgggctcacttactgaacttagatcgactgttgaaaaattattcccaacttcatacctttcgccatatttatttgaaaattccagtgtttcaatgaggtatcaatacccacttcatatacccttggcattaggagcaaccttagttcagacgcagtttgctcatgaaaagaacaacacacagaaattcaagcttttgtttttatcggttattacagaccttgaaaagacatcgacttacataggaaaactgcgatgtgcaagggagttaaaatatctttttgtgttgtatgagaatgtacttgtaaaatcatcaactttaaacttcatcataattcggctttcaaaattcttaatagatacacaaattcacgatgaagtaataacaattttcagctcattgttaaatctggctgacaaaaatacgtttgaaatagagccatctctgcccaatttattttgcaaaatattcatttatttgagggaaaacaaacagctcagtccatccttccagcaggctataaagctattagagcatcgggatctcatcaaaataaaaacttggaaatactgccttgatgcaatattcggaaatatagtccaagatgatatttatgaaaatacggaacttttggatgctagtgattgtggcgtagacgatgttgtattggtttctttactcttttcttatgccaggagaccggtagcttcaaaaatcggttgttcgctttccaaagctgctgcaattaacattttgaagcaccatgttccaaaggaatatttgagtaaaaacttcaaactatggttcgctgctctttcaagaagaattttacagcaagaagttcaaacagagagatctacaaactttaataatgaagttcatttgaaaaactttgaaatggtatttcgtcatcccgaacaaccacatatgatataccaacgtatttcaaccttcaataaagaagctgagttacatgattctactgaagtgttttttatttctgagtgcattctaacgtacctagtgggctactcaatgggaaatagcgaaagtgaattttgttttagggataacataatgaacgagaacaaagataaagttgctccattggataaggatgtactgaatgctatatacccgttggcaaacaattttgggatggaatcattcatatgcgatacttatttgtcagtgaacgaaccctacaactgctggctaagcaaattcgcccgtagtttgattcaccaaatatcatttaatatacctcctattgtttgcttgtatcctttatgcaaaggatcaacagctttttgtgaattagtacttactgacctcttttttctttcaacgacttatgatccgaaaagctgtttgaattggagcaatcgaatattcactcaaatatcaatgttgctgcatgttaaagattctgagataaagctaaaaatgcttttcaatgtaattaaaatgattaggatgggttctagatgcaaggaacgaaactgtctgcgcatatattctagcttagatttacaagaaatatgtcaaatttctcttaaaatagaagagttcaagtttggctatttgttatttgaggaaatgaacatgccaaacataagagaaatgaatataaatacacttcagaagatttacgaatgcataaatgacggcgattttttagcaggtttacctgttccacactcaatagagggtgttttaaactctatcaatagaattgactcagatacctggaaacgttttcttttcaacaacgccgattttgatgccaattacactacttcactagaagaggaaaaggaatcattaatcaaggccacagaagatagcggtttctacgggttgacaagcttattggaaagtggactttctggatccagtgatgtctacaaatggaatgtagaattgggagactggaaactattgactccaaaagttgttgattccaaagccaaaggtttatactatgccataaaaaatttaccacaggacgttggttttgctgaaaaaagtttagaaaaatccttattaactatttttgattctcgacaacattttattagccaaactgaatggatggatactctgaacgcgattattgaatttataaaaatagcagcaatccctcaggacgttacttccttcccgcaaacattgatgtctattatgaaggccgataaggagagactgaatacaatagacttctatgatcacaaaacaacgttaaagagtagacatactttaatgaatgtgctctcgaggaattcattagatgaaaacgtaaaatgctcgaaatatttacgccttggatccattattcagcttgctaattacgttcagctggcaattgccaatggtgcgcctcaagatgcgttacgaaatgccactctaatgagcaaaacagtgaagaatattgcaaaattatacgatgatccctctgtagtatctcaaattgagaaattggcaagtttcacatctgctaatgccctctgggagtctcgagagtacaaggcacctgtaatgataatgagagatcttttagctcaaaatgaggagaatattagcgaaagtatcctttatgacgattttaagctactcattaatgtgcctatggaccaaattaaagctcgactagttaaatggagctcagaatcaaggcttgaatcagctgctgcaatatatgagaaaatcattgtcaattgggatataaatgtcgaagatcatgaatcatgttctgatgttttctacacactcggaagttttctggatgaacaggcacaaaagttacgatcaaatggagaaatcgaagatagagaacataggtcatatactggaaaatctaccttgaaagctttggagctgatatataaaaacacaaaattaccagaaaatgaaagaaaagatgcgaaaaggcattataatcgtgtcttgctacaatataatagagattctgaagtactaaaggcactgcttcttcaaaaagaaaaatttttatggcatgcactccatttctatctcaataccttagttttcagcaacagatatgataatgacattattgataagttttgtggtttatggttcgagaatgatgacaatagcaagatcaatcaattactatataaagaaattggaacaataccgagctggaagtttttgccctgggtcaatcagattgcgtcaaaaatatctatggaggagaatgaatttcaaaagccattgcaactaaccatgaaacgacttctttacaaactaccgtatgactccctttattcagtgatgagcatactactatatgaaaagcaatccaataaggacaccaacatatcccaaaaaattcaagctgtcaaaaagattcttttagaattgcaaggatatgacaggggtgcctttgcgaaaaagtatttacttcctgtgcaagagttttgcgagatgtctgtagagttagctaatcttaagtttgtgcaaaatacgaagacgttacacttagctaatttgaagattggccaatattggctgaaacagctaaacatggagaagcttcccctaccgaccagtaattttacagtcaaaagttctgctgatggaagaaaagcccgcccttatattgtatccgtcgatgaaacagtaggcattactaccacaggattgtccctgccgaaaatagtcaccttcaacatctcagatggtacaacgcagaaagctttgatgaaaggaagtaatgacgatttgagacaagatgcaattatggaacaagtgtttcaacaagttaataaagttctacaaaatgataaagtattaagaaatctagatctgggtattagaacatacaaagtggttccattaggaccaaaggcaggaatcattgaatttgtcgcaaattctacatcattacatcaaattttgagtaagctacataccaacgataagataaccttcgatcaggcaagaaaaggcatgaaagcagttcaaacaaaatcaaatgaagagaggctgaaagcttatttaaaaatcactaatgaaataaaaccgcagttaagaaactttttttttgattcctttcccgatccgttggattggtttgaagctaagaaaacgtacacaaaaggtgtcgcagctagctctatcgttggatacatattaggcctcggtgataggcacttgaacaatatcctgcttgactgctcaacaggggagcctattcatatagacctgggaattgcgtttgatcagggaaaattactccccattccagagttggtccctttcagattaactagagatatcgttgatggatttggagtcacaggcgtggatggcctattcaggcggagttgtgaaagagtttacgcagtattaagaaaagattatgtcaaggtgatgtgcgttttgaatatcttaaaatgggatcccctttattcctgggtaatgtcaccagttaaaaaatacgaacacttatttgaagaagaacatgaaattacaaatttcgataacgtcagcaagttcataagtaacaacgacaggaacgaaaaccaagagtcttatagggcccttaaaggtgtagaagagaagcttatgggtaatggactaagtgtagagtctagcgtacaagatttgattcagcaagccacggatccatcaaatttgagtgttatatatatgggatggtcacctttttattaa

SEQ ID NO: 75402 - DNA, 1401 bp, Saccharomyces pastorianus
atgccatttaatcataatagcaaggcaaaaagaccaaagtttctactggacctgcaaatcaaagaattggtaaatattcctcaatcttctggctattgctacacgaaatggcgtttgaaggatggaacaggtacgtcgggacacaaagtggctctggacggtgagcatcaaaccacttcgacccagagtagaggtacaacaaaacacgtgcatgtgcaacatcatagagcacaatggaattattcattagacaaaccaatcctggtgaagctccacttggataaaaacggcagattcttgaagaaaattttggtgttggatgttttttttgagtttgctgatgcgaattcctcgttgacttctagttctagtcccaatggcaaagtgaagaaaacgacctatgctaacgccactgcactaacggccacaggaaacaattcatattctcaaaagataacgggtaaacttctattgggaacagtagacatagatataacagaatacgtcaaagaagacgaaactcccacaacaaacagatttctcctaaagcactcaaaggtcaattctataatcaacgtctcattgcagttgaagctagttagaggctcttacgaagatttcaacatttccaaatcgtttactaatggccagctcgctaattacaggccaggaataaatactatactggataacacgtctgaactatctagccccacatcaacaacaaaccagatgtcacccaagaatacattctccaattttaacggtattggaacaactgtagcgaaacccggtacaaatgcgacaggaaacagcacaagtattaaatcaccgacttctaccaaccacaagagtagcgaaatgacaacaaagccagggctgtcaacaacaatatcttcctctatgagcccactgattgagagcttgtaccagaaaacgtttaaattaccgtgggatcctcgaccaggtgaatttacgccaagagaatgcgtggaagatattttacaaggcggaaacggttgggctaagaacgagaagggcataaatttaatcgatttacaggcattgagattgaacgaaatggaagaagagtactacaatccaaattatggcaataaccttgggaacaaggcaagtagttggcctccaaatccaagcgatgacggctacagcacaatgggcaaaagagagtatttggagaaaaagcagaattggagtcatatgtcacgagcacaacgtgcaaaactgaggactcataatgacgaggataacgaaaatacggctaatgataaagggagcgacaaggataataactctgtcgaagacaataaccccacggactttttaacagatagaataagagaaaacaaaaactggtctataataaccccatcgggctag

SEQ ID NO: 75403 - DNA, 2943 bp, Saccharomyces pastorianus
atgagtctcgaaggaaataccctaggcaaaggggccaaatcttttcctctgtatattgcggtaaatcagtactctaaacgaatggaggacgagctcaatatgaaaccaggtgataaaattaaagtcattactgatgatggggagtacaatgacggctggtattatgggcgcaatttgagaaccaaagaggaaggtttatacccagcggtatttaccaaaagaatagcaatagaaaaaccagagaacctgcacaaatcaccaacccaagagagtggaaattctggcgttaaatatggaaatttaaatgattctgcgagtaacataggtaaagtctcctcgcatcaacaggagaacagatatacatcattgaaaagtacaatgagcgatatagacaaagccttggaagagctaagaaatggttcagttgaacaagaggtatcaaaatcgcccacacgcgtgcccgaagttagcactccacagttgcaagatgaacagactttgattcaagaaaaaaccagaaatgaggaaaacacgacacatgactcgttattttctagcacagcggatttaaacttaagttctgaatctttgaagaatataagtaagtcaaatatatcaacaaaatccctagaaccgagttcggaatcagttcgtcaattagatttgaaaatggctaaaagttggagcccagaagaggttactgattactttagcttggttggatttgatcaatccacttgcaataaattcaaagagcatcaagtctccggaaaaatactactggaattagaactggaacacctaaaagaattggaaataaattcttttggtataagatttgagatattcaaagaaataaggaacatcaagtctgcaattgattcgtcgtcaaataaactggacgccgactactctacctttgcttttgaaaaccaagctgcccaactaatgcctgcagccactgtaaatagagacgaaatccaacaacaaatttcctccaagtgtaacaagttgtcaagtgaaagctctgatagaaaatcatcttcggtcaccacagaattgcaaagaccaagctcggttgttgttaatcccaattttaaacttcacgacccagctgagcagatcctagatatgacagaagttcctaatttgtttgctgataaagatattttcgaatcaccgggaagggctccaaaaccaccatcatatccaagtccagttcaacctccacaatcgccctcttttaataacaggtacacaaataataacgcaaggtttcctcctcaaacaacatatccacctaaaaacaagaacccaaccgtttattcaaatgggctaattccaaattcttcgacatcttccgataattcaacgggcaagttcaaattccctgccatgaatggtcatgactcgaactctaggaaaacaacactgacatctgctactataccttctattaacacggttaacacagatgaatctctacccgcaatttcaaatatatcttcaaatgctacatctcatcatccgaacagaaattccgttgtttacaataaccataagaggacggaatccggaagctcatttgttgatttgttcaacaggatttcaatgctatcgccagtcaagtcaagtttcgacgaagaagaaatgaaacaaccttcaaaagctagcagagcagtttttgactcagcacgcagaaagtcgtcttacggacattcaagagatgcctcactttctgaaatgaaaaagcataggagaaactcttctatattatcttttttttcttcaaaaagtcagtctaatccaacgtcaccaaccaaacaaactttcactatcgatcccgcaaagatgacttcccattctcgttctcagtcgaattcctattcgcatgcaagatcacaatcttactcccatagtagaaaacactcgttagttaccagccccttgaaaacttctttaagccctataaattccaaatccaatattgctttagcgcatagcgaaactcctactagtagtaataataaggaggcagtatcacaaccaagtgaagggaagcacaagcacaagcacaagcacaagagcaagcacaaacacaagaacagtagctccaaagatggctcttccgaagaaaaaagcaaaaagaaattatttagtagcaccaaagaatcatttgtaggaagcaaggaattcaaaagatctcccagtgaacttacccaaaaatctaccaaatcgatacttcccaggtcgaatgctaaaaagcaacaaacatctgcttttaccgaaggtatacgctctatcacagcaaaggaatctatgcaaactgcggactgttcaggctggatgagcaaaaaaggtaccggtgctatggggacttggaaacaacggtttttcacacttcatggaacaaggctttcttattttacgaataccaatgatgagaaggagcgtggcctgatagatataacggcacatagggtcttacctgccagtgatgatgataggctcatttccttatacgctgcgagcttaggaaaaggaaaatactgtttcaaattggtccctccgcaaccggggtccaaaaagggactaacctttacggaacctcgcgttcactattttgcagttgagaataaatctgaaatgaaggcatggctgtcagccataataaaggccactattgatatcgatacaagcgtccctgtcattagttcatatgccacaccaacgatacctctaagcaaggcacagacgctattggaagaagctaggttacaaacccagttaagagatgctgaagaggaagagggaagagatcaatttggatgggatgacacccaaaataaaagaaattctaattatccaatcgaacaagatcaatttgagaccagcgattacctggaaagttcagcatttgaataccctggtggcagactttga

SEQ ID NO: 75404 - DNA, 2241 bp, Saccharomyces pastorianus
  modified_base (1091)..(1141): a, c, g, t, unknown, or other
atggcggtaaatcctgagttagcaccgttcaccctctcgagaggaatccccagctttgatgatcaagctttgagcaccatcatacagcttcaggactgcattcagcaggctattcagcagttgaactacagtaccgcagagtttttggccgaactgctctatgctgaatgctccattctcgataaatcaagtgtttactggtccgatgcggtatatttatatgcactttcgctgtttctgaataaaagctaccacactgcgttccagatatccaaagaattcaaggagtatcatcttggtatcgcttacatattcgggcgttgtgctttacagctttcgcagggagttaacgaagctatcctcactcttctctcaataataaatgtattttcttcgaacagcagtaatacgcgcataaatatggtgttgaattctaatctcgtccatattcccgatttggccactttgaattgcctgttaggcaatctttatatgaaactggaccattctaaggagggagcattttatcattctgaagcattagccattaatccttacctttgggaatcttacgaagcaatttgtaaaatgagagctaccgtggatctcaaaagggtttttttcgacattgcagggaaaaaaagtaatagtcataataataatgcagcttcatcgtttccgtctacatcactatcgcatttcgaacctcgttcacaacctagcttatattcaaaaacaaacaaaaacggcaataataatatcaataataatgttaatacactgtttcagtcgtctaattctcccccttctacatcggcatcttctttttcttccattcagcatttctcaaggtcacagcagcaacaagcgaacacatcaataaggacctgccagaacaaaaatactcaaactcctaaaaaccctgcaatcaacagtaagacgtcttctgcgctaccaaataacatttccatgaacttagtgtctccatcctccaaacagcctacaataagctcgttggccaaagtttataacagaaacaaacttttaacgactcctccatcgaaactgttaaataacgataggaaccaccnnnnnnnnnnnnnnnnnnnnnnnnnnnnnnnnnnnnnnnnnnnnnnnnnnncaactttcaaaactccaagaaacctatattcctcaacaggaaggttaacaacttccaagaaaaatccaaggtctttaataatcagtaactcaatactaacgagtgattattcaattacgctgcctgaaatcatgtataatttcgctttaatattaaggtcgtcatcacaatacaattcgttcaaggcaataagactgttcgagtctcaaatcccatctcatattaaagacacaatgccatggtgtctagtgcaattaggaaaacttcattttgagatcattaattatgatatgtccttaaagtatttcaatagattgaaagacctacaaccagcaagggtaaaagatatggaaattttttctactttgctgtggcatttgcatgacaaggttaaatcttcaaatttggcaaatgggctaatggatgcaatgcctaataagcccgaaacatggtgttgtataggtaatttgctatcattgcaaaaggatcatgatgccgcaataaaagccttcgaaaaagctactcagttagacccaaattttgcatacgcgtatactttgcaaggtcatgaacattcttccaacgattcttcggattctgccaagacatgctatagaaaggcgctagcttgtgatcctcagcattacaatgcatattacggattgggtacgagcgctatgaaattaggtcaatatgaagaagcgttgttatattttgaaaaggcaaggtcaattaatcccgtcaatgttgtgttaatctgttgttgcggtggttctttagaaaagctgggctataaggaaaaggctctacaatattatgaactagcatgtcatttgcaaccgacttcctcgctatccaaatataagatgggccagttgctctattccatgacaagatataatgttgctttgcaaacttttgaagaattggtgaaactcgttcctgatgatgccacagcccattatttgctgggtcaaacatatagaatagttgggaggaaaaaagatgcaatcaaggagctaactgttgctatgaatttggatccaaagggtaaccaagttatcatcgatgaattacaaaaatgtcatatgcaagaataa

SEQ ID NO: 75405 - DNA, 426 bp, Saccharomyces pastorianus
atggtcttccctgtgccatccgctgaggaaaaatgcagtgctcaatgccaatcccgccaagactattccattcgttctaatcgcatccaacttcatcggcgtcctattttcaaggtccctccactaccagttcctatcctggtatcactggactttgcctatactgatcttttggtcgggaatgcccttcttcgttggtccgatttggtacgtcttgcacgagtggtgctggaattcctatccaccaaactcacaagcaagcacgctattgttggcattgaatactgttctgttgcttctattggccttgacgcagctatctggttcggtcgccctcgccaaaagccatcttcgtaccaccagctctatggaaaaaaagctcaactgaaacagatgtataaatatcatatagtcgtattgttttaa

SEQ ID NO: 75406 - DNA, 1377 bp, Saccharomyces pastorianus
atggaaggtgaacagtctccgcaaggtgaaaagtctctgcaaaggaagcaatttgtcagacctccgctggatctgtggcaggatctcaaggacggtgtgcgctacgtgatcttcgattgtagggccaatcttatcgttatgccccttttgattttgttcgaaagcatgctgtgcaagattatcattaagaaggtagcttacacagagatcgattacaaggcgtacatggagcagatcgagatgattcagctcgatggcatgctggactactctcaggtgagtggtggaacgggcccgctggtgtatccagcaggccacgtcttgatctacaagatgatgtactggctaacagagggaatggaccacgttgagcgcgggcaagtgtttttcagatacttgtatctccttacactggcgttacaaatggcgtgttactaccttttacatctaccaccgtggtgtgtggtcttggcgtgcctctctaaaagactgcactctatttacgtgctacggttattcaatgattgcttcactactttgtttatggtcgtcacggttttgggggctatcgtggccagcaggtgccatcagcgccccaaattgaagaagtcccttgcgctggtgatctccgcaacatacagtatggctgtgagcattaagatgaatgcgctgttgtatttccctgcaatgatgatttctctattcatccttaatgacgcgaacgtaatccttactttgttggatctcgttgcgatgattgcatggcaagtcgcagttgcagtgcccttcctgcgcagctttccgcaacagtacctgcattgcgcttttaatttcggcaggaagtttatgtaccaatggagtatcaattggcaaatgatggatgaagaggctttcaatgataagaggttccacttggcccttttaatcagccatctgatagcgctcaccacactgttcgccacaagataccctcgcatcctgcccgatttatggtcttccctgtgccatccgctgaggaaaaatgcagtgctcaatgccaatcccgccaagactattccattcgttctaatcgcatccaacttcatcggcgtcctattttcaaggtccctccactaccagttcctatcctggtatcactggactttgcctatactgatcttttggtcgggaatgcccttcttcgttggtccgatttggtacgtcttgcacgagtggtgctggaattcctatccaccaaactcacaagcaagcacgctattgttggcattgaatactgttctgttgcttctattggccttgacgcagctatctggttcggtcgccctcgccaaaagccatcttcgtaccaccagctctatggaaaaaaagctcaactga

SEQ ID NO: 75407 - DNA, 1107 bp, Saccharomyces pastorianus
atgccaggccagataatcagcattccgtttttgtcgcagaacgaggacatggataaatacttgttggagtaccgcagtttgaagctccttcatcagtccagtaattccttccagtctcacaatgcgccctcccaccagtcgaactaccacccccattacaatcacatgaaatacaacaacactggtagctattactattacaacaacaacaataacagcagtgtaaacccacataaccaagctggtctacaatccattaacagatctattccatcggccccgtacggggcttacaaccagaacagagctaatgacgtaccatatatgaatacccaaaagaaacaccacagatttagcgctaacaataatttgaaccagcaaaaatacaagcaatatccccagtatacgtccaatccaatggttactgcacatctgaagcaaacgtaccctcaactgtactacaatagcaacgtcaatgctcacaacaacaacaacaacaacaacaacagcaacaacagcaacaacaacaacaacaacaacaacaatctttacaaccagacgcagttctccacgaggtacttcaactcgaactcctctccctcgttgacttcttccacttctaactcatcctctccatacaaccaaagcaccttcgaatacattttgccgtcaacttcggcagcttccacaaatttatcgtcgtcatcatcaaacaactctatgcacaccaacccaaccaccgcaacatcgacatccgccgatttaatcaatgatttacccgtgggccccacgtccagttcgcttatctcggatctacattctccaccaactgtatctttcctaccagcaagccaaaccctgctcatgtcctccaccacatctagctctattggcaccaacataaacccaccgcaacattcaccatccccatcgcaaagggaggatttttcgacggcaccagtgaacatgtcttcgtccgcatcactcttgatgaatgattcttctttaggatgggggtctaaccacatgaacgtatcttcatcctctcaaccagcatcatcaagaccctttggcatttggaatactgacatgagcgtttggagttga

SEQ ID NO: 75408 - DNA, 1626 bp, Saccharomyces pastorianus
atgttgcagcttgcacgtttttattctttggccagaaccaaagccatacatagtcacggtgcacccttcaggccggaatatgcattgaagtgtggattggagattcatacgcaattgaacaccaaaaacaagcttttttcacaatcaacgaatagcgccacatctctagtggatgcaccaaaccatcatactagttattatgacatagctctaccgggaacgcagccggttttgaatctggaagcaatcttgtttgccatgaaactatccttggcactgggttctcaagtgaatagcatatctcagtttgataggaagcattatttttatggagatcaacctcaaggctatcaactgacgcagcactacaggccgtttgctcggggtgggaagatcaatctgtcgaaggaattggatgatatcgatgaatcagccaaggaaatcggtatcttacagttgcagatagagcaggacacggggaagtcacactatacagagacagataaagacgttattactttggttgatttaaataggtcgaacgtcccgcttatcgaattggtaactaaaccagatttcagtgatattaaacaagttagagcgtttattaaaaaatatcagaatttggtacgtcatttgcacatttcctctggggacctggaaacgggcgccatgcgagtggacgttaacctctcaattaatgaatatgcacgcgttgagttgaagaatttacccaatactagtaccatcatcaatgcaatcaagtacgaatatcagcggcaagttgagttgatttctgtgggtgacactagctcactgatggagccagaaacaaggggctggacaggctcatcaacggtgaagttgagaagcaaagaaaccacgatcgattacaggtacatgcctgatccagaattgccgtatatcaacctcgcaccagacgttatcagtggtgtgagagggttgatgccccaattaccggacgatataatgagaatgcttatgaagaaaccctatcaattatcattgaaggacgccaagattctgacttataatagtaaccaaaacgatatgtacaatcatgaggcgttgagatcgtactacttagacaccttccgtgaattttccaagcttgctggtgaacgtagtaacgcgaaattacctacgaattggataatccatgaattcttgggagatttgaacaagctacaaattccattggctaaagcaaaagaaattttgcctcctccggttttcgcccagtttttgaagttattgcatgaagaggttatatccgcaactagtggtaaaatgttactgtttcacatattggaaagtttcaagcagagtaactgccaggatttgtctattccagatttttcaaaactaatcgagaaatttgaattgcatgcaattaatcaggtcgaccctcaagaattgatggatctctgtaatgatgtcattgcacagcacacagatgacacttttatacggaacctggttactggtaaaaagaagtcctctttaaaattcctaattggacaaggaatgagacgaagccagggacgtataaaggcaaacgaattcgagaaaaaattcaaagagatcttaaatattcaatggtaa

SEQ ID NO: 75409 - DNA, 354 bp, Saccharomyces pastorianus
atgaagtctacatttaagtctgaatatccatttgaaaaaaggaaggcggagtcggagaggattgctgacaggttcaagaataggatacctgtgatttgcgaaaaagctgaaaagtcagatattccagagattgataagcgtaaatatctagttcctgctgaccttaccgtagggcaatttgtttatgttataagaaagagaattatgctaccccctgagaaggccatcttcatttttgtcaatgatactttgccacctactgcggcgttgatgtctgccatatatcaagaacacaaggataaggacgggtttttgtatgtcacttactcaggagaaaatacatttggcaggtag

SEQ ID NO: 75410 - DNA, 432 bp, Saccharomyces pastorianus
atgtgctatgatttcacgggtattatacaacattatcggtggagacagttagcattacatgactctaacttaaacgtaaacttacacatatacatctatatcacttcgagtagagaaaaatttgtacgtatttatatgagttgttttcataatttgaacacttttaatttgaaaatggtgtcattaatagattgttcttcatcaccaattgggtctatctttgagccgtcatatttggcaatgtcggatctacaggtcttgcttaacatatcaaaatgttctttgacaatggcttcaaagtcgatagtatctttaactaattcgtactccactaaaacatcgtcggtggcttccaaaccacacttctttctcaatttttggattctgttgaccagctctcttgcgagaccttcactctttagttcagagtaa

SEQ ID NO: 75411 - DNA, 1950 bp, Saccharomyces pastorianus
atgtctagagcagttggtattgatttgggaacgacttactcgtgtgttgctcattttttcaatgatagggtagagataattgcaaatgatcaaggtaataggaccactccatcgtatgtggctttcacagacaccgaaagattaattggtgacgccgccaaaaatcaagctgcaatcaatcctcataatacagtttttgatgcaaagcggttaattggtcgtaaatttgatgatcctgaagtgacgacagatgccaagcacttccctttcaaagttatatccagagatggtaaacctgtagtgcaagtagaatataagggtgaaacgaaaacatttacgcctgaggaaatttcttccatggttttaagcaaaatgaaggaaactgctgagaactatttgggaactacggtcaatgatgctgttgtaactgttcctgcatatttcaatgattctcaaagacaagccactaaggatgcaggaactattgcagggatgaacgttttacgtattatcaatgaacccactgcagcagcaattgcttatggtttggataagaaaggcagggctgagcacaatgtcctgatttttgatttgggtggtggtacttttgacgtctctttactttcgattgacgagggtgtttttgaggttaaggctaccgcaggagacactcatttaggtggtgaagattttgataataggttggtgaaccatttagccactgaattcaaaaggaaaacgaaaaaggacatctctaataatcaaagatcgttaagaagattgagaactgcggcagaaagagctaagagagagctttcttcctcatctcaaacctcgatcgagatcgattctttatttgaaggtatggatttctacacttcgttaacaagggcaaggtttgaagagctatgtgctgatttgttcagatccacattggaaccagtggaaaaggttcttaaagattcgaagctggacaagtcccaaattgatgagattgtgttagtcggtggatctaccagaatcccaaagattcagaaattagtttctgacttcttcaatggcaaagagcctaatcgttctatcaacccggatgaggctgttgcttatggcgcagccgttcaagctgccattttaaccggcgatcaatcaacaaagacacaagatttactattattggatgttgcgccattgtccctaggaattgaaactgcaggcggcataatgactaagctaattcctagaaactcaacgattccaacaaagaaatcggaaaccttctctacctatgcagataatcaacctggtgttttaattcaagtctttgaaggtgaaagaacaagaacaaaggataataacttacttggtaaattcgaattaagtggcattccgcctgctcccagaggtgtgcctcaaattgatgttacctttgatatcgacgctaatggtattcttaatgtgtctgctttggaaaaaggtactggtaagagtaacaaaatcacgatcactaacgataaaggtaggctctcgaaggatgatattgataggatggtttctgaagctgaaaaatatagggctgacgatgaaagagaggcagaacgagttcaggctaagaatcagcttgaatcatatgcatttactttgaagaataccataaacgaagcaagtttcaaagagaaagtaggtgaagatgatgcaaagagattagaaacagcgtctcaggaaaccattgactggttagatgcatcgcaggcagcctctacggacgaatataaggatagacaaaaggagttggaaggcattgccaatccaataatgaccaaattttacggtgctggtgccggcgcaggtcctggagcggccgaatccggtggattccccggatccatgcccaactcaggtgctacgggaggtggagaagatacaggtccaacagtggaagaggttgattga

SEQ ID NO: 75412 - DNA, 1068 bp, Saccharomyces pastorianus
atgaatactgtaccattcacatctgctccgattgaggtaactatagggatcgatcagtattcctttaatgtcaaggagaatcagccatttcacggaatcaaggacatccccattggacacgttcatgtcattcattttcagcatgcagataattccagcatgaggtatggctactggtttgactgtagaatgggaaacttttacattcagtatgatcctaaagatggcctttacaaaatgatggaagaaagggatggcgcaaaattcgagaatattgttcacaacttcaaggaacggcagatgatggtttcttatccgaaaattgacgaagatgatacctggtacaatcttaccgagtttgtgcagatggataaaatccgaaagatagtaaggaaagatgaaaaccagttctcttacgtagattcttcgatgaccacagttcaagaaaatgagctgctaaaatccagcttgcaaaaagcaggttctaaaatggaaaccaagaatgaagatgatcctgcacattctttaaactatacagtaataaacttcaaatctagagaagccataaggcctggccatgaaatggaggattttttagacaagtcttactacttgaacactgtaatgctacaaggaatttttaaaaattcaagtaattattttggggagttgcagtttgcgttcttaaatgccatgttttttggtaactacgggtcgagtttgcaatggcacgctatgatcgaactgatatgttcaagcgctacagtgcctaaacatatgctcgataaattagacgaaatcttatattatcagataaagacattgcctgaacaatactcagacatcttgttgaatgaacgagtttggaatatttgtctgtattcgtcatttcaaaaaaactccctacacaacacagaaaagataatggaaaacaaatatccagaattgcttggtaaagacaatgaagacgacgctcttatttacggtatcagtgatgaagaaagggatgacgaggatgatgagcacaaccctaccattgttggcggtctctattaccaaaggccataa

SEQ ID NO: 75413 - DNA, 312 bp, Saccharomyces pastorianus
atgctgaaaatgaatgacatgaacgtgtccaatggggatgtccttgattccgtgaaatggctgattctccttgacattaaaggaatactgatcgatccctatagttacctcaatcggagcagatgtgaatggtacagtattcattgcaggcttccgatattttgttttttagccccatgtcccagcgataaggaggatctttggtgtccattcatctcattaaaccctaaaccattgaaatattcgtgttcgtgcgtcgcgattttttccgctttcaagatgtgtcctttcttcatctcttggttcttataa

SEQ ID NO: 75414 - DNA, 603 bp, Saccharomyces pastorianus
atgggtatttctcgtgattctcgtcacaaaagatccgctaccggtgccaagcgtgctcaattcagaaagaagagaaagttcgaattaggccgtcaaccagccaacaccaagatcggtgctaagagaattcactctgttagaactagaggtggtaacaagaaatacagagctctaagaattgaaaccggtaacttttcttgggcttctgaaggtatctccaagaagaccagaattgctggtgttgtttaccatccatccaacaatgaattggttagaactaacactttgaccaaggctgccattgtccaaattgatgctactccattcagacaatggttcgaagctcactacggtcaaaccttgggtaagaagaagaacatcaaggaagaagaaactgttgccaagagcaagaacgctgaaagaaagtgggctgctagagctgcttctgccaagatcgaatcttccgttgaatctcaattcagcgccggtagattatacgcttgtatctcttccagaccaggtcaatccggtagatgtgatggttacatcttggaaggtgaagaattagctttctacctaagaagattgactgctaagaaatag

SEQ ID NO: 75415 - DNA, 99 bp, Saccharomyces pastorianus
atggaactgcttcatatacgttatttacaggcctatcttaaagttataggaaattacacttgccatttgctttttggtactcacaagaagacgttataa

SEQ ID NO: 75416 - DNA, 249 bp, Saccharomyces pastorianus
atgtcaacatatgacgaaatcgaaatcgaagatatggcgtttgagcctgaaaatcaaatgttcacctatccttgtccctgtggagataggtttcaaatatatctggatgacatgtttgagggcgaaaaagttgctgtttgtcccagctgctcactgatgatcgatgtagttttcgataaagaagacttggctgagtactacgaagaggcaggcatacaacccccggagcctattgccgctgctgcctaa

SEQ ID NO: 75417 - DNA, 321 bp, Saccharomyces pastorianus
atgggccctgttttagtatggaatatcagcgatttaattggaatgaactttacatgtcttaaaggtctagcgactcttttcaaaacaggagcgtccataggtatctctttgggagcaggcgccgagtgttcaacgatcatcgcttgcaatttagggtcctggttcttcaaaatatctttagccattgttcaacgtttgcctcttggtatggaatgtcgtatttgtagctttcggaatgctcgacaaggtgggaatatacctgagctagctttgattataatatgtacttttatatattttctttatttttcattattttga

SEQ ID NO: 75418 - DNA, 1290 bp, Saccharomyces pastorianus
atggctaaagatattttgaagaaccaggaccctaaattgcaagcgatgatcgttgaacactcggcgcctgctcccaaagagatacctatggacgctcctgttttgaaaagagtcgctagacctttaagacatgtaaagttcattccaattaaatcgctgatattccatactaaaacagggcccatggatttttcttatgaaaagaagatcaagacgcctattcctaagaacaaaattgtagttcgagtaagtaatgtgggtttgaaccctgtagatatgaaaatcaggaacggctacacatcatcgatttacggtgagatcggcttggggagagagtacagtggtgttatcactgaggtaggcgagaacctaaactacgcctggcacgtgggtgatgaagtatacggtatatactaccaccctcatttggccgtgggatgtttgcaaagttcaatcttagtagatccaaaggtggacccaatccttttgagaccagaatcggttagcgccgaagaagctgcaggctccttattctgcttggccaccggctataatattctgaataaattatccaagaacaagtatttgaagcaagattcaaacgttttgattaatggtggaacttcgtcagtggggatgtttgtcatacaattattgaagcgtcattacaagttacagaaaaaactagtgattgtaacgtctgcaaatgggccccaagttttacaggagaaatttcctgatctggctgatgaaatgattttcatcgattacttaacgtgtaggggtaaatctagtaaaccactaagaaaaatgctcgaagaaaagaaaatttctcagtatgatccggtcgaggataaggaaactatacttaactataatgaggggaagttcgatgttgtactcgattttgtcggtggttacgatattttgagtcattctagttcattgattcacggcggtggtgcgtacgtaaccactgtaggtgattacgttgccaattataaagaagacattttcgattcatgggataacccaagtgccaatgcaagaaaaatgttcgggtctattatttggtcatataactacacacattactattttgatccgaatgcaaagacggcttccgccaataatgattggattgagcaatgtggtgactttttgaagaacggtactgtaaaatgtgtcgtcgacaaagtttatgactggaaagaccataaagaagcattttcttatatggccactcaacgtgcccaaggaaagttaatcatgaacgtcgaaaaattctag

SEQ ID NO: 75419 - DNA, 1065 bp, Saccharomyces pastorianus
atggtcatcgaccttgagcatgtggtagactatataatgcacatagactctcagcttcaactcaaaaaggcttctccagcaaaaatgaattcagagtctcgagaagatatggctataaatagtatcaaattgctagcgggaaactcccatcctgatttggctgaacaaatatcgaaaaagttaggtattccactttccaaagttggtgtgtaccagtattctaataaagaaacctctgtcaccataggtgagagccttcgcgacgaagatgtgtatattatccaaactggaataggtgaacaagaaattaatgatttcttgatggaattattaattttaattcatgcttgcaaaattgcatctgcaagaaagatcactactgtaatacccaattttccatatgcaagacaagacaagaaagataaatcccgggcgcccattaccgcaaagttggttgccaatttattgcaaactgctggtgctgatcatgtcatcacaatggatctccatgcctcccaaattcaagggtttttccatatcccggttgacaacctatatgcagaaccaagtgttttaaattatattagaacgaaaacagatttcgacaatgctattttggtgtcgcctgatgcaggtggtgctaagagagtagctgctttggctgacaagttagatttaaattttgctttgattcacaaagagaggcaaaaagctaacgaggtttcaaaaatggtgcttgttggtgatgttaccaataaatcatgtttattagttgatgatatggcggatacttgtggtacgttggtaaaagcttgtgatacgttgatggagcatggtgccaaagaagttatagctattgttacacacggtattttctccggttcagcaagagaaaagctaagaaatagtagattgtctagaattgtttgcacaaataccgttccggtagatttggatttacctattgctgaccagatcgatattagtcccacgttcgctgaagctataagaagactacacaatggtgaatccgtgtcatatttgttcacccatgctccagtatag

SEQ ID NO: 75420 - DNA, 786 bp, Saccharomyces pastorianus
atgtttagtagaatttgtagcgctcaattaaagaggacggcatggacccttcctaagcaggctcacttgcaatcacagacgattaaaacatttgccacagcacctattctgtgcaaacaattcaaacaaagtgatcaaccaagactaagaataaactctgatgctcctaactttgatgctgacacaacggttggtaaaatcaatttttacgactacttgggtgactcttggggggtcttgttttctcacccagcagatttcacccctgtctgcaccaccgaagtcagcgcattcgccaaattgaagccggaattcgacaagagaaatgttaaattgatcgggctttcagtggaagatgttgagtcccacgaaaaatggattcaagacatcaaggaaatagcaaaggttaaaaatgttggtttcccaataattggtgacacttttagaaacgtggcattcctatatgatatggtagatgccgaaggattcaaaaatatcaatgatgggtcactgaagaccgttaggtctgttttcgtcatcgatcccaagaagaagattagactgatttttacctacccttccaccgtcggaagaaacacttctgaagtgttaagggtaatcgacgccttgcaattgactgacaaggagggcgtagtaactccaattaattggcagccagctgacgatgtcattattcctccctctgtctccaatgatgaggcgaaggctaaatttggtcaattcaatgaaattaaaccctatttaagattcaccaagtcgaaataa

SEQ ID NO: 75421 - DNA, 3336 bp, Saccharomyces pastorianus
atggcttgttcttccttgcccaaccgccgcaccgcccagttcgaagcgaacaagaggaggaccattgcacatgctccatctccaagtctttcaaatgggatgcacactctaacgccgcccacctgtaacaatggtgctgccacttcagactccaatatacatgtatacgtaaggtgcagatcgcgtaataagcgagaaatagaggaaaaaagtagtgtagttatatctacactaggcccacaagggaaagaaatcattctgtccaacggttctcaccaatcgtattcgtcctcgaagaaaacttaccaatttgatcaggtgttcggcgcagaatctgaccaggaaacagtgtttaatgccactgcaaaaaactacattaaggaaatgttgcacgggtacaattgtacaatatttgcatacggtcaaacgggaacaggtaaaacctacactatgtctggcgatataaatattctcggtgatgtgcaatctaccgataatctattattaggagaacatgcaggtatcataccacgggttctggtcgatttgtttaaagaattgagctccttaaataaagagtactccgtaaaaatatcctttttagagttgtacaatgaaaatttgaaagatctgctctctgatagtgaggacgatgatcctgcagtcaacgatcccaagaggcagattcgtatttttgacaataacaacaataattcatccatcatggtcaaggggatgcaggaaatctttattaactctgcacacgaaggcttgaatttgctaatgcagggttcgttaaaaaggaaagtggccgctactaaatgcaacgatctttcatcaaggtctcacaccgtctttacaatcacaacaaacatagttgagcaagatagcaaagaccatggacaaaacaaaaattttgttaaaattggcaaattgaatttggtggatttggcaggcagtgaaaacatcaacagatcgggtgcggagaataaaagggctcaagaagctggcctaataaacaaatcgctgctaacactaggccgtgttatcaacgcactcgttgatcattctaaccatataccttacagagaatctaagctaacaagattgctacaagactctttaggtggtatgacgaaaacatgcattatcgcaactatatcacctgcgaaaatatccatggaagagactgcaagtacgctagaatatgcaacgagagccaaatcaattaagaatactccacaagtaaatcagtctttatcgaaggatacatgtctcaaagactacattcaagagattgaaaaattaagaaatgatttgaaaaattcaagaaacaaacaaggtatatttataactcaagatcagttggacctttacgagagcaattctatcttgattgatgagcaaaatctaaaaatacataacctgcgagaacaaattaaaaaattcaaagaaaactacctgaaccaattagatatcaataatcttttacagtctgaaaaggaaaaactaattgccataatacagaattttaatgtcgatttttctaacttttactcggaaatccaaaaaattcaccatactaatctcgaactaatgaatgaagtcatacaacagagagatttttcactagaaaattctcaaaaacagtataatacgaaccagaacatgcaattaaaaatctctcaacaagttttacagactttgaacactttacagggctctttaaataattataactctaaatgttccgaagttatcaaaggcgtcaccgaagaactaaccaggaacgtaaatacccataaggcgaaacacgattctactctcaaatcgttattaaacattactactaacttattgatgaatcagatgaacgaactggtgcgtagtatttcgacttcattggaaatatttcagagtgattctacttctcactatcgtaaagatttgaatgaaatctaccaatcacatcaacaatttctaaaaaatttacaaaacgatattaaaagctgtcttgattcgataggcagttcaattctaacttccataaacgaaatatcgcaaaattgcaccactaacttgaatagtatgaatgttttaatagaaaaccagcagtcaggatcatcgaaattaattaaagagcaagatttagaaataaaaaaactgaaaaacgatctgatcaatgagcgcaggatttctaaccaattcaaccaacagttggctgaaatgaagcgatattttcaggatcacgtttccaggacgcgtagtgaattccacgacgaacttaacaaatgtatcgataacctaaaagataaacaatctaagttggatcaagatatctggcagaagacggcctctattttcaacgaaacagatatcgtagttaataaaattcattccgactcaatagcatccctcgctcataatgctgaaaacactttgaaaacggtttctcagaacaatgaaagctttactaacgatttaatcagtctatcacgcggaatgaacatggacatatcctccaaactgagaagtttgcccatcaatgaatttttaaacaagatatcacaaaccatttgtgaaacctgtggcgatgataacacaatcgcatcaaatccagtattgacctctattaaaaaatttcaaaatataatttgttcagacattgccctaacaaatgagaagatcatgtcattaatagatgaaatacaatcacaaattgaaaccatatctaatgaaaacaatatcaatttgactgcaataaatgaaaattttaattctttatgcaattttatattaactgattacgatgagaatattatgcaaatctcaaaaacacaagatgaggtactttctgaacattgcgagaagctacaatcactgaaaatactgggtatggacattttcactgctcacagcatagaaaaaccccttcatgagcatacaagacctgaagcgtcagtaatcaaggctttacccttattggattatccaaaacaatttcagatttatagggatgctgaaaataagagcaaagacgacacatctaattctcgtacttgtataccaaacttgtcaactaatgaaaattttcctctttcacaattcagtccaaaaaccccagtgccagtgcctgatcaacctctaccaaaagttcttataccgaaaagcataaactcggccaagtccaatagatcaaagaccttaccaaatacagagggtactggacgagaatcgcagaacaatttgaagagaagatttaccaccgagccaatattgaagggagaagaaactgaaaataatgacatactgcaaaataaaaaacttcatcaataa

SEQ ID NO: 75422 - DNA, 381 bp, Saccharomyces pastorianus
atgtgtacctacataattacacagtcttttttttttttaccttgtttatccttcttgttcttcaagctcgtaggtttttttgactcagtttttactgcaggaaaatctttacgagtcatgtttgaactgcccatatttgatgaactaacttcttgctttgctgccatcgactgctcagcaacttcccttgacattccctttgctgaggaagaacttttcctgatgcttgtatcagaacccgttttaataccatttctattcgtgtttgaattcatattaatttgcaaaccttgtggctcacgatcacgttttgaatttccagtaaagaatgtttcagattttgaagaaactcttgaatttgatcctacgttacttgtttga

SEQ ID NO: 75423 - DNA, 2091 bp, Saccharomyces pastorianus
atggcaagttcaccgcaggtacatccatataagaagcatttaatgcaatcacagcatataaattttgataacaggggcctccagtttcaaaacagttcgttgaaggtaggtcaagatttttcagataataaagagaatagggaaaacagggacaatgaagacttcagtaccgcagaccttcctaagcggtcggcaaaccaaccgcttatcaatgagcatcttagagctgcgtcagtacctctactatcaaacgatataggcaatagtcaagaggaagatttcgatccagtcccacccccacagcttcatcttaataattcaaataatacttccttaagttctttgggaagtactcctacaaattctccgtcaccgggagcattaagacagacaaattcgagtacatctcttacgaaggagcaaataaagaaaagaactcgttctgtagatttgtctcacatgtacctgttgaatggtagcagtgatacccaattaacggctactaatgaatctgtagcagatttgtcacatcagatgatcagtcgatatttgggtggtaaaaataatacttccttagttccaaggctaaaaacaatagaaatgtatagacaaaacgttaaaaaatctaaagatcctgaagtgttattccagtatgcgcaatatatgttacaaaccgcactgactattgaatcttccaatgctcttgttcaagatagtgacaaggaaggaaatgtcagccaatctgacttaaaactccagtttttgaaagaagcgcaaagttatttgaagaaactgagcataaagggttattcagatgcccaatacttattagcggacggctactcatccggagcatttggaaagattgaaaataaagaagcatttgtcttatttcaagcagctgcaaagcatggtcatatagaaagtgcttacagagcatcgcattgcttagaagaaggactaggaacaacaagagattctcgtaagtcagtcaattttttaaagtttgcggctagcaggaatcatccctcagcaatgtataaattgggactttattctttctacggcagaatgggtcttccaaccgacgttaatactaaattgaatggggtaaaatggttatcaagggctgcagcaagagctaatgagttgacggccgcagcaccatacgaattggctaagatttatcatgaagggttcttagatgttgtcattccggatgaaaagtatgcaatggaactatatattcaagcagcaagtttagggcatgttccttcagcaactttgttggcacagatttatgaaacaggtaatgatacagtagggcaggatacatcactttctgtacactattatacgcaggcagcgttaaaaggcgattctgtggcaatgttaggtttatgtgcatggtacttactgggagcagaacctgcctttgaaaaagatgaaaatgaggcttttcaatgggccttgcgtgcagctaatgctggtttgccaaaggcccaattcactctgggctacttctatgagcatggcaaaggctgtgatcgtaacatggaatacgcatggaaatggtacgagaaagctgcagggaatgaggacaagagagcgattaataagctacgctcaagggacggtggactagccagcattggtaaaaaacagcataaaaaaaataaaagtatcagtactttgaatttattctctactgtggacagtcaaacaagtaacgtaggatcaaattcaagagtttcttcaaaatctgaaacattctttactggaaattcaaaacgtgatcgtgagccacaaggtttgcaaattaatatgaattcaaacacgaatagaaatggtattaaaacgggttctgatacaagcatcaggaaaagttcttcctcagcaaagggaatgtcaagggaagttgctgagcagtcgatggcagcaaagcaagaagttagttcatcaaatatgggcagttcaaacatgactcgtaaagattttcctgcagtaaaaactgagtcaaaaaaacctacgagcttgaagaacaagaaggataaacaaggtaaaaaaaaaaaagactgtgtaattatgtag

SEQ ID NO: 75424 - DNA, 2064 bp, Saccharomyces pastorianus
atgtgcgccagtttaaacgaggtaaaaaagaatgacacctatggggtctcacaaaagggctacaatgacaatttcagtgaaagtgagggcgtccttcatggtagtaagtcgatgcccactagcatgaaaaatatgctacagtctcccacgatggtcaacatgtgtgatattttacaaaacaaggaagctgctaatgacgaaaaacctgtgatacctactacgaataccgccactgcggggactggtactgaagatattagctccactcaatccgaggaaactgatcagaatagtcatcttattgcctcagagatcttggaagacactttcaaagatgtatcttacaaggaatatgcaaatttcttgggaaatgataacaataatcaagtcttgactgagtttgtaaagttattgagtcctttgccgtcgtcactattagaaacgcttttcaatttatcgaaaagtatatatttcattgcagaagcgcaaaatatcgaccggatactagagtgcttgagcaaagaatggatagcttgccacccgaacacacattggaagtcaggctataagtcatgtcacatagtcttattttccctgttgatccttaattcagatttgcacaacaactttcaagttgaccataaaaagattaagttttccatggttgcatttatcaacaatacactgagggcactaagagaggaaaatgaatacgaagaattgaaaatatactcccgcgaacatttgatcatcgaagaactttccgaatactataaaacgttaaatgaaacgcctttaccgttatgcacagaatctagaacatcaataaatacatcagataaccaatcttccttgaaaaggttctctactctaggatcacgggaatttagtacatcaaatttacgtagtgttaactctaattctactacactatattcaagagatggtcaagtatctgtacgagaaatgagcgcaaaatcaaataaaaactttcacaataatcaccccatggatgcactctaccttaaagagtcttttgatgacagtttaattaccgaaaacggctccagttggttcatggacgatttaattcttataagcaagaaatctttaccacgtaaatattctaaaagagacaaagatcaagtggcggcaccaaaaatgacctctaagagaaacaaatcgttcttcggatggctaaaaccatctaaaacgactacacttattgagcacacatctagaaggacttctttatcgtatttgaataaggattctgaatgggagagggtgaaaatacaggtcaaggagggcagaatttttattttcaaaattaaaccagatgttaaggatatcatccaatcaagtgaaacagacagtgctaccatcgactatttcaaagatatcagtagctcttattttgcttactcactgcttgaagctgaagcacatgtcgtgcaagataatataattataggtagtggagcaatgaaatcaaatgtgtgtaacaaaaacaccaagaggaaaagtggcaactttaccgttagttttccagagaatatcaacggaccaaagcttgttctggagttccagacgagaagtgttgaagaagcccacaagtttatggactgtatcaacttctgggcaggtaggatttctccagttcctttaacacaattcgaagccgtatctaatgcagaatatggatggagtgacaagatcttgacagagcacgcttccctcaatcttaaaaatattgttgtaagtgaatggaagccactattggggctagagctactatacgaagatgcgaaagatgtagagatggtcgaactaaaagaaagactaaaggaattgatgaacttcaccagacagcttggtatatggatagataaacataacgaaataaaggataaactggtcgaaatttggagctttgacgataactattttgaagcagtcatgaataattggaattcgagatatttgtatatgaataatcaatataagaaacgactgagctatttgaaagctttgcaaaaagccatgggctctgttcagttttaa

SEQ ID NO: 75425 - DNA, 1275 bp, Saccharomyces pastorianus
atggcggaaatacctgatgaaaccatccagcagttcatggcattgaccaatgtgtcgcataacatagccgttcaatatctctctgaatttggagatttaaatgaagcactaaattcctattatgcttctcaaacggatgaccaaaaggatagaagagaggaagcacattggaacagacagcaggagaaggccctcaagcaaggagccttctcctccaccaactcttcgaataaagccataaatacggagcacgttggtgggttatatccaaaaccaggatcctcacaaggtagcaacgagtacttaaaaaggaaagggtctacctctcctgaaccaaccaagggtagtagccgctctggaagtggtaacaactccaggtttatgagcttttcggatatggtaagaggtcaagctgatgatgacgatgaagatcaaccgagaaatacttttgctggtggtgaaacatccggcttagaggttacagatccttcagatccgaattcattactgaaggatttgctggaaaaagcgagaagaggtggtcaaatgggcgctgaaaacggatcccgtgatgacgaagaccaggaaatgggtgccaataggtttactggaagaggttttagattagggtcaaccatcgacgcagcagatgaagtcgtagaagacaacacttcacaatcacaacgtagaccagaaaaagtcacaagagaaattacattttggaaggaaggttttcaagtggccgatggtccgctttatcgctatgatgatcctgcgaacagtttctatttgagcgagttaaatcaagggagggctccattaaagctcttagatgtgcaatttggacaagaagttgaagttaatgtatataaaaaattagatgagtcttataaagctccgaagagaaaactgggcggtttttcaggccagggccaaaggctagggtctcctatcccgggtgaatcatcacctgcggaggttccaaagaatgagacacccgctgctcaggaacaacccacgtcggacaatgagccaaaacaaggcgacacctccatccaaattagatacgcaaatggcaaaagagaagttttgcgctgcaattccacagattcagtaaagtttttgtatgagcatgtgacatcaaatgcgaacactgacccatcgaggaatttcaccttgaattacgcctttcctatcaaaccaataagcaacgatgagacaacattgaaggacgctgatctgctgaactcagttgtcgtgcaaagatgggcatga

SEQ ID NO: 75426 - DNA, 1407 bp, Saccharomyces pastorianus
atgggtcaaatattgtccaatccaattatcgacaaagagcatcattctggtacggactgtttgacagcgtttggactatgtgccatgcaaggctggcgtatgtccatggaagatgcccatattgttgagccgaaccttttggctgagtctgacgaggaacatctcgcattttatggtatatttgacggtcatggtggttcttctgtagcggagttttgtggctctaaaatgatatctatactgaaaaaacaggagagcttcaagagcggtatgttagagcagtgcttaatagatacctttttagctacagatgttgagttgttgaaagatgaaaaattaaaagatgaccatagtggttgtacagcaactgtgatattggtatctcaattgaaaaagctactaatttgcgccaattccggtgatagtagaacagttctatctactggtggtaatagtaaagcaatgtcatttgatcataagcccacattgttaagcgaaaaatctcgtattgtagctgctgatggttttgttgagatggaccgtgttaatggaaatttagcgttatcaagagccataggtgattttgaattcaaatctaacacaaaattgggacctcatgagcaagtcgttacatgtgttcctgatatcatttgtcacaatttgaattatgatgaggatgaatttgttattttagcatgtgatggtatttgggattgtttaacttctcaagagtgtgttgacttggttcactacggtataagtcaaggtaatatgacgttgagcgacatttcatctagaatcgtagatgtttgttgttcacccacaactgaaggctcaggaattggctgtgataatatgagtatttccattgttgctttactaaaggaaaatgaatctgagtcacaatggtttgagcgtatgagatcaaaaaattacaatatccaaacgtcttttgtccaaagaaggaaaagtatttttgatttccatgatttttcggatgatgacaacgaagtgttcgcaataaccaccaaaaaattacaagaccgcttgaatcgtagtaaagataatgacgacatggaaattgatgatcttgataccgaattaggcagcagtgctactccctcaaagttatcaggtgaggatagaactggccctattgacttgttttcgttggaggctctattagaagccgggattcaaataaggcagaggcccagctccgacagtgacggcaacacttcttatttccatggtgcttctttatcagatatgttggcatctttaagcaatgcggctgcaggagaaacagaacctaatgatgctgatgataacgatgataacgacggcgaagaaaacggcaagaatgaaaatgcgaagaagggttccaagattgaagaaattgaataa

SEQ ID NO: 75427 - DNA, 1578 bp, Saccharomyces pastorianus
atgacgttgccgaaactcagtagcgtttctgtttcatcaggacatgttagtgccaactcacatggtttctcaatactaagcaaacaccctcacccaaataatcttgtccattcccactcactttctcacacaaatgcaaagagccacctgcctatcagtagcactagcactaaagagaacagcacgaacaaggaggaggcggaatcactcaaaaaaaacaacccctcttcttgggaccctagtgatgatatcaagctccgccacctgaaagagatcaagaacttgggctggaaggagattgcacatcatttcccaaatagaactcctaacgcttgtcaattcagatggaggagactgaaatcaggcaacttaaagtctaacaaaaccgcagttattgacatcaataagctattcggcatgtatgcgactggtgatgctaccccatccgcgggtactccgtctgcggaagaagccgtaaaagaggaagctgttgaggatgaagatattactgcaggttctagtgctatcgaggattctccaccggatttcaagccattagttaagcctaaatacatggacagaaaactgataactcaaagatctacatcaacattttcggaccatgagccacaacacacgaaaccaaggaaactgtttgttaagccaaggtccttctctcattctataacaaccaacacgcctaatgtaaagactgctcagcagacaaatctaagcctttataacactacttcagcaaagacaaataaagctgttaattccagtgattatgagaatattggtcttgtgcctaaaattattatcaggtctagaaggaactcctttattccttcaactcaaatccctcattcaacgacgaagactaggaaaaactcgcattccgtaatttcttctagaagatcatcttttaacatgatgcatccaagaagatcatccttcaactctcacgctcctacggagcctatttctagaagagcttccttggtagttagcccgtatatgtcacccagaaggttatctacatcgcaatccgttcattatcatccacagcaccaatactatcttaaccccatagcgtctcccaactgcaagacagaccacgcaaatgacaaaatcacgcacacgaggactttcttagatatgcaaaaattcgctaataaacacccgtggtctagagaagatgatgaagtgctacttaacaatacgaaggacaaacaaaaccatttgtcgccgctagaaatttctattgttctgcctaataatagatccgagttggaaatccaacaaagaatggattatttaaagagaaaaggatgtgtaagtggttttcatacaaatgaaggatgtaaagatgaggaggaggaggatgacattgacccactgcacaaggagaatggcattaacacgccatcgcagcaatcgcaaaattacggtatgttagaggctaaacatgataatccaaagtctagtgagctttcttctatgaccagcgcaaaggacatacgcaataagcaagatgaacttccaggtataaattctatctttaaaaatatattttaa

SEQ ID NO: 75428 - DNA, 375 bp, Saccharomyces pastorianus
atgttacatgtatatgcttatatccaatatatacccatcgccgcttattcttcgtcatcctctattagagttatttttcttctttttctgactctctccttccttatgtggcttactatatcgttttcatcctgctcttgtccttttctcttcccatcctcatcgtcatcactgtcttcttcatatgtgtcttcctcctcatcattttcttctgatatttgctcatcctcaatgtcatcatcaagggtaaagtcttcgtcttcgtcttcatcttctttggcgttttcacctacatataattcagtatctacatcgttttctacttcatcctgctctaaacttgatattccagtatcgtttctcctagctgcatga

SEQ ID NO: 75429 - DNA, 2499 bp, Saccharomyces pastorianus
atgtcattaacagcaaacgacgaatcaccaaaacccaaaaaaaatgcattattgaaaaacttagaaatcgatgatctgatacattctcaatttgtcagaagcgatacaaatggacatagaactacaagacgactattcaactccgataccagtatatcacatcgaataagaggaagtgttcggtctgataaaggccttaataaaataaaaaaagggttgatttcccagcagtccaaacttgcgtcagaaaattcttctcaaaatatcgttaatagggacaataaggtgggagcagtaagtttccccattattgaacctaatattgaagtcagcgaggagttgaaggttagaattaagtatgattctatcaaatttttcaattttgaaagactaatatctaaatcttcagtcatagcacctttagttaacaaaaatataacatcatccggtcctttaatcgggtttcaaagaagagttaacaggttaaagcaaacatgggatctagcaaccgaaagcatggagtacccatattcttctgataatacgccattcagggataacgattcttggcaatggtacgtaccttacggcggaacaataaaaaaaatgaaagatttcagtacaaaaagaactttacccacctgggaagataaaataaagtttcttacatttttagaaaattctaagtctgcaacgtacattaatggtaacgtatcactttgcaatcataatgaaaccgatcaagaaaatgaagataggaaaaaaaggaaagggaaagtaccaagaatcaaaaataaagtgtggttttcccagatagaatacattgttcttcgaaattatgaaattaaaccttggtatacatctccttttccggaacacatcaaccaaaataaaatggtttttatatgtgagttctgcctaaaatatatgacttctcgatatactttttatagacaccaactaaagtgtctaacttttaagccccccggaaatgaaatttatcgcgacggtaagctgtctgtttgggaaattgatgggcgggagaatgtcttgtattgtcaaaatctttgcctgttggcaaaatgttttatcaattctaagactttgtattacgatgttgaaccgtttatattctatattctaacggagagagaggatacagagaaccatccctatcaaaacgcagccaaattccatttcgtaggctatttctccaaggaaaaattcaactccaatgactataatctaagttgtattttaactctacccatataccagaggaaaggatacggtcagtttttgatggaattttcatatttattatccagaaaggagtcaaaatttggaactcctgaaaaaccattgtcggatttaggattattgacttacagaacgttttggaagataaaatgtgctgaagtgctattaaaattaagagacagtgctaaacgtcgatcaaataataaaaatgaagatacttttcagcaggtcagcctaaacgatatggctaaactaacaggaatgataccaacagacgttgtgtttggattggaacaacttcaagttttgtatcgccataaaacacgctcattatccagtttggatgatttcaactatattattaaaatcgattcttggaacaggattgaaaatatttacaaaacttggagctcaaaaaactatcctcgcgtcaaatatgacaaattattgtgggaacctattatattagggccgtcatttggtataaatgggatgatgaacttagaacccaccgcattagcggacgaagctcttacaaatgaaactatggctccggtaatttcgaataacacacatatagaaaactataacaacagtagagcacataataaacgcagaagaagaagaagaagaagtagtagtgagcacaaaacatctaaacttcatgtaaacaatatcatagaaccggaagtacctgctactgatttttttgaagacactgtttcctccttaacagagtatatgtgtgattataagaacacaaataatgatagattaatctatcaagcggaaaaaagagtgctggaaagcatccatgatcgcaaagggataccaagatcaaaatttagtacagaaactcattgggagctctgcttcaccattaaaaactccgaaacaccacttggaaatcatgcagctaggagaaacgatactggaatatcaagtttagagcaggatgaagtagaaaacgatgtagatactgaattatatgtaggtgaaaacgccaaagaagatgaagacgaagacgaagactttacccttgatgatgacattgaggatgagcaaatatcagaagaaaatgatgaggaggaagacacatatgaagaagacagtgatgacgatgaggatgggaagagaaaaggacaagagcaggatgaaaacgatatagtaagccacataaggaaggagagagtcagaaaaagaagaaaaataactctaatagaggatgacgaagaataa

SEQ ID NO: 75430 - DNA, 417 bp, Saccharomyces pastorianus
atgggattgcgttactccatatatattgaaaatccgttatcttccccatcatcatcgtataaatcaataaacgacccgttattccactctcagcatcgatcgcaaaaaaacgtgagcttcatcacctacggttgtagacattgcaagacacatctttccagttccttccagattatttctagagattataggggtaggaccggaactgcttatttaatgaacaaagttgttaatgtcgttgaaggaaaggtcgagcaacgaagaatgttgactggcgactacttagtctgtgatattctttgtcattggtgcaagaggaacgtaggttggaaatacttgcagagcagcaatgatgatcagcagtataaggaaggaaagtttatcttagagctgaaaaacatttgtaaatgtacttga

SEQ ID NO: 75431 - DNA, 312 bp, Saccharomyces pastorianus
atgattctttttaagaatctggtctttcttccttctattttgattgggtatatttctattcgtgtttcattactggtctgggttaattgggttttggtttggtccagttgttttcaagtagcctttattttttcattgtggtattttatcttatcgatttatacttttttttattcaaagaaaattaaacagataatctcttatgagcctagctactttgttttttcttacagggccattgacttatgccctgaacgagtcttactttactttttttgtattttcaaaaatgtcgtgtttcccatgttgtaa

SEQ ID NO: 75432 - DNA, 1353 bp, Saccharomyces pastorianus
atgagctcgacgatgttggatgatgtggataataatatgatgggtatcaagtctatcaacctttatgaattacttagcgatgtggtgaaacagggcgacaagacgcgattggtgacggcgggtcccgagcaagttttgcccgatttaatccgacatatcactgaaacaataccgtttgacctatttataaaccttaagaatgaaatgaacgatgcgagaaatctcgttaccagattaaattggctgggtaagtttctgaatgataattttttacaaaatcatacatttccattcacaatacttcggatatgcgaattgtgttatgatcctttcaaatattacaagatcaatgaattggagaagtttgtaaatgcgctagaaaaatgttgcatggtaactagcagttggcaggtttttgataaaacacacggtgagaagcaagaggacgataaggagaaagatattaacttcatcaagaatcaagaagatgtctcactaatgaagataccgtggataaccgagaacaatactagggagttggcaccctttataagagaaatcgactctataatgagtgtcaacctaggctacgatgacgaggatgaagaggatgaagacaatggtgatggagaagaggaaggattttttgatggtgatgaagatagggagatggggaataagagtaagcgtaatgttttgctgaaagatgaaaatttcatggtggaagaatactatgaggatgattgcgggataaacgatgataataccgataataaaggacaaaattgtcagagcgatgttacgaagaataatagcgatgatgaagatgacgatgacaacgatgacgattatcgtgaagatggtgcagatgaagatgatgaggatgatgatcacatgggcagcacagatgacgatgaagatgatgacgaagataggcaggcgggcgaaagtaccaaggtgcaaaattttgacaagaaaaatgaaactccaaggaagaggaagcccacagatttagataactttgaatatgacgaatcaccatcattcacaaacatggatctcacgacgccaaagaaatataaacataccgcaacgggcaggttctccataatagagtcgccatcgtcttcgctcctcaatgccatggacggcagtaatgagatctcatcgagccaggaggaggagaaagaggatgctcgtgaaaaccatgagggtggaagtgaaggactgttaccaggtgacgaattagtgagtccatcgatgagctcttcacaagaggataagatggttgcgattgctggtattacctaccgtgagaatattagcagtccattaggcaagaagttcagatga

SEQ ID NO: 75433 - DNA, 774 bp, Saccharomyces pastorianus
atgaactctacaaccccatcgattcaagatcaatatattttggccagcaaagtacgctccaagctggcaaaatgcgttagcgtgactactaaaaacaaagactacaacctgagagttttagtcgggcacgcaaacttgctggataagattactgaaaatgtggaaactcataatgctgcaaccaacgcccttgccggagaccctttcagtaaaggacctgaaaacttgtccatcgaacatatcgaattgtccaatgctaatgctagtaaaaatgacgtcggtaaggaggaaaatgcagaaaagacgatagaaagtgaagattactgtgatttttactctagtgacgaagatccagatgctgacactctatcctctactgacagtgaagacgatgatgattatgaagactatgattttgagtacgattactctggcggtgattataacaagaaaattgacatgtactttagttttcacaccgcacctaattatcaatatttgactcacacaaactctcattccgagcagacggatgaacttgccgaatcaacgccgcgctacaatgctcttcccgccactgcctccacgacagaggaagaacaggacactgaaacgctcgatgctgtgagtttgcatagttcagcgccaatctttcgtgtgctctctcggcgggtaaatggacaagaagatgacagcgaaaacgagagtagtagcgatgtcgacgatggttccgtaccattaacgagatttcattcttgtcctatcacagcataa

SEQ ID NO: 75434 - DNA, 180 bp, Saccharomyces pastorianus
atgggcttttttaacaataatccggtaattgaattcttccacagaataacgagaaaacccagtaccattgcgatgtgggtgtttgctggtctgatttgctcaagtacattttatttaatgttcatgtcatcacctacaatcgacttcaactcgaagagtaagaaaaaaaatgataaataa

SEQ ID NO: 75435 - DNA, 1740 bp, Saccharomyces pastorianus
atgaagtacgttgttgtttcaggtggtgtcatttcgggtatcggtaaaggtgttcttgcatcttcaactggtatgctaatgaaaaccctcggtttaaaggttacgtcaattaaaattgacccttatatgaacattgatgcaggtactatgtctcctttggaacatggtgaatgtttcgtgcttgacgacggtggtgaaacagatttggacttgggtaactacgagagataccttggagttaccttgactaaagaccataacattactactggtaaaatatactcgcacgttattgctaaggaaagaaaaggtgactatttaggcaaaaccgtgcaaattgtccctcatttgaccaacgctatccaagattggattgagcgcgtggccaaaattcctgtagatgacaccggtatggaaccagatgtttgtatcattgaattgggtgggacagttggtgacattgaaagtgctccttttgtggaggcactaagacaattccaatttaaagttggaaaggaaaattttgccttgatacacgtttctctagttcctgtcatccacggtgaacaaaaaactaagccaactcaagctgccatcaaaggtttgaggtctcttggtttggttccagatatgatcgcctgtagatgtagtgaaactttagataaaccaacaatcgataagattgccatgttttgtcatgtggggcctgaacaggtggttaacgttcacgatgttaactctacttatcacgtcccattgttgctactggaacaaaagatgattgattacttgcacgccagattaaagttagatgaaatatcacttacagaagaagaaaaacaaagaggcctggaattattgtctaaatggaaggctacaacaggtaacttcgatgaatccatggaaaccgtgaagattgctttggttgggaaatacaccaacttgaaagattcttatctatcagtgataaaagcattggaacattcatccatgaagtgtcgtcgtaagttagacattaaatgggtggaagctactgatttggaacctgaagcacaagaaagcaacaaaactaaatttcatgaagcatggaacatggtcagtaccgcagacggtatcttaatccccggtggttttggtgttagaggtactgaaggtatggttttggctgctagatgggctcgtgaaaatcacattccattcttaggggtttgcctgggtttacaaattgccaccattgaatttacacgtagtgtgttgggaagaaaagacagtcattcggcagaattttatccagacattgatgaaaaaaatcacgttgtcgttttcatgcctgaaattgacaaggaaaccatggggggctcaatgagattaggtttgagaccaacatttttccaaaatgaaactgaatggagtcaaatcaagaagttatacggtgacgtctccgaagtccatgaaagacaccgtcaccgttacgaaatcaatccaaagatggttgatgaattggaaaacaacgggttgatctttgtaggtaaggacgacactggaaagcgttgtgagattttggaattaaagaatcatccatactatattgctactcaatatcacccagaatacacatcaaaggtcttagatccatccaaaccatttttgggtttagttgctgcttccgctggtatccttcaagatgtcattgaaggtaagtacgatcttgaggccggcgaaaacaaattcaacttttaa

SEQ ID NO: 75436 - DNA, 84 bp, Saccharomyces pastorianus
atgtggggcctgaacaggtggttaacgttcacgatgttaactctacttatcacgtcccattgttgctactggaacaaaagatga

SEQ ID NO: 75437 - DNA, 699 bp, Saccharomyces pastorianus
atgttcccctatttaacaagaatgaatttagccataaagatgggagggctaactttaaaaggaagttcccccaatgcttttttaaataacaccactattgctaggagattcaagcatgaatatgcgccacgtttcaaaatcgtacaaaaaaagcaaaaaggtagagtgccagttcgtacaggtggttcaataaagggatccactttgcaatttggtaagtacggattacgactgaaaagcgaaggtattaggatatctgcgcaacagctgaaggaagcagataacgcaattatgagatatgtcaggcctttaaacaatggtcatttgtggaggcgtttgtgtacaaacgttgctgtatgtatcaagggtaacgaaacaagaatgggtaaaggtaaaggtgggtttgaccactggatggtgagagtacccacagggaagatccttttcgaaataaatggtgatgatttgcatgaaaaagtcgcacgtgaagccttcagaaaagcaggcaccaaattacctggggtatatgaatttgtatccttggattctctggttagagttggattacatagtttcaaaaatcctaaagacgacccagtgaagaatttttacgatgaaaatgcaaagaagccatcaaagaagtatttgaatattttaaagtctcaagaaccacagtacaaactcttcagaggacgttga

SEQ ID NO: 75438 - DNA, 3078 bp, Saccharomyces pastorianus
atggatcgcaaaaaaacacttataaactcaagtgtttctaataataacagtaccatcaagggcctacagttattcattgcagatcttcgttctgcacaacaagcacaagagcaggaaaagagaatacaatctgaaattgtcaaaattaaacagcatttcgatgctgcaaagaaaaaacaaggcaatcacgacagattaggtggctatcaaagaaagaagtacgttgccaagctagcctatatatatattacttctaatacgacaaaactaaatgaaattttattcgggttggagcaaacggtagagctgttgaagtccagcatattttctgaaaaattcattggatatatgacccttgagttgctttatgaacgtagtgaagttgttgccaaagttaacgatgaggtgaattatcaactgatgaaagatctctcttcttccgatgataatttcgtaatgttggcgctgaattttgttggtgtagtaggagaacttacgaaccgtctagcgtacaacgatgatatcacaacaggagtattcaagatattaagatcaccgacctcctccatttatctcaagaaaaaatcagcattgtcatttctagcactattgaaaagtaatcattctatactgaccgaagatttacaacgtaagcaactatggatacaaaggatattaagcttattggatgatacggaaaactataggttaactttagctacgattccgttaatagaattcattgcaaaatacattgatcccagttactgtacgagactattaccacagctaacagaaattttgtacaattgtgttgttgttggtacttcaagatctagtgacaatcagtttccgttagaatatacgttcgcgaatatgccaaatccttggcttatcacaaaagttgtctctttgttgagcatattgattgcctcaccaactgagagggattctggctcattattacaaaccaacaacatagataatgaattactaaataaacttcgaaagtgtgtttccgttgccatcgaattaggaaccagacaagctcaagatcccatggaacgtatcgtccaaaacacagtattgttttcattgatcaatttcgcctctaagcttgatccgtcggatgaagctatcagcaattctgtgacagccttatgttccctgctaacatctaaggaaattaatattcggtatttaacgctagattcattggtcaaattatgctcatcaagcgggaaacctgcaattgatgccgttcgttacaagaatttggatatgatttttcatcttttgaacacagaaagagattcatctattgttaggaaggttgttgacttgttatatacctttactgatgttgaaaacgttaagattattgtggacggattactgcagtatattttatctccgaaaaatcttgctgaaccgcaaataaaatctgatattgcagttaaaatagctattttgaccgagaaatatgccacggatatcaattggtttgtaattatttcgttgcagttgctatcattaacttcaaatacaactattaacgatgatgagatctggcaacgactatgtcaaattgtagtgaacaatccatctttacatagaataacatgtgaacggttggtggactatttatgtaaaaagcaagcatctgaagctattattaaagctgcggcttttctactaggggagtactcaagtctcataacagacaggatttcaagcgcaaatttatttactttgtttgccgagaaatattttagtgcaccaaatgtggctaaggcgatgatattgactacgatgatcaagttgtacaagacctcacctgagatcggctccaacgtcatcaaatttttccaattggaattgaactctcttgatattgagttgcaaacaagatccttcgaatatctcaacattattcaactggctaaggtgaacggaaatacagatattttgcaaattttatttgaaccaatgccgccttttaacagcaaatctaatccattattgaagagattagggtcactgccggcatcagcgggtagcacaactttaataaattcaccatccgaagcatcctcctccacgcctgacttactatcaaaaagagcaaactcttccaggtcgatcatggttcccatgcccccaccatctcgtaggaacaccattgatgatgcaaattccaaaattagttcatctgaagacttttcaggaaaggactcttattattcaaggcagatcctcgctccaaattggagggaaggtttcacaagaatgatttcgcataagcagggtgtgcttttcacatcatctttgatgaaagttttctatcggataaccactcctgatgcacaacagccatacgtgtttcatatatctcttgccttcattaacctgactgagtgggaaatcacgggattatccacacagattatcccttcaaaaacgcaaggtaatcctgagtatttaattctgaatattaatacaccttctactgctactattgggccccataaaagggcagagcaaagctatgaagtttcaataagaaaacctttcgacgttgaagatagtccaattttggcaattcatttcaaatgtggcggtagtacaaacactatcaatttgaaaactgccataggcatgaccacaacactaattagcagcgatgtcaatcctagcatgcatttgaatttggcacagttcatcagccgttggaagactttgagcgatgctttgggaaaagagggagaataccaaaaatctggcataaagctcaacaaggattttagaaaagttgaaacaatcagtttagaagacggactcctactattgacgcaaacagtgaagaggttgggctttgatatagtcgatcagaccagtgttcgtagtacattgtttgtctcgggtattattcatacgaaaagtgagggaaacttcggttgtttaatgaagatacaataccaggtaaatggatcagttaatgttacctgtaaaacaacgacggccggtcccctggcgaagtacattgtcgaatgtataaagaatgtgcttacgaagtaa

SEQ ID NO: 75439 - DNA, 774 bp, Saccharomyces pastorianus
atgtccacaggtattacttatgatgaagatagaaagacacaattaattgcccaatacgaatctgtaagggaagttgtgaatgcagaggcaaaaaatgttcatgttaatgaaaatgcctccaaaattttattattggttgtttcgaaattgaaaccagctagcgatatacaaattctttacgaccatggtgtgagggagttcggggaaaactatgttcaagagttgatcgaaaaggcaaaattactaccagacgatatcaagtggcactttattggcggtttgcaaacgaataaatgtaaagatttggctaaagtgccaaatttatactctgttgaaacaatcgactccttgaagaaagccaaaaaattaaacgaatcgagggctaaatttcaaccagattgcaacccaatattgtgtaatgttcaaattaatacctcccgtgaggatcaaaaatcgggcttgaataatgaagcagaaatatttgaagtcatcgacttcttcttatccgaagaatgcaagtatattaagttgaatgggttaatgactattggttcatggaacgtctctcatgaagatagcaaagaaaacagagactttgctacgctggttgagtggaagaagaagattgatgctaaatttggtacatcattgaaattgtctatggggatgagtgctgatttcagggaggctataaggcaaggaacagcagaagtcagaattggtaccgacatttttggtgctagacctccacaaaatgaagctagaatcatttag

SEQ ID NO: 75440 - DNA, 2118 bp, Saccharomyces pastorianus
atgagcggatctatcgatgtcatcactcattttgggcctgatgcagacaagccggaaatcatcactgcattagaggatttaactaaactgcatgcattgtccgtcgaggatctatacattaaatgggagcagttctccaatcaaaggcgtcaaactcacacagatctgacttccaagaacatagatgagtttaaacaatttttacaattacaaatggaaaagcgtgctaaccaaatttcatcgtcctctaaggtaaacacatccacaaaaaaactagtgattaaaaaaagtttgaattcaagtcccttgtttggccttagtattccaaagactccgactttaaaaaaaagaaagttacatggtcccttttcactcagtgattccaagcaaacatataatgtaggctctgaggcagaaacaaatgaaaaaggaaatagttctttaaaattagagtttactccaggcatggcagaagatgctgtgggtgacagtgctccattgtcccacgctaaaagctcggatgccaagactcccggctcgtcgacattccaaactccaacaacaaacactcctaccacatcgaggcaaaatgttcctgctggtaaaattttggattctttgaaccctgaaaatattgaaatatcatctggtaatccaaatgcaggccttctttcgactgaagaaccatcatataaccaggtcaaagtagaaccattctatgatgctaaaaagtataaattcagaacaatgaggcaaaacttacaggaagcgtctgatgtcctcgatgatcaaattgaatcgtttactaagattattcaaaatcactataagttatctccaaacgacttcgctgatccaacgattcaatctcagtccgaaatttatgctgttggaaggatagttccagattcgccgacctacgacaagtttttgaatccagaatcgctttccctagagacctcaagaatgggcggcgttggaagaagagtaaggttagacctatcgcaggtcaacgaactttcgtttttcttaggccaaattgtggcattcaaaggtaaaaatgctaatggggattacttcaccgttaactctattttgccgctaccttatccaaactccccagtgtccacatcgcaggaactgcaggagtttcaagcaagtttggaaggttcttctttgaaggttatcgtgacctgtggcccatactttgcaaatgataacttctccctcgaattgttgcaagaatttatcgatagtataaataatgaggtaaaacctcacgtcttgataatgtttggcccatttatagatatcacccatcctctgatagcgagtggtaaattgccaaattttccccagttcaagacacagcccaaaacattggacgagctttttttgaagttattcactcctattctaaaaaccatatcaccacatatccaaaccgtattgataccctccacaaaagatgcaatttctaatcacgccgcatatccacaagcttctttaattagaaaggctttacagctgcctaaaaagaacttcaaatgcatggctaatccttcatcttttcaaataaatgagatatacttcggttgctcaaacgttgatacattcaaagatctaaaggaagttataaaaggcggtactacctcatcaagatatagattagatcgtgtttctgagcatattttacaacagcgcaggtattaccccatatttccaggtagtattcgtacaagaataaaaccaaaagacgtatctacgaagaaggaaaccaatgatatggaaagcaaagaagaaaaagtttatgaacatatatctggtgcagatttagacgtgagttatctgggactaacagagtttgttggtgggttctcgcctgatataatgattatacctagtgaattacaacactttgcaagagtcgtccaaaacgtagttgttataaatcccggaagatttattagagcaacaggtaacaggggatcctatgcacaaattactgtccaatgccctgatcttgaagacgggaagttgacgcttgttgaaggtgaagagccagtttatctacacaacgtgtggaagcgcgctagagttgacttgattgctagttga

SEQ ID NO: 75441 - DNA, 1038 bp, Saccharomyces pastorianus
atgaccatagataactacgacaacagtaaacaggatagcagcaaatacgaggttagtggtacgggtgatggcaggaacggcgatggcggcttgcctctagtacaatgtgtcgcaagagctcgtatcccaaccacacagggtccggatatctttttacatctttacagtaacaacagggacaacaaggaacatctagccattgtgtttggtgaagacatacggtcgcgctcgctattccgtagaagacagtgcgagacgcaacaagatagaatgatcaggggcgcttatattggcaaactgtatcccggcagaactgtggcagacgaagacgatagactcggattagctctggagtttgatgatagtacaggtgagttattagcttccaaagccactacatgggacgcccataacgacacgctggtacggatccattctgaatgttacaccggtgaaaacgcatggagcgcccgttgtgattgtggtgaacaattcgatagggccggtaggcttatcgcttgcgaccacgaacccacaagcaacatcaaaggtggcaacggccatggtgttatcgtgtatctaagacaagagggtcgtggcatcgggttaggtgagaaactcaaggcctacaacctgcaagacttaggtgctgacacagtgcaggccaacttaatgctgaaacatcccgtggatgctagggacttctcgctgggtaaggctattttgctggatcttggcattggtaatgtcaggctgctgacaaataacccggaaaagataaaacaggtagatcatgcgccttaccttaagtgcgttgaacgagtgcctatggtacccatacactggacaaactccagtgaaggcatagactccaaggagatagaaggttacctaaggaccaagatagaaagaatgggtcatttactaacggagcctctgaaacttcatacaaaccctcaacctactgagacaagtgaagcccaaaaccaaaaccgtatgaactctgcgttgtcatcaacatcgacgctggcaatataa

SEQ ID NO: 75442 - DNA, 1017 bp, Saccharomyces pastorianus
atgaatgataaactccaagaagagcataacgaaaaagacaccacttcacaaattaatgatttcacgccgccgcatatgagtatagactttcattcaaataacaatagcaatatcatcgagactattggcgtttccaaaagactaggaaattctgtattaagtgaactggattctagagctagctcaaaatttgaatttttaaaagatcaatccgaacaacaatacaacggcgacaagaacaatgaaccaaaatcgggctcgtataatattaatgagttcttccaagcaaagcacgactctcaatttggccagatggagtcgctagacacacattatacccttttacatacgcccaagagaaagtcacaacatgcaatcccacaggatcgatcggattcgatgaaaaggtcgagaccgtcccgctcaattccatacactacaccagtggtaaacgatatcacaagaagaatacgaagattgaaattacggaactcattggttaatggtaatgacatagtggctagagcgagatctatgcaagcaaactctaacgttaattcaataaagaacacaccattgtcaaagcccaagccatttatgcacaaaccaaactttctaatgcccactacgaattctttgaacaagatcaattccgctcaccgtaatacatcctcctcttcgacagcttcatcgataccaagatctaaagtacacagatcgacatcaataagagatttacacgccaaaaccaaaccggtagaacgcacgccagttgcgcaaggaacaaattcgcaattgaagaattcagtttccgtttttgatagactttacaagcaaacaacgttctctaggtcgacgtctatgaacaacttatcgtcaggaacctctgcaaaatccaaggaacacacaaatgtaaagactcggttggttaaaagtaagacaagtggttcattgtccagtaaccttaagcaaagtactgccaccggcacaaagagtgatagacctatttggcggtga

SEQ ID NO: 75443 - DNA, 957 bp, Saccharomyces pastorianus
atgtcttctaacgcccaagtcaaaaccccactacctccagccccagctccaaagaaggaatctaactttttgattgatttcttaatgggtggtgtcagtgccgctatcgccaaaactgctgcatctcccatcgaaagagttaagcttttgatccaaaaccaagatgaaatgttaaaacaaggtactttggacagaaaatacgcaggtatcgtagactgtttcaagagaaccgctacacaggaaggtgttatctcattctggagaggtaacactgctaacgttatccgttatttccccactcaagctttgaatttcgccttcaaggacaagatcaaggccatgtttggtttcaagaaggaagaaggttacgccaaatggtttgccggtaacttggcatctggtggtgctgctggtgccttgtcattactatttgtttactctttggattatgcaagaactagattggctgctgactccaagtcctctaaaaagggtggtgcccgtcaattcaacggtttgatcgatgtctacaagaagaccttaaaatctgatggtgttgctggtctttacagaggtttcttaccttctgtcgttggtattgttgtctacagaggtctatacttcggtatgtacgactctttgaagcctatattgttgactggttctttggaaggttcattcttggcttcattcttgttgggttgggttgttactactggtgcttctacatgttcttacccattggatactgttagaagaagaatgatgatgacctccggtcaagctgttaagtacgacggtgcctttgactgtttgaagaagattgttgctgctgaaggtgttggttctctattcaagggttgtggtgctaacatcttaagaggtgtcgcaggtgctggtgttatctcaatgtacgatcaactgcaaatgatcttgtttggtaagaagttcaaataa

SEQ ID NO: 75444 - DNA, 285 bp, Saccharomyces pastorianus
atgtcattcatacctattgtatgtggtatgaagagtttcgactcttcatacgataccgttcccggacatcaaaacctgtattgcccgaattgtcacaattatagtgtcggccccataaaaagaaaggaatttttcactatttggtttataccgttggttccggtcttctggggaaaacagttgcactgccccatatgcaattggcgacaagattttaagaatgacgaacagcttaataaagtcattcaagaacaacaaaacttacgacaaaagcagcccaactga

SEQ ID NO: 75445 - DNA, 1131 bp, Saccharomyces pastorianus
  modified_base (210)..(300): a, c, g, t, unknown, or other
atgtgcgccaatatccccgaattcgactctttttacgaaaatgaaaatataaattacaacttggaatcattcgcacctttaaattgtgatgttaattcgccctttctccccattaataacaatgacatcaacgttaatgcttatggtgacgcaaatttaacgtactccaactttttattgtcttataacgataagctggctactacaacnnnnnnnnnnnnnnnnnnnnnnnnnnnnnnnnnnnnnnnnnnnnnnnnnnnnnnnnnnnnnnnnnnnnnnnnnnnnnnnnnnnnnnnnnnnctcggtaatgacatcagtcagatggcttttttactcgattacccttctactctcaacgaaccgcaatttgccgtaaattgtaaagacatttacagaaaggatatatcaacaccttcgtcattagtttcgagtctgccatctgcaaagttttcgttatccctatcgaattcgccttctccgccaccaccatcgtcgtcctctttgaaacatggggaagcaataatttctaataccagcgaaagcagtgacatatttgccgatcctaattcatttgaaaaggatactatgcccctaacgcaagaactgacgctagaaaatctaaataatcaattaaactatcccgatttcacgataaacgccatcgagcaggatcctgccccttcgtctttttcatcctcatcttcgtcttcggagtcaacggtctcttccagcaggaagaggaagccctgtcatgattcctacacacattcttcacgctcttcctcagagtctaagaaaatttccgactcgagattatccgccgaaggtttagccaaagtgcttaatttagaatcccccgaagaagctttaaaaagagaacgctttatattgggtattttccagaatgaattaaattacccgctaggttaccaaacgtggattagggatactaccaaagaatataggacaaagttaatcaatcaactgcacgaacgagtaaaggtaaagtaccccgaatacaaccagtccatactggaaacgataattagacgaggcacctactacatgatgcagagtaggttaagaagagagaggagaatgaagcttaaggaacgtaaaagaacaacctaa

SEQ ID NO: 75446 - DNA, 321 bp, Saccharomyces pastorianus
atggccaaatcattacgtgctagcagtcatctaaatgctaaatctgtcaaaagacgtggcgttttccaaaaagcagtagatgcacgtgaacaaagaatatccgataaactaaaggaagacttactaaagcaaaaattagaagatctaaaaaagaaagaagagcaaggaattgacatggatgtcgacgagaaaaaatccaatgaagaagctcccagaaaaaaaatcagcacctctggttggagagacggtagacatcacacttataaaaaggctaagctgatgaaacaatctaagaaaaaaacttctttcactagattctga

SEQ ID NO: 75447 - DNA, 438 bp, Saccharomyces pastorianus
atggatagaaatgtatatgaagcctgcagcaatataattaaggaatttggaacacatgtagtgagcgccgatgaagtactcgcagaaaagatagataatgctgttcctataccgttcaaaacaagggaggacatagatgccgacgtggaaaaagatagaaacgaaggagttttcgaaggtaatatcattcctgatatcgacctacgtgtagtacactactacgccacgcagttgtgtctaaataagtaccctcatttgattaacgcctttgatgagacaagccttataacattgggtttactcatcgaaaagtgggtaaaagactatctaaccagcatccagacagaacagggaaggcaaagtaaggtaatcgggaaggggccatgcgaattcatatcaaaacatattgattataggcatgcgccaggtaatatctga

SEQ ID NO: 75448 - DNA, 435 bp, Saccharomyces pastorianus
atgaataccaacgagtccgaacatgttagcacaagcccagaggatactcaggagaacggtggaaacgctagctccagcggcagtttgcagcaaatttccacgctaagagagcaggacagatggctacccatcaacaatgtagcgcgactcatgaagaatactctcccaccgagtgctaaggtatcgaaagatgcgaaagagtgcatgcaggagtgtgtcagtgagctcatttcttttgtgactagcgaggccagcgatcgatgcgctgctgacaaaagaaagacgataaacggggaagacattctcatatcattgcacgccttaggattcgagaactatgcagaggtgttgaaaatctacttggctaaatacaggcaacaacaggcgctgaagaatcaactaatgtatgagcaggacgacgaagaggtgccttga

SEQ ID NO: 75449 - DNA, 1725 bp, Saccharomyces pastorianus
atggcgaaaaaaaactcacaattgccctctactagcgagcagatcttggaaaggtccacaacaggagctaccttcctcatgatgggccaacttttcaccaaactggtaacgttcatactaaataatttgttgatcaggtttctgtcgcccagaattttcggtatcacggcctttctagaatttatacagggcacagtgttattttttagcagagatgcgattcgtctgtcgacgttgagaatctcagactccggtaatggaataatcgatgatgacgacgaggaggagtaccaggaaactcattacaagtctaaagttttgcaaaccgcagtcaattttgcttacattccgttttggatcgggtttccactgtccattggtcttatcgcctggcagtacagaaacatcaacgcgtatttcatcactcttccattcttcaggtggtcgatttttcttatctggctgagtatcatcgtggagctgttaagcgagccattcttcatcgtcaaccagtttatgttgaactatgccgcaaggtcaagatttgaaagcatcgcggtgactacaggatgtattgtcaattttatagttgtttatgccgttcagcaatcccgctacccaatgggggttgtcacatcggacattgacaaagaaggcatcgccatattggcatttgccttgggcaagttagcacattcgatcaccctgctagcatgctactactgggactatctcaagaatttcaaaccaaagaaattgttcagtaccaggctaacgaagataaaaacgcgtgaaaacaacgaattgaagaaaggctacccaaagagcacatcttattttttccaaaacgacattttacagcacttcaaaaaagtttattttcaactatgttttaagcatttgttgacagagggtgataagttgattatcaattctttatgtactgtggaagaacaaggcatttacgctctattgtcgaactatggatcgctactaacaagattattatttgcgccgatcgaagaatctctgcggttatttttggcccgtttattgtcttcgcataaccctaaaaatttaaaactatctattgaagtcctggtgaatttaacaaggttttacatatacttatcgttaatgatcattgtatttgggcctgccaattcatcctttttattgcagttcttgattggctcgaaatggtccactacttccgttttggacactataagagtctactgcttttacatcccatttttatcgcttaatggtatttttgaagcttttttccagagtgtagccactggtgaccaaattttgaaacattcatattttatgatggccttttctggtattttcctgctcaattcctggcttcttattgaaaaactcaaactatcaatcgaaggtttgatattgagtaacatcattaacatggtgttgagaatattgtattgtggagttttcttgaataaatttcatagggaattgtttacagattcctcttttttcttcaattttaaggatttcaaaacagttattattgctggctcaacgatctgtctacttgactggtggtttattgggtacgttaaaaatttacaacaatttgttgttaacgtattattcgcaatgggattgttagcgttaattttggtcaaggagcgccaaaccatacaatcttttattaacaagagggcggtttccaattctaaagatgtataa

SEQ ID NO: 75450 - DNA, 1563 bp, Saccharomyces pastorianus
atgtcatcaagcgaaaacacgttactggatggaaagtcagagaacacaatacgatttttaactttcaatgtcaatggtataagaaccttttttcattatcaaccattttctcaaatgaatcaatcccttagatctgttttcgacttttttcgagcagacataataacattccaagagctcaagacggaaaaattgtctatctctaagtgggggagagttgatggtttttattcttttatttctatccctcaaaacagaaagggatattctggcgttggctgctggattagaattccggaaaagaaccacccactataccatgcattacaagtcgttaaggcagaagaaggtataacgggttacttgacaataaaaaatggtaagcattcagcaatctcctatagaaacgacgtaaatcaaggaattggtggttacgattctttagatcccgatttagatgagaaaagtgcactggaactagattcagaaggcagatgtgttatggttgaactggcatgtggaatagttattatcagtgtatattgtcccgcaaattcgaactcatcggaggagggtgagctgtttagaataaggttcttgaaagttttattaagaagagttcggaatttggacaaaattgggaagaagattgtgctaatgggcgacgtaaatgtttgccgggatcttatagacagtgccgatacattagaacaattctcaattccaataacagatcccatgggtggaacaaagttagaagcacaatatagggataaagcaatccaatttattatcaatccggacacgccacatcggaggatatttaatcaaatattggctgattcacttttaccagacgcgagtaaaagggggatactgatagacactacgaggctaattcaaacaagaaatcgacttaaaatgtatacagtctggaatatgttaaaaaatttaagaccttcgaattatggctcacggatagattttatcctagtgtccttaaagcttgaacgatgcataaaaacagctgacattcttccggatatattgggctctgaccattgtcctgtgtattctgatttagatatagtggacgacagaattgaacctggtacgacacaagttgccataccaaaatttgaagcaaggtacaaatataatttaagaaaccatgatgttttagagatgtttgccaaaaaggatacgaataaagaatctaataaacagaaatattgtgtatcaaaagtcatgaataccaaaaaaaacagcaacatcaaaaacaaatcgctcgactcatttttccagaaggtaaatggagaaaaagatgacaggattaaagaatcctctgaaattccacagcaagctaaaaaaagaatctccacgccaaagttgaatttcaaggatgtcttcggaaagcctcccctgtgcaggcatggggaggaatccatgctgaaaacatcgaaaacttcggccaatccaggtagaaagttctggatttgcaagagatctcggggtgattcaaataatacagaatcatcatgtgggttttttcagtgggtttaa

SEQ ID NO: 75451 - DNA, 1062 bp, Saccharomyces pastorianus
atgccaaagagaattgtatacaatatatccagtgacttccagttgaagtcgttactgggagagggtgcatacggtgtggtatgttctgcaacgcataagcccacgggagaaatcgtggcaataaagaagattgaaccattcgataagcctttgttcgcattacgtacgctgcgtgaaataaagatcctgaagcacttcaagcacgaaaatatcataacaatcttcaacattcaacgccctgactcgttcgaaaacttcaatgaggtctacataattcaagagctaatgcagacagatttacaccgtgtaatctccacccagatgctgagtgacgatcatatacaatattttatataccaaaccttgagagcagtgaaagtgctgcatggttcgaacgtcatccatcgtgatttaaagccctccaaccttctcataaactccaactgtgacttgaaagtatgtgatttcggtttagcaagaatcattgacgagtcagccgcggacaattcagagcccacaggtcagcaaagcggcatgaccgagtatgtggccacacgttggtacagggcgccagaggtgatgttaacctctgccaaatattcaagggccatggacgtgtggtcctgcggatgtattctcgctgaacttttcttaagacggccaatcttccctggcagagattatcgccatcaactactactgatattcggtatcatcggtacacctcactcagataatgatttgcggtgtatagagtcacccagggctagagagtacataaagtcgcttcccatgtaccctgccgcgccactggagaagatgttccctcgagtcaacccgaaaggcatagatcttttacagcgtatgcttgtttttgaccctgcgaagaggattactgctaaggaggcactggagcatccgtatttgcagacataccacgatccaaatgacgaacctgaaggcgaacccatcccacccagcttcttcgagtttgatcaccacaaggaggcactaacgacgaaagacctcaagaaactcatttggaacgaaatatttagttag

SEQ ID NO: 75452 - DNA, 1581 bp, Saccharomyces pastorianus
atgacaatttctaatttgttaaagcagagagttaggtatgctccctatctgaaaaaagttaaggaagctcacgagcttattccattgttcaagaatggtcagtaccttgggtggtccggttttacaggagtgggtactcccaaggcagtgccggaggcactgatagatcacgtggagaagaacaatttacaagggaagttgagattcaacctttttgttggagcttctgctggtccagaggaaaaccgttgggctgaacacgacatgatcattaagagagcccctcatcaagtagggaaacccattgcaaaggcaattaaccagggtagaattgagttctttgataaacatctgtccatgttccctcaggatctgacatacgggttctacaccagggaaagaaaagacaacaaaatccttgattatactataatcgaggcaacggccattaaagaggacgggtctatcgtcccaggtccctctgtcggtggttctccagaattcattacagtcagtgataaagtgattattgaggttaacacggctacgccttcgttcgagggtattcacgatatagacatgcccgtgaacccacctttcaggaaaccatacccatatctgaaagtggacgacaagtgtggtgttgactccatcccggttgatcctgaaaaggttgttgcgattgtggagtccaccatgagggaccaggtcccaccaaatacgccctctgacgacatgtccagggctattgcaggtcatttggtcgagtttttcagaaacgaggtaaaacatggtaggctacctgaaaacctgctgcctttacaaagtggtataggtaacattgctaacgctgtcattgaagggcttgctggcgcccaattcaagcacttgactgtatggacggaagtgctgcaggactcgttcttggatcttttcgagaacggatctttggactacgccactgctacttccatgagattgactgaaaagggtttcgacagagcctttgcaaactgggaaaatttcaaacacagattgtgtttgaggtctcaagtagtgtcgaacaatccggaaatgatccgtagattgggtgtcatcgccatgaataccccagtagaagttgacatttacgcgcacgccaattctacaaatgtgaatggttcccgtatgttgaacgggttgggtggatctgctgatttcttgagaaatgcaaagttgtccatcatgcatgccccctctgcaagaccaactaaagtagaccctaccggtatctctaccattgttcctatggcctctcatgtagatcaaactgagcatgacctggacatcttggtcactgaccaaggtttggcggatctaagaggtctatcgcctaaggaaagagcccgtgaaatcatcaacaagtgtgctcatcccgattatcaagctttgttgaccgattacttggacagagcagagcattacgctaaaaagcacaattgcttgcatgaaccacacatgctaaagaatgctttcaagttccacaccaacttagctgaaaagggtacaatgaaggtcgacagctgggaaccagttgactag

SEQ ID NO: 75453 - DNA, 2685 bp, Saccharomyces pastorianus
atgagtgagggacaaattccaagctcagatgtgttaggctcgcaattgggtgttggtgtacaaggcgccagtctttactgtccgcaagaaaattacactacgaagaagcaagaaaagccacaatggctaagaccagtggatgatacattggccgaggatgcactagaccttcatatagtggtcaaaagtctgctttgtgatactgccataagatatatttccgacgacaaggttttgcaagaatcagatgccgacgatgatctcataactagcgatattgatgaagatacggacaatcagggggatacatctatagtggtcaatccagtgatacccgtggtaccgaaagatgtccatttttttaagaaagttgacgttggtaatggttctatgtttggcgtgaactgcgatacgccagtttcatttcaagattacattccttcagatttgctgcgcaacttagatgatacattacaagaaagtactaactcttcgaggccgatgcaagacgccttcttttgggatcctactgtggctaatcgactggactctcaatatattcagacagcatcagatttaagaaattatagagacggaaccgaaatcatagcatatgcctcgggtaaaacaggctcagtcctaaatatagcagttctgacacgacaaaatacattgcatttaaaccgacataacaatgtaacgagtatcgaattgcattcacctatcaagagtattaagataccggaggcctctgagtccatcgggcggagatcaaacctggtgggcataatcaccgaaaattctttccaaatctttagaattgaaagtgtccactcaagatcatgtgatgtcatggttagtagttcagaaccactgtattttgttgaaatagacgaccttcaggtggtagattttgcattcaatccttgggacttacaacaattcgcaatcattgatatcaaaggtaactggagtatcgggaggataccaaagaatttcaataataataacaaaaggaaactacagttaatagataacctccacggtacgatttttgatccagaagaattatcgtcatggaaaagaatagaatggttttcacacttccaaaaaatactggtctttgataggtccaaaatgattgagatcgactttatgaacaattggcaaacggaagtagtacaagcgaaagcatggtcaaacatacgtgattataagcggatagatgataaaaatggtattttactcacttcaagggaaataatcatcgtaggggcatcagaatcaaatgatccagtgagaagaatatcttggaaacacgatctggatccagatgatactacgctcagaatcactggacaaaaggttaaaaagcctgaccatattcttctggtggcctttgtatattcgatgcggcataaacgcatctatatgcatgtattttcccataagaaagcaaacttgtttcaatccttaggatgttcaacagttcttgaaattccgggtgggacccccaccggtatagagacaatcttaacactggatcatatagacgatgaatctcggagagaggaggatgcagatgaaaattttgagttagttgtagattttttagtcaaactaaggaactcatccgaggtttattactatgctttatcaaacactcaaaactccgaaccgaacaaacaagaaacccccatcattgtcgaccatcccgaatgggcgtcacttttcaataacgctgatgaacgtgaaaaggagagtatcggtgcactggtttctcaaattaagttgaaggaaagagagcgcatatctcgagtccaaaatttaattgagcatgaaaacagtcacgacgaagataaatatctccaagatttgggatatcgcttatctatagctacaaacgaattgcttgaatcttggcagaagacgaaagatgaaagcatccttagtgggtctttgagccattcaaaattgaaaaaccttgtggagaattcagattccttcgcgagtatacctgaattttcttcattactagatcagtttttccagtactatcaggatcaggatgtgacatttattggttttgagaaattgctacatttgtttttacatgaagacgttccgggcttggatatcttttacaacaaattattgcaatgttgggttttggtatccccgcaagcggaactgctgacaaaggagatagtcaaagacattatctggagtttagcaagacttgaaaaaccatcactttttgaaccgattcaaaacgaaatttcacgatcactaagtggtccttaccaggatattatctcctcttgggatatggatgatatcaatgaagaagatgaatcgaatgaatttaattttgatagtcaattttcagcaccctttaatggcaggcctccatttaatttaaattcgcaatctcaaattccaacgatcaaatcatcacaaagtagcggactggcaaggaggaaaagaatattaaagacacaatcacaaaaagctactccgttatcacaatccactcaaaacttaagtgtcctgccagattcaatgacaccagcatttactctaatgcagcccccttcctcgcagatatcatttgtgaacgattcacaaccgcgtaattctcaaaaagccaaaaagaagaagaaaaggatccgggggtttggataa

SEQ ID NO: 75454 - DNA, 2265 bp, Saccharomyces pastorianus
atgcctgcatcaaaactcacggagaaatctgcctcttccaagagcacacagaaaactacgaattacagttccatcgaggccaaaagcgtcaagacgtcggctgatcaggcatacatctaccaagagcctagcgctaccaagaagatactttactccatcgccacatggctgttgtacaacatcttccactgcttctttagagaaatcagaggccggggcagtttcaaggtaccgcaacagggaccggtgatctttgttgcggctccgcatgctaaccagttcgtcgaccctgtaatccttatgggcgaggtgaagaaatctgtcaacagacgtgtgtccttcttgattgcggagagctcattaaagcaacccgccatagggtttttggctagtttcttcatggccataggcgtggtaaggccgcaggataatttgaaaccggcagaaggtactatccgcgtagatccaacagactacaagagagttatcggccacgacacgcatttcttgactgattgtatgccaaagggtctcatcgggttacccaaatcaatgggatttggagaaatccagtccatagaaagtgacacgagtttgaccctaagaaaagagttcaaaatgaccaaaccagagattaaaaccgccttactcaccggcactacttataaatatgccgctaaagtcgaccaatcttgcgtttaccatagagtttttgagcatttggcccataacaactgcattgggatctttcctgaaggtgggtcccacgacagaacaaacttgttgcccctgaaagcaggtgtggcgattatggctcttggttgcatggataagcatcctgacgtcaatgttaagattgttccctgcggtatgaattatttccatccacataagttcaggtcgagagcggttgttgaattcggtgaccccattgaaataccgaaggaactagtcgccaagtaccacaacccggaaatgaacagagatgcagtgaaagaattattagataccatatcgaagggtttacaatccgttaccgttacatgttctgattatgaaactttgatggtggttcaaacgataagaagactatatatgacacaatttagcaccaagttaccgttgcccttgattgtggaaatgaacagaagaatggtcaaaggttacgaattctatagaaacgatcctaaaatagcggacttgaccaaagatataatggcatataatgccgccttgagacactataatcttcctgatcaccttgtggaggaggcaaaggtaaatttcgcaaaaaacctcggacttgttttttttagatccatcgggctctgcatcctcttttcgttagccatgccaggtatcattatgttctcacctgtcttcatattagccaagagaatttctcaagaaaaggcccgtaccgctttgtccaagtctacagttaaaataaaggctaatgatgtcattgccacgtggaaaatcttgattgggatgggatttgcgcccttgctttacatcttttggtccgttttaatcacttattacctcagacatagaccatggaataaaatatatgttttttccgggtcttacatctcgtgtgttatagtcacatattcagccttaatcgtgggtgatattggtatggatggtttcaaatctttgagaccactggttttatctcttacatctccaaagggcttgcaaaagctacaaaaggatcgtagaaatctggcagaaagaataatcgaagttgtaaataactttggaagcgaattattccccgatttcgatagtgccgccctacgtgaagaattcgacgtcatcgatgaagaggaagaagatcgaaaaacctcagaattgaatcgcaggaaaatgctaagaaaacagaaaataaaaagacaagaaaaagattcgtcatcacctatcatcagccaacgtgacaaccacgatgcctatgaacaccataaccaagattccgatggcgtctcattggtcaatagtgacaattccctctctaacattccattattctcttctacttttcatcgtaagtcagagtcttccttagcttcgacatccgttgcaccttcttcttcctccgaatttgaggtagaaaacgaaatcttggaggaaaaaaatggattagcaagtaaaatcgcacaggccgtcttaaacaagagaattggtgaaaatactgccagggaagaggaagaggaagaagaagaggaagaagaagaagaagggaaagaaggagatgcgtag

SEQ ID NO: 75455 - DNA, 240 bp, Saccharomyces pastorianus
atgaaaatgaacccttgtactgttatcctctgtaagtcgttatttttcttttgcctttttcaggttgactgctactgtaatcgtaagaatattcaaaatcaatcatctcgcatcgcaacaaaaataaaacgaagttactggtttaggtggcagaaacatataatattggcgaacattcataaaataattaaggcttaccaacgaagcataataaaattgccagtaaccaaaggtctctga

SEQ ID NO: 75456 - DNA, 2931 bp, Saccharomyces pastorianus
atgaaagtgaagaaatcaactagatcaaaagtttcgacagcatgtgtcaattgcagaaaaaggaaaatcaaatgcacaggtaaatatccatgtaccaactgcatttcttacgattgtacgtgtgtattcctaaaaaaacatttaccgcagaaggaggatagttcccagtctttgcctactacagctgttgctccaccctcttcccacgccaatgtagaggcttcagcagatgtacagcatctggacactgcgattaagctagataatcaatattacttcaaactgatgaacgacctgatacagactccagtctctccgagtgcgacgcatgctcctgatacttccaataatcctactaatgataataatattctctttaaagatgattccaaatatcaaaatcaactggttacgtatcaaaatattctgacaaatttgtacgctctgccgccttgtgatgacactcagctcttgattgataaaacgaagtcgcagttgaataacctgattaacagttggaatcccgaaataaactaccccaagctttccagtttctctcctcgcccacaaagatcgatagaaacgtatcttttaaccaacaagtatagaaataaaatacacatgacgaggttctccttttggacagaccaaatggttaaatcacaaagtccagattcatttctagccaccactccactagtagatgaagtatttggtcttttctctccaatacaggctttttcactaagaggtataggatatttaattaaaaaaaatatcgaaaacacgggttcatcgatgttaatagatacaaaggaaactatttatctaatattaagattgtttgatttgtgttatgaacatttgatccaaggttgcatctctatttctaatccattagagaactatcttcaaaaaataaagcaaactcctactacgacggcatctgctagtttgcctacttccccagcacctttatctaacgatttagtcatttctgttattcatcaactacctcagccatttatacaatcgatcaccgggtttacgactactcaattgatagaaaatttacatgattcattttcgatgtttcgaatagttactcaaatgtatgctcaacataggaagcgctttgcggaatttttaaaccaagctttttccttgccccatcaagaaaagagtgttttattctcatcattctgctcatcagaatatcttctatctactctttgttacgcatactacaatgttaccctatatcacatgttggacataaacactttagattacctagagattttagtgtcattgctagaaatccaaaatgaaattgatgagcgttttggatttgaaaaaatgctagaagttgcggttacatgctccactaagatgggattgtctcgttgggagtattatgttggaatagacgaaaatactgccgaacggagaagaaaaatatggtggaaaatatacagtctggaaaagcgttttttaactgatcttggtgatttatccttaataaatgaacatcaaatgaattgtctcttgccgaaggatttcagggacatgggattcattaaccataaagaatttttaacgaaaattggtacgtcctctttatcaccgtcatcgcccaagctaaaaaacttgtcattgtccaggcttattgaatatggtgagttagcgatagcccaaattgttggagattttttttcagagactctttataatgagaaattcacgtctttagaagtatccgttaaacccacaattatcagacaaaagttattggagaaagtttttgaggacattgaatcttttaggttaaaattggccaaaataaagcttcacacctcaagagtttttcaagtagctcactgcaaatatccagaatatccaaaaaacgatctaattgaagcagctaaatttgtaagttatcataaaaatacatggttctccatcttgggtgctgttaacaatcttattgctaggctatctgaagatccagaggtgataactgagcaaagcatgaagtatgcgaatgaaatgtttcaagaatggagggaaattaatcaattcttaatacaggttgatactgattttattgtttgggcatgtttggacttttatgaactgatatttttcgtgatggcttcaaaattttatgtggaagacccgcacatcactttagaggatgttatcaacactttgaaagtttttaagagaataactaacattatttctttttttaataataatttggacgagaaggattatgattgtcaaactttcagggagttttcgagaagttcgagtttggttgccatatccataagaatcatatttttaaaatactgctatgccgaacaaattgatagagccgaattcatcgaacgtttgaaagaagttgaaccgggtctaagtgaccttttgcgtgagttttttgatacccgctcttttatttacaggtacatgttgaaatccgttgaaaaatcaggctttcatttaataattagaaaaatgttagaaagcgactataaatttttgtatagagacaaattggccactggtaatattccagatcaaggaaattcaagccaaatttctcagttgtatgacagtactgctccttcatacaacaatgcttctacctcagcagcaaattcaccgttgaagttatcgtctttgttgaactctggagaggaatcgtacactcaagacgcatcagaaaatgttccatgtaatctgcggcatcaagatcgatcgttacaacagacaaaaagacaacattctgcgcctagccaaataagcgctaatgagaataatatatacaacttgggtactttagaggagtttgttagcagtggtgacctgactgatttatatcatactctgtggaatgacaatacttcatatcccttcttatga

SEQ ID NO: 75457 - DNA, 399 bp, Saccharomyces pastorianus
atgtccggtggtaaaggtggtaaagctggttcagctgctaaagcttctcaatctagatctgctaaagctggtttaacattcccagttggtagagtgcacagattgctaagaagaggtaactacgcccagagaattggttctggtgctccagtctatctaactgctgtcttagaatatttggctgctgaaattttagaattggctggtaatgctgctagagataacaaaaaaaccagaattattccaagacatttacaattggccatcagaaatgatgatgaattgaacaagctattgggtaatgttaccatcgcccaaggtggtgttttgccaaacattcaccaaaacttgttgccaaagaagtctgccaagactgccaaagcttctcaagaactgtaa

SEQ ID NO: 75458 - DNA, 396 bp, Saccharomyces pastorianus
atgtcctctgccgccgaaaagaaaccagcttccaaagctccagctgaaaagaagccagctgccaagaaaacatcaacctccgtcgatggtaagaagagatctaaggttagaaaggagacctattcctcttatatttacaaagttttgaagcaaactcacccagacactggtatttcccagaagtctatgtctattttgaactctttcgttaacgatatctttgaaagaattgctactgaagcttctaaattggccgcttataacaagaaatccactatttctgctagagaaatccaaacagccgttagattgatcttacctggtgaattggctaaacatgccgtctccgaaggtactagggctgttaccaaatactcctcctctactcaagcctaa

SEQ ID NO: 75459 - DNA, 315 bp, Saccharomyces pastorianus
atgcccaagatcttttgtttagcggacgtgtgtatggtccctattggcaccgactctgctagtatttctgattttgttgcactcattgaaaaaaaaatcagagaaagcccattaaagagcactttacacagtgcaggaacaacaattgaagggccttgggatgatgtgatgggtttgattggcgaaatccatgaatacggtcatgagaaaggatatgttagagtacacactgatattcgtgttgggactagaactgataagcaccaaactgctcaagataagatcgatgttgttttaaaaaaaatttctcaatga

SEQ ID NO: 75460 - DNA, 2343 bp, Saccharomyces pastorianus
atggtagattttttaccaaaagtaacggaaataaatcctccatccgaaggtaatgatggtgaagataacataaagccactttcaagtggttcagagcagcggccgttgaaagaagaggggcaacaaggtggtagaagacaccaccggcggttgtcctctatgcatgagtattttgacccgttttccaacgcagaggtctattatggaccaataacagatccaagaaaacagtcaaaaattcatagactaaatagaaccagaactatgagtgttttcaataaagtttctgacttcaaaaacggaatgaaggattataccctgaaaaggaggggttctgaagacgacagcttcctcagcagccaaggtaaccgtagattttatattgataatgtggatctcgctttagatgagctgctcgctagtgaggacacagacaagaatcatcaaattaccatagaagacactgggcccaaagttattaaagtcgggacggccaattccaacggtttcaaacatgtaaatgttaggggaacatatatgctttctaacttgttgcaggaactaaccattgcaaaaagtttcggacgacaccaaatatttttggatgaggcgcgtataaatgaaaaccctgttgatagattatcaagattgataacgactcaattttggacgagtttaacgagaagagttgatctttataatattgcagaaattgctagagactcaaaaatagatacgccaggcgctaaaaatccaagaatttatgttccatataactgcccagagcagtacgaattttacattcaggcatctcaaatgaacccgtccttaaaacttgaagtggagtacttaccaaaagatattacagcagagtatgttaaatcattaaatgatacaccgggtttgttagccctggctatggaagaacacgttaatccatctactggtgaaaggtccctagttggttatccttatgcggtacctggcggtagattcaatgaattgtatggctgggattcatatttaatggcactgggactcatagaaagtaataaggttgatgttgcaagaggtatggtggagcattttatattcgaaattgatcactatagtaaaattttgaatgctaataggagttattatctttgcagatctcagccaccattcctaaccgatatggctctgctcgtatttgaaaagataggaggtaagaataatccaaacgctattcagtttttaaaacgcgcgttcagagctgctattaaagaatataaagaggtgtggatgtcgagccctaggttagattctctgacagggctgtcttgttatcatcctgatggtattggtatccctccggaaactgaaccagatcattttgatactatattattaccgtatgctgaaaagtacaatgttactttggaaaagcttaggtacctttataacgaaggcatgattaaagaacccaaactggatgcattttttttacatgatcgtgccgtgagagagtcaggacatgacacgacttataggtttgaaggtgtatgtgcatatttagcgacaattgatctaaactccttgctctataaatatgagaaagatattgctttcgtcattaaggagtattttggtaatgaatataaagatgagaatgatggaacggtaaccgattctgaacactgggagaagctagctgaactgaggaaaacaaggattaataagtatatgtgggacgaagattcagggtttttcttcgattataacacgaaactgaaatgcagaacgtcttatgagtctgcaacgactttttggagtttgtgggctggtcttgcaactgaagagcaagcaaaaatcacagtagaaaaagctcttcctcagctagaaatgctcggcggactagttgcatgcacagaaaaatcaagaggtcctatttctattgatagaccgatcaggcaatgggattatccttttggttgggcgccgcaccaaatattagcctggaaaggtttatctgcatatggttatcaacaagtagctacaagattggcttataggtggctgtacatgattacaaaatcatttgttgattataacggaatggtggtagaaaaatatgatgtgacaagagggactgatccgcatcgcgttgatgcggaatatggtaatcaaggtgctgattttaagggcgtcgctacagaaggctttggttgggtgaacacaagttatttgctcggattgaaatatatgaataatcatgcaagaagggctctcgctgcttgtagtccaccattgccatttttcaatagtttgaaaccctctgagaaaaaattgtattacctataa

SEQ ID NO: 75461 - DNA, 1422 bp, Saccharomyces pastorianus
atgtttcaaaggtctggcgctgctcatcacatcaaatcgatttcatctcgaagatgccgctttaaatcctcctttgcagttgctttaaacgctgccagtaagttggtaactcccaagattctttggaataatcccatatcattagtctcgaaggagatgaacacattggccaaaaatatagttgccctcatcgggtctggccatccggtgctaaacaaggttactagttactattttgaaacagaaggcaaaaaagtacgtcccttgttagtgttgttgttgtcaagagcactttctgaaattcccatgacagaaagaaatcacttgaaaattgacaagtcggatgttcctgaggacccaatttactctaaacctagtcaaaatcaactatttcaacgtcctgcaagtagcatatccccactacatattcttcacggtattaaaccactaaatcccttgacaaaaggtcctgagcctttgccagaagaaacttttgacaaacaaagagggattttacccaaacagagaagattagcagagattgtagagatgatacacactgcgtctttacttcatgatgacgttattgatcattctgatacaagaagaggaaggccaagcggaaatgctgcctttaccaacaagatggccgttttggcgggtgattttctcttaggaagagcaacagtgtcaatttcaagattacacaaccccgaagtcgtagaactaatgtctaatagtattgcgaatcttgtcgaaggtgagttcatgcaactgaaaaatacttccattgacgcggatatcgataccatcgaaaatggccataagctacttccggttccttctaaaaagcttgaagttaaagagcacgactttcgtgttccaagccgccaacaggggctgcaattatctcatgatcagattatagaaactgcatttgaatactacatacacaagacctatctgaagactgctgctttgatatcaaaatcttgcagatgtgctgctatattatctggggcatcacctgccgttatcgacgaatgctatgatttcggtagaaatctaggtatatgtttccaactcgtagatgatatgcttgattttactgtgtctggaaaagatttagggaagccatccggcgcggatctaaaattaggtattgctactgctccagtcttgtttgcatggaaagaagacccatctttaggtccactaatttcacgcaatttttcagagaggggtgatgttgaaaaaactattgattctgtgagactccataatggtatagcgaagacgaaaatactagcggaggaatatagggacaaggcattacaaaatctacgggattctcttcctgaatctgatgctcgttctgccctagagtttttaactaatagtatactaacaagaagaaagtaa

SEQ ID NO: 75462 - DNA, 642 bp, Saccharomyces pastorianus
atgggacttatttcatacgaaaatgaggcgataaacgaggtgaaaaaggcagataaccatcacgttagcaaatttgtgactagttactatgggccatcatcgtcgtcatggcagtcaggaagatggattttgtttgtgctgtttgttgccgcaataatccttataatactgttcacttttgtagcgaacagaaggagacgaaggatggggcgtgctcccattagaggtacggcatggttgacaccgccttcatacagacagtctcaacaacaatatactgggaccgttcagcaacggacagatgattatgttcctgagtatacagaaacagcgaacgaacatgatcttggatactatgaccagcggggcgagtttcaccccaacgataaggctgcatacgtggcccccccgccattggtacaagaatgttcatcagaatctgttaattctttagaaagacctcccgctgctgtagttcaccaagctaactctttagatacggattacggtttaacaaggcctagcaatgggcgcgttccagctgtaagtgatacggtggagcaattggaaaggcttccgggcgggactacaacgcaggaaattaacccaccggagagggcaaaggtaaatgcaaggtcatga

SEQ ID NO: 75463 - DNA, 2211 bp, Saccharomyces pastorianus
atgaatcaaaatataaaaaacacttcttgggctgatcgaataggaagcgacgatcaagaaagaaaagctaactcttcagaggtttcacaaagcccaccacccaataatagcttcgagtcatcaatggattcacaatttagctatgctcattcaaataaaagtagcatttcattcgaatctattcaaaccacggaaagacttcttgacaaattagacctcagcttggaagatgaactgattctgcaagaagctttattagaagaagaaaacgcgtcgagaaattcgcaactgtcacaaacaagtggtccaacattatgtatgcctgcgtcggaattcccttcattaaggtatagaactaatccctctccaacatatatacaagctagagatcgttctcttatcatagacaatttaaaagaaaaggattccactttgagaggcaaatactcttccggtaaagtggaaaggcatttgcccgtgaagtcgagatactcttatatcgtcgaagaagattatgactctgagacttttagttgcatgaaaccccaaatgaatagaaatgagaaagattataagtacccaaaccttgaaaatggcaatagaagcacaaatagccctaatcctttcaacttcgagaaatataggattgaaaatactagactgcaccatctttatcctacgctgatatcagacaataatattagcgttgacaataatgctaatagtaagaataacagaactactagtaataatattaatacatctacaaaaactgacagaatatccgagaagcagagttgccccaatgagttcacaaccacgcaaaagagtaattgtctttatcggaacggaagttcaacaagcaccaacacctccttttctgaagttggacaactatcaaagccgaaaactcagtcttcttttgaaagtgaatcatcctcattctccaaactcaagttaactaagagtgatacaacacccatcaaaccatctcctaaacggtctaattcctctacctcgacgataacgaaaacaaataccatgacaaatgatatttcattacctccaacgccaccatataaagctcataaaaaaaaaacgtcactaaattcgctaaaaaaactttttaaatctcctaggacaagagcaaaaaataagaaagaccttgagtctgaaggatcaagccctatccggtctgccagcaattcattggacttctctggggagaatattcaacttccatctacttcaagtaccattaataattccagtccacatttagctaggtatatttttcctccaaacccagttttccattttaaaacagcatcaacacctcagtcatccacggataaaaaaaagaacagtaaagcacgtccaaataggactcatttgagaactttctcggatttccatacaacggaaaaagattcaaaaataggtgaattaagtgcactaacagaacaatcaaataagccctaccacccgaaagttagaagaagaacactttctttagatggtatgttgcccaataattcgacgcaatgcatggattccttcagtcataaaaaagaaggatcgaacgcaacaagcaagtgcgggaagcttaaatttcacccagaaccttatgataatgatgaatcttcacacatcggacaggcaattactatgcgtcatcaaggcaaacttgaagaatctgcacaacgactgaaaaaagcctgcgcgtgcggaaacaaaactgcgtttctgttatatggactagccctgcgacatggctgcggagtggacaagaacttgaaattatcattaggatatttaatggctgccactgatatcaaatcctttgctgctgaggttcttgatttagatataaatccgttaaattttgcttcaatggacgatatccctgatatagcgcctgaaccaacagcacctgccttgtatgaatgtggtatggcatatttaaagggtcttgggatggatcatcccgacgagcgaaaaggtttgaaatttttggaaaaagctgctctattaggccatgtagactcaatgtgcttaagcgggacaatttggtccaaaacttcaaacgtaaagaaaaaggatctcgccagagctgctgcatggtttaggatagccgataaaaaaggtgcaaatctattaggttcagattggatttataaggaaaagtacatgaaacaaggtccgaaataa

SEQ ID NO: 75464 - DNA, 312 bp, Saccharomyces pastorianus
atgtccggtagaggtaaaggtggtaaaggcctaggtaaaggtggtgccaagcgtcacagaaagattctaagagataacatccaaggtattactaagccagctatcagaagattagctagaagaggtggtgtcaagcgtatttctggtttgatctacgaagaagtcagagctgtcttgaaatccttcttggaatccgtcatcagagactctgttacttacaccgaacacgccaagagaaagactgttacttctttggatgttgtttatgctttgaagagacaaggtagagccttatacggtttcggtggttaa

SEQ ID NO: 75465 - DNA, 411 bp, Saccharomyces pastorianus
atggccagaacaaagcaaacagcaagaaagtccactggtggtaaggccccaagaaagcaattagcttctaaggctgccagaaaatccgccccatctaccggtggtgttaagaagcctcacagatataagccaggtactgttgctttgagagaaatcagaagattccaaaaatctactgaactgttgatcagaaagttgcctttccaaagattggtcagagaaatcgctcaagatttcaagaccgacttgagatttcaatcttctgccatcggtgccttgcaagaatctgtcgaagcctacttagtctctttatttgaagataccaacttggctgccattcacgccaagcgtgtcactatccaaaagaaggatatcaagttggctagaagattaagaggtgaaagatcatag

SEQ ID NO: 75466 - DNA, 864 bp, Saccharomyces pastorianus
atgacctacactaccagacaaattggtgccaagaacaccttggaatacaaagtttatatcgagaaggatggtaagccagtttctgccttccacgacattcccttgtacgctgacaaggaaaacaacattttcaacatggttgttgaaattccacgttggaccaacgccaagttagaaatcaccaaggaagaaactttgaacccaatcatccaagacaccaagaagggcaagttgagatttgttagaaactgtttccctcaccatggttacattcacaactatggtgctttcccacaaacttgggaagacccaaacgtaagccacccagaaactaaggcagttggtgacaacgatccaattgatgtgttggaaattggtgaaactattgcttacactggtcaagtcaagcaagttaaggctctaggtatcatggctttattggatgaaggtgagaccgattggaaagttattgccattgatattaacgatccattagctccaaaattgaacgacattgaggatgttgagaaatacttcccaggtctgttgagggctactaacgaatggttcagaatttacaaaatcccagatggtaagccagaaaaccaatttgccttctccggtgaagctaagaacaagaagtacgctttggatatcatcaaggaaacacatgactcctggaaacaattaattgctggtaagtcttctgacagcaagggtattgatttgaccaatgttactttgcctgacaccccaacctactccaaggctgcctctgatgccatcccaccagcttctccaaaggcagatgctccaattgacaagtctattgacaagtggttcttcatctccggttctgtttaa

SEQ ID NO: 75467 - DNA, 612 bp, Saccharomyces pastorianus
atggctattgttataaacaaaagaaacgtgagagtcttggtaataactaatttactgctcattgttgtgttttttgtgttaaggaattcgaatgctagcgtcaacgaaagtattactactcaccatcctgattcattggtgacgtttgacaattcaggaaatgcacctggcactcaccaatctgtccatgatacagtaaatacacaagataaggaagccgaagaagttgataaaaatagtggggacgctgaatttgatgccgctgcagaatacaacaaaataatggaacagtcacccatgattgtatttagcaagactggctgcccatatagcaaaaaactgaaagctttgttgactaattcgtacacgttttctccatcttaccacgttgtagaattggataggcacgaacacacaaaagaactacaagaccagattgaaaaagtcactggtaggagaacagtcccaaacgttatcatcggtggtacttccagaggtggttatactgagatagcagagttacataaaaatgatgaacttctagattctttcaaaaaatggagcgatggggcgtttactgtaacagctaattcgcaatctgagagtgcctag

SEQ ID NO: 75468 - DNA, 1794 bp, Saccharomyces pastorianus
atgctgcttaccaaaaggttttcaaagctgttcaagctgacgttcatagttttgatattgtgcgggctgttcgtcattacaaacaaatacatggatgagaacacgtcagtcaaggagtacaaggagtacttagacagatatgtccagagttactccaataagtattcatcttcctcagacgccgccagcgctgacgattcaaccccattgagggacaatgatgaggcaggcaatgaaaagttgaaaagcttctacaacaacgttttcaactttctaatggttgattcgcccaaggggagtactgcaaagcagtataacgaggcatgcttattaaagggtgacattggagaccgtcccgaccactacaaagatctttacaagttgtctgctaaggagctgtccaagtgtttggaactatctccggatgaagtagcaagtctgaccaaaagccataaggactacgtagagcatatagcgactctcgtctcgccaaagggtacgtacaaagggtccggtatagccacagtgggtggcgggaagttctcccttatggcatttttgatcattaagactttaaggaatatggggaccacgttacctgtggaagtcctgatccctcctggtgatgaaggtgaaactgagttttgtaacaagattctgcctaagtataactccaagtgtatttacgtttcagatattctaccacgagagacgattgaaaaatttgttttcaaaggataccagtttaaatcattggcccttatcgcttctagttttgaaaacctgctcttactggatgctgacaacttccccatcaaacccctagacaacatattcaatgaagaaccatatgtgtctacgggcttggtcatgtggcccgatttctggaggcgtacaactcacccattgtattacgacattgcaggtattgctgtggacaagaaaaagagagttcgcaattctcgagacgatatcaccccacctgctgtttacacaaaggatttgaaggatttgagtgacgtcccgctaagtgacctagacggaacaatacccgacgtgtctacggaatccggccaactgatgataaacaaaacgaagcatttggctacggctcttctatctttattctacaacgtcaatggaccaacgtggtactacccaatattttctcaaaaagctgctggtgaaggtgataaggaaactttcattgccgctgcaaacttttatggtctatcattttaccaagttagaacaaggacaggcgttgaaggctaccatgatgaagacgggtttcatggtgtagcaatgttacaacacgactttgtgcaggattatggccgttacttaaatgctatggagagcattggcaacaaatacggtggcactaaatcagctgatgcaatcaagtttgacaaaaactattccctcgaaaaatacaccgaagaatttttcgacaacgaggacttaaatgccaagaatcatgtagatgttatgttcatccattcaaacttcccaaagtttgacccatacgatttatctaaaagcaattttttgactacgaatggtaaacctgctcgttcatatacggccttaaaaaaggtaaaaaattacgatattgaactagagaatttcaaggttttaaacgaatatgtttgtgttaataagaatcctttcaaatatctcgatgaccttttagggcaggataaaacggaatggaaaagagtgtgtggttacatcaccgatagattagcatttttagaatctactcatgataaggcgattgccggtaaataa

SEQ ID NO: 75469 - DNA, 387 bp, Saccharomyces pastorianus
atgtctgctaacgattactacggcggaaccgccggcgcgaagagccaatattcccgtccctccaacccgccaccttcatccgctcatcagaacaaaactcaggagcgtggatacccaccccaacaacagcagcagtactaccagcagcagcagcagcatcccggatactataaccaacaaggatacaatcagcaagggtacaatcagcaagggtacaatcagcagggctacaatcagcagggatataaccagcagggatacaaccaacaaggccatcaacaaccagtctacgtccaacaacaaccaccccagaggggtaacgaaggttgtctggctgcatgtctggctgcattatgtatatgctgcaccatggatatgctattctaa

SEQ ID NO: 75470 - DNA, 2748 bp, Saccharomyces pastorianus
atggcatcgacatggaagcccgccgaagactatgtgttgcaactagcaactcttttacagaactgtatgtcaccaaatccagagattcgtaataacgcaatggaagctatggagaacttccagctgcaacctgaattctcaatatttgtgttatatttaattgaaggcgaatctgatgatgtattgaagcaacactactccctacaggatcttcagaacaatagagctaccgccggtatgctgttgaaaaattcaatgctagggggaaacaatttaattaagagcaatagccacgacttaggatacgtcaaatcaaacattatacatggcctttataattcgaacaataatctcgtttcgaacgtgacaggtatcgttattactactttattttccacttactataggcagcatagagatgatccaactggtcttcaaatgctttaccagttgctagagctaacctcaaatggaaatgaaccaagtattaaggctttatctaagatcatggaagacagcgctcaatttttccaattggaatggtcgggaaatacgaagcctatggaagccttattggatagtttttttaggtttatttcgaatccaaatttctcacctgtgattcgctcagaatcggtgaaatgtataaatacagtgatcccgctacaaacacaaagttttattgtgagattagataaattcttagaaattatttttcagttggcacaaaacgacgaaaacgacctagttagggcacagatttgcattagttttagtttcttattggaattcagaccagataagctggtttcccatttagatggtattgtacaattcatgttgcatttgatcaccactgtaaatgaggaaaaagtggctattgaagcctgcgagtttttgcacgcctttgcaacgagcccaaatattcctgaacatatcttacaaccatatgttaaggatatcgtgccaatattattatcgaaaatggtctataacgaagaatccatcgttctcctggaagcttctaatgatgatgatgcattcttggaggataaagatgaggacatcaagcccattgcaccccgtattgtgaaaaagaaagaggcaggaaatggagaggatgcagatgacaacgaagatgatgatgatgatgatgaagatggcgatgttgatacgcaatggaatttgagaaaatgttccgcggcaacgctagatgtaatgacgaatattttacctcatcaagtgatggatatagcgttcccatttttaagagaacatttgggttctgataggtggtttattagagaagctactatattagcactgggggccatggcagaaggtggaatgaagtattttaatgatggcttaccagcactaataccatttttagtggaacaattgaacgataagtgggcaccagtgaggaaaatgacatgttggacattaagtagattttcaccatggatattacaagaccatactgagtttttaattccagtcttagaacctataataaacacattaatggacaagaaaaaggatgttcaagaggcggctattagtagtgtagcagtatttattgaaaacgccgactccgaattggttgaaactttattttatagtcaattattgacgagttttgataaatgtttgaaatattacaagaaaaagaatttaattatattatatgatgccatcggcaggttttctgaaaaatgtgcattagacgagacagcgatgcaaataattttgccgcccttaattgaaaaatgggctttgttgtcagacagtgacaaggagctgtggccacttttagaatgtctttcctgcgtggcatcatcactaggggaaagattcatgcctatggcaccagaagtgtacaacagagcctttagaattctatgtcattgtgtcgaattggaagccaaatcacatcaagacccgacaatagtagtgcctgagaaggacttcatcatcacctcattagatttgattgatggattggtacaaggtcttggcgctcactcgcaggatctattgttccctcaagggacgaaggatttaacgatattgaaaatcatgctagaatgtttgcaggaccctgtccatgaagtaagacaaagctgctttgccctgttgggagatattgtatattttttcaattcggaactggtaattggtaatttggaggatttcttgaagttgattggtacggaaataatgcataacgacgatagtgatggtactcctgctgtgataaatgcgatatgggcgcttggtttgataagtgaacgtatcgatttgaatacttatatcattgatatgtctagaatcattctagatttatttaccaccaacacacaaatcgtagacagctctgtgatggagaacttgtctgtgaccatcggaaaaatggggctaacacaccctgaagttttcagttctggcgcatttgccaatgattccaactggaataaatggtgtttgtccgttaacgcattggacgatgtagaggaaaagagtagcgcgtacatgggtttcctgaaaattatcaatttgaccagcacggaggtcacaatgagtaatgataccattcataaaattgttacgggcctttcaagcaatgtagaggcgaatgtttttgcgcaagagatctacacctttttgatgaaccattctgcccaaatttctgcaataaatttcacgcccgatgaaatctccttcttacaacagttcaccagctaa

SEQ ID NO: 75471 - DNA, 1587 bp, Saccharomyces pastorianus
atgactaaatctcattcagaagaagtgattgtacctgagttcaattctagcgcaaaggaattaccaagaccattggccgaaaagtgcccgagcataattaagaaatttataagcgcttatgatgctaaaccggattttgttgctagatcgcctggtagagtcaatctaattggtgaacatattgattattgtgacttctcggttttacctttagctattgattttgatatgctttgcgccgtcaaagttttgaacgagaaaaatccatccattaccttaataaatgctgatcccaaatttgctcaaaggaagttcgatttgccgttggacggttcttatgtcacaattgatccttctgtgtcggactggtctaattactttaaatgtggtctccatgttgctcactcttttctaaagaaacttgcaccggaaaggtttgccagtgctcctctggccgggctgcaagtcttctgtgagggtgatgtaccaactggcagtggattgtcttcttcggccgcattcatttgtgccgttgctttagctgttgttaaagcgaatatgggccctggttatcatatgtccaagcaaaatttaatgcgtattacggtcgttgcagaacattatgttggtgttaacaatggcggtatggatcaggctgcctctgtttgcggtgaggaagatcatgctctatacgttgagttcaaaccgcagttgaaggctactccgtttaaatttccgcaattaaaaaaccatgaaattagctttgttattgcgaacacccttgttgtatctaacaagtttgaaaccgccccaaccaactataatttaagagtggtagaagtcactacagctgcaaatgttttagctgccacgtacggtgttgttttaccttctggaaaagaaggatcgagcacgaataaaggtaatctaagagatttcatgaacgtttattatgccagatatcacaacatttccacaccctggaacggcgatattgaatccggcatcgaacggttaacaaagatgctagtactagttgaagagtctctcgccaataagaaacagggctttagtgttgacgatgtcgcacaatccttgaattgttctcgcgaagaattcacaagagactacttaacaacatctccagtgagatttcaagtcttaaagctatatcagagggctaagcatgtgtattctgaatctttaagagtcttgaaggctgtgaaattaatgactacagcgagctttactgccgacgaagactttttcaagcaatttggtgccttgatgaacgagtctcaagcttcttgcgataaactttacgaatgttcttgtccagagattgacaaaatttgttccattgctttgtcaaatggatcatatggttcccgtttgaccggagctggctggggtggttgtactgttcacttggttccagggggcccaaatggcaacatagaaaaggtaaaagaagcccttgccaatgagttctacaaggtcaagtaccctaagatcactgatgctgagctagaaaatgctatcatcgtctctaaaccagcattgggcagctgtctatatgaattataa

SEQ ID NO: 75472 - DNA, 1902 bp, Saccharomyces pastorianus
atgccagacaatctatcattacatttaagcggctcttcaaaaagattgaactctcgccaacttatggaatcttctaatgagacctttgcgccaaataatgtggatttggaaaaagagtataagtcatctcagagtaatataactaccgaagtttatgaggcatcgagctttgaagaaaaagtaagctcagaaaaacctcaatacagctcattctggaagaaaatctattatgaatatgtggtcgttgacaaatcaatcttgggtgtttctattctggattcatttatgtacaaccaggacttgaagcccgtcgaaaaagaaaggcgggtttggtcctggtacaattattgttacttctggcttgctgaatgtttcaatatcaacacttggcaaattgcagctacaggtctacaactgggtctaaattggtggcagtgttggataacaatttggattgggtacggtttcgttggtgcttttgttgttttggcctctagagttggatctgcttatcatttgtcattccctatatcatctagagcatcattcggtattttcttctctttatggcccgttattaacagagtcgtcatggccatcgtttggtatagtgtccaagcttatattgcggcaactcccgtatcattaatgctgaaatctatctttggaaaagatttacaagacaaaatcccagatcactttggatcaccgaatgctactacttacgagttcatgtgtttttttatcttttgggctgccagtcttccatttttactggttccacctcacaaaattagacacctgtttactgttaaagccgtcttggttccgtttgcttcttttggtttcttaatttgggctatcagaagagctcacgggcgtattgccttaggatctttaaccgatgtacaacctcatggctctgccttttcgtgggcttttctaagatcactaatgggttgtatggctaatttctccacaatggtaatcaacgctccagatttctctagattttcaaaaaaccctaactccgctttatggtcccaattagtgtgcattccatttttgttttccatcacttgtttaattggaattctagtcaccgcagctggttatgaaatatacggtattaattactggtcgccactcgatgtgctagaaaaatttttacagactacttataataagggcacaagagctggtgttttcttaatctcttttgttttcgccgtagctcagttaggtactaatatttctgcaaactcattatcgtgtggaactgatatgtccgctattttccccaagtttatcaatatcaagcgtggttcattattttgtgcagccatggcgctgtgtatttgtccatggaatttaatggcaacatcaagtaaatttacaatggctttgtccgcatatgctatctttttgtccagtattgccggtgttgtctgctcagattactttgttgttagaagaggatatatcaagctaacacacatatattcccatcaaaagggctctttttatatgtacggaaacaggtttggtatcaattggagagctttggctgcatatctatgtggggtggctccttgcttgcccggtttcatcgcggaggtgggcgctcccgctataaaggtttctgatggagctatgaaactatattacctaagttactgggtaggatatggcttgagtttttcttcttatactgctctgtgttacttcttccctgtacctgggtgccctgttaacaacattataaaggacaagggctggttccaaagatgggccaatgtcgatgattttgaagaagagtggaaagacacaattgagagggatgacctggtagatgacaatattagtgtctacgaacacgaacacgaaaagactttcatttaa

SEQ ID NO: 75473 - DNA, 534 bp, Saccharomyces pastorianus
atgtcgaacatcacttatgtcaaaggtaacatcttaaaaccaaagtcatatgctaggatcctcatccattcttgcaactgcaatggctcgtggggtggtgggatcgcttatcaacttgctttgcgctacccaaaagcagagaaagattacgttgaagtatgcgaaaagtatggttctaatttactaggcaaatgcatattacttcccagttacgaaaactcagatctgctgatttgttgcttgtttacatcatcatttggaggttcaagtcatggagaaaagcaaagtattttgaattatacaaaacttgctttggataaattgaagacctttagagaagcaaaagacaaaactcgaacaagtgaagattcaatcggtgactatttaaacggccacatcaaatacccaataggggaatataaattggaaatgccacagataaatagtggcatattcggagtcccttggaaagagacagaacgcgtgttagaagaatttagtggcgacatgagttttacagtatatcagctgtaa

SEQ ID NO: 75474 - DNA, 906 bp, Saccharomyces pastorianus
atgttgaatagttcaagaaaatatgcttgtcgttccctattcagacaagcgaacgtctcaataaaaggactcttttataatggaggcgcatatcgaagagggttttcaacgggatgttgtttgaggagtgataacaaggaaagcccaagtgcaagacaaccactagataggctacaactaggtgatgaaatcaatgaacccgagcctattagaaccaggttttttcaattttccagatggaaggccaccattgctctattgttgctaagtggtgggacgtatgcctatttatcaagaaaaagacgcttgctagaaactgaaaaggaagcagatgctaacagagcttacggttcagtagcacttggcggtcctttcaatttaacagattttaatggtaagcctttcactgaggagaatttgaagggtaagttttccattttatactttggattcagtcattgccccgacatttgtccagaagagcttgacagattaacgtattggatttctgaattagatgataaagaccatataaagatacagccattgtttatctcatgtgatcctgcaagagatacaccggatgtcttgaaagagtacttaagcgattttcacccagctatcattggtttaaccggtacgtacgaccaagtgaaaagcgtatgcaaaaaatacaaggtatatttttcaactccacgtgatgtcaagcccaaccaggattacttagtggaccattcgatatttttctatttgatcgaccctgaaggacagtttatcgatgcgttgggaagaaactacgatgagcaatctggtctcgaaaagattcgtgaacaaattcaggcgtatgtgccaaaggaagaacgggagcgtaggtcaaaaaaatggtactcttttatcttcaattga

SEQ ID NO: 75475 - DNA, 1185 bp, Saccharomyces pastorianus
atgcctccaaagaagcaagtcgaagaaaaaaaggtcttattgggtcgtccaggtaataacttgaaagccggtattgtcggtttggccaatgttggtaagtctacctttttccaagccatcactagatgtccattgggtaacccagctaactatccattcgctaccattgatccagaagaagcccgtgttattgtcccatctccaagatttgataagttgtgtgaaatctacaagaagacagcttcggaagttccagctcatttgaccgtttacgatattgctggtttgactaagggtgcctctgctggtgaaggtttgggtaatgctttcttgtctcacatcagatcagtcgattctatctaccaagtcgttcgttgtttcgatgatgctgaaattatccacgttgagggtgacgttgatccagttcgtgatttagaaattattaaccaagaactaagattgaaagatattgaattcgcacaaaaggctttggaaggtgctgaaaagattgccaaaagaggtggtcaatctttggaagtcaaacaaaagaaggaagaaatggatttgattacgaaaatcattaaattgctagagagtggtcaaagagttgctaatcactcctggacttcaaaagaagttgaaattatcaactccatgttcttgttgactgctaagccatgtatctatttgattaatttatctgaaagagattacatcagaaagaaaaacaagcatctgctaagaatcaaggaatgggtagacaagtactctccaggtgacttgatcattccattcagtgtttctctagaagaaagactatctcatatgtccccagaagatgctgaagaagaattgaagaaactgcagacaatatctgccttgccaaagattatcactaccatgagacaaaagttagatttgatttcctttttcacctgcggtccagatgaagttcgtgaatggaccatcagaagaggtactaaagctccacaagctgctggtgttattcataacgatttaatgaatacctttattttggctcaagttatgaaatgtgaagatgtcttcgaatataaggacgattctgccatcaaggccgctggtaagttgatgcaaaagggtaaagactatgtcgttgaagacggtgatatcatttacttcagagctggtgctggtaagaattga

SEQ ID NO: 75476 - DNA, 1143 bp, Saccharomyces pastorianus
atgcttcccacattcaaacgttacatgtcgtcctcagctcatcagattcccaagcacttcaaatcgctcatctattcaactcatgaagttgaggattgtaccaaggttttgtcagtgaaaaattatacgcctaaacaagacttatctcaatcaattgtgttaaaaactttggcctttcccataaacccttcggatatcaatcagttgcaaggagtatacccgtctcgtccagaaaagacatacgattactccacagatgagccagccgctatcgccggtaatgagggtgtctttgaagttgtttctttaccttcgggaagttccaagggagatttgaaattgggtgaccgagttatcccattgcaggcaaatcaagggacttggtccaattatagagttttctctagtagttctgatttaatcaaggtaaatgatttggatctgttttctgcggcaactgtatctgttaatggttgtaccggtttccaattagtatcagactatatcgactggaacagtaacggtaatgaatggattatccaaaatgccggtacatctagtgtatcaaaaatagttacgcaagtagcaaaagctaaagggatcaaaacattaagtgttatacgtgaccgtgataattttgatgaggtagcaaaagttttggaggataagtatggtgctacgaaggttatttccgaatcgcaaaacaacgacaagacttttgccaaagaagtattgtccaagattttgggtgaaaatgcaagggtgaggcttgccttgaattctgttggaggtaaatccagtgcatcaatagcacgtaagttggaaaataatgctttgatgctcacttatggaggaatgtcaaaacaacctgtaactttaccaacatctctacacattttcaaaggcttgacatccaaagggtactgggtgactgaaaagaacaaaaaaaacccccaaagcaagattgacaccatcagtgattttatcaaaatgtataattatggtcacattatttcaccaagagatgaaattgaaactcttacctggaatactaacactactactgacgaacagttactagaactagtcaaaaaaggtataactgggaaggggaagaaaaaaatggttgttttagaatggtaa

SEQ ID NO: 75477 - DNA, 1578 bp, Saccharomyces pastorianus
atgattttctcactagatgaagaacttcatcgtgtgtcactagatgataaaaagaatgacattaaagtagattattcctcggcaatatacgatgatatcaatcatgaacaaggcagctccatcacatatgaggagagtataaatcacctctcggttcattcaaatgcgattccgctaaatggcatgagtcctccacataggatgagaagaaggtcctcagcttattccaaattccctattctcactccaccaaatacgagaagattttctattacaggttcggacgcaatgccaactaatacgaatagactatccataacacctcaggacattatttcctctaatattggagaaaatgaattatcaaggaacctgcacgattttaagcccgtgagagtcctaggccaaggtgcctacggtaaagttcttcttgttaaggacgtcaatacatccaagctgtatgctatgaagcaattacggaaagcagaaattttaatttctcaaacagccacagattccaagagagaagacgaagataaaaatgatggtaataacaacgataatgacgatggattatcaaagaggcttgagagaacatttgccgaacggtctattctatctgaaatagaacatccaaacattgtcaagttattttattcttttcacgataactcaaagttatatttactgctacaatatatccctggcggtgaactattttaccacttgaaggaacacgggaccctagatgagacgacagtttcgttttacgcggcagaaatcagctgtgccttgagatttttgcatacgaaaggtgttgtctatagagatttaaaacctgaaaactgtttattgaatcaacgtggacatttagtattgacagattttggtctgagtaataaaagtgctaatgattccgcggttgatgaggaggatccagagtacgtcaatgccctatactcgattatcggtacgcctgaatactgtgcgcctgaaatattattaggtaaagcttacagtcagaattgtgattggtattctttgggatgtctgttgtatgacatgttagtaggtaagcctccatatactggtagcaatcataaggtgatcattaataagattcaacaaaacaagcaaggccccaaaattccattttatctgagcgagggaatgaaagatatattaaacgcgctgttgaagaaggaaactgccaaaaggtggaatgttgacaaatactgggccaaaaccggggctaataataagcctactaagtctaagaagaagaaatcaggggctgcaagaactagtcttttcactgaacattttatctttagaaaaatagactggaagttattagaatctggacaattgcaaaaaaccactctaggcccaattgttccagttattacggatttggaactagcggaaaattttgacacagaatttacttctatgtcatatgaggaaacctatacggatagcaagccgattaatatcaattcggtgagcaagtccccggatatgttcaagggatttagttataaagcaagtggtagctatttggagaagtacttttga

SEQ ID NO: 75478 - DNA, 1374 bp, Saccharomyces pastorianus
atgtctgacaaccctgagatgaaaccacatggtacgagcaaggagattgtggagtcggttactgacgccacctcaaaggcgattgataaattgcaagaagaactccacaaggacgccagcgaatccgtcacgccggtgaccaaggaaagcactgctgctacaaaggaaagcaggaaatacaactttttcattagaacagtttggacgtttgttatgatcagtggtttcttcatcaccttagcatcgggtcatgcatggtgtatagtgctgattttgggctgccaaattgctacttttaaagagtgtattgccgtaacaagtgcatctggtcgcgaaaagaatttgccattgacaaagacgttgaactggtaccttctcttcaccactatctattacttagatgggaaatcactcttcaagtttttccaagctactttttacgagtatcctgtattgaactttatcgtaacaaatcataagtttatctgctattgtctctatcttatgggatttgttttgttcgtttgtagtttaagaaagggatttttgaaattccagttcggatcattgtgcgttactcatatggttcttcttctggtagtatttcaggctcatttgatcatcaaaaacgtgctcaatgggctattctggttcttattaccatgcgggttggtaattgttaatgatatcttcgcctacctgtgcggcattacattcggtaagactaaactaatagaaatctcgcccaagaaaactttagaaggtttccttggtgcctggtttttcactgctctagctagtattatattaacaaggattctgagcccttatacttacttgacgtgccctgttgaagatctccataccaattttttctctagtttgacatgtgaactaaacccagttttccttccacaagtttacagacttccacccatctttttcgataaagttcaaatcaattcaattacagtaaaaccaatttatttccatgctttaaacttagctacctttgcatcattatttgcgccatttggaggctttttcgcatctggtctaaagagaacttttaaagttaaagactttggccactccatcccaggccatggtggtatcacagacagggttgattgccaattcataatgggttcttttgccaatttgtactatgaaacattcatcagcgaacacagaataacagtagatacagttttatccactattttaatgaacctgaacgacaagcagattatagaattgattgatatcttgattagattcctatctaaaaaaggtataatatcagcgaagaattttgaaaagttggctgacatctttaatgtgaccaagaaatcattgaccaatcactcttga

SEQ ID NO: 75479 - DNA, 1683 bp, Saccharomyces pastorianus
atgtccgtaacttttaaggacgatgttcatcggattctgaagtttgttgctaattgcaatggcaggtttgaagattccaaatgtgatataagagaatcgcctctcggtggattgggtgtctttgcaaagactgatattgcagaaggtgagtcaatattgacgttgaacaaatcctcgattttttctgcatctaacagctccattgccaatttgttatgtgacagtagcatcgatggaatgttagctctaaacatcgcattcatttacgaaactacagttttcagaaattctagtcattggtacccatttctgcgaactatccgaattcatgatgacgaagggcacttaaacctgccgccaagcttttggcatgcggatgctaagcgacttttaaaaggaaccagtttcgataccttattcgattcgttgacaccagaagaagaaatcatggaaggatttgaaattgctgtggatttggcacacaaatggaacgacgagtttgggttggaaattccaaaaggcttcctagacgttagtgaggagaatcatgaagaagattacaatttgaaattagaaaagtttatatcggtggcatatactttatcatcaagaggatttgaaattgacgcgtaccatgagacagctttggtgcccatcgcagacctgttcaatcaccatgtttccgacccggatttaaagtttgtatcgctatatgatgtgtgcgataaatgtggtgaaccaggcatgtgtaaacatctcatagcagaggaatacttggaagcagaaaatctagacaaaaatatgcccaaagtcgcaagtatggagactcgtgtcatcgatgaagacttaatcaaaagtttagaaaatgatttagagaaagaacactctaatgttacggcaaacaccgaggatgatgatggcggtattgaaaaccctgacgaatgtgtcgatttagtgttaaagaatgacgtcgcacaaggccaagaaatatttaattcctatggtgagctctcaaacgtctttttgttggccagatatggtttcaccgtacctgagaatcagtatgatattgttcatttaggacctgattttatgaagatcttaaagaaagaagaaaaatatcaagaaaaagtcaagtggtggagccaagtcggtcatggcttgttttcagcatggtatgctcaaatgcgccaagaagatgaagaagacgaagacggtcaagcaaaatcagataatctgtctgacgatatagagagcgaagaggaagaggaagaggaagaggaagaggaagaggaagaggaagagggtgatgatagcttggaatcatggctttcccagctttacatagactcaagtggcgagccttcaccctcaacgtgggccttagctaaccttttgactttaacggccgttcaatgggaatcattgttttccaaaaaggccactcctcacatcagtgattctatagttaacgaagaaaagctgcccttcctggccaaaaaagacaatccccattccaagaaactgctttccaaattacttaaggaaaagcaactaccttgcataaaaggcgacaactcgtcaaagataacaagtgctactaaaagcatgctccaaaatgctcggacacttgtacaatcggagcataatatcttagatagatgtctcaagagactatcctaa

SEQ ID NO: 75480 - DNA, 303 bp, Saccharomyces pastorianus
atggtaatcatacgtatcacattgagcaacttactgagggagaaaggagacctgtgcctggaactacttcgtgtagacaaaggaatatacccctttgatacttctcaaccaattggtagtatgcaggtgctgctcccccacgctagtaattaccccggttccgctcaattttatctttttgacgcggctacgaaactcggtttcgagcagtccgttaacttaaactacagtgaaaatcattggttaaacaacactccatgccagtatctgtatgtgtttttgcaacaagcacgactggagtaa

SEQ ID NO: 75481 - DNA, 687 bp, Saccharomyces pastorianus
atgactaaacaagctgaggagacccaaaagccaatcatatttgctcctgagacgtatcaatatgataaatttactttgaatgaaaaacaacttactgacgacccaatcgatcttttcaccaaatggttcaacgaagccaaggaagacccaagggaaacgttgccagaagcaattactttttcatccgcggaactgcctagtgggagggtgtcgtccagaattcttctttttaaggagctcgaccatagaggttttactatttattctaactggggaacctctagaaaggctcatgatattgctaccaacccgaatgcggcaatcgtattcttttggaaggatctgcaaaggcaggtgagagttgaaggtatcacagagcatgttaacagagaaacttctgaaagatactttaagacgagacctcgtggatccaagatcggtgcatgggcttcccgccaatcggatgttatcaagaacagagaagaactagacgagctgacccaaaaaaacaccgaacgtttcaaggatgctgaagacatcccatgtccagattattggggtggcttgagaatcgttccactggaaattgagttctggcaaggtagaccctcgagattgcatgatagattcgtttacagaagaaaaacagaaaacgatccatggaaagtcgttagactagccccatga

SEQ ID NO: 75482 - DNA, 1233 bp, Saccharomyces pastorianus
atgtctaccacactactttggttttcaagtgtaataggctacgtgattcaaacaaaatgtttgtctaacatacaatctaaaaaggaaatctccgtggggcccaatggtacaattgcaacgcctgaaactaacggcgacaacggaaactcaagttcattaaccttctatctgacctttatgtattttgcttcgtggctgctcttggtgcctgcatctcgactttggaagaagatgagaccgatgtttgtctctgactcagactcgaacaggaattctcagttcgacaacaacaacagcgggtctgtgacaaacgaagatgtcgatacgttctcgcacgtgttggatgatcctcaaccacggattccagcccaacagcagaagcaaaaaatcatatccgtggctatcttcaaatatgtggctaagctaacagtgctggctctcataatgattgtcgctgatttgacttataacctggctttgtcattgtcaccagcatttgatgttgctttgatgcaaaatactgccattttcgaaattgtcactttactatatggtgtttgtggaatctccaggaagaactacgttttccgtaatttcctcatcatgatgaacgcggtcattggaattttgatcatctcatacacgaaggctacctgtgacatgcttgccggaaagctgtccgtcaaccctaacacgggtgaactttctgatccattcttgtttgataggttgaaaggtgctctgatttgcggccttggtgctttgattatgggtccttttgccgtgttatggaaccgttggttttgcagtaacatttccaagaacgaaaattctgctgtagtcttggttaagcagagcacccacatggccctaatcggtattattggcatggtaatacttttgccatttattcctaaatttccctcccgtgagtctgtggaatccatttcgttgttctataatgacaagagcttttggttctctctactaggctcgattatctttggttccttgccgagcttgatttcgatattagagttgaatcgcaaggcccctgctgagtatttgacgacgtgcaacctgggagctattatctttatggggttagctgagtgggtttgcgaacctacgcaaaccacaattgtgagatgggaagtcataggatacataatgctaacggtaagtttgttggtcctatcagtaacactcggggaaggtaaataccaccattag

SEQ ID NO: 75483 - DNA, 888 bp, Saccharomyces pastorianus
atgctgaagttgtcaagaagtgccaatctaagattggtccaattgccagccgcaagattaagtggcaatggcgctaaattgctcacgcaaaggggattctttactgtaacgcgcttatggcagtcaaatggcaagaaaccattaagcagagtacctgtgggcggtactcccattaaggataacgggaaagtgcgagaaggctcgatcgagttttccacgggaaaggccattgctctattcctagcagtcggtggggcactttcttatttcttcaacagggagaaacgcagattggaaacacagaaggaggctgaagcaaacagaggatacggtaaaccttcacttgggggacccttccatctggaggatatgtatggcaatgagtttacggagaaaaaccttctcggtaagttttctataatatactttgggtttagtaactgtcctgacatctgtcctgatgaactggataagctaggtgtatggcttaatacactctcttcaaagtatggtattactctgcagccattatttataacttgtgatccagcaagagactcccctgctgtattgaaagagtatttgagcgactttcatccctccatcctgggtttgacggggacgttcgatgaggtgaagaacgcatgcaagaagtacagagtatacttttctacgcctccaaacgtcaaaccgggccaagattatttggtagaccattccatcttcttttatctcatggaccctgagggacagtttgttgatgctttgggtagaaattatgatgaaaaaacgggcgtggacaagatcatggaacacgttaagagttatgtgcctgcagagcagcgcgccaagcagaaggaggcatggtactccttcttatttaaataa

SEQ ID NO: 75484 - DNA, 2892 bp, Saccharomyces pastorianus
  modified_base (822)..(853): a, c, g, t, unknown, or other
atgacgagaaacccgtttatggtggaaccttcgaatggctctcctaatagacgtggtgcttcaaacctctccaaattttacgcaaacgctaacagcaactctcggtgggctaatcccagtgaggagagtttagaggatagctatgaccaatctaacgttttccaaggccttccggcatctccttcgagagctgcactaagatactccccagaccgtcgccatagaactcaattttaccgcgatagtgcccataactctccagttgctccaaacaggtatgctgctaatctacaagagtctcccaaaagagcaggcgaggctgtcatacatctaagtgaggggagtaacctttacccccgcgataatgcagatctaccggtagacccctaccatctatcaccccagcaacagcccagtaacaatctgtttggaagtggcagattgtattctcaaagctcgaaatacacgatgtctactacttccacaacggctccctctctggcagaagcagacgatgaaaaggaaaaatacctcacttcgactacttcctatgatgatcagtctacaattttctctgcagacactttcaatgaaacaaaatttgaactgaaccatccaacaagacagcagtatgtaagacgtgccaattctgagagtaagagaagaatggtctcagacttgcctcccccaagcaagaaaaaggcactattgaaactagacaacccgataccaaaaggtctgttggatactttgcctcgtaggaactcccctgagtttacggaaatgaggtatacagcctgcactgtggaacctgacgatttnnnnnnnnnnnnnnnnnnnnnnnnnnnnnnnnagatgaacagagaatgtcaaattgccatttgtattaccatgtacaatgaagataaatattcattggcaagaaccatccactccattatgaagaatgttgctcatctttgtaagcgtgaaaaatctcatgtttggggccccaatggctggaagaaagtctctgtaattctgattagtgacggtagagcaaaagtcaaccaagggtctctcgactatttagctgctttgggtgtttatcaagaagacatggccaaggcgtctgtgaatggtgatccggtaaaagcgcacatttttgaattgacaactcaggtctctatcaacgccgatctggattatgtttcaaaggacattgttcctgtgcaattggttttttgtctaaaagaagaaaataagaaaaagatcaactcccatcgttggctattcaacgcgttttgtcccgttttgcaacctactgtagttactttggttgatgtcggtacacgtttaaacaatacagcaatttacaggttatggaaggtttttgatatggattcgaatgtggctggtgcggctggtcagattaaaactatgaaggggaagtgggggctgaaacttttcaatccattagttgcatcgcaaaattttgaatataaaatctcgaatattttagataaaccattagaaagtgtttttggttacatctctgttcttcctggtgctctgtccgcatataggtatagagccttaaaaaatcatgaagatggcactggccctctcagatcgtatttccttggtgaaactcaagaaggtagagaccatgatgttttcactgcaaatatgtacttggctgaagatagaattctttgttgggaattggtcgccaagcgagatgcaaaatgggttctaaaatatgttaaggaagccactggtgaaacggatgttcctgaagacgtttctgaatttatttctcaaagaagacgttggttaaatggtgcaatgtttgccgcaatttatgctcaattacattcctaccaaatttggaaaactaaacattctgttgtacgcaagttctttcttcatgttgaattcctttatcaatttattcaaatgcttttttcctggttttctattgcaaattttgttcttaccttttattatttagcaggatcaatgaatttagttattaaacatggtgaggccttattcattttctttaaatacctgatcttttgtgacttggcaagtttattcattatttccatgggtaatagaccccagggtgcgaaacatttattcattacctccatggttatactgtctatatgtgccacatattctctaatttgtgggtttgtttttgctttcaagtcgttagcttctggaacggaatcccacaaaatatttgtcgacatcgttatctcattgctctccacctatggcctatactttttctcatcactgatgtacctggatccttggcacatgtttacatcatccatacaatactttttgacacttcccgcctttacatgtactttacagatttttgccttctgtaatacacacgacgtttcctggggtactaaaggttccacacaggaatccaagcaattgtccaaggccattgtcgttcaaggtccagatgggaaacagattgtggaaacagattggcctcaggaagttgataagaagtttttggaaataaaaagtcgtttgaaagaaccagaatttgaagaatcaagcggcaatgaaaaacaatccaaaaatgattattatagagatataagaaccagaattgtgatgatttggatgctatcaaatctaatactgatcatgtctataattcaagtctttacaccacaagatactgacaatggttatttgatattcattttatggtctgtggccgctttagctgcctttagggtggttggttccatggcctttttgttcatgaaatacttgcgtataatagtgagttacagaaataaagttgaaggtagcggctcatgggaagtctctaaattagacttaccaaatgttttctacaaaaagggctaa

SEQ ID NO: 75485 - DNA, 936 bp, Saccharomyces pastorianus
atgttgtcaagaattgtatcaaacaatgcaacacgctccgtaatgtgccaccaagcgcaagtgggtattctttataagaccaacccagtgagaacttatgctactttgaaagaagtggaaatgtgtttgaaatctatcaaaaatattgagaagatcacaaaaactatgaagattgttgcatctacaagattgagtaaagctgaaaaggctaaaatttccgcaaagaagatggatgaagcagagcagttgttttacaagaacgccgaaaccaaaaatttggatgttgaggctactgaaacaggtgctcctaaagagttgattgttgctatcacctctgataaggggttgtgtggttctatccactctcaattggctaaagctgtgagaagacatttgaatgatcaaccaaacgctgatatagtcactattggtgataagattaaaatgcagctattgagaacccatcctaacaacattaaattgtctattaatggaattggtaaagatgccccaactttccaagaatctgctttgattgccgataagttattgagtgtcatgaaggccggcacttacccaaaggtttccattttctacaatgacccggtgtcttccctatcttttgaaccatctgaaaaaccgatctttaacgccaagaccattgaacaatccccatcattcggcaaatttgagatcgacacggacgcaaacgttccaagagatttgtttgaatatactttggctaaccaaatgttgacagcaatggctcaaggttatgctgctgaaatttccgccagaagaaacgctatggataacgcttccaagaatgccggtgatatgatcaatcgttactctatcttgtacaacagaacaagacaagctgtcattactaatgaactggttgatattattactggtgcttcctctttgggatga

SEQ ID NO: 75486 - DNA, 1194 bp, Saccharomyces pastorianus
atgctgcatcaaaaaatagctcataaagttcgaaaggtcgtcgtcccaggtatttctttattgattttcttccagggatgccttattcttttgtttctccaactcacctataagactctttactgtagaaatgatataaggaaacaaattggtctcaataaaacgaaaagattatttattgtcttggtatcatccattttgcatgttgtcgcaccatctgcagtgagaattaccactgaaaattccagtgttcctaaaggtactttttttttagacttgaagaagaaaaggattctttctcatctaaagtccaattcggtggccatttgcaatcaccaaatatacacggattggatatttttatggtggttggcttacacatcgaacttaggggctaatgtcttcattattttaaaaaaatcgttggcttccattcctatcctcggtttcggtatgagaaactataatttcatttttatgagtagaaagtgggcacaagacaaaataaccctaagcaacagccttgctggccttgattcgaatgcaaggggcgccggctcacttgctggaaagtcacctgagcgcataactgaggaaggagagagcatatggaatccggaggttattgatccaaaacaaatccattggccatacaatcttatcctattccctgaaggtacaaatctcagtgctgatactaggcaaaaaagtgctaaatacgctgccaaaataggcaaaaagccattcaagaatgtgctgctgcctcattctacgggcctgagatactcgttacaaaagttgaagccaagtattgaaagtctatatgatattacgatcggctactccggtgtaaaacaggaggaatatggtgagcttatatatgggctgaagagcatatttttagaaggaaaatacccgaagttagtcgatattcacatcagagcatttgatgtcaaagatattcccttagaggacgaaaatgaattttcagaatggctgtataaaatttggagtgagaaggatgctttaatggaaaggtactattccactggatcattcgtaagtgatcccgaaacaaaccattcagttaccgatagtttcaagatcgatcgtattgagttaactgaagtgctaatattaccaactctaacaataatttggttagtttataaactttattgttttattttttaa

SEQ ID NO: 75487 - DNA, 1005 bp, Saccharomyces pastorianus
atgaaatgtactataccagaacagcaaaaagtcattttgattgatgaaattggtggatacgatgttatcaagtatgaggattatcctgtaccatcgatttcggaggaagagttactaatcaaaaataagtacacgggtgttaattacatcgaaagttacttccggaagggtatttatccctgtgaaaaaccatacgtattgggcagggaagcgtcggggaccgttgtagcaaaaggtaaaggggtaactaattttgaaattggagaccaagttgcttatatatctaactcaacttttgcacagtattcaaaaatttcgtcccaaggcccagtcatgaagctgccaaagggaacgagtgacgaagagttgaaactttatgcggctggtttattacaagttctcactgctttatcatttacaaacgaagcgtatcacgtcaaaaagggcgactatgtattactttttgccgcagcgggtggtgtgggattgattttaaatcagctactcaagatgaaaggtgcacatacgattgcagttgcctcaactgatgaaaagcttaaaatagcgaaggaatacggcgccgaatacttgatcaacgcttcgaaagaggatattttaagacaagttttaaaattcactaatggtaagggcgttgatgctagttttgactcggtcggaaaggatacctttgaaatcagcttagccgcactaaaaagaaaaggtgtattcgtttcctttggtaatgcatctggtcttatcccgccattctctattaccagactttccccaaaaaatattactttggtgagacctcaactttacggctatatcgccgatcctgaagaatggaaatattactctgacgagttttttggtctggttaattcaaagaagttgaacatcaaaatatacaaaacttatccattacgggattatagaactgcagctgctgacatagaaagtagaaaaactgttggtaagctagttcttgaaataccacaatag

SEQ ID NO: 75488 - DNA, 528 bp, Saccharomyces pastorianus
atgcttatcaaccacttgagtaagatccgaaccgtaaggcacttttctaatattaaacccgttttatccaaggaagtttcgcgacgagtaattgttgcacctgcatcacacttcaaaacctccagtccaaatgtgaaaagtaacatccctattcatgaatataaacaactaccggaagattctaactacattgaaaagcattataaggaactacaagtatttttgaatgagtttttgattaagaaattaaacaagacctatgcggattttgaaggagatccggacgagttggtatttcaattggaaaaattcattgaactagaagttactccgagatacacaaatcattcagcacctgatggttgtgaagagagattcaaatccatcggagacaggatagtcgttgaccgctatttagattttgtgaaagatgtcagactaacactgctgctaaatggaggacactccttcatatttgatgtcatgctacaagccaaagaagtatttgacaaaatgcagaaagaatga

SEQ ID NO: 75489 - DNA, 351 bp, Saccharomyces pastorianus
atgcacattcttttcttgtttattttccactgtttggcattcaaagacttgattttttttaagcaatacgtaccatttgcagcggcgggaggatatcccatatcgtttctattcatcaaagttctgaccgcctcaacgaatttactactttcttcttcctctggagggtcctggaataagttatccaaagagtcgcaattactcaaagtcattctcacacactttcttgttcctattttttttttcttattccaatatattattttatcagaagacagacagcaagaacgacagcctaagtttcgagacaacgctaaatttgacggacatgcgaagacatgccatatataa

SEQ ID NO: 75490 - DNA, 633 bp, Saccharomyces pastorianus
atgccgaaagtcgctattttgatttactcagtggacgatataattgccacattagcagaaaatgaaaaaaaaggtatagagatagctggtggtgaggctgagattttccaagtgccagacgtcagctataaaactgaatatgcgacagaagaaggaaaagaggcagccaaagtcgccaaaactaatgcagatttttcctataaaatcctaacaagagaaacgttggttgagtacgattactacttattcggaatacctactaagtttggcaacttccccgcggagtggaaaagcttttgggactcgaatactggtgggctttgggcaaagggttctctccatggcaaaattgccggtttgtttgtttcaggcgcaataagcggcaagggtgatacagaaatgtgtatcatgaacgcaatgagtactctggtccatcatggtgtcatttatgtcccattggggtataagaacgcatacaaggaattgaccgacgttgaagatgtgaacgggtcttgcgcctggggcgcaggatgtgtttctggaatcgacggtggcagacctcccagtttatccgagctaagagttcaccaacttcaagggaaggccttttacgaccgtatcaaagatttgtaa

SEQ ID NO: 75491 - DNA, 1077 bp, Saccharomyces pastorianus
atgagtagtgttggcgatttcgaagaaattattttgcatgatttaaaaccttattatcacgttcccggtgccatacatagtgaaggaataaccttcgttaaggaaaccggtacactgttgtgggttgatatttttaaaggagaggttcataaagtcgaagacatagaacagcctgaatccagtcattcttttttttccattagtagagccaattatggcaagaatgcgtcaattgagtaccctcccaatccagatgaattaaaagaacccgtgggctgtatatttccaatacttgatggggcttcacaaaatgaaatcaaacaagtattatttggtagtaaatttggcataggaaaattggattttagcaaaagtgaatgggaatatgtcattttgtattccgaatgtcctgaattgagtacagacagagcatataagttgagatctaatgatgggaacgtttcgccagatggaaaatatatttatgtggggctaatgagcgattttccgtttgatttggaacctattgggtgtttgcttcgtgttgacctattagctcacaagatagagcttgtttggaattgcttgttaattcctaacgcgatccactgggatgaaagtgatcaaaagacgatgtacgtgactgattctttaaacttcattatttggaaatgtcctggtggcgacttgctaaaacgtgacgagttaattgacgtgaagaactccaacaatcaatcttttgagtctcctgaaccagatggaagtgcaatttggtttagcaaagacggaaaacattctgggtttctgtttatcactgtctggtccaccagtaaggttcaaatgttcgacctaactaacggaaaattgctgaaggagttcattttgccggagcagacaccaagagtttcatgttgttgttttgttggtaaagatctcttcgtgaccactgccaatgcagaaatcaacgatgctgtaagaaccaatactgacaagaatggtggctgcatctacagaattccaaacgtgctagacggaaatgttcctctggaatctacaaagcgacaacctctccactag

SEQ ID NO: 75492 - DNA, 1026 bp, Saccharomyces pastorianus
atgtctgattatgttgaactattgaaaaggggtggtaacgaagccatcaaaattaatccaccaaccggtgctgatttccacattacatctcgtggttcagactggcttttcaccgttttttgtattaacctactattcggtgtgatattagtcccactaatgtttagaaaaccagttaaggacagattcgtatattatacggccattgctccaaatttgttcatgtcaattgcttatttcaccatggcttctaacttgggttggatcccagtcagagcaaagtacaaccatgtacaaacttctactcaaaaggagcacccaggttacagacaaattttttacgctagatacgttggctggtttttggctttcccatggccaatcattcaaatgtctctacttggtggtactccattatggcaaattgctttcaatgttggtatgactgaaatatttactgtctgctggttgattgctgcctgtgtccactctacttacaaatggggttactacaccattggtattggtgctgccattgttgtttgtattagtttgatgacaactacattcaacctggtcaaggccagaggtaaggatgtctctaacgttttcgttactttcatgagtgtcatcatgtttttgtggctgattgcttacccaacctgttttggtatcacagatggtggtaacgttttgcaaccagattctgctaccattttctatggtattattgatttattgatcttatctatcttgccagttcttttcatgccattggctaactatttggggattgaaagattaggtttaatcttcgacgaagaacccgctgaacatgttggtccagttgctgaaaagaagatgccatccccagcttctttcaagtcatctgattctgactctagtaccaaggagaagttaaagctaaagaagaagcacaagaaggacaagaagaaggctaagaaggctaagaaggccaagaaggcccaagaagaggaggaggatgtagccaccgactctgagtaa

SEQ ID NO: 75493 - DNA, 2700 bp, Saccharomyces pastorianus
atggagaggccatcttttttggatcaagaaccacctgcaggttacgtaccaggtattggtcgtggagccactggattttcaacaaaagaaaagcaagtggttagtaatgatgacaaaggaagaagaataccgaaaaggtaccgtgaaaatttgaacaaccatcttcaaagccaaccgaaagatgatgaagatgatgaagctgcaaatgtattcaaaacgcttgaattgaaattagcacaaaagaaaaagaaaagagctaatgaaaaggatgatgacaattcagttgattcttcaaacgtgaaacggcaatttgccgatttgaaagaatcattagctgctgtaacggagagtgagtggatggatattccggatgccacagattttacaagaagaaacaagagaaatagaattcaagagcaattaaacagaaaaacttatgctgcaccggattcgctaatacctgggaatgttgatttaaataaattaacggaagaacgagaaaaattattgcaatctcaaatagatgagaatcttgcacaattaacgaagaatgcaagtaatcctatacaggttaataaaccgaacgttgctaccgatgcgctaagttacttaaaggacttagaaaacgatagagtaaactctctctcagacgcaacgttagaagacttacagaaaatgcgcacaattttaaagtcatacagaaaggccgatccaacaaatccacagggttggatagcttctgccagattagaagaaaaggcaagaaaattttcagtagcaaaaaaaataatagaaaatggttgccaagagtgccctcgaagctccgatatttggctagaaaacattagactacacgaatctgatattcactactgtaaaacattagtggcaacggcaataaattttaatccaacgtctccgcttctttggttcaaagccattgatttggaaagcacaacggttaacaaatatagagtagtgagaaaagcactgcaagagattcctcgagatgagggcctatggaagctagctgtcagttttgaagctgacaaagcgcaagttataaaaatgttagagaaagccacacaatttattccacaaagtatggatctcttgactgcatatactaatttgcaaagctatcataatgctaaaatgactttgaattccttcagaaaaatccttccgcaagaaccggaaatttggattatctctacactcttggaagaacgaaataacccagatatacctgtagataaactagttagtttgctcaaggagggtttattggaactctctaaaaatgggtacaaagcgaccttgtcagcgtggttgaaacgtgcagaggctctaaatgatgcgcccaattcaaatttaacctgtcaagccatcgtttacgctatattagaatggttaagagaaagtggcgagtatgagtctgagttgaataatgttgatcagatattagaaaaaatgccacactcaaaggtacaaattgccgtcttaaaaaagcttattcagtgggatccttgtgatacagttctttggtctagactgaaaatggccactgaaagctaccataaaattgaagagttattagcatttttccaggagctgctatttcagaccaagaatagtgatgatatacgagcaaatatgagggagaaaagccctggcttgttaatgatgtatgtaagcgaatattggaaggcccaaaaaggggatactaggcaaacactagttttgattgaccagattatagatttcgccccgcataatttggatttacgctttttcaagataaagttattaggtcgttcactacaacttgatgaattacgagatttttttcagcaaactttctcctctttagaggattttaagatcagtggcacggaaagattatattataaatacgtaaactttctgcggtaccaagatctgaatgaagaggctataaaattcttgaatgagagatgtttgaaatcatttcccatctgccacaaattttttctacagctgggtcaaatttatcattccatgggcaatattgaaatgagtagagaaacctatttgtctggtacaaggttagtgcccaattgccctttattatgggtttccctatcaaaaattgacgagattgatctaaaaaatccagtaagggcaagatcaattttagatagaggattgttaaaaaatcctgacgatgtattattttacattgctaaaatccaaatggaaataagacttggtaacttagatcaggcggagttactcgtcacacaggcattgcaaaagtttccaagcaatgctttactttgggtggagcaaatcaagctgtttaagcatggaaacaaaagttcattaaaaaaaacaatttttcaagatgctttaagaaggacacaaaacgatcatcgcgttcttttggagattggagtatccttttatgcagaagcgcaatatgaaacatcattaaaatggttagaaagagctctgaaaaagtgctcgcgttacggagatacatgggtttggctatttaggacatatgcaaggttaggcaaggatactgttgatctctacaatatgttcgatcaatgtgagcctacttacggacccgaatggatagccgcctctaagaacgtaaaaatgcaatactgcacacctagagagattttattgcgcttgatgaatgacaaataa

SEQ ID NO: 75494 - DNA, 1506 bp, Saccharomyces pastorianus
atgattggctcacttagaaacaaatttgagcatttcaaagtttctgaaaagggaggccaaaatttatctacaacactaccgaaactaccccctgcaaaggaccttgatagatcaactatctacaagtaccgttacaattatggtgtaaacttgggtgcgttatttgtgctcgaaccatggattttttctaaagaaaccatttgtacaatcgatgggaaagaatatgatagcgaatttgatgctatttcccaacaattgaagaagcattcttctgaagacgttgcgaaaatgttaagcgatcactataaaaagtacattgatcgaattgactgggaatggctatctaaagatgcccatattacagcgttacgtattccaattggatattggcatgtcgaagatgggaagcatttagattcgcttccatttgccccattgagaaaagtttatgagttagccaaaccttgggaaaaacttggcgaattaatcaataatgccaagaaaatgagcattggtgtattgatagatttgcatggtctaccaggaggcgctaattgcgactcacacagtggctcgaagagtggtgaagctgcgtttttccacaaggaaaagtacatgaccaaagtctacaaagatattttacctgcaattattaacacaatgactctgggcaacgaaaacatcattggtattcaagtggttaatgaggcatgttttgataataacccaaagggccaaaaattctactattcagaagccattaataccgttgaaaaacttcaaccaggtttacctgtcataatatccgatggttggtggccccaacaatgggcagactgggttaaagaaaaacattttagtgaaatagtggtcattgattctcatgtctaccgctgtttttctgattctgataagtcgaaggatgccaattccattatcaaagatttgccaaatactgtgaattttcctcatgaagatgccgattatactgttggtgaattttctggtgttcttgatggacaaacttggaataaaacttctggcgacagagacgctattgttcaaaaatacgtacaaacccaagcagatgtattttctcatgtagctagttggggttggtttttttggactttgcagtttgaatacggtgatggaggtgaatggggcttagctcccatgatgcagaaaggaaatttaccaaaacgtcctcacggtgatgacttacaagtcgacaagaagaaaatagattcaataatccatgaacacgaggcttattggaacggtaaaggtaaaatttttgaacactggaggtttgaggatggcataaagacagctgttgatgatataattgcctttaggaaatttgacaattcattaattggtagatggcattcatggaagtcgcaaagaagagctgaatacgtttctgtcaaaaaagatagcgaatttatgtgggaatgggatcaaggctaccaacgtgggttagatgagtttaataagtattaa

SEQ ID NO: 75495 - DNA, 201 bp, Saccharomyces pastorianus
atgagacatcaatactatcaaccacaaccgatgtattatcaaccacaaccgcaacctatatacatacaacaagggccgccgccaccaagaaatgattgttgttgttgttgtaactgtggcgattgctgttcagcaattgcgaacgttttatgttgtctgtgtctaattgatctatgttgtagctgcgctggcggcatgtaa

SEQ ID NO: 75496 - DNA, 1101 bp, Saccharomyces pastorianus
atgaattacatggcttatgattatgatccccaacattcgttggaaacgtcctttaacaatttggcatttcatccccaccaacagtcacagcaacaagccctatacgaatctggtgaaagaaacgatgccaggccgggattaatgaacaccttaggtcaggcgagtaaaatgaataattccatgcttcctcaaggttcgtcggctagtcccttaacgggtcaacatagcttgaacagtacaacaaatttcaacatgcccccatcaatgaatacctataattaccagaatgtaccacaagcatctatgagaaatactctcaatcataacaatatcatgaatggggcaactgctaatgattattggctggatccaatgaataatatgacaaataacaaggatactaatgggaatcctaatgactcgatgtcatcaatgtctaatatgaccgctaaaacctcaatcaatagtacggcattcaagaattcatttgttccttttaatcatgtgacagcgctctcaatgaataatgtcaacagcaatgagatgaattcaaataaagatgacagaatggaagcattggaagtagaactacaaataaaggaaagtcaaatcgaatcactcgagaacgaaattcaaaggctaaagaaaattttcaacgaggggctaaactacaagcagaatgagcataagtatgagaaggaaaactgccatataccccaaactttcgaattgccagcttccttggaagtgatattcagaaaactgtcatcgtcactgcatgcaaaggaaaaggagttagcagagacgaaagaaaatctggaaagtatattaactgcactggcgctaaatccaacaaattcagtgactaagtatggcaggtatgatgcagaatcgattgctcacaaaatggtggtaagattagaaaacttaacaaacgagaacaaagaaatggccaagatgttagcatatggcagatcaaaagagacccaaattgaactgcagttggccaaaaaagaaaatctagaattaagagaaaaaatcgcatctttggaagcccatttggcttcaaaggagtcttcaaaggaggacgttgctaattga

SEQ ID NO: 75497 - DNA, 2412 bp, Saccharomyces pastorianus
atggcagtagagatgacagataagttcatccaaaaagagagcccgaagtctttctcacattcagaaatggcagaagcagtactagaaaacgttaacgttcctgcagtcgtttcaaaagatgagtgtatttattgctttgaatccccttataatgaaccattggccctcaatgcatcacctaaacattcattgaatatatgcttaaactgtttccaagctacgtgcaacagacatgtcccactccatacccgagtcacagaatatgcttgcgataccatacattccaattatttaactattgctaaagtggagaaacctaagcaagaaaatgtagaagaaaataataacaacaaaaaaataaagctacaggtaattgagacgtcagaagacgacacccacaacactatttggggtttacaaaggttcaatggtgaaaatgttcccaggaccgtacttttgaagtcgacagactctgacatttcttctacggccttggagaagattgaaaagatattaaaggcgaagtcacaagacttcgaggataagaagaactcctgggtgttagaaatcagcacctgtccacatacagaaaactttcaaattccatctaagcccgaaaatactgtgaatttaaaccaatgctcttcctgtgatttgactcaaaatctctggttatgcctacattgtggtaatatcggatgtggcagggaacaaatcgggattgatggtcactcacatgctttggatcattatcggagtaataataatcacccattagctatcaaattagggtctttaagctcttcaacctatgatctgtattgttacgcatgtgacgacgaaactagatttccagataatgttaatttaggcagtgcactacaaatatacggaattaacatacaagaaaagattgcggatgaaaagactctagttcaattacaagtggaacagaacgaaaattggcaatttagaatggtcgattctagcggtaaagaatttgaaaaattatccgctagtaagaattatggctgtggtctgatcaatttgggtaattcctgttacttaaattcggttatacaaagcttggtgaatggtggcgtcccgaattggtccttggattttctaggaagtaaatttccactggatgttgtatatccggacaataatttaaagtgccaatggatcaagctactcaatgccatgaaatgtgaacccgaactatatccaaatggtatcaaacctactactttcaagaaatgcattgggcaaaatcatcaggaattcagttccaatagacaacaggatgcgatggaatttctaaccttccttttagacttgttagacaagaaatttttttcaagtagttcttcaggtattccaaatcccaacgatttagttagatttatgatggaggataggctccaatgtaacatttgcgggaaggttaaatattcttatgaacccacagaggctatacagattcccttagaggagaatgatgaacctcaagatatgttagagagaatcaaggcgtattttgaagggcagacgattgaatttaaatgtgctaattgtaaggaaaaggttaccgcaaataaaaaacctggtttcaaatctcttcctcaaacacttattttgaacccaataaggattagattacagaactggattcctgttaagacaagtaatgagctttctttaccaggtttaatagacagggatgatatgctagatgtttcgtcttatttatcacaaggatttgatcctcaaactgaaaacttattgcctgatgaggacgaaaaccgtagctcttttacgccaaaccaatgcagtatttctcaattaattgaaatgggctttactcaaaatgctagcgtgcgcgccctatttaacaccggaaaccaagacgctgagagcgctatgaattggctattccagcatatggatgaccctgatttaaatgatccctttgtcccgcctcctaatgtccccaagaaagataagagagaagtggatgaggtatcattgacttcaatgttatccatgggactaaatcccaacttatgtcgtaaagccttgatactcaacaacggagatgttaatcgtagtgttgaatgggtatttaacaacatggatgatgatggaacatttcccgaacctgaagtgccaaatgaagaacagcaacaaaaaaaggatcttggatattcgaccgctaaaccgtacgctttaactgcagttatttgtcataagggaaattctgtccattctggtcactatgttgtttttattcgtaaactagtggcagacaaatggaagtgggttctttataacgatgagaaactagttgctgccgacagcattgaagatatgaaaaaaaatggttatatttatttctatacaagatgctaa

SEQ ID NO: 75498 - DNA, 243 bp, Saccharomyces pastorianus
atgacacaacataaaagctcgatggtgtacatacccaccactaaggaagctaaaagacgtaatgggaaatcagaaggcatactaaatactattgaagaagtggtggaaaagctttattggacctactacatacatttacccttttatttaatggcctcttttgattcattcttcctccatgttttttttctcacaattttcagtttgagtttcttcggtacactaaagtattgcttcctttga

SEQ ID NO: 75499 - DNA, 3327 bp, Saccharomyces pastorianus
atgtcgatcacgaatggtacttctagaagcgtttcggcaatgggccatccggcggtagagaggtacactccaggccatattgtctgcgtaggcacacataaagttgaagtggtaaattatttagcagaaggtggctttgctcaaatttacgtggtgaaattcctagagtatcttaatgaatttgataatacagcaagtgttcccttaaaaattggcgatgtcgcatgtctaaaaagggtattagttcaagatgagaatggattgaacgagatgagaaatgaagtggaggtaatgaagaaattgaaaggggccccaaatatagtacaatacttcgattccaacgcctctcgccgtcgtgatggcgttcaaggatttgaggttcttttgctaatggaattgtgtccaaacaaatctttgctagattatatgaaccaacgattgtcaacgaaactgacagaagctgaaattgtgaaaattatgtatgacgttgctctttctatctctcaaatgcactaccttcctgtgcccttgatccatcgcgatatcaagattgaaaatgtcttggtagatgccaaaaccaatttcaagctagctgattttgggtccacgtcaacatgtttcccaattgtcactactcatcaagatattgctcttttgactcaaaacatctatgtgcatactactccgcagtataggtcccctgaaatgattgacctttacagatgtctgcccattaacgaaaaatcagacatatgggctttgggagttttcctttacaaattattatttttcaccaccccttttgaaatgaccggtcaatttgctatattacattccaaatatgaatttcctgtcaacaaatattcatcaaaactaatcaacttaatcattatcatgttggcggaaaacccaaatttgagaccgaacatttatcaagtattataccatttatgtgagattttaaatgtggaagttccaatcgaggataagtatgcggaaggtgcctataatttttctaaatatacgcagtttcagaataaattacaaaatgttcaattgcaaatgtaccagttacaacaaaagaaaattatgcagaacaataaattgagtgactcagaagaaaacttactgaatgacatgtttctttcttcttttgaaatctcatccaaacttcccatgaatgctagtgacggtcatgccgctgtttctagaataccatctcaaaatgtcggccaagaacttgaagaagagaaagaaagtcaatccgatcagaggaagtctaccctgtccgaagataaatcgtcaagaacgacatcgaatgctaacagttctggtacagccaataatcctcaagaaatcaatacaatccagtctccaggtatagaggacaaatcaatttttgaaaataaaactcctggagagttatattatccaagcgtgagcgaattagatacttatttggacaaagaattggtcaaacaatcaagtgatccgactatttctgaacaaagtcctcgtttgaatacccaatcactaccacagaggcaaaagagcacaagctcttattcttcaggtggcagatcaatgaagagcacatcatatggtgcagcaacgatcgggtcagacgaagccttggcgaacgagaaaactgctggtattaataagatgaaacaacataaatcgaataatccctttccaaaaatgaatgttgcataccattctacgaatgaattgagcaatgacgcaagtaactttttcctggaagaacaacagcaaggccagagatatcagcaagctcaaaatcaaacaggtacacaagggaatacctttccagatgaatctcagtatcaatctagagttgaacaacagcagcaacaacaggaccaacccaaaggacctgctaattatagtcaaagaaatttctacactgggagggatcggtccaataaacctatgcagttgggtggaactattgctggagatagtggtaatagaagagtcaactttcagaatatttctcaaaattacgccacgaactcccagtcaggatatctcccaagtcaaaattccccagcaattccaatggtgagacctgttatttccatgaatcagcagcaagcgcaacagatacaagcccagcaattgcaggcacaacagatgcaggcaaagcaacagatgcaagccaagcagcagatgcaagttcagcaacaactgcaagtccaacagcaaatgcaaattcaaaatgcaaataataatggtacttacgtctctgatagaacaaatcataccacagaagatatgagaaatgctcaggggggtgaacctccaattcttgcaggaaattctgcaaatgaaccaatgcactcatcctctaaaaatgaagctctcttaattgaattatctccattaaaagaagatacaggaaagcaatctttccaagatacaaatgagcctcaaactggcggtatcgaagatgccggcggttcaggaactatcaaaggctcgaacaataatcgaaatggcgttttaaatttaagtttgaatgagatggacttatcaagagatgatactgatgctgctgtctcctccttttcatcgtcttcatcgtctgcatcaattcaacaagctaagctttctggacgcaaaggttcaagtaagagcaacaattattcaacagacgaattgggagatagtatggtctccagcgaaagcattgatattgatttggatgatgcaaggagaggaaaaacagctgaaagaagaccactccataatgaaagaggtcataaagaccaggcaagatcaagtgatgctaggaagtctaatcaattcaaaagcaaggacttcagcagcgtatcaacaaggcaaccgcggcagtcattggatctgaatttccaggaagtaaatctgtcttcaccaacgttaactcaagagcatagaaataaaaacgactcgccagtaccaaattcacattactcgtatagagttccacctcatgcttccaccgcaataactgagaataagcgccacagtactggtcacgaactgtcaacccggtcaaatggcaagcatgaaacacacaggactggttccaagcaaaggcacgatttggaaagataccggcattcgaaggataaggatagcaatagcagcattactattagcacctcaactccatcagagatgagaaaatccttcgctagggcccgtcaatcgcttgatttggaaagggtccgtcgtgaagcgatggcaagtagtgcatccagtagtggtggcagtaacgggaaaaggagatcttttttctcagtctttagaagcgagaaatga

SEQ ID NO: 75500 - DNA, 1863 bp, Saccharomyces pastorianus
atgctaaatggggaagactttgtagagcataatgatatcctatcgtctccggcaaaaagcaggaatgtaaccccaaaaagggttgacccacatggagaaagacaactgagaagaattcattcatcaaagaagaatttattggaaagaatctcgcttgtagacaacgaaaggaaaaatacatctccagatccggcactcaaacctaaaacgccaagtaaagctccccgtaaacgtggaagaccaagaaagatacaggaagaattaactgataggatcaagaaggatgagaaagatacaatttcctctaagaaaaagaggaaattggacaaagatacatcaggtaatgtcaatgaggaaagcaagacttctaacaacaagcaggtgatggaaaagacggggataaaagagaaaagagaacgcgaaaaaatacagatagcgaccacaacatatgaagataatgtgactccacaaactgatgataattttgtatcaaattcacccgagccaccagaacctgcaacaccatctaagaagtctttaaccactaatcatgattttacttcgcccctaaagcagattataatgaataatttaaaagaatataaagactcaacctccccaggtaaattaaccttgagtagaaattttactccaacccctgtaccgaaaaataaaaagctctaccaaacttcggaaaccaagtcagcaagctcgtttttggatacttttgaaggatatttcgaccaaagaaaaattgtcagaactaatgcgaagtcaaggcacaccatgtcaatggcacctgacgttaccagagaagagttttccctagtatcaaactttttcaatgaaaattttcaaaaacgtccaaggcaaaagttatttgaaattcagaaaaaaatgtttccccagtattggtttgaattgactcaaggattctccttattattttatggtgtaggttcgaaacgtaattttttggaagagtttgccattgactacttgtctccgaaaatcgcgtactcgcaactggcttatgagaatgaattgcaacaaaacaaacctgtaaattccatcccatgccttattttaaatggttacaaccctagctgtaactatcgtgacgtcttcaaagagattaccgatcttttggtccccgctgagttgacaagaagcgaaactaagtactggggcaatcatgtgattttgcagatccaaaagatgattgatttctacaaaaatcaacctttagatatcaaattaatacttgtagtgcataatctggatggtcctagcataaggaaaaacacttttcagacgatgctaagcttcctctccgtcatcagacaaatcgccatagtcgcctctacagaccacatttacgctccgctcctctgggacaacatgaaggcccaaaactacaactttgtctttcatgatatttcgaattttgaaccgtcgacagtcgagtctacgttccaagatgtgatgaagatgggtaaaagcgataccagcagtggtgctgaaggtgcgaaatacgtcttacaatcacttactgtgaactccaagaagatgtataagttgcttattgaaacacaaatgcagaatatggggaatctatccgctaacacaggtcctaagcgtggtactcaaaggactggagtagaacttaaacttttcaaccatctctgtgccgctgattttattgcttctaatgagatagctctaaggtcgatgcttagagaattcatagaacataaaatggccaacataactaagaacaattctggaatggaaattatttgggtaccctacacgtatgcggaacttgaaaaacttctgaaaaccgttttaaatactctataa

SEQ ID NO: 75501 - DNA, 933 bp, Saccharomyces pastorianus
atgggtaagagcagcaaagataaaagagatttgtactatagaaaagcaaaagagcagggctatagggctagatctgctttcaaactacttcaactcaatgaccaatttcatttcctggatgatccaaacttaaaaagagttgtagatttgtgtgcagcaccaggttcatggtcacaagtgctctcgagaaaactatttgatgaaagtcccagttcagataaggaggacaggaaaattgtctctgtcgatttacaaccgatgtcccccatacctcatgtgacaacgttgcaagccgatatcactcatcctaaaacattggcgaggattctaaaactgtttggcaacgaaaaggccgattttgtttgtagtgatggtgcacctgatgttactgggctacacgatcttgacgaatatgtgcaacaacagttaattatgagtgcgctgcaacttactgcatgcattctgaaaaaaggtggaacttttgtggcaaagatcttcagaggtcgtgatatagatatgctatattcccaattgggctatctattcgataaaatcgtttgcgcaaagccaagatcatcaagaggtacatctctagaagcgtttattgtttgtttaggctataacccaccatccaattggacaccaaaattagatgtaaatacatccgttgatgaattttttcaaggctgttttttgaataaattgtgtatatcagacaaattgtctcattggaatgaagaggagagaaacatagccgaatttatggcttgtggaagtcttcaaagtttcgactcagatgccacttatcatgacctaccttcttcagttgcaggcacttcatcgtccttagatcctgttcaaagcccgacgaaccctccctacaagaaagctttggaattaaaaaggagcgggaaactcactagatcagtttga

SEQ ID NO: 75502 - DNA, 429 bp, Saccharomyces pastorianus
atggatatggtttcaccagtcttgaacctacaatcatctgttttaggtgagctcgtaggcattactggaaaagtgttctttctcttaatagaagagattaaatacccgataatcacacccagaattattgtggatgcccagatatcttcttggtcattgttttttttcgcttcaatctgtaatctctctgcaaaatttcgggagccaatagtgacaacatcgtcaataataagtttgatggaatcggaaaaagatcttaaaaatgtaaatgagtatttccaaataatgaccaaaatgctctttatattggaaaataaaatatttgtttcgttcttcgtagtatttaacatttccgttcttatcattgtaaagtctgagccatattcatatggaaaagtgctttttaaacctagttcctccatattttag

SEQ ID NO: 75503 - DNA, 1095 bp, Saccharomyces pastorianus
atgaatgatgaaattaatgagtcaccgcccaatatatgtgagcagtgcttaggtgatgaggctaatatacgaatgactaaaattccacaaggctctgaatgtaagatttgtaccttaccgttcaccttataccattttaagacgtctaaacgaagcaataatatcattaaaacattaatatgtgtacggtgcgccactcagagaaacatttgtcaatgctgtatgcttgattcaagatggcacatccctatacaactgcgggatcatttaatatcccttgtgaacggggaaaacgttatgacggaggaagcaaaaaacgacatgatgaaaaggtttctgtcactaaaaaacgtgaaattaggaggagctcagattacgagtgatccgtcagaagcagataatatcgttgataaattgaaaaatatacttctgcgagcaccatcagatggcccaagtactccgttaataaaaaacacaacagcattgtataaaaatgaaaaaggtgcaaatgaggtcaaaaacttggaaaagtacgcgtccgtggacatttctcatattttgaagaaactacccttgaatgaatcgtttttaaagaacccctccaccaaatcattttttctgtataatattgatgcctcaatccctgaatggaaaataactgatacagtttcgcaattattgggtataaagaaatggaaggatggaaattcattgtcattaatagtcaaccacaaggcgaagtgtggtggcctaagatttcaatctagtgaattgggggagcggtttgtcagtaaaataagtgagacacttgtcacaccaaagggcctaaagagaggagttttacttattgaccgttttagaatctttatcattccgtggtcgtctggcttttcagctgcgtcattcggaaccaacactgcagaaaatataaaacttagtttaagtttgaataagcttattcagttggagctagggctttcttttcctacaaaaagcacagataacgcaaagaatgacaagaaaaagacatcaaaaaaagttcataaggccagatcaaagaaatcgaaacctcgcgctaacaagttaacaatatag

SEQ ID NO: 75504 - DNA, 597 bp, Saccharomyces pastorianus
atgtctgtttccaagattgctttcgttttaagtgccattgcctctttggccgtcgctgacaccagcgccgccgaaactgctgaattgcaagctattatcggtgacatcaactctcatctttctgactacttgggtctagaaactggcaacagtggattccaaattccatctgatgtcttgagtgtgtaccaacaagtcatgacttacaccgatgacgcttacactaccttgtttagtgaattggactttgatgccatcactaagacaattgttaaattgccatggtacaccacaagattgagttctgaaatcgctgctgctcttgcctccgtttccccagcttcttccgaggctgcatcttcttccgaagctacatcctctgccgctccatcctcttctgctgccccatcttcttctgctgccccatcatcatctgccgaatcatcttctaaggccgtttcttcttctgtcgctccaactacctcttctgtcagcacttctacagtcgaaactgcttccaatgccggtcaaagagtcaatgcaggcgctgcctctttcggtgctgttgttgcaggtgcagctgctttattgttataa

SEQ ID NO: 75505 - DNA, 714 bp, Saccharomyces pastorianus
atgaaaacggcctacttggtgtcattggtgctcatcgtatcgacagcatatgttattaggttgatagcgattctgccttttttccacactcaagcaggtacagaaaaggatacgaaaaatggagttaacctactgaaaatacgaaaatcgtcaaagaaaccgctcaagatttttgtattcttaggatcgggaggtcatactggtgaaatgatccgtcttctagaaaattaccaggatcttttactgggtaagtcgattgtgtacttgggttattctgatgaggcttccaggcaaagattcgcccactttataaaaaaatttggtcattgcaaagtagaatactatgaattcatgaaagctagggaagttaaagcgactctcctacaaagtgtgaagaccatcattggaacgttggtacaatcttttgtgcacgttgttagaatcagatttgctatgtgtggttctcctcacctgtttttattgaatgggcctggaacatgctgtataatatccctttggttgaaaattatggaacttcttttgcccctgttgggttcctcccatatagtttatgtagaatcgctggcaaggattaatactcctagtctgaccggaaaaatattgtattgggtagtggatgaattcattgtccagtggcaagaattgagggacaattatttaccaagatccaagtggttcggcatccttgtttaa

SEQ ID NO: 75506 - DNA, 639 bp, Saccharomyces pastorianus
atgctaagacgctctaaaaattccagcactaacacaaacgcagacaccaagaaaagacaatccatgcatttaggatccaaaagttcgctaatctcgctgactagcgaatttggccatggacactccaagacgaagcagaaaaaggaggagggcacagctccttctcaattcctgtctcctacgaataagagaagcacatctagtcagtcaaagttaaaaaggagcagcttgttactggacgaaacactgcttaaagactaccactcggccatgaggcacatgcaaacaaacgctgcaaaggaagaaaagctgcggatggctccatcaccaacgcagtcaacgaggagcgaatcagacgccagtctttcctccaccaagagctcgatctcttccatattttcccaagataatgactattccattcacgatttgttgtacgaagatattgaagagatggataaaacaacagacgctctcaaaattaacaacacaatagcaatcgacgattctaaagctctctttgttttctgttcaaacgactcctcctcaaggacagcgtctattgaaacattgcacgaatcaaatttggacaacctggatatgggttccagtagaaggacatcgttggactttttttaa

SEQ ID NO: 75507 - DNA, 645 bp, Saccharomyces pastorianus
atgtcatttaacagtccattttttgatttctttgacaacatcaacaacgaagttgatgcctttaacagattgctgggtgaaggcggcttaagaggctacgcaccaagacgtcagttggcaaacacacccgcaaaggattctactggcaaggaagttgctagaccaaataactatgctggcgctctttattatcccagagatgaaaccttagatgattggttcaacaatgacttgtccctgttcccatctggtttcggtttccctagaagtgtcgcagttccagttgatattttggaccatgacaacaactacgagttgaaagtcgtggttcctggtgtcaaaagcaagaaggacattgatattgagtaccatcaaaacaagaaccaaattttggtttctggtgaaattccatctaccttgaatgaagagagtaaagacaaggtcaaggtcaaggagagcagctctggtaagttcaagagagtcatcactttgccagactacccaggtgtggatgcagacaacattaaagcagactacgcaagtggtgttttaacattaacagttccaaaattgaagcctcagaaggatggtaagaaccacgtcaagaagattgaagtttcttctcaagaatcgtggggtaactaa

SEQ ID NO: 75508 - DNA, 267 bp, Saccharomyces pastorianus
atgcacgtacataagggcctcatcttcctctcctttttttcccccatctacctatcgctgttattgaacggaagcatcttctttttttattatgctcagagggccctacatgacagcttttttttccccaatgagctgctacggtgccagatctgcttatgttcattattttggatggtaaccgttataaatttaaagcgtttcttcgctaggatggtgaatattagtatttatcagccgtctcgtaatcgtttagttcgttactag

SEQ ID NO: 75509 - DNA, 489 bp, Saccharomyces pastorianus
atggtgatgctccattctaaaaacgttaaagggtttctggaaaacactttgaaaccgtatgatttgcattcggtagacttcaagacatcgtctttgcaatcgtctatgattataaccgccactaatgggggtatactgtcctatgcgacgtcaaacaacgatgtaccgaaaaattccataaacgaaataaactcggtcaataacttgaaaatgatgagcttattgattaaggataagtggtcagaggatgaaaacgatactgaggaacagcactccaatagctgttaccctgtggaaatcgactcctttaagacaaaaatatatacttacgaaatggaagatttacatacctgtgtcgcacagatacccaatagcgaccttttgctattgttcattgcggaaggtagcttcccttacggactactggtaattaaaattgaaagagctatgagagagttgactgatttgtttggctacaagctaggttga

SEQ ID NO: 75510 - DNA, 2886 bp, Saccharomyces pastorianus
atggcccccccaccattccgtcctgaaaatgccattaagagagccgatgaacttatttctgttggcgaaaaacaagctgctttacaatctttgcatgatttcataactgccagaagaatccgttgggctacaccttcaactgttgagccagtcgtgtttaaattcttggaaattggtgttgaactaaagaaaggtaagctgctaaaagacggtttgcaccagtacaaaaaattaattcaaggatctaccgaaggtttggtttctgtcggtgccgttgcacgtaaattcattgatttagtcgaatctaaaatcgcttctgaacaaactagagctgacgaacttcaaaagcaagaaatcgatgatgatttggaaggtggtgttaccccagaaaatttgctgatttctgtttacgagtcagatcaatctgtggctggtttcaatgatgaagccattacttcatggttaagatttacttgggaatcatatcgtgcagtcttagatttattgagaaacaacgctttgttggaaattacttattctggtgtcgttaaaaaaactatgcatttctgtttgaagtatcagcgtaaaaacgaattcaagagattagctgaaatgttacgtcaacatttagatgctgctaactaccaacaaagtaaatcaggaaacaatttagttgacttgagcgatgctgataccttgcaacgttatttagatcaacgtttccaacaagtcgatgtttctgtcaagttggaattgtggcacgaggcttatagatccattgaggatgttttccacttaatgaaaatatccaaacgtgctcctaaaccatctactttggctaattactacgagaatctcgtaaaggtcttctttgtttccggtgatccattgttgcacactactgcctggaagaagttttataagttatattctaccaatccaagagccacggaagaagaattcaaaacatattcttctacaattttcctatccgctatttctacccaactagacgaaattccatctattggctacgatcctcatttacgtatgtaccgtttattaaacttggacgccaagccaactagaaaggaaatgttgcaatccattattgaagacgaatccatttacggtaaagttgacgaggaattgaaagaattgtacgatatcattgaagttaactttgatgtcgacacagtgaaacaacagctggaaaatttattagtcaaattgtcttctaaaacctacttcagccaatacatcgcacctttaagagacgtcattatgagaagggtttttgttgctgcctcccaaaaattcactactatctcccagtccgaattatacaagctcgctaccctacctgctccgttagacttatctgcttgggacatcgaaaaatcgctgttacaagctgctgtggaagattatgtttcaattaccatcgatcatgaatctgctaaggttacattcgctaaagatccatttgacattttcgtatcaactgcttctaaaggagtctctgaagaagaaaacacagagccagaagtccaagaagaaaaggaggaaactgacgaagctcttgggccacaagaaactgaagacggtgaagaaaaggaagaagaatctgatcctgttattatccgcaattcttacatccacaacaagttgcttgaattatccaatgtcctacacgatgttgacagtttcaacaatgcttcatacatggaaaaggttagaattgcccgtgaaactttaattaagaagaacaaggatgaccttgaaaagatttccaagattgttgacgaacgtgtcaagagatctcaagagcaaaagcaaaaacatatggaacatgctgccctacatgctgaacaggatgctgaggtcagacaacagcgtattttggaagaaaaagctgctattgaagctaaattggaagaagaggctcaccgtcgcttaattgaaaagaagaaacgtgaatttgaagctatcaaagaaagagaaatcacaaagatgattactgaggtgaatgctaagggacatgtttacattgaccctaacgaagctaaaagcttagatcttgacaccattaaacaggttattatagctgaggtatcaaagaacaagagtgaattggaaagtcgtatggaatatgctatgaagaagttagatcatacggaaagagctttgagaaaggtcgaattgccattgctgcaaaaagaagttgacaagctacaagaaacagacacagcaaattatgaagctatgaagaaaaaaattgtcgacgtcgccaaggccgaatacgaagccagaagggctgatcgtaagaacttggtcatggtctatgatgattatttgaagttcaaggagcatgtttcgggcactaaggaaagcgaattagctgccatccgcaaccaaaagaaggctgaattggaagctgccaaaaaggccagaattgaagaagttcgtaagcgtcgttacgaggaagccattgcaaggcgtaaggaagaaattgcaaatgctgaaagacagaagcgtgctcaagaactcgctgaggctacccgtaaacaaagagaaatcgaagaagctgctgccaagaaatcaactccatactctttccgcgcaggaaacagggaacctccaagtacaccaagcactctaccaaaggcgaccgtttctccagataaagctaaattggatatgatcgctcaaaaacaaagagaaatggaagaagccatcgaacagagactagccggtagaacagctggtgggtcctccccagctactccagcaaccccagcaaccccaactccatcttctggtccaaagaaaatgactatggctgaaaagttgagagccaagagattggccaaggggggcaggtaa

SEQ ID NO: 75511 - DNA, 2277 bp, Saccharomyces pastorianus
atgttcaagatacctggttttggaaaagctgctgcaaatcatactccaccagatatgacaaacgtggatacccgtacacgccatttaaaggtgtcaaactgtccaaataactcctatgcactcgcaaacgtagctgctgtctcaccaaatgatttccctaataacatttatattattatcgataatttatttgttttcacaactagacactccaacgacattccaccgggaaccattggatttaacggtaaccagcgtacctggggtggttggtccctaaatcaagacgtgcaagcaaaagcatttgatttattcaagtattccggtaagcaatcgtatcttggttcaatagatatagatatctcattcagagctagaggtaaggccgtaagcacggtattcgatcaagatgagttagccaaacaatttgttcgttgctacgaatctcaaatattttctcccactcagtaccttatcatggagttccaaggccatttctttgacttaaaaattagaaatgtccaagcaatcgatttgggtgatattgaaccaacctccgctgttgcaactgggatagagacaaagggaattttgacaaaacaaacacaaattaattttttcaaaggaagagatggtttagttaatttgaaatcatcaaattcattaagaccaagatcaaatgctgtgatcagaccggatttcaagtttgaagatttgggtgtcggtggtttggataaagagtttactaaaattttcagaagagcgtttgcaagtcgaatctttcctccttcagttatagaaaaactgggtatttctcatgttaaaggtttgctattgtacggtcctccaggtactggtaagaccttaattgcaagaaagattggtacaatgctgaatgctaaagagcccaaaatcgtcaatggtccagaaattttgagcaagtacgttggttcttcagaagaaaacattcgtaatttatttaaggatgcagaagcagaatatagggccaagggtgaggaatcttccttacatattattattttcgatgagctggattctgttttcaagcagagaggttcaagaggtgatggtactggtgtaggggacaatgtagttaatcaattgttagctaaaatggatggtgttgatcagttgaataatattttggttattggtatgaccaatcgtaaagatttaatagacagtgctcttttgcgtccaggtagatttgaagtccaagttgaaattcatttacccgatgaaaaaggaagactccaaattttcgacattcagacgaagaaaatgagggaaaataatatgatgagcgacgatgttaacttagctgagttagctgcattaacaaaaaacttctctggtgctgagattgagggtttagtgaagagtgcaagttcttttgcaatcaacaaaaccgtcaacatcgggaaaggtgccacaaaacttaacactaaagatatagcaaaacttaaagtaacaagagaagactttttaaatgcactcaacgatgttactcccgcttttgggattagtgaagaagatttgaaaacatgtgtggaaggtggaatgatgctttattccgaacgagttaactcaatattgaagaacggagcccgttacgtccgccaagttcgcgagagtgataaatccaggttagtatctctattaatccacggccctgcagggtccggtaaaacagctttagccgctgaaattgctttaaaatctggattcccattcatcaggttaatttctcccaacgagttgtcaggcatgtcagaaagcgcaaaaattgcctatattgataacactttcagagatgcgtataaatctccactaaacattcttgttattgattcgttagagactctagttgattgggtaccaattggtccaagattctctaataacattttacaaatgctaaaggttgcattgaagcgtaaacccccacaagaccgtcgtttattgatcatgactactacatcagcttattcggtacttcaacaaatggatatcttgagttgcttcgacaatgagatagcagttccaaatatgaccaatttagatgaattgaacaacgtcatgatagaatcaaactttcttgacgatgctggtagagttaaagttattaatgaattatcaaggagctgtcctaacttcaatgtcggtattaaaaagaccttgaccaacattgaaaccgcaaggcacgatgaagatcccgtgaacgagcttgttgagttgatgacccaatccgcataa

SEQ ID NO: 75512 - DNA, 1461 bp, Saccharomyces pastorianus
atgagtcttaaagaagacgactttggcaaggataattctagaaatatagaatcatatactggtagaatttttgacgtatatatacaaaaagattcgtattcacagtcggccttggatgatatgtttccagaagccgtagtttcaaccgccgcttgtgtgaaaaatgaagcggaggataacatcaatctcatagacgcgcatcctcaattcgaactggtaaatactggactgggtgctaaatcggacgatttgaaatctccatcagcaaaggctacgttcactgacaagcagaggaagaatgaagtaccaaatatatctgtgagcaactactttcccggacaaagtagcgaaacgtcgtcaacaacggaatcttggactatcggttgtgataagtggtcagaaaaggtagaagaggcattccttgaggcacttagactgataatgaaaaatgggaccacaaaaataaaaataagaaatgccaattttggaagaaacgagctgatttcattatatatcaagcacaaaaccaacgagttcagaaccaaaaagcaaatttcttcccatattcaagtctggaagaagaccatacaaaacaaaatcaaggactcgctgaccctatcatcaaaggagaaggagcttctacaccttatcgaacatggcgctgaacaaactactgaaaactcaaacctgttttatgacatatttgaagaaattatcgactctctaccttcagtcagtgattctggaagtttaacccctaaaaacctctatgtaagtaataatagcagtggattgtcagtacattcaaaactgcttacgccaatcactgcttccaacgagaaaaaaattgaaaatttcataaaaactaatgctgcatctcaagccaaaacccccctcatttacgctaagcacatttatgaaaacatagacggctacaagtgcgttccgtcaaagaggcctcttgaacaactttcccccacggaactccaccagggagatcgccccaataaggctagcttttccaacaagaaggcaatcctggagagtgcaaaaaaaatcgaaatagagcagagaaagataatcaacaaataccaaagaatttcccgcatacaagaacatgaaagtaatcctgagttcagttccaattccaattccggttcagagtacgaatcggaggaagaagtagtcccaagatcagccacagtcacacaactccaaagcagaccagtgccatactacaagaataatggaatgccctactcactctccaaagtacgaggaaggcccatgtatccaagacctgctgaagatgcttacaatgccaattatattcaaggtctgccccagtaccaaacatcttatttttcgcagctgttattatcatcaccccagcattacgaacattctccacatcaaaggaactttacgccatccaaccaatcgcatgggaacttttattaa

SEQ ID NO: 75513 - DNA, 2928 bp, Saccharomyces pastorianus
atgttgtcgagactatctttattgagtaactcgagggcgttccaacaggccagatggcgcatttaccgcttaaaagtttcgccaactgtgcatgcttcacaataccatattctctctggtaggaaacttgctcaatctattcgagaaaaagccaatgatgagatacaagccattaagctcaagcatcctaatttcaagcctaccttgaaaatcattcaagtcggggccagaccagactcatctacgtacgtgaggatgaaattgaaagcttcaaaggacagcaatgtagactgtatcatagagaagttaccagcagaaatcactgaagttgagcttttgaagaaaattagtgacatcaatgatgatgactctatccatgggttgctaattcaactacctctaccgcgtcacttggatgaaaccacgattacaaacgctgtggactttaaaaaggacgttgatgggttccacagatataatgctggtgaattggctaaaaaaggagggaaaccatacttcataccatgtactccttatggttgcatgaaattacttgaagaagctcatgttaagttagatggtaagaacgccgtcgtgttaggcagatcaagtatcgtcggaaatccaattgcttcgttgttgaaaaatgcgaatgccactgttactgtctgtcatagtcatacaaggaacattgcagaagtggtctcccaagctgatatagttatcgcagcttgcggtattcctcaatacgttaaatcagactggattaaagaaggcgccgtggttattgatgtaggtatcaactacgtacctgatatcagtaagaaaagtgggcaaaaattagttggtgatgttgattttgattctgtaaaggaaaagacatcttatattacccctgttcctggtggagtgggtccaatgactgtcgctatgcttgtttccaatgtactattagctgctaaaaggcaattcgtggaatctgaaaagcttccagttatcaaacctcttccattacacttagaaagtccagtgccttcagatattgatatatcaagagctcagagtcctaagcatatcaagcaagttgccgaggagttgggaatccactctcacgaattagaattatacggccactataaggcaaaaatttctccaaatatttttaaaagattagaatctagagaaaacggtaagtacgtccttgttgcaggtattactccgactccattgggtgaaggtaaatccactacgactatggggttggtgcaggctttatccgctcatttagggaaaccatccatcgcgaacgttagacaaccatctcttggcccaaccctgggtgtcaaaggtggtgctgctggtggtggttatgcccaagttattcctatggacgagttcaatttacatttgaccggggatattcatgctatcagcgctgcgaacaatcttcttgcagcagctatcgacactagaatgttccatgaagccactcagaagaatgatagtacattttacaagagactagttccaagaaaaaaaggcatcagaaagtttaccccatccatgcagagaaggcttaaaagattgggtattgaaaaagaagaccctgatgctttaacacctgaagaagtcaaaagatttgctagattgaacataaatcccgatactatcactatcagaagagttgtcgacatcaatgacaggatgttaagacaaattaccattggcgaagccgctacggagaagggttttacaaggaccactggattcgatatcactgttgcctctgaattaatggccattttagctctatctaaaagcttacacgagatgaaggaacgtattggacgcatggttattggtgctgattatgataacaaaccagtaacagtagaagatattggctgtaccggtgctctgactgcattattacgtgacgctataaagcctaacttaatgcaaactttggaagggacccccgtaatggttcacgctggtcctttcgccaacatctccatcggcgcatcatcagtaattgcagacttaatggcattgaagcttgttggttcagaaaagaacccgttaaatgacaagaacatccatgaacctggttatgtagttactgaagcaggattcgattttgccatgggtggtgaaagattctttgatatcaaatgtcgttcctctggattggtgccagatgcagttgtcttagtcgcaaccgtaagagctttgaaatctcatggaggtgctccaaatgttaagcccggacaatcattaccaaaagaatacacagaggaaaacatcgattttgttgccaagggtgttagtaatttggttaagcagattgaaaacatcaaaacgtttggaataccagtcgttgtagcaatcaacagatttgaaacagactcacaggcagagattgaggtaatcaagaaagcagccttgaatgctggcgcatctcatgccgttacttctaatcactggatggaaggtggtaaaggtgcagtagaattagcacatgctgtggtagatgcaacgaaagaaccaaagaactttaactttttgtacgacgtcaatagctccatcgaggacaagcttaccagcatcgtccaaaaaatgtatggtggggcaaaaatcgaagtatcaccagaagcccaaaaaaagatagacacctacaaaaaacaaggcttcggtaatcttcccatctgtattgctaagacacaatattcattatcccatgatccatcattaaagggtgttcctagaggttttacgttccccatcagggatgtgagagcttcaataggtgcaggttatttatacgcattggctgcagaaattcaaaccataccgggtctatcgacatatgctggttacatggcagtagaagtcgacgacgacggtgaaattgaaggtctattttaa

SEQ ID NO: 75514 - DNA, 924 bp, Saccharomyces pastorianus
atgagtagcgacgctaagcaacaagaaacaaactttgccattaatttcttaatgggtggtgtgagtgcggccatcgctaaaactgctgcctcaccaatcgaaagagtcaagatcttgatccaaaatcaagatgaaatgatcaagcaaggaactttagataaaaagtattccggtatcgtggattgtttcaagagaactgcaaagcaagagggactaatatccttttggcgaggaaatactgccaatgttattcgttattttcccactcaagctttgaacttcgccttcaaagataagattaagttgatgtttggtttcaagaaagaggaaggctatggtaaatggtttgcaggtaatctggcttctggtggtgcagctggtgctctttcgttactatttgtttattctttagattttgccagaaccagacttgctgctgatgcaaaatcgtcgaaaaagggtggcgctcgccaattcaatgggttgactgatgtttataaaaagaccttgaaatcggatggtatcgcaggattatacagaggattcatgccatcagtagtgggtatcgtggtttatagaggactatatttcggtatgtttgattctctcaagccactggtgctaactggttcattagatggttcattcttggcttcatttttattgggatgggtggtcactacaggtgcctcaacatgttcttatccattagacacagtgagaagaagaatgatgatgacttcaggtcaagcagtaaagtacaacggtgctatagattgtctcaaaaaaatcgtagcttctgaaggtgtagggtcattgttcaaaggctgcggggcaaatatcttgagaagtgttgctggagctggtgttatttccatgtatgaccagttgcaaatgatattgttcggtaaaaaattcaaatga

SEQ ID NO: 75515 - DNA, 258 bp, Saccharomyces pastorianus
atgtcatctgctctatacaaacaaagcacaaattttactcattctaccggttctttcttgcaaagcgcacctgttgaactgacgacagtcagtgggtaccaggagtttttgaagaagcaagagaaaaagaactatgaaattcaaacagttttaagcgaggataaatcacatggttatgtgctaaaggacggcgaagtcatcgctaatatcattggtgaggccaaagattatcttttggatttggccggccaggcttga

SEQ ID NO: 75516 - DNA, 2838 bp, Saccharomyces pastorianus
atgtcgcagacaattacatctctagatccgaattgtgttattgtattcaataaaacttcgagtgcaaacgagaagagtttgaatgtcgaattcaaacgtttgaatatacattctattatcgaacctggccatgatctgcaaacaagctatgcgtttattagaatccatcaggataatgcgaaaccgcttttttcatttttgcagaatctggacttcattgaatccatcataccatatcatgatactgaattgtccgatgatttgcataaactgatttctatcagcaaatcaaaaatactggaggctccaaaacagtatgagttgtacaacctatcgaatttgaccaataatcccaaacaatccttatattttgcattcttacagaactatataaaatggttgattcccttctccttttttggattatcaattagatttttatctaattttacgtatgaattcaattccacatactcgctgttcgccatcctatggacattgtcatttacagccttttggctttataaatatgaaccattttggtctgatagactgagtaaatactcatcattttctaccattgagtttcttcaagataaacagaaagcccaaaaaaaagctagttcggttatcatgttgaagaaatgttgttttattcctgtggctttgttgtttggcgcaatattactatcattccagctatattgttttgcgttggaaattttcatcaagcaaatttataacggcccaatgatttccatcttatcttttttgcctactatacttatttgcacgtttactccggttttaactgtgatttacaacaaatatttcgtagaaccaatgacaaagtgggaaaatcatagcagtgttgtgagtgcaaagaaatctaaggaagctaagaactttgttattatttttctatccagttacgttcccctattaattacactatttctttatctcccaatggggcatttgttgaccgcagaaataagaactaaggttttcaatgccttttcaatattggcccgtttacctacccatgattcagattttattattgatacaaagcgctatgaagatcaatttttctactttattgttatcaaccaactgattcaatttagcatggaaaactttgttccaagccttgttagcattgctcagcagaaaattaatggaccaaatcctaactttgtcaaagctgagagtgaaatcggtaaagctcaactcagctcatcagatatgaaaatttggtcaaaggttaagtcgtaccaaacagacccctggggagcaacatttgatttggacgccaacttcaaaaagcttcttctacaattcgggtatcttgttatgttttctacaatttggccactagctccatttatctgtttgatagtcaatttgattgtttaccaagtcgatttgaggaaagctgtgctttatagtaaacctgagtatttttcatttccaatctacgataagccatcctctgtgtctaatacccaaaaactgacggttggtctatggaactctgtcttagttatgttctccatcttaggttgtgttatcactgctactttgacctatatgtaccagagctgtaatataccaggtgtcggcgctcatacttccatccatacgaataaagcttggtacctagcaaatccaataaaccactcgtggataaatattgtactatatgctgtttttattgagcatgttagtgttgctattttcttccttttctctagtattttgaaatcttcccatgatgacgttgcaaatggcattgtgccaaagcatgtagttaacgtgcaaaacccaccaaaacaagaagtctttgaaaaaattccctcccctgaatttaattcgaataacgaaaaagaactagttcaaagaaaagggtctgcgaatgagaagttgcaccaagaactcggtgagaaacagcctgcctcttctgccaatggatatgaggcacatgctgccactcatgccaacaatgatcggtcttctttatcctcagcctcctcgccttcattatcttcttcttcttctagcagcaaaaccggtgtagtcaaagctgttgataacgatacagccggatctgctggtaaaaagccattggccacagaaagtactgaaaaaagaaattctttgatgaaggtgcctaccgttggctcatatggtgttgcgggcgccactttaccagaaacaattccaacatctaaaaattactacttaaggtttgatgaggacggtaaatccattagggatgcgaaatctagtgcagaatcttccaacgccaccaataacaataccttaggcacggaaagtaagcttttgccagatggtgacgccgttgatgcactaagtagaaaaattgatcaaatacccaaaattgctgttactggtggcgaaaataacgaaaatacccaggccaaagacgatgctgccactaagactccactaattaaagatgcaaatattaagcctgttgtcaacgcagctgttaacgataaccaatcgaaggtttcagtggctactgaacaaacaaaaaagactgaagtaagcacgaaaaatggcccatcaagatctatttccacgaaggaaactaaggattctgcgagaccatctaataacaatactactactactactacagatgctactcagccccaccaccatcatcaccaccaccgccatcgtgatgctggagtgaagaatgtcacgaacaattctaagacaaccgaatcctcttcctcttcatcggcggcaaaggaaaaaccaaaacataaaaaggggctattgcataagctgaaaaagaagctttaa

SEQ ID NO: 75517 - DNA, 1065 bp, Saccharomyces pastorianus
atgtcattgtgggtagataaatacagacctaagtccttgaatgctctttcacataatgaagagttgacaaattttctaaaatcgttatctgatcagcctcgtgatttacctcatcttttactgtatggaccaaatggtacaggtaagaaaacgcgttgtatggcattattggagtccatatttggacctggagtctatagattgaaaattgatgtcagacaatttgtcactgcttcgaacagaaaactagaactgaatgtggtcagctcgccataccatttagagatcacgccaagtgatatgggtaacaatgatagaattgtcatccaagaactattgaaagaagtggctcaaatggaacaagtggactttcaagattctaaggatgggcttgcccatagatataagtgtgttattatcaacgaggcgaactcgttaacaaaagatgctcaagctgctttaagacgtaccatggaaaaatactccaaaaacattaggttgataatggtctgcgattcgatgtcgcctataattgctcctatcaaatcccgttgtctgttgattcgttgtcctgcaccaagcgatagcgaaatttcaactattttgtctgatgtggtgacaaatgaaagaatacaactagaaacaaaggatattttaaaaagaattgctcaggcatcgaatggaaacttgcgagtctccctattaatgcttgaatctatggcactaaacaacgaattagcattgaaaagcagtagccctataataaaaccagattggattatagtgatccataaattaacgaggaaaatcgttaaagagagatctgtcaactctttaatcgagtgcagagctgtcctatacgatttactagctcattgtatacctgccaatatcatcttaaaggaactaacgttttctttgttggatgtggaaaccctgaataccacgaataaatcgtccataattgaatactcaagtgtttttgacgaaagattatcacttggaaacaaagcaatattccatttggaagggttcatagcaaaagtcatgtgctgtttagattaa

SEQ ID NO: 75518 - DNA, 777 bp, Saccharomyces pastorianus
atgttagaagcaaaatttgaagaagcatcccttttcaagagaataattgatggtttcaaagattgtgtccagttggtcaatttccaatgtaaagaagatggtatcattgcacaagctgtcgatgactcaagagttctattggtctccttggaaataggtgtcgaagccttccaagaatatagatgtgaccatcctgttacgttaggtatggatctaacctcactaagtaaaatcctacgttgtggtaacaacaccgatacattaacactaattgctgacaacacaccggattccatcatcttattatttgaggataccaagaaagaccgtatagccgaatactctctgaaattgatggatatcgatgctgatttcttaaagattgaagaattacagtacgactccaccctgtcattgccatcttccgaattctctaaaattgttcgtgacttgtcccaattgagtgattctattaatatcatgatcaccaaagaaacaataaagtttgtagctgacggtgatatcggatcaggttcagtcataataaaaccattcgtggatatggaacatcctgaaacaagcatcaaacttgaaatggatcaacctgtcgacttgacgttcggagctaaatatttattggacatcattaagggctcctccctttctgatagagttggtatcaggctctccagcgaagctcctgctttattccaatttgatttgaagagtgggttcctacagtttttcttggctcctaaatttaatgacgaagaataa

SEQ ID NO: 75519 - DNA, 600 bp, Saccharomyces pastorianus
atgcttgtttcaggatgttccatatccacgaatggttttattatgactgaacctgatccgatatcaccgtcagctacaaactttattgtttctttggtgatcatgatattaatagaatcactcaattgggacaagtcacgaacaattttagagaattcggaagatggcaatgacagggtggagtcgtactgtaattcttcaatctttaagaaatcagcatcgatatccatcaatttcagagagtattcggctatacggtctttcttggtatcctcaaataataagatgatggaatccggtgtgttgtcagcaattagtgttaatgtatcggtgttgttaccacaacgtaggattttacttagtgaggttagatccatacctaacgtaacaggatggtcacatctatattcttggaaggcttcgacacctatttccaaggagaccaatagaactcttgagtcatcgacagcttgtgcaatgataccatcttctttacattggaaattgaccaactggacacaatctttgaaaccatcaattattctcttgaaaagggatgcttcttcaaattttgcttctaacattttttctctcttttga

SEQ ID NO: 75520 - DNA, 300 bp, Saccharomyces pastorianus
atggccgcaactaaagaagcaaagcaaccaaaggaaccaaagaagaggaccaccaggagaaagaaggatcctaacgcccctaagaggggcttgtcagcttatatgttctttgctaatgaaaacagagacattgtccgttccgagaatcctgacgtaacttttggccaagtaggcagaatattgggtgagaggtggaaggccttaactgctgaagaaaagcaaccctatgaatctaaggctcaagcagacaagaagagatacgaatctgaaaaggaattgtacaatgctacacgtgcttga

SEQ ID NO: 75521 - DNA, 330 bp, Saccharomyces pastorianus
atgtcgttctttttaaatagtctaaggggcaaccaggaggtctcgcaagagaagctagacgttgcaggagtgcaattcgatgcgatgtgctcgactttcaacaatatcctcagtacgtgtcttgagaaatgtattccgcatgagggctttggtgagcctgatctaacgaaaggtgagcaatgctgcatagacagatgtgtggcaaagatgcattacagcaatcgcctcattggaggatttgtacaaacacgaggtttcgggccagagaatcagctacgacattattcgcgatttgtggccaaagaaatagctgatgattccaaaaaatag

SEQ ID NO: 75522 - DNA, 1404 bp, Saccharomyces pastorianus
atgtttaaatctgttgtttattcaattttagccgcttctttggccaatgcaggtaccattcccttaggcaaactagccgatgtcgacaagattggtacccaaaaagatatcttcccatttttgggtggtgccggaccatactactctttccctggcgactatggtatttctcgtgatttgcctgaaggttgtgaaatgaagcaactgcaaatggttggtagacatggtgaaagataccctactgtcagtctggctaagactatcaagagtacatggtataagttgagcaattacactcgtcaattcaacggctcattgtcattcttgaacgatgattacgagtttttcatccgtgatgacgatgatttggaaatggaaaccacttttgccaactcggacgatgttttgaacccatacactggtgaaatgaacgccaagagacatgctcgtgacttcttggctcaatacggttacatggtcgaaaaccaaaccagtttcgccgtttttacctctaattctaagagatgtcatgacactgctcaatatttcattgatggtttaggtgaccaattcaacatcaccttgcagactgtcagtgaagctgaatccgctggtgccaacactttgagtgcttgtaactcatgtcctgcctgggactacgatgccaatgatgacattgtaaatgaatacgacacaacctacttggatgacattgccaagagattgaacaaggaaaacaagggtttgaacttgacctcaactgacgctagtactttattctcgtggtgtgcatttgaagtgaacgccaaaggttacagtgatgtctgtgatattttcaccaaggatgaattagtccattactcctactaccaagacttgcacacctattaccatgaaggtccaggttacgatattatcaagtctgtcggttccaacttgttcaatgcctcagtcaaattattaaagcaaagtgagattcaagaccaaaaggtttggttgagttttacccacgataccgatatcctaaactttttgaccaccgctggtataattgacgacaaaaacaacttaactgccgaatacgttccattcatgggcaacactttccacagatcctggtacgttcctcaaggtgctcgtgtctacaccgaaaaattccaatgttctaacgacacctacgtcagatacgtcattaacgatgctgtcgttccaattgaaacctgttccactggtccagggttctcttgtgaaatcaatgacttctacgactatgctgaaaagagagtagccggtactgacttcctaaaggtctgtaacgtcagcagtgtcagtaacgtcaccgaattgaccttctactgggactggaatactactcactacaatgataccctattaaaacaataa

SEQ ID NO: 75523 - DNA, 1362 bp, Saccharomyces pastorianus
atgacagcatctcctgcaaaaaagaggttgagaaacaaatatctcagctgttgcttcttgttgatcgagatgactattaggagtagtatgaaaaacaacgcagaattggaaagcaagagtgtgttagctaatgaatcgaatataattagcacatttactagaaggataataaaggaaaaaagcggtaactatcaggtactgaaaagatcccttgatggaaaactaatctatcctgaggccactggcatatcctctaacagaggtaacaaacttttgcagagaagcgaagtagtaacaagaagagacttgaacaattctaagccaatgattgagcaaactgtgttctataacggttcggagcatcgccttctgcaaacaaatattgtcactgatagtagacgcaaaagaataaaattcacacctgacatcaacgtcgagcctgttttagtcggtgatgaaaacgacatcgatggtagtgagaaggaagacgaaaatatcactgatgagtattacggcgaagaagacgatgacgacctatcaaaactagtgaatgtaaaggagattttgactcccattctttccctaggggatataataaatcataaaactatctcaaggacattttcaagcccaattttgaaaaatttagccttgcaaataattctaatgattgaaaaagaacagatgtcagttgttagatattcccagtttttggaggtttttttaggagatcatcctgaaccaatttatgaatctaacttgaacctaccatcttataatcacaatttgacccttccagaggatagaggggcaagcgacgaggatgacattaacaacaaaaacaatatcaacgaggttaactcgaatagtttgtctactgaagctggtcatatcaataatggcatggaagaatttggagaggaagatcctttttttgcattgccaaggttggaacaatctaatgcgctgttatcgttgctgccatcttcttccggttctgcttctatatcaacattaacagcggccgaacaacaacagttaaatgaggaaattgagtctgcccgacagctgtcgcagattgcactacagaggaataaagaattcataagaaacttacaaaaaatcagaaaatctgtaataaaagccaatagaataagaggtaggattttaaattggagtcgggaatatttgggtatatctgacgatgatattactatcccggtggctctacgtgttgtgaagagaggtctgatcagtgctacaacaaataagacaacaaatttcgaggaagaaattgaaaataccatggaagacggtgttgtagacgataatgaaccagatgaagaagctaatagagcctaa

SEQ ID NO: 75524 - DNA, 693 bp, Saccharomyces pastorianus
atgggtgtttgcactatttttaggtggctctttgctgcttacttgctctcttcatataagtcgcttcctggggcatattttgttaggttttattattatgttattcaaaacttgttcttgcctatgtttacagggtttgaaaccgagaatattaagaaacttgagaaaaatgaatatggctgtttctcgtacaccagcctagatacctatgcctctccattcgaatgtgacttctactttcataagagcaatagcacctattttgcggaattggacatttcaagaggtaatctcatgtgcaagatttttcaaaaattgatgctgaattccaagcattatccatatattccagttgcgaacgttttcactaatttcttgaaggaaatcaagccttttcaaaagtactcggtttcatcaaggattatctgttgggatgagaaatggatttacgtcatgagtagattcacaattaaaaagggcaccgtcttatgctcattatcattgaccaaatacgtccttaaggacggtagaaagaccatcaaaccaaaggatgctcttgaatactgtggtttatataatgagaaggtcgccaaaatttctgaggacaatctaaagcttttaaccgagcgttgtggcttccacgagacagtaccattggaaaacttgagccaagagtactgttcagaaatctaa

SEQ ID NO: 75525 - DNA, 384 bp, Saccharomyces pastorianus
atgcgctgttttccaattaatgacactaggttcggcagagaattaataaactccatatgtgaatttacagtatgtattttgacatgccattctctatcaatgaagcgcaatcgttgctctaaatcaaatttttttatccctaattttccaacttggcttgattttttacttctcggtcttaaagcttcttctgttcctgacaatcgttgttctaccctagctttgtacttttcattttctaattggaaaatagctcttttgagtttatttatatcgcttagtataagaatcacatgttttccattctttgagaaaaatcgtatcttcctatataattctttcttttgtgaagtgtattgttcaaaaaattcttgcgcatcataa

SEQ ID NO: 75526 - DNA, 873 bp, Saccharomyces pastorianus
atggaaaagctattacagtggtctattgcaaattctcaaggggacaaagaagctatggctagggccggccaacctgatcctaaattgctacagcagttattcggtggtggtggtcctgacgatccaaccctaatgaaagaatccatggctgttattatgaatccggaggttgacttagaaacaaaacttgttgcatttgacaactttgaaatgttgattgagaacttagataatgctaataatatcgaaaatttaaaactgtgggagccattgttggatgttcttgttcagacgaaggatgaagaactacgtgctgctgctttatccattattggtacggctgtgcaaaataacttggattcgcaaaataatttcatgaaatacgacaatggtctgcgaagccttatcgaaatagctagtgacaagacaaagccactcgacgtgagaacaaaagctttttacgcactatctaatctaataagaaaccataaagatatctcagaaaagttttttaaattaaatgggctcgactgcatagcacctgtattaagtgataacaccgccaaaccaaaactgaaaatgagagccattgccttattgaccgcatatttgtcatctgttaagattgatgaaaatataatcagtgtgctgagaaaggatggagtaattgaaagtacgattgagtgcttgtctgacgagagtaacttgaacatcatagatagagttctgtcttttctctctcacctgatatcttccggaataaaatttaatgaacaggaattgcacaaattgaacgaaggttacaaacatattgagcctctaaaggacagacttaatgaagacgattatttagccgtaaagtatgtattatga

SEQ ID NO: 75527 - DNA, 2262 bp, Saccharomyces pastorianus
atggttgagttttctttgaagaaggccagaaacaattggaagcatgtaaagaagtctgcaagctctcctgctaagcaaaagacacctccatcgcctgctaagcctaaacaaaaaacaaaaaagaacccttatagtgatctcaaggatccggctaccagttatacgctaccaacaatcaatgcaagggagagaagtagggtagcaacttcaatgcagagaagactatcaattcataatacaaattatgctccacctacactagattactcaatgcccctacctgatatgccaaacatgatagttcccaatgataatgtggatagtagtcataataatagtagtttcaccactgagaacgaatcgttaagctctaaaggcccttccaacagtttaaatctttcaactgccgatctctccctgaacgacagctcctataataaagtgcctgctagatcagcaatgcgaaatactgtcaatccttccggcagtaatgatcctttcaataatagcacgtcgctaagaaagatgttggcaaacccgcattttaatgctaaagattttgttcatgataaactaggcaatgcgagtgccattactattgataaatttacctcaaatttaacagatttatcgatacaggtccaagaagaagtaaagttaaatatcaataaatcatataacgaaatcatgacggtaaacaacgacctaaatgttgctatgttggagcttaaaagggttagagcaaatataaatgatttaaacgaggttttggatcagtgcaccaaaatagctgaaaaaaggttacaattgcaggatcaaatagatcaagagagacaaggcaattttaacaatgttgaaagtcattctaatagtccagcgttacttccgcctttgaaagcaggacaaaatgggaatctcatgaggagggacagatcgagcgtcttgatattagagaaattttgggatacggaactggatcagctgtttaagaacgttgaaggtgctcagaagtttatcaattctacgaaaggaagacatattttaatgaatagtgccaattggatggaattaaatactaccactggtaaacccttgcagatggtacagattttcattttgaatgatttggtacttatcgccgataaatcaagagataagcaaaatgactttatagtaagccagtgctatcctttaaaggatgtcactgtcacgcaagaggaattttccactaagaggctacttttcaagtttagcaattcgaattcaagtttgtatgaatgtagagacgcagacgaatgctctaggttgttggacgttataagaaaggctaaggatgatttgtgcgacatattccatgtagaagaggagaactctaaacgtattagagagtcctttagatatttgcaatctacgcaacaaaccccaggtagagaaaacaacagaagccctaacaaaaacaaaagacgtagtatggggggttcaatcactcctggccgaaatgtaacaggcgcaatggatcaatatcttttgcagaacctaactctatcaatgcattcgaggccaaggtccagagatatgagttcaaccgcccagaggcttaaattcctggatgaaggcgtggaagagatagatattgaattagctaggcttaggtttgaaagtgccgtggaaacattattggatattgaatcacaattggaggatctttctgaaagaatttctgatgaagagttaatgttacttaacctgatatctttaaaaatcgaacaaagaagagaggccatttctagcaaactttctcagagcattttatcatcgaatgaaatagtgcatttgaaaagcggtactgaaaatatgattaagttaggattaccagagcaagctcttgacctattcttacagaatagatctaatttcattcaagatttgattctacagattggatcagtggacaatcctacgaactatttgactcaattggctgttatcaggttccaaaccattaaaaaaacagtggaggacttccaggatattttcaaagaactcggggctaagatttcttccatcctagtagattggtgtagcgacgaagtggataatcacttcaaattgatagacaagcaattactgaatgatgaaatgttatccccagggtccattaagtcatccagaaaacagatagatggattgaaggccgtaggtttggattttgtctacaaattggacgagtttatcaaaaagaacagtgataaaattcgctaa

SEQ ID NO: 75528 - DNA, 144 bp, Saccharomyces pastorianus
atgactcttcgagattcctgcacaacgtcactcaaaggcggcccgcggcgttttccattgcgaaatttttcacttttcaccttttgtaaacaaagaaataacaataagaatgataaaattcatctgtttatgtactgtacctag

SEQ ID NO: 75529 - DNA, 990 bp, Saccharomyces pastorianus
atgagtgaagaatttcctacgccgcagcttttggatgaattggaagatcaacagaaagttaccacgccgaatgagaagagagagttaagttctaatcgtgtgttgaaggatatttttgcgggtaccatcggtggtattgcacaagttcttgtagggcaaccgtttgatacaacaaaagttaggcttcaaacagccaccacaagaacaacaacgttggaggtattgcgtaacttggtaaagaatgagggtgtgtttgcattctacaaaggtgcgttaacaccgttattgggtgttggtatatgtgtctcagtacaatttggtgtgaatgaggcgatgaaaagatttttccaaaattacaacgcttctaagaacccgaatatgagctcacaggacgtagatctttcacgttcaaatactctgccactatcccagtactacgtttgtgggttgacaggtggtgtagtcaattcattcttggcatcgcccattgaacaaataagaattcgtttgcagacgcaaacatctaatggtggagacagagaattcaaaggtccttgggactgtattaaaaaattgaaagctcaaggtggattgatgaggggtttatttcccacaatgataagagccggacatgggcttggtacatattttcttgtctacgaagcattggttgccagagaaattggtacgggactaacaagaaacgaaattcctccttggaaattatgcttatttggtgcattttccgggacaatgttgtggttgacagtatacccattggacgttgtgaaatccattatacaaaacgatgatttacgaaaacctaaatacaagaattccatttcttacgtagcaaagaccatttatgcaaaagaaggtatcagagcctttttcaaagggtttgggccaacaatggttaggtccgcgcccgttaatggtgcgacattcctgacgtttgaattagtcatgagatttctgggggaagagtag

SEQ ID NO: 75530 - DNA, 1089 bp, Saccharomyces pastorianus
atgatcaataatcctaaggtagacagtgtagcggagaaacccaaagctgtgacatcaaagcagtcggagcaagcggcttcgccagaaccaacaccagccccccctgtttctagaaatcagtatccgatcacgttcaacttgacttcaaccgcaccctttcatcttcatgaccgtcatcgctacttacaagagcaagatctttacaagtgcgcttctagggattcgttgtcttccctgcagcaactcgcccatacacctaatgggtcgacaaggaagaaatatattgttgaggaccaatctccctatagttcggaaaatccagtcattgtgacctcttcctataaccatacggtttgcacaaactacttaagaccaagaatgcagtttacagggtaccagatatcaggatacaaacgctatcaggtaacagttaacttaaagactgtagatttgccaaagaaagattgcacgtcgctgtcccctcatttatctggatttttgtcgataagaggactcacgaaccaacacccggaaatcagtacatattttgaagcctacgcggtaaaccacaaggaattagggttcttgtcctctagttggaaagatgaacctgttttaaacgaattcaaagccacagaccaaacagacttagaacactggataaatttcccctcctttagacagcttttcctgatgagccaaaaaaacggtctcaactcaactgacgacaatggcactacaaatgcagccaagaagttgcctccacagcagcttcctactacaccaagcgcagacgctggtaacatatcaagaatttttagccaagagaaacaatttgacaactacttgaacgaacggtttatatttatgaaatggaaggaaaaatttttggtaccagatgccctattaatggaaggtgtagacggcgcatcttatgatgggttttattacattgtccatgatcaagttaccgggaacattcaagggttttactatcatcaagatgctgaaaagttccaacagctggaattagtaccatctttgaaaaataaagtcgagtccagtgattgttcttttgagtttgcttga

SEQ ID NO: 75531 - DNA, 567 bp, Saccharomyces pastorianus
atgaatcctcaagtcagtaacatcatcatcatgttggtcatgatgcaactctcccgtcgcattgacatggaggacccaaccatcatcatgtacattagaattttatactgttcttccatcggtatctcttggatcatctaccaaatggccagaaagagaattgttgctaaaaacgacatgactaccatgaagtacgtcgaacctggtaatgctatgtccggcgaaggtgagaaactgcaagttactaccgtcagagactacgatttgaaggaaatagacagtgctatcaagtctatctacactggtatggctatgatgggtttcatgcatttgtacttgaaatacaccaacccattgttcatgcaatccatttctccagtgaaaagtgctctggaacacaacgaagtgaaaattcacctcttcggtaagcctgcaaccggcgatttgaagagaccattcaaggctccatctttgtttggtggtatgggtcaaactggtccaaagaccgacaagaaatctatcgaagaagctgaaagagccggtaacgctggtgttaaggctgaatga

SEQ ID NO: 75532 - DNA, 738 bp, Saccharomyces pastorianus
atgccttatacttggaagtttttaggaatcagcaagcaacttccactggaaaatggtatagcacagttgaaccaattgctaaacctggaagtagatttagacattcaaaccattcgagtacccagtgatcctgatggtggtaccgccgctgacgagtatttccgttacgaaatgaggttggacatctctaatttggatgagggcacttactctaagttcattttcttggggaactcaaaaatggaggtgccgatgtttctgtgctattgtgggacagataaccgcaatgaagtggtattgcagtggctgaaggcagagtacggtgtcattatgtggccgataaaatttgaacagaagaccatgataaagttagctgacgccagcattgtgcacgtgacgaaagagaacgtcgaacaaattacctggtttagctcaaagttatattttgaaccagaaacacaagacaaaaacttgcggcaattcagtatagaaataccgagagagagctgcgagggtttggctcttggctatggtaatactatgcacccgtataacgatgcaattgtaccctacatttataatgaaacggggatggcggtggaaagattaccgttgacttccgtcatattggcagggcacacgaaaataatgagagaatccattgtcacttcaacacgaagtctcaggaacagagttctagcagttgtactccaatcgattcagtttaccagcgagtaa

SEQ ID NO: 75533 - DNA, 444 bp, Saccharomyces pastorianus
atgtcctccaatcttaccgaagaacaaattgctgaattcaaagaagcctttgccctctttgataaagataacaatggctctatctcatcaagtgaattggccactgtgatgaggtcattgggtctttcgcccagtgaagcagaagtaaatgatttgatgaacgaaatagatgttgatggtaaccatcaaatcgaatttagtgaatttttggctctgatgtctcgtcaactcaaatcaaatgactctgaacaagaactattagaagcttttaaagtattcgataagaacggtgatggtttaatctccgccgctgagttgaaacacgtgctaacatccattggtgaaaaattgactgatgccgaagtagatgatatgctaagagaggttagtgatggatcaggcgagatcaacattcaacaattcgctgctttgttatctaaatag

SEQ ID NO: 75534 - DNA, 1350 bp, Saccharomyces pastorianus
atgtttttggaaattcctcggtggttacttgccttaataatattatatctttccataccgttagtggtttattatgttataccctacttgttttatggcaacaagtcgaccaaaaaaaggatcatcatatttgtgctgggtgatgtaggacactctccaaggatatgctatcacgccataagtttcagtaagttaggttggcaagtcgagctatgcggttacgtggaggacactctacccaaaattatttccagtgatccaaatatcaccgtccatcatatgtcaaacttgaaaagaaagggaggcggaacatcagttatatttatggtaaagaaggtgctttttcaagtcttaagtattttcaaattactttgggaattgagaggaagcgattacatactagttcaaaatccaccgagcatacccattcttccgattgctgtgctatacaagttgaccggttgtaaactaattattgattggcacaatctagcatattcgatattgcaactaaaatttaaaggaaacttttaccatcctttagtgttgatatcttacatggtagagatgatattcagcaaatttgctgattataacttgactgttactgaagcaatgaggaaatatttaattcaaagctttcacttgaatccaaagagatgtgctgttctctacgaccgcccggcttcccaatttcaacctttggcaggtgacatttctcgtcaaaaagccctaactaccaaagcctttataaaggattatattcgcgatgattttgatacagaaaaaggcgataaaatcattgtgacttcaacatcattcactcctgatgaagatattggtattttattaggtgccctaaagatttacgaaaactcttatgtcaaatttgattcaagtttgcctaagatcttgtgttttataacgggtaaaggaccactaaaggagaaatatatgaagcaagtagaagaatatgactggaagcgctgtcaaatcgaatttgtgtggttgtcagcagaggattacccaaagttattacaattatgcgattacggagtttccctgcatacttcaagttcagggttggacctgccaatgaaaattttagatatgtttggctcaggtcttcctgttattgcaatgaactatccagtgcttgacgaattagtacaacacaatgtaaatgggttaaaatttgttgatagaagggagcttcatgaatctctgatttttgctatgaaagatgctgatttataccaaaaattgaagaaaaatgtaacgcaggaagctgagaacagatggcaatcaaattgggaacgaacaatgagaggcttgaagctaattcattga

SEQ ID NO: 75535 - DNA, 696 bp, Saccharomyces pastorianus
atgtttttgagaaacggtagacttatttccctcaattcaaggagactatttagaaccatgagcaccgtcaagggtaaaccagaagatgctaaaataattgaaacccgtcacgttaaagaaacatctgactgcaagtggatcggtttacaaaaaattatctacaaagatcccaacgggaaggaaagggaatgggatagcgcagtccgcaccactagaagttccggtggtgtagacggcattggtatcttaaccattctaaaatacaaagatggaaaacctgatgaaattttgctacaaaagcagtttcgccctcccgttgagggcgtatgcattgagatgccagccggtttgatagatgcgggtgaagatattgacactgctgccttaagagaattaaaagaagagactggttacagtggtaaaataatttctaaaagcccaacagtttttaacgatcctggtttcacaaacaccaacctctgtctggttactgtcgaagttgttatgagtttacctgaaaaccaaaaaccagttactcaattggaagataatgaatttatcgaatgctttagcgtcgagttgcacaagtttcctgatgaaatggttaagttggatcaacaaggctacaagttggatgcacgtgttcaaaacgtagctcaaggtatcctcatggccaagcaataccacatcaaatag

SEQ ID NO: 75536 - DNA, 4179 bp, Saccharomyces pastorianus
atgactaacgaaaaggtctggatagagaagttggataatccaactctttcagtgttaccacatgactttttacgcccacaacaagaaccttatacgaaacaagctacatattcgttacagctacctcagctcgatgtgcctcatgatagtttttctaacaaatacgctgtcgctttgagtgtatgggctgcattgatatatagagtaaccggtgacgatgatattgttctttatattgcgaataacaaaatcttaagattcaatattcaaccaacgtggtcatttaatgagctgtattctacaattaacaatgagttgaaccagctcaattctattgaggccaatttttcctttgacgagctagctgaaaaaattcaaagttgccaagatttggaaaggacccctcagttgttccgtttggcctttttggaaaaccaagatttcaaattagacgagttcaagcatcatttagtggactttgctttgaatttggatactagtaataatgcgcatgttttgaacttaatttataacagcttactgtattcgaatgaaagagtaaccattgttgcggaccaatttactcaatatttgactgctgcgctaagcgatccatccaattgcataactaaaatctctctgatcaccgcatcatccaaggatagtttacctgatccaactaagaacttgggctggtgcgatttcgtggggtgtattcacgacattttccaggacaatgctgaagccttcccagagagaacctgtgttgtggagactccaacactaaattccgacaagtcccgttctttcacttatcaggatatcaaccgcacgtctaacatagttgctcattatttgattaaaacgggtatcaaaagaggtgatgtagtgatgatctattcttctaggggtgtggatttgatggtatgtgtgatgggtgtcttgaaagccggcgcaaccttttcagttatcgaccctgcatatcccccagccagacaaaccatttacttaggtgttgctaaaccacgtgggttgattgttattagagctgctggacaattggatcaactagtggaagattacatcaatgatgaattggagattgtttcaagaatcaattccatcgctattcaagaaaatggtaccattgaaggtggcaaattggacaatggcgaggatgttttggctccatatgttcactacaaagataccagaacaggtgttgtagttggaccagattccaacccaaccctatctttcacatctggttccgaaggtattcctaagggtgttcttggtagacatttttccttggcttattatttcaattggatgtccaaaaggttcaacttaacagaaaatgataaattcacaatgctgagcggtattgcacatgatccaattcaaagagatatgtttacaccattatttttaggtgcccaattgtatgtccctactcaagatgatattggtacaccgggccgtttagcggaatggatgagtaagtatggttgcacagttacccatttaacacctgccatgggtcaattacttactgcccaagctactacaccattccctaagttacatcatgcgttctttgtgggggacattttaacaaaacgtgattgtctgaggttacaaaccttggcagaaaattgccgtattgttaatatgtacggtaccactgaaacacagcgtgcagtttcttatttcgaagttaaatcaaaaaatgacgatccaaactttttgaaaaaattgaaagatgtcatgcctgctggtaaaggtatgttgaacgttcagctactagttgttaacaggaacgatcgtactcaaatatgtggtattggcgaaataggtgagatttatgttcgtgcaggtggtttggcagaaggttatagaggattaccagaattgaataaagaaaaatttgtgaacaactggtttgttgaaaaagatcactggaattatttggataaggataatggtgaaccttggagacaattctggttaggtccaagagatagattgtacagaaccggtgatttaggtcgttatctaccaaacggtgactgtgaatgttgcggtagggctgatgatcaagttaaaattcgtgggttcagaatcgaattaggagaaatagatacgcacatttcccaacatccattggtaagagaaaacattactttagttcgcaaaaatgccgacaatgagccaacattgatcacatttatggtcccaagatttgacaagccagatgacttgtctaagttccaaagtgatgttccaaaggaggttgaaactgaccctatagttaagggcttaatcggttaccatcttttatccaaggacatcaggactttcttaaagaaaagattggctagctatgctatgccttccttgattgtggttatggataaactaccattgaatccaaatggtaaagttgataagcctaaacttcaattcccaactcccaagcaattaaatttggtagctgaaaatacagtttctgaaactgacgactctcagtttaccaatgttgagcgcgaggttagagacttatggttaagtatattacctaccaagccagcatctgtatcaccagatgattcgtttttcgatttaggtggtcattctatcttggctaccaaaatgatttttaccttaaagaaaaagctgcaagttgatttaccattgggcacaattttcaagtatccaacgataaaggcctttgccgcggaaattgacagaattaaatcatcgggtggatcatctcaaggtgaggtcgtcgaaaatgtcactgcaaattatgcggaagacgccaagaaattggttgagacgctaccaagttcgtacccctctcgagaatattttgttgaacctaatagtgccgaaggaaaaacaacaattaatgtgtttgtcaccggtgtcacaggatttctgggctcctacatccttgcagatttgttaggacgttctccaaagaactacagtttcaaagtgtttgcccacgtcagggccaaggatgaagaagctgcatttgcaagattgcaaaaggcaggtatcacctatggtacttggaacgaaaaatttgcctcaaatattaaagttgtattaggcgatttatctaaaagccaatttggtctttcagatgagaagtggatggatttggcaaacacagttgatataattatccataatggtgcgttagttcactgggtttatccatatgccaaattgagggatccaaatgttatttcaactatcaatgttatgagcttagccgccgtcggcaagccaaagttctttgacttcgtttcctccacttctactcttgacacagaatactactttaatttgtcagataaacttgttagcgaagggaaaccaggcattttagaatcagacgatttaatgaactctgcaagcgggctcactggtggatatggtcagtccaaatgggctgctgagtacatcattagacgtgcaggtgaaaggggcctacgtgggtgtattgtcagaccaggttacgtaacaggtgcctctaccaatggttcttcaaacacagatgatttcttattgagatttttgaaaggttcagtccaattaggtaagattccagatatcgaaaattccgtgaatatggttccagtagatcatgttgctcgtgttgttgttgctacgtctttgaatcctcccaaagaaaatgaattggccgttgctcaagtaacgggtcacccaagaatattattcaaagactacttgtatactttgcacgattatggttacgatgtcgaaatcgaaagctattctaaatggaagaaatcattggaggcgtctgttattgacaggaatgaagaaaatgcgttatatcctttgctacacatggtcttagacaacttacctgaaagtaccaaagctccggaactagacgataggaacgccgtggcatctttaaagaaagacaccgcatggacaggtgttgattggtctaatggaataggtgttactccagaagaggttggtatatatattgcatttttaaacaaggttggatttttacctccaccaactcataatgacaaacttccactgccaagtatagaattaactcaagcgcaaataagtctagttgcttcaggtgctggtgctcgtgggagctccgcagcagcttaa

SEQ ID NO: 75537 - DNA, 528 bp, Saccharomyces pastorianus
atgcagccaaaaaattgtacgatactaaaaaaatcaaagcaagagttgtttccctgccagacttttatacttttgacaggcaaagtgaagaatacagattctctgttctaccagacggtgttccgatcatgtcctttgaagtattggctacttcaagctggggtaagtatgctcatcaatcgttcggactcgacgaatttggtcgttcaggcaaggggcctgaaatttacaaattgttcgatttcacagcggacggtgttgcgtcaagggctgaaaagacaatcaattactacaaaggaaagcagttgctttctcctatgggaagagctttctaagtctgaagaagtaaacagttctttgctatttcacacttcctggttgatggtcacttgctgcctgaaatatatatatatgtatgtcatatgtacttgttttcttttttgtgcctttgttacgtctatattcattgaaactgattattcgattttcttcttgctgaccgcttctagaggcatcgcacagttttag

SEQ ID NO: 75538 - DNA, 1377 bp, Saccharomyces pastorianus
atgggtaaagagaagtctcacattaacgttgtcgttatcggtcatgtcgattctggtaagtctaccactaccggtcatttgatttacaagtgtggtggtattgacaagagaaccatcgaaaagttcgaaaaggaagccgctgaattaggtaagggttctttcaagtacgcttgggttttggataagttaaaggctgaaagagaaagaggtatcactatcgatattgctttgtggaagttcgaaactccaaagtaccaagttaccgttattgatgctccaggtcacagagatttcatcaagaacatgattactggtacttctcaagctgactgtgctatcttgattattgctggtggtgtcggtgaattcgaagccggtatctctaaggatggtcaaaccagagaacacgctttgttggctttcaccttgggtgttagacaattgattgttgctgtcaacaagatggactccgtcaaatgggacgaatccagattccaagaaattgtcaaggaaacctccaactttatcaagaaggttggttacaacccaaagactgttccattcgtcccaatctctggttggaacggtgacaacatgattgaagctaccaccaacgctccatggtacaagggttgggaaaaggaaaccaaggccggtgtcgtcaagggtaagactttgttggaagccattgacgccattgaacaaccatctagaccaactgacaagccattgagattgccattgcaagatgtttacaagattggtggtattggtactgtgccagtcggtagagttgaaaccggtgtcatcaagccaggtatggttgttacttttgccccagctggtgttaccactgaagtcaagtccgttgaaatgcatcacgaacaattggaacaaggtgttccaggtgacaacgttggtttcaacgtcaagaacgtttccgttaaggaaatcagaagaggtaacgtctgtggtgacgctaagaacgatccaccaaagggttgcgcttctttcaacgctaccgtcattgttttgaaccatccaggtcaaatctctgctggttactctccagttttggattgtcacactgctcacattgcttgtagattcgacgaattgttggaaaagaacgacagaagatctggtaagaagttggaagaccatccaaagttcttgaagtccggtgacgctgctttggtcaagttcgttccatctaagccaatgtgtgttgaagctttcagtgaatacccaccattaggtagattcgctgtcagagacatgagacaaactgtcgctgtcggtgttatcaagtctgttgacaagactgaaaaggccgctaaggttaccaaggctgctcaaaaggctgctaagaaataa

SEQ ID NO: 75539 - DNA, 2004 bp, Saccharomyces pastorianus
atgagtgtagaagatatcaagaaggctagagccgctgttccatttaacagagaacagctagaaagtgttttgagaggaagatttttttatgccccagcttttgacttgtacggtggagtttctggtttatatgactatggtccaccaggttgtgcattccaaaacaacatcattgacgcctggagaaagcattttattttggaagaagatatgttggaagttgattgtactatgttaactccatatgaggttttgaagacctcaggtcatgttgacaaattttctgattggatgtgtagagatttgaagactggtgagattttcagagctgaccatttagtcgaagaagttttggaagctcgcttaaagggtgaccaagaagctagaggtttagtcgaggatgctaatgccgctgctaaggacgatgccgaaaagaagaagagaaagaaaaaagttaaacaaattaaagcagtcaaattggatgacgacgttgtcaaagaatatgaagaaattttggctaaaatagatggttattccggcccagaattaggtgaattgatggaaaaatacgatatcggtaacccagtcaccggagaaactttagaatctccaagggcttttaacctgatgtttgaaacggctattggcccatctggtcaattaaagggttacttgaggccagaaactgcccaaggtcaattcttgaattttaacaagttgttagaatttaacaacagtaagaccccttttgcctcagcctctatcggtaaatcatttagaaatgagatttccccaagggccggtttattaagagtccgtgaatttttgatggcagagattgaacatttcgttgacccattggacaaatctcatccaaaatttaatgaaatcaaagacatcaagctttcctttttgcctcgtgatgttcaagaagctggttctactgaaccaattgtcaagacagttggtgaagcagtcgcttcaagaatggtcgataatgaaactttgggttactttattgccagaatttaccaatttttgatgaaaattggtgttgatgagtccaaattgagattccgtcaacatatggctaatgaaatggcacattatgctgctgactgttgggatggtgaattgaagacatcttatgggtggattgaatgtgtcggatgtgctgatagatctgcctatgatttgaccgttcattccaaaaagaccaaagaaaaattggttgttagacaaaaattagataatccaattgaagtcaccaagtgggaaattgatttgacgaaaaaattgtgcggtccaaaattcagaaaagatgcaccaaaagttgaatctcatctattgaatatgtctcaagatgacttggcttccaaggccgagttattgaaggcaaatggcaagtttactataaaggttgatggtgttgatggcgaagtcgagttggacgataaattggttaaaatcgaacaaagaacaaaggttgaacacgttagagaatatgttcctagtgtcattgaaccatctttcggtattggccgtatcatctactccgtttttgagcactctttctggaacagaccagaagacaatgccagaagtgttctttccttcccacctttggttgctccaacaaaggttcttttagttcctctatctaaccacaaagatttagttcctgttactactgaagttgccaaaattttaagaaagtctcaaatcccatttaagattgatgattctggagtttccattggtaaaagatatgcccgtaatgacgaattaggtactccattcggtgtcaccattgactttgaatctgccaaagaccattctgtcactttgagagaaagagattccaccaagcaagttagaggttccgtcgaagatgtcatcaaggctatccgcgatatcacttacaatggtgcttcttgggaagaaggtaccaaggatttgactccttttattgcccaagctgaagctgaagctgaaactgactaa

SEQ ID NO: 75540 - DNA, 159 bp, Saccharomyces pastorianus
atgaaatcaaagacatcaagctttcctttttgcctcgtgatgttcaagaagctggttctactgaaccaattgtcaagacagttggtgaagcagtcgcttcaagaatggtcgataatgaaactttgggttactttattgccagaatttaccaatttttga

SEQ ID NO: 75541 - DNA, 360 bp, Saccharomyces pastorianus
atgcccccacacatttttatagccttctgtatactagagtgttttgtggagacattaagtggcaattctaaacttggaattctgggcaggtctaacgtaaattcatctgctattaacggtggggcctggtccgcgctagaatctggaattgatgaaagtgtagcaagaggctcctccactggcattttcacgatttggaagatattttcgctcttgaaagctatagagatcaattatgtttttcccttggtataccttttctgtgttgtctttcagttcctgtctttaggatgttatttatcgatctttttcagaaagaccaaaagcgaagaagcgaagaagaggacttctctgtactaa

SEQ ID NO: 75542 - DNA, 1488 bp, Saccharomyces pastorianus
atgactacggataacgctaaggcgcaactgacctcgtcttcagggggtaacattattgtggtgtccaacaggcttcccgtgacaatcactaaaaacagcagtacgggacagtacgagtacgcaatgtcgtccggagggctggtcacggcgttggaagggttgaagaagacgtacactttcaagtggttcggatggcctgggctagagattcctgacgatgagaaggatcaggtgaggaaggacttgctggaaaagtttaatgccgtacccatcttcctgagcgatgaaatcgcagacttacactacaacgggttcagtaattctattctatggccgttattccattaccatcctggtgagatcaatttcgacgagaatgcgtggttggcatacaacgaggcaaaccagacgttcaccaacgagattgctaagactatgaaccataacgatttaatctgggtgcatgattaccatttgatgttggttccggaaatgttgagagtcaagattcacgagaagcaactgcaaaacgttaaggtcgggtggttcctgcacacaccattcccttcgagtgaaatttacagaattttacctgtcagacaagagattttgaaaggtgttttgagttgtgatttagtcgggttccacacatacgattatgcaagacatttcttgtcttctgtgcaaagggtgcttaacgtgaatacattgcctaatggggtggaataccagggcagattcgttaacgtaggggccttccctatcggtatcgacgtggacaagttcaccgatgggttgaaaaaggaatccgtacaaaagagaatccaacaattgaaggaaactttcaagggctgcaagatcatagttggtgtcgacaggctggattacatcaaaggtgtgcctcagaagttgcacgccatggaagtgtttctgaacgagcatccagaatggaggggcaaggttgttctggtacaggttgcagtgccaagtcgtggagatgtggaagagtaccaatatttaagatctgtggtcaatgagttggtcggtagaatcaacggtcagttcggtactgtggaattcgtccccatccatttcatgcacaagtctataccatttgaagagctgatttcgttatatgctgtgagcgatgtctgcttggtctcgtccactcgtgatggtatgaacttggtttcctacgaatatattgcttgccaagaagaaaagaaaggttccttaatcctgagtgagttcacaggtgccgcacaatccttgaatggtgctattattgtaaatccttggaacaccgatgatctttctgatgccatcaacgaggccttgactttgcccgatgtaaagaaagaagttaactgggaaaaactttacaaatacatctctaaatacacttctgccttctggggtgaaaatttcgtccatgaattatacagtacatcatcaagctcaacaagctcctctgccaccaaaaactga

SEQ ID NO: 75543 - DNA, 207 bp, Saccharomyces pastorianus
atggctatcacccctgacaaacagaagaaagaacaacagcatcaaccacagaacggaccgctcgactatgctctgatatgcaagtgtattgcaatgttctttgtcgttgcgggcgtggtgctgatgttcttcgagaccgggttggacccagaacaaaaagagcaaatcaagcgtctccaccagttggacggcattcctcacgcttga

SEQ ID NO: 75544 - DNA, 144 bp, Saccharomyces pastorianus
atgcaagtgtattgcaatgttctttgtcgttgcgggcgtggtgctgatgttcttcgagaccgggttggacccagaacaaaaagagcaaatcaagcgtctccaccagttggacggcattcctcacgcttgatgtgcccagggtga

SEQ ID NO: 75545 - DNA, 1554 bp, Saccharomyces pastorianus
atggttttgtctgataaggagttgtttgccataaataagaaagccgtcgaacaaggtttcaatgtgaagcctagattgaactataatacggtcagtggtgtgaacggtccattagtcattttggaaaaggtcaagttcccacgttacaacgaaattgttaatttgacattgccagatggaaccgtgagacaaggtcaagttttggaaattagaggagatagagccattgtgcaagtgtttgaaggtacatctggtattgatgtcaagaagactaccgtggaattcactggtgagagtttgagaattcctgtgtctgaagacatgttgggtagaatttttgacggttctggtagacccattgacaacggtcctaaagttttcgcagaggattacttggacattaacggttctcctatcaacccatatgctcgtatttatccagaagaaatgatttctactggtgtttctgctattgacacaatgaactccattgccagaggtcaaaagatcccaattttctccgcatcaggtttaccacacaacgaaattgcagcacaaatttgtagacaggctggtttggtgagacctaccaaggatgttcatgatggtcatgaagaaaatttctccatcgtttttgctgccatgggtgtcaacttggaaaccgctagatttttcaaacaggatttcgaagaaaatgggtctttggaaagaacttcattatttttgaacttggctaatgaccctaccattgaaagaattatcactccaagattggccttgaccaccgctgaatacctggcttaccaaacggaacgtcatgtgttgaccatcttgaccgatatgtcatcgtatgctgatgctcttagagaagtttccgctgctagagaagaagttccaggtagaagaggttatcctggttacatgtatacagatttgtccacaatttatgaaagagcaggtagagtagagggtcgtaacgggtccatcactcaaatacctatcttgacaatgcctaacgatgatattacgcatccaattccggatttgaccggttatattaccgagggtcaaatcttcgttgaccgtcaattacataacaagggtatctacccaccaatcaacgtcttgccttcgttgagtagattgatgaaatctgccatcggtgaaggtatgaccagaaaggaccacggtgacgtttctaaccaattgtatgccaagtacgccatcggtaaggacgctgctgctatgaaggccgttgtcggtgaagaggcgttatccatcgaagataagttatctttggaatttttggaaaaattcgaaaagacctttatcacacaaggcgcctacgaggacagaaccgttttcgaaagtttggaccaggcatggagtttgctaagaatctaccctaaggagatgttgaatagaatctccccaaagattcttgatgaattttacgatagagccagagacgatgccgacgaagatgaagaagatcccgacacaagaagctccggtaagaagaaggacgccagccaagaagaatctctaatctaa

SEQ ID NO: 75546 - DNA, 1035 bp, Saccharomyces pastorianus
atgcattgcccaatttgccaccatagagcgcatgtagtgtactgtgcacattgtatcaatacgagcccaagtctgctactgaagctaaaactagatttaattttattaaaggatgagaataaagaacttaacgggaaagtcgaacaaatattaaacgaggccatgaactatgaccagttagatatcaagaggatggagaaaaagaaagatcccctgatgaatagtctcatgaagttagatgttttaggaatgaaaaagaataataacctgattaggcacaggatagaacagctaaatgagcggatttatagtaaaaggaatcacatcagcgaattgaaagtagaaattgacaattataaatgttataaggtgggtactggtacggacaaattaagagagcaagtggaaattagtgatgcaaaaaataagctggcacaagtatcgaagatttgtgaatcggctagagattacaagctcaatctactaaataattggtttgtgatccagaagctgcaagataatttccaaatacctttcgctatagcttttcagccactaatatctttgaaaaacttccgtgttttacctcttgctataacaaacgattccatcaacatcatgtggaagtatattagcttcttctcagacattcttatgattaaacttccctacacaaataaaatctgtgaacaacccatgtttgagttttccgatagcatacagacagtagtacaaaggttgatcaagcttatcataaatattttacagatatgtagacatttgaaactcgtaccttcaacacccatggatatcccatggctactggaccagtacgatgtggatgggctgttctataatatggtgaaacggaacaagatgaagtgtaggtccgtctcgctatattggacttttgggatgttgtactcgatggttttggataacatgaataatccacaaagaggacatcctgcaaggcggaccgcaccacctccaacagtcacaggatctcatgaccgatggtacgtggtaggctag

SEQ ID NO: 75547 - DNA, 987 bp, Saccharomyces pastorianus
atgatagcaggtgcgactgctccgtcaagtcagcatgaaattttgatcgcatcgaatctcatcaagaagccatcaacgtctcaaaataaaacgccgacagctcaatccagttcaggtaacaatggagctgctgatggtgcaccgcagggttaccatcatcaccatcatcaccatcgtcatttatggtggcctcggacaacagaccatcaatattggtgtgtcttgaggaagaaccaatttgcctattacaaaactcgggatgaaagagaggctataagtgtcataccgagatttgacatacttaattttaagataagcgagctcgatggtatattaactgtttatactccatccaaggatttaatattcaaatttccacgagggcaaaatgagaaggttggtatggagctgatgcataattggaaaattgcccttgaaaaattcctctctagtcctagtggcaacgaaagtgtcactacaggtagtgattatgatgaagaagaggatgatgatgatttaattgtagttgacgaaaaggcgggtccttctagcagcaagcattcttgcagtttgacgatggatgagcaactgtctcgtgaagataaagaattttataggatgttcgatccaagaaatgcagagcaccaggtttgttctgggattctttacacaaaagtgaaaaagaagaaactgttcaatagggctaaatggcaaaagttcaatgtggaattgactaatacttcgttcaatttatactctttcaagactgggaagttaaagaaaagcattaaattggataaaattatcgattgtattgaacttgataataattcgaagatgaaaaatgacgacactaattttgcgctaattacatttgatgaaaggttatcttttaaagccgctaacgatcaagatatggtggattggataataaatttcaagagtggaattttgataagaaaaaaattaaaggccgaaaatatataa

SEQ ID NO: 75548 - DNA, 1278 bp, Saccharomyces pastorianus
atgtcggaccaggataatacccagacttcttcaagcaagttggcacctcaccataatatttttatggcaaacttggaaagttcccccacaaaagatagaaatacctccagccaaaatgcctcatcttcgagagtcattgaatcactgcatgaccagattgatatgctgacaaaaacaaatctacaattgactacgcaatctcaaaatttattgagtaaattggaattagcacaatccaaagaatcaaaactactggaaaatttaaatctgctgaagaacgagaacgaaaatctcaactcgatatttgaaagaaagaacaagaagctaaaggagctagagaaagattatagcgaattgagtaaccgttacaatgaacaaaaggagaaaatggatcaattgagtaaattggcgaaaaattctagtgccattgaacaatcttgctctgaaaaattgcaaaatatggaagttaactataattcattattggagtcacaaaatctttacagagaccactattctgatgaaatttccaaattaaatgaaaaaatcggtttgttggagttagagttaagtaatcaaaatttaaattatggttcagatactagttcaaattcagatatagaattgaatttaaataaattcaatgactctgtgaaagatttgaaatctctggaaacagaaaaggattcaaaattaagcaagataatcactcactctttagatgagttaaatctacaaagctggctaaatctgtaccagacgaacgaaaatctgatatcaacttttgctgaaaagatggatttgaaagacgtcttgaaaagaaacgatgagaagattagtaataaaggcgcggtagtacaaaccttgaagaagaacgtacaaacccaggtggaaagcaacaacgctgacgctttgagtagcaataatgcacaggatatgcttcctattaagatggtcaaattaagaaagacgccgaacacaaacgattcatcctccaatggtaatagcagtaacaataaaagaagaagtttctatactgcgtcgcctttgctgtcatcgggttctattccaaaatctgcatccccggttttgcctggtgttaaaagaactgcctcagtaagaaaaccaagctcgagcagtagtaaaacaaatgtaacgcataataacgatccaagtacatctcccacaatctcagtgcctcccggtgttacaagaactgtttcctccactcataagaaaaagagaaatagtatggttgttcacggggcccaatcctag

SEQ ID NO: 75549 - DNA, 2115 bp, Saccharomyces pastorianus
atgagactacactatattacggtttttgatccatcaagatctaccaacgaaaatgacactttcaagcagttgctgctgttccattattttggcactactgattcaataccctctttaaacgaaaaactgtccatcataggagtaatacagggcatttggtcacttacgagttcatgcgtaaacaaggacggcgaagatttagagaaaattattgagctgaacaatgatattattttttgtattaaggtggaatcaagatttttcatcagtctagcaatttcgaatatcagcgacgatcagagtgccatacctttacagtatctcagtgcttacttatggcttagttacaggttcttcaagctactcaatgggtcattcagcggatttaacaaggacttccgcaaactcacggatttgttgaacgaattcgttattccgttctggaatgatatttatttgaatctagaaactgtaacgaatagatcatttactgtaatgtggcctggtttttataaaagggcaaattttcaacattcctcttataatcctggagaaaaaaataatgtcgaagagtcatgggacgctataatcttgcagaatattcttttagataaaaagagttatctaggactaaaggacattttggtttaccacctaccaaagcgcaccaaagcggctaatagggagtctatgggaacaaaaacttatggactagtaaggaactttaccagtgacctgaacacattaccagatatctcaaattggctatatcatttgcactgcacctatggtgaactatcaagtcatatattaacaggaaatgtccattttaaagaggagctacaagtagaagaagaacaagagcgaagtcgtgatacaaacggaagagacgaagaggaatcacaggagcaacagcgacgggagcaccaagagactacgcaaaacaatacaagcgaactctctctatcggaaagagtgatacacaacgtaacactccccatttcttttgcatacgacgctatacatgaagtgagtaccacgactggtgtttcgggtagcttatccatgataatggactatgtaccgaagccccattggccgttcatttcatcctctaacaaaagtgccgacaaaaataattactcaaatagcaatgataacgcaaattcgaatgccccactgatgacgcaatcagaggctgttggagggacgataggcaactcgagatttggtttcctaatatccccattgaattcagacctgttgccatcatcataccaagccctgaaactgaatttgaactttgaaaactccaaagacaaggaggatttttataactgcctattttggtactttgatgattttttaattgtaattgtctgtgatccggacttcaacaagatttgtgaaagggactatctaaaggacttgagtttccaattgtgtcagagtatggaatgtctaaacaatgagattttaaactctcaaaattgcgataacgtggaatccttcgcttatgtgatcagagataatgccaccaaagaaatcgactcgtccgttccatttgggtctccaaaatttacttcggatgaaagcatttcaactttacaactagcaatcaacggtatagatcagttcattaacgataattcaaattccctatcgcttgctaattggaatccaataactattatgggtggctcaaatgctatcagcaaaaaaaatactacagaaggatttgggaacggggtaaacgataagactcaaaaatttaaaagaaaatatctgaatttcttaaatttaatgagcgcagaaaagttatgggacttacaggttgacgtcttacaattcttgactagtttacagaactcaaaaagagacccagaatattttcaggaggagaggttgttaaaattgaacaatggtgttttatgctatatcaaagaaaacaattcaaacttaattattattattaaaaactggtttcaaaataacggcacgtcaaaggctgcaaaacaaaggaaccgttttcgttcagattcctctaagggaagttcattgtttcaaagtttaggtcgtgacgtgactgactggtgggaatccagggaaatttaa

SEQ ID NO: 75550 - DNA, 1791 bp, Saccharomyces pastorianus
atgacaaaggaacgtatgaccatcgactacgaaaatgacggtgattttgagtacgataagaataaatacaagacaataaccactcgaataaagagtatcgaacctagtgagggatggttggaaccttctgggtcagtgggtcacataaacacgatacccgaagcgggcgatgttcacgtggatgaacatgaggatagagggtcttctattgatgatgactcaaggacttacctgctatattccacagaaactcgacgtaaactagaaaacaggcacgtccagttgattgctatttccggtgtcattggtacggcgctattcgtggcgatcggaaaagctttataccgtggagggcccgcctctttattattggcatttgctctttggtgtgttccaatactttgcattactgtgtctacagcggaaatggtctgctttttccctgtaagttccccctttttgagattagcaacgaagtgcgttgacgattcattggcactcatggctagctggaatttctggtttctagaatgcgtacagatccctttcgagattgtttctgttaatacaattatacattattggagagatgattattctgctggtattccgctcgccgttcaagtagttttgtatctgcttatttcaatttgtgcagtcaaatattacggtgaaatggaattttggttggcttctttcaaaattatccttgcactcggcctatttacattcacgttcattaccatgttgggtggaaatcctgaacatgatcgttacgggtttcgtaattatggtgaaagtccattcaagaaatactttcccgatggcaatgatgtggggaagtcttcgggctacttccaggggtttctcgcttgcttgattcaggcatcgtttaccatagctggtggcgagtatatttctatgttagcgggagaggtcaaacggccaagaaaagtattacccaaggcgtttaagcaggtgtttgtgagattaacatttttgtttttagggagttgtctgtgtgttgggattgtttgttcgccaaatgatcctgacttgacagcagcaattaatgaagcaaggcctggcgccgggtcttcaccttatgtcattgcaatgaataatctgaaaattagaatattacctgacattgttaatatagctttaattacagccgccttttctgctggtaacgcttacacttattgctcatccagaacattttatggtatggcattagatggctacgcgccaaaaatcttcactagatgcaataggcatggtgtgcccatttactctgtggccatatctttggtatgggctttagtgagccttttgcaactgaattctaatagtgcggtcgtattgaattggttaattaacttgattactgcctctcaattgattaattttgtcgtcctttgtatcgtctatttatttttcagaagggcttaccatgtccaacaagattcgttacccaagttgccattccgttcgtggggtcagccatacactgctattatcggccttgtttcatgttccgcaatgattttaatacagggctacaccgttttctttcccaaattatggaacacacaagattttttgttttcgtatttaatggtgtttatcaacatcggtatatatgtgggctacaaatttgtttggaaacgtggtaaagatcacttcaaaaacccacatgaaattgacttttctaaagagctaacagaaattgaaaaccatgagattgaaagctccttcgaaaaatttcaatattatagcaaagcataa

SEQ ID NO: 75551 - DNA, 2484 bp, Saccharomyces pastorianus
atgcatagcaacgtatttgttggtgtcaaaccaggctttaatcataaacagcacagcaaaaagtcacgtttcctagaaaatgtctctagtcattcaccagaactgcctagtaactatgattacgttttgcttcctataacaacgccaagatataaggaaatagttgggcaagttttcaaagatttccaaagacaatccatacagaactggaaaccgcttcaaattcctgaaccgcagttgcaggatatctgtatacccccgttcaacgtcaagaagctagacaatgacgatacgccgtcttacatagggctgttatcctcctggctggagctggagagtcgcgatccaaatgtaagagatcttggcttaaaggtccttctaaacgaatgtaagtacgcgaggtttgttggaatcaataagctaatattggcgcctccacgggacctgtccaacctgcaattgtatggacagatgatttacaggctcctgcaaaatcgcatcgtctttgctgcgcctgcgttaaccatatccatttctctgccactttacgaagacagcgatccattggccacttgggaactgtggaataccgtgcggaaacaatgcgaatatcatccctctttgactatctctttggctttgccaagaaccaggactccttcgtatgtgctgaatagatggttagccgaacccgtctcgtgtcttttggtatcttcatccatctttgccagtaatcagtacgattatcccgttttacacaagtttaaccagaatttgattttaaagttccaaaaggttaatggagattcacaaattttgggtaatgaattatgcgtgatattgcatgggatggagaaatatgccaataatgttaagggcggagaatctgcctatttggaatatataaactacttattgaaaaagggcgacaaagtattaaattccaatagtaatcaccaatttttgctccaagaggagtctcggataatgccgcctctgaaacctcattcagataatttattaaattccacatatttgacttttgaaaaagatttggtgaagtacgatctttacgaatctgccatattagaagcgcttcaagatcttgctcctcgagcgagtgccaagagaccgttggtgatcctagtagccggtgcgggaagaggacctttagtggatcgaacttttaagataatatcaatgttgtttatggatagtaaggtttctataattgccattgaaaaaaatccacaggcatatctgtacttgcaaaaaagaaatttcgactgttgggataatagagtgaaattaatcaaggaggatatgaccaaatggcaaatcaacgagccgtcggaaaagcgtattcagatagatctgtgcataagtgaactgctgggttcgttcggttgcaatgaattatcaccagaatgtctctggtctattgaaaaatatcattcccataatgacacaattttcataccgaggtcatactcttcatacatagcacccatttcgtcaccattattctaccaaaaactctcacaaacaaatcgctcgttggaggcgccctggatagtccatagagtgccatactgtatattatcctcaagggtaaatgaagtgtggcggttcgagcatcccatggcccaaaaagatactgcccaagacgaagatgattttacagttgaattttctcaaagttcattaaatgagttcaagataaagcaccgcggcgaaatccatggctttatcggattcttctcggcaaacttatataacaatatattcttgtcaactttgcccaatgacagcacagtccgtttaaaatttagcgaagaaacgttgatgaataccagacgagaagaaaatctaatcaagaaatgtgaccatacaccaaatatgacctcgtggtctccaattatctttcctttgaagcaaccaatatcctttatagatgactccgaactttctgtgttgatgtcacggatacactccaatacagaacaaaaagtttggtatgaatggtctttggagagtttcatataccttatgttgtcaaattatacttcggcggtaactgctgcaagcatgactattccgaggtctatagttacagatgacactaaaactttagcccataatcgacattattcagcgactaccaatcaaaagctagataatcaaattgatcttgaccaagacattgaaaacgaagaagaacagggattcttatccaatctagaaactggttggcaaagcgtacaagatattcacggactcagcaaaaccgccaaaccagaccatttagattctatcaataagcctatgtttgatctcaaatctactaaagcgcttgaaccctctaacgaattgccaaggcacgaagacctcgaggaagatgttccagaagttcatgtcagagtcaagactagtgtttccacgctacataatgtctgtggcagagccttttccctgcctctgtga

SEQ ID NO: 75552 - DNA, 480 bp, Saccharomyces pastorianus
atgtaccatcactatcacgccttccaaggcagaaagcttactgaccaagaaagagcacgcgtgttggagtttcaagattccattcactattctccgcggtactcagacgataactatgagtacaggcatgtgatgttacctaaggccatgctaaaagttatcccatctgattacttcaattcggaagtggggaccctgcgtatattaacagaagacgaatggagaggcctcggcatcacacagtctttggggtgggaacattatgaatgccatgcgccagaaccacacattttgctattcaaaaggccgctgaactacgaggccgagctgagggcagcgaccgctgctgctcaacagcaacagcaacagcagcaacagcagcaacagcagcaacaacaacaacagcagcaacaacaacaacagcaacatcaaacacaatcgatttcgaacgatatgcaagttccaccccaaatctcctag

SEQ ID NO: 75553 - DNA, 540 bp, Saccharomyces pastorianus
atggtggttttagacaagaagttgttggaaagattgacttctcgtaaggttcccttagaagagctcgaagatatggaaaaacgatgctttttgtctacttttacatatcaagatgcctttgatttggggacttacataagaaatgcagttaaagaaaacttccccgaaaaaccagttgcaattgatatctccttaccaaatgggcattgcttgtttcgcacagtgacctacggtggcagtgcattggacaatgatttttggatccagagaaagaagaagacagcgcttcgatttggtcattcaagtttctatatgggctgtaagaaaggtgatacaacaccggaggaaaagttccttgtggactcaaaagaatacgctttccatggaggtgctgtcctaatacaatctgagagaagtgactacccctatgcctgcttaactataagtggattgaagcaggaagaagaccatttaatggcagtcagctctttaattgcatttgctaatgaaagtctagaagaagatttgaatttggattga

SEQ ID NO: 75554 - DNA, 1575 bp, Saccharomyces pastorianus
atggagaaagatcaaatccaccctagggtgttggagtcagtagacacaaactcattatccttgctttcgtccaataccagctcaaatatgaatagcaacaccaacaataaactcagtataattgctagtgatatttctacaggatccgtactttccaggcccttgactcctccagtcgttcaggatatagagaataactccatgttgcaatggcaatttgaaaagaaggaatttatcttcgatagtaacagcactccttcgaagcaggcaaaaccattgcagagaacttctccataccaaggcaatagtcaaagtgaaaatcagaaccaacagttattgaatgtaagaaagcgtcgctcacaattgataggtgccaagcctaaaattccatccaaattgtatcaatctgtttccaaattagatctaattgatgacaagagctttacgtctttgccaattgcgcctccatgcaatatcgaaactaatgaagatgatagtggaaacaacgaatacaacaacaataaaaaacgacccaggttgaatcctgtaaatgaactgcgagtgcataacaacaaacgtaataggtacgtcagttatgggccgagtttagatacaaaaaactacgagctaacagaaaatacttctcaggatataccaccgctagtcctggttgaagactacataccgtatacccaaagtaaatcaacaaaaaaaatggtatctatttcagatttgaaatcaaaactaagtaaaagaagagataatcatatcccgctgagagtaaaaaattcatattctgaaattaataaggaaaccaatagaaatagctttgaaccgaattcactaacactgataccccatatattaaggaatactgaagaaaatagggacgaaagtaacaaccccttagattttatcaaagaggaaattgaaataagtgatatttccataccaaattccattgaaaatatggtggttaacttggttaatattccatcttccaataaaagttacgatgatctttatctatcggaattaaatgttcattcccaactgaggaaatgtgtcatctgcgaaaaggccctatatgaaattagctcgagacttttaaattcaggatactataaagaaattgtatgtgagcaatgcacagttagatatgaagaagccgctaaaatctttgagaactgcgagttcgaatcatctatggatgaatcaaatctaagcagcggtacttttagtgatcttgagaattcagcggaaccgtttcatttatcgacagatgttccaaaaaaaataaataggcacatagaagataacaagatcgaccttaaaaaggaaacatcaaaaaaaaaggacagcttctctaaggaactaatagaacgattgcagttgcaattgctagaaaatgataagtcaatcaaacatcattttaataaagatgcaatgggctctaaatcaatgaattggtttttggaagcaagaagaaaattgaagtggaagtggagaataaatggtttacttccgcatttcttacgcaatcaaaatagtgatcgtttaaattttcaaccttga

SEQ ID NO: 75555 - DNA, 1014 bp, Saccharomyces pastorianus
atgcattcaagaaagtcgaagagtattacgggcaagaggaagcaagtaggaagtaacgtgacgagagtaatcaagccacagaagacaagaaggataataagaagattccaccatttaattaataagcgtcaatcgatatgcaagtttttatgccttaaggaaaacctagatgattccaacgaggagaagaatgacaaaattatcaggttaagtattaaaggtaatgtaagactgggcaagtactatgaagacggcaaatcgcagtccttcaatgatgctatggaatcacaactactgaggctgcactcattaattaaaaatgaatccaaatcaaaggatacttctgacttggctgtgatgtacacattacttggttacataatgaatcagattaataaattgggaggactagaaacttaccaaattgccagtcaaaatgggcaattgaaggaacgaggaggagacacgtccaagttgctcgagaaatggatcaggtcctcatttgaaaatcgtcctggagtaatggcattagaaattggttcattaagctccggaaatcgcatatcccgttgtgcactttttagaaaggtggttcgtatagatttagaggaacatgaaggcgttatcaagcaggattttatggaaagaccgctaccgagaaatgaaaacgacaaattcgacctgatatcatgctctctagtgctaaattttgtcaaaaatcacagggatcgcggtgcaatgtgccatcgcatggtcaaatttctcaagccgcaaggctacatctttattgttctgccacaagcctgtgtgacgcactcaagatactgcgacaaaacactgttacaaaacctcctctgctctatcgggctcataatgcttaatagccatcaaagtaataagttgtactattgtttgtatcaattgcaggtagttccaccgcagccgagtagcttttccaaaagaatcaaggttaacgacggccctgggttgaacaattttggtattaccctctaa

SEQ ID NO: 75556 - DNA, 96 bp, Saccharomyces pastorianus
atgagcccgatagagcagaggaggttttgtaacagtgttttgtcgcagtatcttgagtgcgtcacacaggcttgtggcagaacaataaagatgtag

SEQ ID NO: 75557 - DNA, 2322 bp, Saccharomyces pastorianus
atgggtaagaaaagggctcctcaaaaaggaaaaacggtcacaaagccacaggagataattgtagatgaatccaaattgaactggaaaccagtagatattccggacactttagatgactttggtggattttatggcttggaagaaattgacggagtggacgttaaagtcgtggatggtaaagtaactttcgtcaccaaaaaagattcaaaagtgttaaaagatagcaataaggaaaaagtcggagatgatcaggaatctgtggaaaatgaatcagggtcagattcggagtccgagctccttgaattcaagaacttggacgatattaaagaaggagagttgagtgcagcatcttattcatcatccgacgaggatgagcaaggtaatattgagagttcaaagttaaccgatcccagtgaggatgtggatgaggatgtggatgaggatgttttgaaagaaaacgtctttaacaaagacattaatatcgatgatatttctcctgtaaatttacctgaatggacgaatcttgcacctctctcaatgactattttgcagagcttgcagaatttaaattttctcagacctacagaaattcaaaaaaagtctattccagttattatgcaaggcgtagacgtcatggggaaagcctctacaggttcaggtaaaactttagcctatggtattccaattgtagagaaactggtcagtaacttctctcagaaaaacaagaaaccaatatcgttaatctttactcctacaagagaactggcgcatcaagtcacagaccacttaaaaaagatctgtgagcctgttctagcgaaatctcagtactcgatattatctttgacaggtggactctctatccaaaaacaacaacgtctattaaagtacgataatagtggccaaattgtcatcgcaacaccaggtagatttttggaactgttggaaaaagacaacactttaatcaaaagattctcgaaagtagatacgctaatccttgatgaggctgataggctgttacaagacggtcatttcgacgagttcgaaaaaatcattaaacatttattagtagaaagaaggaaaaacagagaaaactccgagggcagtagcaaaatttggcaaactttgatcttttctgcaacattctccatcgacttgtttgataagctatcttcttcccgtcaagttaaggatagaaggtttaaaaacaacgaagatgagctaaatgccgtaatacaacacttaatgagcaagattcacttcaactcaaagccggttataatagatacaaatcctgagtcaaaagtgagctctcaaatcaaagaatccttaattgaatgtcctccattagaacgtgacctatactgctattactttttaaccatgttcccaggtacaactttgatcttttgtaatgccattgactccgtgaagaaattgaccgtatacttaaataacctaggcatcccagcttttcaaattcattcttccatgacacaaaagaaccgtttgaaaagcttagaaaggttcaagcaacaaagcgctaaacagaaaacaataaatcattcgaatccggattccgttcaactctcaacagtattgattgcaagtgatgttgctgctagaggtttagatattccgggtgttcaacacgttattcattaccacttaccaagatctactgatatttatattcatagatcaggcagaactgcaagagcaggttctgaaggtgtctctgccatgatatgctcacctcaagaatctatgggcccattaagaaagttaagaaaaactctcgctacaaaaaatagtgtttcgacggatttgaactctagatcaactaacagaaaacccatcaagtggcaaaacactgtgcctttgttaccaattgaaaccgatatactttcacaactcagagaaagaagtagattagcaggcgaactggctgatcatgaaattgcttctaattccctaagaaaagatgacaattggttaaaaaaggctgctgatgaattaggtattgacgttgattccgacgaagatgatatatcaaagagtaattcggacactttcttactaaaaaataaaaataaaaaaatgcagaagactataaataaggacaaggtaaaagccatgagagctacgttgaacgaattgttatcagtgcctatacgtaaagatagaagacagaaatatttgacaggtgggctagtgaatttagctgataacttggtcaaaaaaagaggtcataattctatcattggtcatgaaaagacaaacgccttagaaactttgaagaaaaagaaaaagagaaataattaa

SEQ ID NO: 75558 - DNA, 1314 bp, Saccharomyces pastorianus
atggataacgaggttgaaaaaaatattgagatctggaaggtcaagaagttggtccaatctttagaaaaggctagaggtaatggtacttctatgatttccttagttattcctcctaagggtcaaattccactgtaccaaaaaatgttaacagatgaatatggtactgcctcgaatattaaatctagggttaatcgtctttccgttttatctgctatcacttccacccaacaaaagttgaagctatataatactttgcccaagaacggtttagttttatattgtggtgatatcatcactgaagatggtaaagaaaaaaaggtcacttttgacatcgaaccttacaaacctatcaacacatccttatatttgtgtgataacaaatttcatacagaagttctttcggaattgcttcaagctgacgacaagttcggttttatagtcatggacggtcaaggtactttgtttggttctgtgtccggtaatacgagaactgttttacataaatttactgtcgatctgccaaaaaagcatggtagaggtggtcaatctgcgcttcgttttgctcgtttaagagaagaaaaaagacataattatgtgagaaaggtcgccgaagttgctgttcaaaattttattactaatgacaaagtcaatgttaagggtttaattttagctggttctgctgactttaagaccgatttggctaaatctgaattattcgatccaagactagcatgtaaggttatttccatcgtggatgtttcttatggtggtgaaaacggtttcaaccaggctatcgaactttctgccgaagcgttggccaatgtcaagtatgttcaagaaaagaaattattggaggcatattttgacgaaatttcccaggacactggtaaattctgttatggtatagatgatactttaaaggcattggatttaggtgcagtcgaaaaattaattgttttcgaaaatttggaaactatcagatatacatttaaagatgccgaggataatgaggttataaaattcgctgaaccagaagccaaggacaagtcgtttgctattgacaaagctaccggccaagaaatggacgttgtctccgaagaacctttaattgaatggctagcagctaactacaaaaacttcggtgctaccttggaattcatcacagacaaatcttcagaaggtgcccaatttgtcacaggttttggtggtattggtgccatgctgcgttacaaagttaattttgaacaactagttgatgaatctgaggatgaatattatgacgaagatgaaggatccgactatgatttcatttaa

SEQ ID NO: 75559 - DNA, 1056 bp, Saccharomyces pastorianus
atgccttcgcaagtcattcctgaaaaacaaaaggctattgtcttttatgagacagatggaaaattggaatataaagacgtcacagttccggaacctaagcctaacgaaattttagtccacgttaaatattctggtgtttgtcatagtgacttgcacgcgtggcacggtgattggccatttcaattgaaatttccattaatcggtggtcacgaaggtgctggtgttgttgttaagttgggatctaacgttaagggctggaaagtcggtgattttgcaggtataaaatggttgaatgggacttgcatgtcctgtgaatattgtgaagtaggtaatgaatctcaatgtccttatttggatggtactggcttcacacatgatggtacttttcaagaatacgcaactgccgatgccgttcaagctgcccatattccaccaaacgtcaatcttgctgaagttgccccaatcttgtgtgcaggtatcactgtttataaggcgttgaaaagagccaatgtgataccaggccaatgggtcactatatccggtgcatgcggtggcttgggttctctggcaatccaatacgcccttgctatgggttacagggtcattggtatcgatggtggtaatgccaagcgaaagttatttgaacaattaggcggagaaatattcatcgatttcacggaagaaaaagacattgttggtgctataataaaggccactaatggcggttctcatggagttattaatgtgtctgtttctgaagcagctatcgaggcttctacgaggtattgtaggcccaatggtactgtcgtcctggttggtatgccagctcatgcttactgcaattccgatgttttcaatcaagttgtaaaatcaatctccatcgttggatcttgtgttggaaatagagctgatacaagggaggctttagatttcttcgccagaggtttgatcaaatctccgatccacttagctggcctatcggacgttcctgaaatttttgcaaagatggagaagggtgaaattgttggtagatatgttgttgagacttctaaatga

SEQ ID NO: 75560 - DNA, 837 bp, Saccharomyces pastorianus
atgttttcaaggctttctttgtttcgaagggcagctctggctcctgcccctatgagaatgtcttttaggactatttatcaaaaaaccgaggatgaattgcccagaaggatcgtcccaaagctagccacattttattcggcgaatcctaaccatgaagatcgtattaatcgactcgaaagacttctaaggaaatacataaaactgccatctcagaacaacaatgaagcacaacaaacaaaagctccttggatttcttttgatgagtacgctttaattggcggtggtacgagattaaagcctacgcaatatactcagctactgtatatgttgaataaacttcacaacattgatcctcaacttactaatgatgaaatcacatccgaactatcccaatattataaaaaaagttcaatgctttccaataatatcaaaatcaaaactttagatgagtttggaagaagtatagccgttggaaagaggaaaagttccactgcgaaagtattcgttgttagaggtacaggtgagatattagttaatggtcgacaattgaatgattacttccttaagatgaaagacagagaatcaatcatgtatccacttcaagtgatcgaatcagttggaaagtacaatatttttgcgacaacgtctggaggcggacctacgggtcaggctgaatcaatcatgcacgccattgcgaaagctttggttgtgttcaatccattattaaaatccagactacataaagctggcgtcttaacaagagattacaggcacgtcgaaagaaagaagccaggaaaaaagaaggcaagaaagatgccaacatgggtcaagagatag

SEQ ID NO: 75561 - DNA, 924 bp, Saccharomyces pastorianus
atgaagctgatcccaattattttgaatgctaagaatctcagtgggatggctggatccatatcaatatgctgttggattgttgtgtttgtaccacagatttatgaaaacttccgaagacagtctgcggagggattatcactgcttttcattgtgttgtggctattaggtgatatatttaacgtcatgggagctatgatgcaaaatttactcccaaccatgataattttagctgcttactatacattggcagatttaattttgttaatacagtgcatgtggtatgacaaggagaagaagagcattttacaagaagtcaagaaaaatgttgatcctgtgcatttgtctccagcaaaccccataaatgagactgtcttacaagacgtttttaatgaatatgagccacttttgccaaggatagaagaagaagatagccaatcgtatagctcgcttgagcttggcagaacaatagtcgtaaaggaaagagagaattttttcaatgacttcttaattgtttcaggtgtacttattgccggaattttgtcatggtatatatcttactgttccggcctagataacggtattcctaaaaaaaaacctgcgttcgaacagattaatttacctgcacaaattttagggtatttaagtgcgatactgtacttgggctctaggatccctcagattgttcttaacttcaaaagaaaatcatgcgaaggagtctcattcctattctttttatttgcatgcttagggaacacttctttcataatctcagtgctctcagtctcaatggaccccgaatatttaattttgaacgcatcttggcttatcggtagcgctggtacgctgttgatggacttcacagtttttattcaatttttcctttacgccaaacctaaatacgagaaaatactaatagataattaa

SEQ ID NO: 75562 - DNA, 951 bp, Saccharomyces pastorianus
atggcttttttgaatattttcaagcaaaaacgtggtgatgaagcttcacaactgagcgcaaagggacgggaggaaatttctcaatcgattaagatatgcaaaagtgacgatgctgctaacgaacatagctgctctggtgattgcaaaacagaaattgaagaaggagagcaggcttttgcgaaactaaagatcgaacatgaaactcctttgttgaactcttctaaaacgccaaaaattcacttcgttgtccccacctctcaaatcgattggcagcatgatgcctgcctcgaggacccaaagtcagtacagtataaaatttcccagtggtgtgataagaattcagctaaattttccaacgtgggcacaggcaagacactaaactgtgcagtttcatctttacctaaagatattatggatattgatgttatgcggggaaccaagaataatgtacttatgttgccttacttcatttggctgaacgaccttagatcagatgacgtcgaagcaacgctggatggtttagttcctgatttattagacgagaatatttcaagagagaaattgctagaaacacgaccaaatgttgccgttgcacgtgaacgtgcatttgtatttatatgttcacatactacgagggataaacgatgcgggattacggcaccctatttaaagaaagtttttgacagtaaattacaggaacatgggctgtatagggacaattcggattacagggcagagggtgtcaaaattgcatttgttaatcatgttggtggtcacaaatttgctgcaaatgttcaaatttatttacgaaatccaaataccttaatttggttgggaagagtaactccaaccatagttccttctattgtcgaacatctgattgttcctgaagaaccaacgttgccgtttcccgaaaaagttcgctgtattaagaaatatcaaagctggtaa

SEQ ID NO: 75563 - DNA, 876 bp, Saccharomyces pastorianus
atgagttttagacatttcaagaggagacttgacacaagttcagcagatgaaagctcttcggcggatgaagagcatccagaccaaaacgtatctctaacagaaaaatcagcctcattaagccatagtgatttgggcggcgaaattttaaatggtacaggaaagaaccgcacccccaatgatggccaagaatcaaatgaaagtgatgggagtcccgaaagtgatgagagtcccgaaagtgaagaaagtagcgacaacagtgattcgagcgatagtgacgatatgagacctttaccgaggccattatttatgaagaaaaaggccaataatttgcagaaagctaccaagatagatcaaccgtggaatacccaagatgacgcacgagttctgcaaacaaagaaggaaaatatgataaaaaacatcgacaaagctaatcaagtggcaaagaactacgaaacgatgaagctgagacttaacaccaattacagcaccaacgaagaattgatcaagcagtgcatgctcttagatgataacgatgaagtcgattcagaaaaggagaggcagaaatggtttgaaaggcagaacgaacgaaagcaaaagcatagaagaatacaacttgcgaaacaaagagaatcagaagaatatgaggcaaaacgatttgaagcgatgcaaaaaggcaaagatgggaataccaaatacgacgttatcttggacaaggagaaagagaaacttgatcacaaaaaacaaagatcggctgaaaaagtggaaaaatctcacaataacaaccgttacaagattacaagaactaaaaatgttgaatttggtgacctaggcaagaatagtagagattacgaagaaactgaatattcggttatataa

SEQ ID NO: 75564 - DNA, 735 bp, Saccharomyces pastorianus
atgtctttgacaccactgtgtgaagatttaccacaatttctgcgaaactatctaccgaatgctggtcaaacggaaaataccattgtgccctttgtcacattaacttatgctcaatcgctcgacgcgagagtatctaagggccctggagtgaggactataatttcacatcccgatactaaaacaatgacgcattatttgagacatcatcacgatggaatactcgtaggaagtggaacagtgctagctgataatcctggattgaattgtaaatggggtcccgatccggctgcaaattccccaaggccaataataatagatacaaagcaaaagtggcgatttgatggttcaaaaatgcaagaactttttattaaacgacagggtaagccgccaatcgttgttgtcacaagtgagcccattataaaagaacaacatgtagactacgcaatttgtccaataaatgatactacgaaattggtcgattggaagaaattgtttgagatattaaaagaagaattcaatataaggtcagtaatggttgaaggaggtgccaatgtaataaatcagttgttgctgaggagcgatattgtcaacagtcttataataactattggatcaacatttctgggtagctcaggcaccgaagttagcccaccccaaacagtaaatttaaaggatatgtcatggtggaagggcattaccgatgtggtgctttgtgcgagactggccgatgactaa

SEQ ID NO: 75565 - DNA, 648 bp, Saccharomyces pastorianus
atggaccaagaaaatgaaagaaacatctcaagattatggagagcattcagaacagtaaaagaaatggttaaggacaggggttattttatcactcaagaggaagtcgaattgccattggaagatttcaaggccaagtattgtgactccatgggcagaccacaacgtaaaatgatgtccttccaggcaaatccaacagaagaatctatatcaaagttcccagacatgggctccttatgggtagaattttgtgatgagccttccgttggtgtaaagacaatgaagacttttgttatacatattcaagaaaaaaatttccaaacaggtatctttgtttaccaaaataatattacaccaagtgcaatgaaattggtgccttctataccaccagccaccattgaaacttttaatgaagctgccttagtggttaatattactcaccacgaattggttccaaagcatatcagattgagtagtgatgagaaaagagagcttttaaaaaggtatagattgaaggaatcccaattgccaagaattcaaagagctgatcctgtagccttatacttggggttgaaaagaggcgaagtagttaaaatcataagaaaaagtgaaacctctggtcgttatgccagttacagaatctgtatgtag

SEQ ID NO: 75566 - DNA, 1158 bp, Saccharomyces pastorianus
atgagctccgttaacgcaaatggaggatataccaaaccacaaaaatatgtgccagggccaggtgatcctgaacttccaccccaactatccgaatttaaagataaaacatcggatgaaatcttgaaagaaatgaacagaatgccttttttcatgaccaagttggatgaaacagacggtgcaggtggtgaaaacgtggagttagaagctttaaaggcattagcttatgaaggcgaaccacacgaaatcgctgaaaatttcaagaagcaaggtaacgaactatacaaagcaaaaagattcaaggatgcaagggaactttactcaaagggcttggctgtagaatgcgaagataaatcaataaatgagtcactatatgccaatagagcggcatgtgagttagagctgaaaaattacaggaggtgtatcgaggactgcagtaaagctctaactattaaccccaagaatgttaagtgctactatcgtacaagcaaggcttttttccaattaaacaagttggaggaggccaaatcagccgcaacatttgccaatcaaaggattgacccagagaacaaatcaattttgaatatgttatcagtgattgatagaaaagaacaagaattgaaagcaaaagaagaaaaacagcaaagagaagctcaggaacgtgaaaacaagaaaattatgttagagagcgcaatgacgctgagaaacataactaacatcaaaactcactctccagtagagttacttaatgagggtaaaataaggctagaagacccaatggattttgaatctcaattgatctatcccgcattaattatgtaccccacgcaagatgaatttgattttgtaggtgaagtaagtgagttaactactgtgcaagaacttgttgacctagttttggaagggccgcaagaacgcttcaaaaaagaaggtaaggaaaacttcacaccaaagaaagtgttggtgttcatggaaacaaaggcaggtggtttgagtaaagctggtaagaaactgacatttcacgatatcttgaagaaagagtcgccagatgtaccattgttcgataacgctttgaaaatatatattgtgccaaaggtagaaagtgaagggtggatttccaagtgggataagcaaaaagccttagaaagaagatctgtgtga

SEQ ID NO: 75567 - DNA, 2097 bp, Saccharomyces pastorianus
atggactgggcaatcaaagcagctaggaagaaaactcaaaggaagccaggctctacccgttcaatcatagaaaccctcgatgatctaaataatctaacaacagatgcacattcagaaataaatcaacgattgtacgaaagtagtgaatggttaagaaataatgtttatatgaatacactcaagtatgaagacaaaaagatggaagagtctttaattagccccgaaaatacgcataacaaaatggatgtcgaatttcctaaaatgaaaggagaatatgaactttctaactcccagaatgatgccgcaaaagacgttactaagacacccagaaatggattacataacgataaaagtatcacgcctaaatcactccgcaggaaggaagtcaccgaaggaatgaatagatttagtatacatgataccaataaaagcccggttgagccattgaatagcgttaaagtcgacgccaatgaaagcgaaaaatcctcaccatggtcaccttacaaagttgaaaaggttctaagagaatcctccaagacttcggagtctccgattaatacaaaacgcttcgataatcaaacatgggcggctaaggaagaaatggagaatgaacctatacttcaagctttaaagaaagctgaatcagtaaaggtgaaaccaccaccgaattctgggatagcgagatctcaaagaaggtcgaatatgtttgttccactgccgaataaagatcctcttattattcaacacattccaccaacaaaatcttcaggatcaataccaaaagtacgaacagtaaaggaatcaccaatcgcatttaaaaaaaaatctacgataaatagtcctgctataagagctgtggaaaacagtgataccgcgggatctacaaaagcatccagtgttttcgataggctatcatctattccaacaaaatcatttgaaaacaaaatttcccgtggaaacgttggtcacaaatactcctcttcatcaatcgatttaacaggctcccccatgaaaaaagtttctcaaaagtttaagtcaataaactccacggatactgatatgcaagaagcgttaagagatatattctcagtaaaaaataaaataaccaaaaataattcacccaaaggaaaaaactctcgaaaatcctctattccgaggtttgataagacttctttgaagctaacgacacacaaaaagctagcaatcattgcagaacagaaaaagaagtccaaacactctagtgatgttcataaaactggttcaagaccgcacagtatttctccaacaaaaataagtgtcgattcaagctcgccatctaaagaagttaaaaattattaccaaagccctgtaagaggttatttgagaccaacaaaaacgtctatttcgcctaataaaaataaaaatttaacaacgtcgcaaacgccacatcgtttgaaaattaaagagaaaacattaagaaaactttctccgaatattgctgacatctccaagccagagtctcgtaaatccaaaaattatcggcttacaaaccttcaattacttccaccagcagaggcagaacgagatgacttaaaaaaaaagtttgataaaaggttatcaggaattatgaggtctcaacaggaacatcatcggcgtaaacaagagaaacaaaaaaggatgtcgcatttggaacaagatctaaaaaagcaaacaagctttagtaatgactacaaggacatacgtctaaaagaatctttggctcctttcgataatcatgtgcgagataccatcaacaaatatactgcatttagtaccgacaatgtattggccacaataaatacagttgaccatcgagaaataatcggaaatgtgaccccaaagatagcctctgtcaatgattctttaccagagataaatactgattctgaagatgaggctagcgtaactttagcggcatgggctaaatccccgtatttgcaagagcaattgataagacagcaagatataaatccacaaactatctttggaccaattccgcctttgcacaccgatgaaattttcccaaatcctaggctaaacaggttgaaaccgcgtcaaattgtgcccaaaaggtcttga

SEQ ID NO: 75568 - DNA, 1650 bp, Saccharomyces pastorianus
atgaaactagaacgcgtaagcagcaatggctccttcaaaagaggtagagatatccagtcacttgaatctccgtgtactagaccgctgaaaaaaatgtcacctagtccatctttcacatctcttaaaatggagaagcctttcaaagatattgtaaggaagtatggaggtcatcttcatcaaagtagttacaatcccggctcaagcaaagtggagttagtaagaccagatttgtctttaaaaacagatcaaagttttcttcaaagtagtgtgcaaactacgcctaataagaaaagctgcaatgagtatctttcaactccagaggccacaccattaaaaaatacggctacagaaaatgcatgggcaacctctcgagttgtttctgcatccagtctttctatagtgacaccaacggaaattaaaaacattcttgttgatgaattctctgaattgaagttagggcaacctttgactgctcaacatcagcgaagtcatgcggtctttgaaattcctgagattgtggaaaatatcataaaaatgatagtttctctagaatctgcaaatataccaaaggaaagaccatgcttaagaagaaatccacaatcttatgagcactctctgcttatgtacaaagacgaagagagagcaaaaaaagcatggtcagcagcccagcagctacgagacccaccattagtcggacacaaggagaagaagcaaggggccttatttagttgtatgatggttaacaggttatggcttaacgtaacaaggccttttcttttcaaaagcttgcactttaagagcgtccataattttaaggagtttttacgaacttcccaggagacgacacaagtaatgagaccgtctcattttatattgcacaaattacatcaagtaacacaaccagatatagaaaggctttccagaatggagtgtcaaaatttgaaatggttagaattttacgtttgccctagaataactcccccattaagctggtttgataacctccataaacttgaaaagcttattattccaggcaataaaaacatagatgataactttttactcagactatcacagagcataccaaatttaaagcacttagatttaagagcatgtgataatgtcagtgattcaggtgttgtttgcattgctttgaattgcccgaaattaaaaacatttaacattggcagacataggcgtggaaatttaattaccagtgtctcactggtcgcgctaggcaaatacacacaggtggaaactgtggggtttgccggttgtgatgttgatgatgccggtatttgggaatttgctcgattaaatggcaaaaatgttgaaagattgtctttaaattcctgtcgtcttttgactgattactctctacccattctttttgctttaaactcatttccaaatctggctgttttagagatcagaaatttagataaaataactgatgtgaggcatttcgtgaagtacaacttgtggaaaaaatcattggatgcccccattctaatcgaagcatgtgaacgtattacgaaactaatcgatcaagaagaaaatagagttaagaggattaactccttggttgccttaaaagatatgacagcttgggttaatgcagacgacgaaatagagaataatgtggactag

SEQ ID NO: 75569 - DNA, 897 bp, Saccharomyces pastorianus
atgagcggtgaattagcaaattacaaaagacttgagaaagtcggtgaaggtacatacggtgttgtttataaagcgttagacttaagaccaggccaaggtcaaagagtagtcgcattgaagaaaataagactagagagtgaagacgagggtgttcccagtacagccatcagagaaatctcattattgaaggaattaaaagacgataatattgtcagattatacgatattgttcactctgatgcacacaagctatatcttgtttttgagttcctcgatttggacctgaaaagatatatggagggtattccaaaggaccaaccgttaggagctgatattgttaagaagtttatgatgcaactttgtaagggtattgcatactgccactcacaccgtattctgcatcgtgatttaaaaccgcagaacttattgattaacaaagatgggaatctaaaactaggtgattttggcttagcgcgtgcttttggtgttccgttgagagcttacacacatgaaattgttactctatggtatagagctccggaggtattactgggtggaaaacaatatagtacaggtgtcgatacatggtccatcggctgtatatttgccgaaatgtgtaacaggaaaccaatcttcagtggcgatagtgagatcgatcagattttcaagatattcagagtattgggaacgccgaatgaagctatatggccagatattgtctacttgcctgatttcaagccaagctttcctcaatggcgcagaaaagacctatcacaagtggtaccaagtctagatccacgcggtattgatttgttggacaaactcctcgcgtatgaccctattaaccggattagcgccagaagagcagccatccacccctacttccaagaatcataa

SEQ ID NO: 75570 - DNA, 1131 bp, Saccharomyces pastorianus
atgaagaaggagttgaaaattcttataatagcgaacattgcattacttatctctataatacattacacatttgatttgttgacgttatgtatagatgatacttccaaagatgcgctaacagatgaacagctgaaccctcccaatggcttcaattcaacattctatgagtctcctcctcaactcataccgaaaatcattcatcaaacctacaaaacaaacgatatcccagaacagtgggtaaaaggaaggcagaagtgcattgatttacatccggattacacttacattttatggacggatgaaatgtctgatactttcattaaacaggaatacccgtggtttcttgacacctttaggagttatgaatatccaattgagagggcggatgcaatacggtatttcatcctttcgcattatggtggtatttacattgacttggatgatggttgtgaaagaaggctagaccctttgttgaaagtaccagcatttctaaggaaaacttcgcctacaggagtgtcaaatgatgtgatgggctctgttccaaggcaccccttcttcttgaaggtcatcaaatcgttgaaacactataagaaaaactggtacattccatatatgacaatcatgggctctacgggccccttattcattagtgtggtttggaagcaatataagagatggtctaatacggccgaaaatggtgcggtaagaattttacaacctgcagattataaaatgcataataattcttttttctcaatatctaaaggttcctcctggcatacgggtgatgccaattttatgaaaactctagagaatcatatcttgtcttgcgtggttaccggattcatttttggctttttcatattatacggtgaatttacattttatacttggctgtgctcgggaccatttaacaacaaacgctattacattcagtggttgagtgacaagttcaagttacacaagtggaaactaacatcgtcctacaagaataaggaaaagaggcggaatcctactcgtcacgaatataattcgaggggtaagagattaagaaaagattctaatatcccctacgacagcgttttccttgatatagaaaagaatcacgcaaaatttaccgacttaacctaa

SEQ ID NO: 75571 - DNA, 1368 bp, Saccharomyces pastorianus
atgttacaaaagctttccatcaccgcattagtcggtttgttttcttcagttgtgtcactcgtgaacgctgattgtacttactctggcggtaattactattgtgctcaaaccgatgccatcatttactctaacgtcggtttatctgctacctaccaagatgtcaccaatatggatgaatcttcttgtgcttgtacccaagctgatttcactgcttctggtagcttggctcccttcaacgaggaactatctgttcatttcaggggcccgatcgagttactacaatttggtgtttactacccaaatggtgaatctaatgctttgaagaaaagatcagagaaacaatcaatcgagtcctgtaaggaaggtgaagctgttgtctccagacataagcatcagcacaagagggatgttgctgttgaatatgttcaagttacttccactgtttacgtcgacagtaatggtcaaacagtcacagccgattccaccaataccgttgtcggtcctgctgttccttcttcttacactaaagtctctactgttttgtccagcagtgctcaagcagttgaaacgagtgaaagccagtcttccatctcttcctctaaaaccacctcttctgctgctgctgcttcatcatcttcgtcatcatcttctaacactaacggtgactggtccagaggttcctactttgtcccaggctctactagcaactgtacattcatgaacaaccaaggggggactgccggttctggtgtctggtcgagttgtttcggtaactccatctcttttgctgcttcagatggtgtttctggtgctgcctccgctcaagcttttggtgatgtcaccattaaatctggtaatgaattcatgattttctctggtgaagaatgttccggtaataacggcgattgtggttattacagagaaggtattcctgcctatcatgggtttggtggggctgataaaattttcgtcttcgaattttctatgccaagtgacaccagcggttctgcctacaatcaagatatgccagctatttggttattgaatgcaaaaatcccaagaaccttgcaatatggtgatgcatcttgttcttgttggaaaactggctgtggtgaaatggatttgttcgaaattttgaccgctggttctgataaattaatctcacacatccatgacggccaagatggtggtactcaagattacttcgagagaccaactgatggtactttaaaggctgccgtaatctttaattcgagtgataaaactattcacattatcgaagtcgacgaaagctttgatgctactttaagcgatgatgtcgttgaccaatggttgagcaagtccggttcttctgcggccttgccatag

SEQ ID NO: 75572 - DNA, 198 bp, Saccharomyces pastorianus
atggccgtacagacaccaaaacaaagactggctaatgccaagtttaacaagaataacgaaaagtatagaaaatacggtaagaagaaggagggcaaaactgagaaaaccgcacctgtgatatccaaaacttggttgggtattcttctgtttcttctcgtaggtggtggtgttttgcaactaatcagctatatcctatga

SEQ ID NO: 75573 - DNA, 1758 bp, Saccharomyces pastorianus
atgctgggccggacactaatcaacaagcatggatttttaattcatcctaggagatttgtacatttaaacgataagtcccttgatggaacatttatactaccttcgaagaaaaatcatatgtatgatgttccaactaatgatccaagcggtatcctgaatgcctcggatatcgatagaatcaataatttgccatttttcgataacaccagtccgacaaaagagacaaatactaaggaaggagcattgttgagcgaaaaattggccagcgttaaagaattatttggagaagaccctgaaaatccttcgtttatcaattacagattccccagaggtctagaaaatccctattttgacattcaagtaaatcagctaaagaaaaaacgattatccgtcacacaattatgcactacgcagaattggtgcgagttaaggaatttctacgacttttattctcaaaatttgtctaaccaactactgaacttaaaatttcaggtgcagaaaggtaaaaagattcataaatcactagaggacgaaacgcatcctgaattaaatcagtataaaagctttacccacaatttccttgcactgacaaaattatctatggatattgataatgatatggatgccctgctagataactggttcaactctatcaatagattggtctctttattcaccaaaggtgacggtcatgcaagagaaatagtttgtcatggcttcattaacttagaagatggcaaactggtagagcatttgctgaacagtgatagcaagacaaaggaaaatgtgattatatcaggtgttattgaccacttaactcttagaaataagcacaatcatcaagtacagaaaggtgcagctcatcttgatacggaatatcagagctggggtaatatcctcactaatttactatcaaatctaaaagaactgaagtcgaataacgagatagttatctctgatatcaaaactaggtcagtaccaaaaataccatctattgagtccgttatagaatcctctaaattacagacaatgtattataagttttttttttcccaccttagtcaagacatgacacaaacctaccatagctttttaatcaatgccaagagaagagggctcgacgttgatgcgcccataaatcctaccaagattttaacattcatactaacaaacccactcttcgctaatgatgtgaagaacctcctgtacggactaccgataaatcatactgctttcgataacgacgccaaaggctctaatacatttgatatggccgcgttcaatgatttgctggatagaggtcccacatcttttaacgttccgattgagcaagacgaagatagttcggagtcaacaaaatgtgtatctttgcgagattatggacatttttatacgaaatggaagacacctctaactttgaaatactttgcggcaaggttatcacagatctattttattgtgggtaatctcgtttcgaatgatttaatgatagaatattattaccataacgataatttccacaatatcatcttcccatatgataccttgaaactgggaacccatgcccatgattctgcaatggtttggtttggtggcagagatatgcatccaattgagcctactcaaaaaaacttcaacacatactgtaagttttgtgactacagacacgtttgttcttggaaaaataaaaatgaattgaaacttattgatctagggaaagaattaaaaaaaattattcttgaatcaagtatgaagtaa

SEQ ID NO: 75574 - DNA, 552 bp, Saccharomyces pastorianus
atgggtaacatttttagttcgatgtttgacaaactatggggttcaaacaaagaattgcgtatattgattctgggtttggatggtgcaggtaaaactaccatcttatatcgtttacaaattggcgaagtagtcactacaaagccaaccattggtttcaatgtagagacgctaagttataaaaacttaaaattgaacgtctgggatcttggtggtcaaacaagtatcaggccctactggaggtgttattatgcagacactgctgcagttattttcgttgttgattcgactgataaagatcgtatgtctacagcctctaaggaacttcatttgatgttacaggaagaagaattgcaagatgcagcactgctggtttttgcaaataaacaagaccaaccgggtgcattaagtgccagtgaagtctccaaagaactgaatcttgtagaattgaaggacagaagttggtctatcgtagcatccagtgcaattaaaggcgaaggtattaccgaaggtttagattggttgattgatgttataaaagaggaacagttatag

SEQ ID NO: 75575 - DNA, 834 bp, Saccharomyces pastorianus
atggcttactctttaacaaggaaattgctgaaggattggaaatattttatgcgccatcctgagaagacccaaggtctttttcatgtaaggccacatgattcagacttacatctttggcacgtggtaatgtacgagcccaggacttctttggaagtatatctactactttatattggcggaaacgaccaggatccatatatcatcatgaaatgcctgtctccaaattgttgctttccaattaacagaacggtttcgatgacacacttaaactatcttttattgaaagacttgggattacaggatttacttttccacatatggcaaccgctttttcatattcaagcaacggaagacttacagtattcaccgtcaacggtaaaattcaacagggcgtggaataggattatatataaggactttaaatcttattttccggaactgataggtacactacaaccaggtgattactctatagtaaagagctattccaaaaatcataatatcagcaatagtaatggtggcagtgtcaatgaatttatgtcctcttacaatgctcaaagccacacctttcacgcacaagacaacagcaagaacccttatactaacagtagcataggaaagtctagtatgttatctactctcaacaataataacgttaacaaaaggacacatgactacaatgctatcgactttatgaccaaaaacttacttgcatgtgatgatgacagtattcatccggtcgtaagttctaaaaggtcaagaacgttggcatgtccagatgaaacgaacgataatcgcggtagtgagcattacacaaagaggaaaaaaatctaa

SEQ ID NO: 75576 - DNA, 1359 bp, Saccharomyces pastorianus
atggtatcagaggataagattgagcaatggaaagccacaaaagtcattggtataattggtctgggtgatatgggcctattatacgctaataaatttacagatgctggatggagtgttatatgttgtgatagggaagaatattatgatgaactgaaagaaaaatatgcctcagctaaattcgaactggtgaaaaatggtcatttggtatccaggcaaagcgactatattatctatagtgttgaagcatccaatattagtaagatcgtcgcaacgtatggaccatcttctaaggttggaacaattgttgggggtcaaacgagttgtaagctgccggaaatcgaggctttcgaaaagtatttacccaaggactgcgacatcattaccgtgcattcccttcatgggcctaaagttaatactgaaggccaaccactagttattatcaatcacagatcacagtacccagaatcttttgagttcgttaattctgttatggcatgtttgaaaagtaagcaagtttatttgacatatgaagagcatgacaagattaccgctgatacacaagctgtgacacatgctgctttcttaagtatgggatctgcgtgggcaaagataaagatttatccttggactctgggtgtaaacaaatggtacggtggcctagaaaatgtgaaagttaatatatcactaagaatctattcgaacaagtggcatgtttacgcaggattagccataacaaacccaagtgcacatcagcaaattcttcaatatgcaaccagtgcaacagaactatttagtttaatgatagataacaaagaacaagaacttactgatagactattaaaagctaagcaatttgtatttggaaagcatactggtctcttactattggatgacacgattttagagaaatattcgctatcaaaaagcagcattggtaacagcaacaattgcaagccagtgccgaattcacatttatcattgttggcgattgttgattcgtggtttcaacttggtattgatccatatgatcatatgatttgttcgacgccattattcagaatattcctgggtgtgtccgaatatctttttttaaaacctggcttattagaacagacaattgatgcagctatccatgataaatcattcataaaagatgatttagaatttgttatttcggctagagaatggagctcggttgtttcttttgccaattttgatatatacaaaaagcaatttcagagtgttcaaaagttctttgagccaatgcttccagaggctaatctcattggcaacgagatgataaaaaccattctgagtcattctagtgaccgttcggccgctgaacaaagaaatacataa

SEQ ID NO: 75577 - DNA, 1242 bp, Saccharomyces pastorianus
atggacacaaattctaaaaccaaagtacaaactgaaaataaaaaaattaaggcgaaatttatacataatcatgggcaaaagccctctcttatccaaattacacctccaatgatttccagcactctgtttcacgcatatccactactactaatattcgacaatgccttagcgaatataatgtggctgtccgacgataaatgtttaacattcatttatctaacgagcatatggctgaccataagtttttttatccccgttgaaacagaggctagccattttctgccatttacaaagattttgagactatggttaggcattataagcggggcatttctattcttatcattcatgtattatattgtttcattgatagcttcgttaagagacacggaacctcctacattggatgaaattgtcgtgctactagagtctgtgttggataaactggaagtactgagaaacgagctgaatgtttggaaaaaattaaagctttcatttgatggcgtcaataaggagtgttctggcaagaggttgttttgcagattattcttattcggtacaatttttcaaattattatcatgagatacatatcaccgggaacttatactagattttttattattaccggcttgatatacaatacgagtagttttcaagctaccttaaggctactttggaggtttactgctgttaggaatttctattatttggggattgaaagttttaaaatttcgagtttcttaccaaaacacttaaagatggaacaaattattcctttatctcaaggacgtgcaatcacggtgccactggtagaggtattgcctaaactacttcgggacaagaagggtgatgaccacattcatattctacagcttctacttaatgagcaaaaagataactttggtaatgaagaccttaaaatactagaaattgaagtatacgaaaatcaaagaaggtggtatcaaaataaaaattggagtacaaaattactgccgtacgaaagacaaaactactgcatagaaattaaaaacactgatggaactttaaccatgaggagttgtttgcccccagatgaacttggtgaagaagaattacccaataattggcattggatcaatgataattgggacggaactgattggatatattcagattcagcatggaaagaaattggacaatacagttctttggaaagttttaccaggtcaagaaaatggaaacgacgcctcttccatttgtaa

SEQ ID NO: 75578 - DNA, 2082 bp, Saccharomyces pastorianus
atgagcactccatttggcttagatttaggtaacaataactcagtactggcagttgccagaaataggggtattgatgtcgttgtcaatgaagtttctaataggtctacaccatccttggtcggctttggccccagaaataggtacttaggtgaatctggtaaaactaagcaaacatcgaatgttaaaaacactgtggaaaacttgaaaagaattattggactaaagttcaaagaccctgaatttgatatcgagaataagttcttcacttcgaaattggtacagctaaaaaatggtaaagttggtgtggaagtcgagttcggcggtaaaacacacgtattttcagctactcaactgactgctatgttcattgataaggtgaagcacaccgttcaagaggaaacgaagtcatcaattaccgatgtctgcctcgcagttcctgtatggtattcggaagaacaacgttataacatagctgatgctgccagaattgcaggattaaatcctgtaaggattgtcaacgatgtgactgcagccgctgtttcgtacggcgtcttcaagaatgatctgcctggttttgaagaaaagccaagaatcattggcttagtggacattgggcattctacctacacctgttctattatggctttccgcaaaggcgaaatgaaagtattaggtactgcttatgacaagcactttggtggtagagatttcgatcgcgcaatcacagaacattttgctgatcagtttaaggacaagtacaagattgacattaggaaaaatccgaaagcttataacagaattttaatcgctgctgaaaaattaaaaaaagtgctttctgcgaacactactgcccccttctccgttgaatctgttatggatgatatcgacgtttcctctcaattgagccgtgaagagctggaagaattagtagagcccttgttgaagcgtgtgacgtatccaatcaccaatgcattggctcaagctaaattaactgtcaatgatattgacttcgtagaaataattggtggtacaacacgtatcccagttttaaagaagtcaatttctgatgtttttggaaaacctttgtcatctactttaaatcaagacgaagctgtggccaagggggccgctttcatatgtgccattcactctccaactttaagggtcaggccgtttaaatttgaagatattgatccgtattcagtgtcatacacttgggataagcaggtcgatgacgaagaccgtttggaagtattccctgctaattcatcatatccatcaactaaactaattactttacatcgtactggagatttcagcatgaaagcggtgtacactcatccttcgaaactgccaaaaggtacttccaccactattgcaaaatggagcttcactggggtcaaggttcctaaagatcaagattttattcctgtaaaggtccagttaagatgcgatccttccggcttgcatattatcgagaacgcttacacaacggaagatattacggttcaagagccagtgcctttaccggaagacgcaccagaagatgccgagccccagtttaaagaagttactaaaacaattaagaaagatgtgctaggtatgactgcaaaaacattcgcgctaaacccggttgagttgaacgatctaattgaaaaagagaatgaattaagaaaccaggataagttagttgccgaaaccgaggatcgcaaaaatgcccttgaagagtatatttatacccttcgtgccaaactcgatgatgaatactccgattttgcgtctgacgcagaaaaagaaaagctaaaaaacatgttagccactactgaaaattggttatatggtgatggtgacgattctaccaaggcaaaatacattgctaaatatgaggagctggcatcgttggggaatattattagaggtagatatttagcaaaggaggaagaaaaaagacaagcactcagagcgaatcaagaaacttctaaaatgaatgatattgctgaaaaattggctgagcaaagaagggcacgcgctgcaagtgatgatagcgatgacaacaatgatgaaaacatagaccttgattaa

SEQ ID NO: 75579 - DNA, 1743 bp, Saccharomyces pastorianus
atgcttatcagatttagatcaaaaaacggtacacacagggtttcttgtcaagaaaacgaccttttcggaacggtcattgaaaagttggtgggtaatctggaccccaatgccgatgtcgacacatttactgtttgtgagaagcccggtcaaggtattcatgctgtttctgaactagctgatcgaacagtgatggatctaggactaaagcacggtgacatgctgatccttaactattcggacaagcccgctaatgagaaagatggtgtcaatgttgaaatcggatccgtaggtattgacagcaagggaattcgtcaacacaggtacggtccactaaggatcaaagaactcgctgtagatgaggaactagagaaagaggacggattaattcctcgtcaaaaatcaaaactatgcaagcacggtgatagaggtatgtgtgaatactgctcgcctttacctccttgggacaaagaatatcatgagaagaataagatcaaacatatatcgtttcattcatatcttaaaaagctaaatgaaaatgctaataagaaggagaacggcagctcttatatttcccctctttcagaacctgattttagaatcaataagcgttgccataatggccatgaaccatggcctcgggggatatgttctaaatgtcaaccatcggcgattacattacaacagcaagaatttagaatggttgaccacgttgaatttcagaagagtgaaataattaatgaatttattcaggcgtggaggtacacgggtatgcaaagatttggctatatgtacggatcttattctaagtatgataacacacctttaggtataaaggccgtcgttgaggcgatatacgagccccctcagcatgatgagcaagacggtttaaccatggacgtagaacaggtcaagaatgaaatgctacagattgatagacaggctcaagaaatggggctttcgcgaattggcctaatatttacagatttatctgacgcgggagctggggatgggtctgttttttgcaaaagacataaggattcgttttttctttcatcattagaagttattatggctgctaggcatcaaacagggcatcctaatgtaagcaagtatagtgaacaaggttttttctcttccaagtttgtaacttgcgttatatcaggtaatttggaaggtgaaattgatatttcgagctaccaagtatccacagaagctgaagcattggttactgcagatatgataagtgggtccacatttccttcaatggcatatattaatgacactacagatgaaagatatgtacctgagatattttacatgaagtcgaatgaatatggtataacagtgaaggaaaatgcgaagcctgcatttccagtagactatcttttagtgacgctgactcatgggttcccgaataccgatacggaaaccaactcgaaattcgttagttccaccggatttccatggagcaatcgacaagctatggggcaatctcaagattatcaagaattaaaaaagtatttattcaatgtggcttcaagtggagatttcaatcttttgcatgaaaaaatctcgaactttcatttactattatacataaattctctgcagatactctctccagacgaatggaagttactaatagaatctgccgtgaaaaatgaatgggaagaatctctactaaaacttgtctcatcggctggttggcaaacgttagtcatgatccttcaggaaagcggctag

SEQ ID NO: 75580 - DNA, 621 bp, Saccharomyces pastorianus
atgtccgaatttaatgaaacaaaattctccaacaacgggacgttttttgaaacggaagagccaattgtggagacgaaatcaatctccgtttataccccactcatatatgtctttattctggtggtgtcccttgtgatgtttgcttcaagctacagaaagaagcaggccaaaaaaattagtgagcaaccatccatatttgacgaaaacgatgcccatgatctgtatttccaaataaaggaaatgagtgaaaatgaaaaaattcacgagaaggtgttgaaggccgctttattgaacagaggagcagaatctgttagacgatcattaaagttaaaagagttggctcctcagataaaccttctatataaaaatggctctattggggaggattactggaagagatttgaaactgaagttaaattaattgaattggaatttaaagatactttacaagaagctgaaagattgcaaccgggctgggttcaattgttcgttatggtttgtaaagaaatttgctttaatcaagctctctctagacgttatcaatcaatcttgaaacggaaagaagtgtgtattaaagagtgggagctgaagataaataatgatggaagattagtcaattag

SEQ ID NO: 75581 - DNA, 2373 bp, Saccharomyces pastorianus
atgggccttttaaaacttttcacaatactacaaataccgacacacgcagttcagtggcctctccgagttcatcatttccattcgtactccttgagcttttaccttccttcctcctcccctatatactcaacttctcagcccacatcaataatgatagcaccagactcacaaagattattcggttcctttgatgaacagttcaaggacttaaaactagattcagtcgatacagaaaacaataacacacacggtgtttctactatcctggattcctcccctgcgagcgttaataacaatacaaacggtactgttgctgcaagcgtgaatacagtccctggatctacgtttagatccaatacacctcttttaggaggtcgacatccactcagtaggacgtcttccttaatcgattctattggtatacagcgtgcggcgtcaccattttcttctatgaaagagccttttattcctcaaagttcgggagtaatgagttcctctttttggcacggcgaccatcctgaatcacgggttagtacgcctgttcagcagcatccactattgcaaagaaacgagtcctcctcctcctttagttatgccgcaaatcttggagtgaatctgagtacacattcattggcggtagatattactccagtaggtacaccaactgctgcccaatctcatgtcaatttgtttccgtcctctgatattcctccaaatatgagcatgaacggaatgtcacaactcccagcaccagtttcagttgaatccagttggagatacatagacacgcagggacagatacatggtccatttactacccaaatgatgtcacaatggtacataggtggctattttgcttcaacccttcagatttcaagattgggaagcactccagaaacgctaggaataaacgatattttcatcacacttggtgagttaatgactaagctcgagaagtatgagacggatccattcactacttttgacaaacttcacgttcaaacaaccagctctggttctatcaacttgaatctagctccttacgcaagcggtgttgccgctactggcactattaaagctactgaaaacgatattttcaagccattgacacatgacaatatctgggatatggatggaggtaccacctccaaaggagtcgatattaaattagcctcagcaaccaccattagtcaaacagatgaatctcacaagcaagaatacaaatcgaccactatgctggaaaaagggaagaaggaaaaatcagaatctgtagcaaaagcgttattggatgaacaagagaaacggaacagagaactcaaaaggaaggaagaagctcgcttatcgaagaaacaaaagcaaaaagaggatgatttattgaagaaacaaaaggaacaaaaggaacaaaaggaaaaagaagctttggaagcagaaaagcaaaaaaaatcagaaaagacaaaaaaggacatacaaacacaaacagaaggctttaagacatcaaaagatttgccttcattaaattcctcaagcgcgaatccggcaccatgggcctcaaaagtcaaagttaataatgcaatcgaaacttcaatcaaaaatggtgtaagtggcactggaaagaagaaaggagaacccttaggtctacaacagaggaacagcaaagaagaaaagcaaaaggaggaactaaaatccgtgcttaactgggctaacaagtccagcctaccatcgaatcaaactattgatattaaatctcagtttcaaaaaagcccaaaagggatgaaagagtcgtctccgttaaaggagttggaagatccaaatttcatagaagagcagaaaaaactatgggaaaaggttcagagttcttccaaacaagtaaagtccgcaccctctgcatctactaccacatcttcttggactacggtgacttctaaagggaaagcacctataggaaccgttgtctccccatattcaaaaaccaataccagtttaaattcttcattaacggcaaaaactagcacaacttctaccaccactacctttgctagcatgaacaatgtttctccccggcaagaatttatcaaatggtgtaaatcacagatgaaattaaattctggaataacaaataacaatgtcttagaactattattgagtttacctacggggccagaatctaaagaattgattcaagaaacaatttatgccaatagtgacgttatggatggtagaagatttgccactgaatttattaaaagacgtgttgcgtgcgaaaaacaaggtgatgatccactaagttggaatgaagcgctagctctatcaggcaatgatgacgacggctgggaattccaagtagtgagcaagaagaagggtagaaaacactga

SEQ ID NO: 75582 - DNA, 315 bp, Saccharomyces pastorianus
atgatttccacagaaaaatcatccgatgcagtagctatgcactgtccatctggagaccagcataactctgagaaaggcctggcatgtgatgtgactagtgtttgtgatacagttcgtctgttaatgtcgtatatcaggatgttaagtccttgtgttatagcaagaaactgcccatcaggagaaattttcgcacaggtagctttcaatccattctgtgtttccacaggagtaacaaactggaacatgctagcatataatggccacttgcaaatgaatgtgcctacgctcaaactttccaatatctaccgccagtga

SEQ ID NO: 75583 - DNA, 948 bp, Saccharomyces pastorianus
atgttccagtttgttactcctgtggaaacacagaatggattgaaagctacctgtgcgaaaatttctcctgatgggcagtttcttgctataacacaaggacttaacatcctgatatacgacattaacagacgaactgtatcacaaacactagtcacatcacatgccaggcctttctcagagttatgctggtctccagatggacagtgcatagctactgcatcggatgatttttctgtggaaatcattcatttatcttatgggctgctgcacacttttatcggccatacagcgccagtgatatctctgacattcaatagaaaggggaacttgctgtttacatcctcaatggacgaaagtatcaaaatatgggacacactgaacgggtctttgatgaaaacgatatctgcacactcagaagcagttgtgtcggtggacgtacccatgaatgattcatccattctgagttcaggttcatatgacgggctcatacggatctttgatgcagagacgggccattgtttgaagacattgacctatgacaaggattggaaaagagaaaatggtgtggtacccatctcccaagttaagttttctgagaatgcaagatatctcctggtgaaatcgctggacggtgtagtgaaaatatgggattgcatcgggggttgtgtagttcgtactttccaggttcagccccttgaaaagggcgtactgcatcattcctgcggtatggacttcttaaatcctgaagatggatccactcctttggtgatcagcggttatgaaaatggcgatatatattgttggaattctgatacaaaaagcctcttacagttgctcgatggttctttatatcatcacaacagccctgtaatgagcatacattgcttcggtaatataatgtgttcccttgcattgaatggagattgctgtttatggagatgggtttaa

SEQ ID NO: 75584 - DNA, 939 bp, Saccharomyces pastorianus
atgaatataatgaaaagacaattatgcacctcctctaagcgatttttttctacagcaaaaaacgttgtcaaatataatacgattcaggatatcaggaacaaatatgttactggtacgcctttgtcgatgtgtactgcgtatgacttcattactgcaacatgggttaacaaggctaattgtgatttactcttaatcggagattctttggcgatgacttcattggggtacgatagcacaattacactatccttgaatgagtttaaacatcatgttgcctctgtgtgcagagctgaaggttcttccatggtagtggtagacatgccattcggtacgtttgaatcgggcatatctgatggcttgaagaatgccatagatatcatgaaattggacagtaaagtcacctcagtcaaagttgaagtcggttcttacaccaaagacaaatatgcaatgaaatttattgaagaactgtgctcccggggtatacctgttatggctcatataggactaactccccaaaaagttcattcacttggaggttataaagtgcaaggtagcaaaagtctattacaaatgcaggagctgtatgaaaccgccatgcaactacaaaaaattggctgttggtctatcctgattgaatgtgtcccccataagatggctcagttcataacatctaaactttcagtaccaacaataggtatcggtgcaggtaacggtaccagtggacaagttctagttatatctgaccttctcgggatgcaaggcgattctgtcccaaaatttgtgaagcaagctgtaaatatgacagatattgccactcagggcttgaaggagtacattgcaagtgtagaggataggacatttcctgagagaggtactcatactttcaaagttaaggaggacttatggaatgaattcctctcttcaattaacgaaaagtaa

SEQ ID NO: 75585 - DNA, 1356 bp, Saccharomyces pastorianus
atgtcagaagtttccaaatggccagcaattaacccattccattggggatacaatggtacagtttcgcatattgtcggtgaaaatggttccattaaactccatttaaaagacaacaaggagcaagttgattttgacgagttcgctaacaaatatgtcccaacgttgaagaatggtgcccaattcaaattgagtccttacttgttcacaggtattttgcaaactttgtacttaggtgctgctgatttctctaagaaatttcctgtattctacggcagggaaattgtcaaattctcggatggtggagtttgcaccgctgactggctcatagattcatggaaaaaggattataaattcgatcaaagtactacgagctttgataaaaaaaaatttgatgaagacgagaaggcgacacatccagaaggatggcctcgtttacaaccacgtacaaggtacctgaaagataatgagttggaagaactacgggaggttgatctacccctagtagttattctacatggtcttgctggtggtagtcatgagccgattataagatctcttgctgaaaacctgtctcgcagtgggagatttcaagtagtcgtcctaaataccagaggttgtgcacgttccaaaattaccaccagaaatttatttacggcttatcacacaatggatattcgcgagtttttgcaaagagaaaagcaaagacatccagatagaaaactatacgctgtgggatgctcttttggtgctacgatgctggcaaactatctgggagaagagggcgataaatcacctttatccgcagctgctactttgtgcaatccttgggatcttctcctttcagcaattaggatgagccaggattggtggtcaagaactttattttccaaaaatattgcgcaattcttaacaagaaccgttcaggttaatatgggtgaattaggagttccaaatggctctctccccgatcatcctcccacagtcaagaatccatctttctatatgttcacgcctgaaaatctaataaaggcaaagagctttaaatcgacccgggaatttgatgaagtgtatactgcgcctgctttaggcttcccaaatgctatggagtattataaagcggccagctcaataaacagagttgatacaattcaggttcctacccttgttatcaattccagggatgatcctgttgtcggcccagatcaaccatactcaatcgtggaaaagaatcctcgtattttgtattgtagaaccgatttaggtggtcatttagcttacctagataaagacaacaactcgtgggctaccaaggcaattgcagaatttttcactaagtttgatgaattagtcgtatga

SEQ ID NO: 75586 - DNA, 2568 bp, Saccharomyces pastorianus
atgtctgaaggaaaacaacaattcaaagacagcaataaaccgcacaaggactccacagatcaggacgatgatgccgccacaatagtaccacaaactcttacttactcacgcaacgaaggtcattttttaggcagtaatttccatggagtaactgatgaccgtaccactttgtttgatggtgaagaggggcgtagggaggatgatttgttgccctcattgcgttcctccaactcaaaagcacacttaatttcttcacaacttagccagtggaattataacaacaatagagtacttttaaaaagatctatattaaagacacaagcttttatggatcaacttcaagaagaaaataatattcgcccgatttttattgctgcaaatgatgaacgggaaaaattacatgttctacaactgaatatcaagctagatggtcagtacaataccaaagaaaagaacggtttcaacattgagaaaaaagctttatcaaaattatttcactctcagatcgtatcagtgacaaatcatttaaacgctttgaaaaaaagagtggatgacgtttcatctaaagtattcatcacaggtgatgtaaatactggtaaatcagctctttgcaactctctattaaagcagcgtttgctacctgaggatcagctaccatgtaccaatgtattttccgaaatactagaggctcgggaaaatgacggcatagaggaggttcatgccataccactaaacattgctccgacgctcaaggaagccattgatatgtattcaatacaaaatccgaaaacttatgaaatacacactttgaaagaacttcccgatttggttccccaaaacggaaaatatgctttactgaagatttacataaaggacgataaaaggcctgcctctactagtctattaaggaatggtactgttgatatttcattgattgactcccctgggttgaacatggactcgttacaaaccgccgaagtaatgtcccgacaagaagaaatcgacttagttatatttgttgtcaacgcagagaaccagctaacactatctgccaaggagtttatttctttagcatctcgtgagaaaaaattaatgttttttgttgtgaaaaaatttgacaaaatcagggacaaacaacgttgtaaggagttgatcctaaagcaaatccgtgacctgtccccagaaacatataaacgtgcagctgattttgtccactttgtttccaaaaacggagatgaattgccacattatcataatgaaaatgacaatgaagatcatggtgacggaaaacctgacgacgacccatattctagcagcgatcccgatccggattttgacagtctggaagattctctacgcaattttgttttgaagaaaagatcactttctaaattgttacctgccaagacttatctatcgaaattattaagcgatataataatgatctccaaatctaatatgaaaatgtatagtgaagaagaaataaaaattaacgaacaactggaaacattgagacctgaaattttgagcgctagagcaaagtgcaatgatttaacaacttccgttgatcaaatggccgagcaaacaattacaatgacttataacaatactaaagaagcacttctcaatgcgttggatgttccgctacacgaatatccgaaatatcagggcctcggtcaaatatatgacttcatattttcaacagaagcattcatagcaaatcagattgatgagtcaataggatcaagtgaattatttgccaagcaaaagacagatttactggtaaaaaaaatttatgagattggaaaaaatgaacttggtgatgatttcatgtgtgaacgtgttttcagaagcgaactaatgtttagaaaaaggaagcatttgataggaaaaaggcttaaagtatctttgtcaataactgatttgtttgctccaacttggaaaggctttttgtcttacttaagctggcagaaacctgtcacagaaccactgccggatatagaaggacaaactaacgagggtcagattggcctaatgaagtatttgggtttgaaaaattatcctttgacacaatattggtcaagaccatcattgctcttcacatcaaaaattcccactctaacgctgtactttctaggaagtacaaaggtagtagggaacattatattaaacggcattaaattatcgtcgtggagctcactcaagaagttatcagttccggttatagtggtaggttccttgttgggacttacgtatttaatccatgacctcccccgtgccttaccaatgaatctttccattaaatacaaaagaaagttgcaagaactggattacattcatcttaacgctcaaagaacctcaaatgaagtacgtgatgttttgcgtgtacctacacgtgaaattctaaggtcgtgtgaaataattatggataaaaaacaaatcactaagaaagaattggaaaacaaaaaagaaagtaacttgttgtcaatcaaattcttccaatctctatacgaaggaaccgtggctcaaaaattgatggtggaagaaataaatttagacatcgattag

SEQ ID NO: 75587 - DNA, 1719 bp, Saccharomyces pastorianus
atgggaagtgaaccgtttcagaaaaagaatttgggtctgcaaattaattcgcaagaaagtggaacaacccgctcaacatttcattcgctagaagatttaggagatgatgtaattaatgaaagctgggatcgtgtgaaccaaaagagagccaatacagatcatgatgtctttcatgagcaccctgactcttccccatcattatcagcacagaaagcaaaaacaaaagaagaggaagttgctgtaaagtcatcgaactcccagtcaagagacccttctcctgatactcaagcacatattccatatacttatttttccaaggatcaaagactaatcatttttggaattatcatttttataggatttttgggcccgatgtctggaaacatatatataccggctttaccattgctgcaaagggaatatgatgtaagtgcaacaacaataaacgctacagtttctgtatttatggctgttttttccgttggtccattgttttggggctcactggcggattttggtggaaggaaattcttatatatggtgtcgttatcactaatgttaattgttaatatacttttggccgctgtaccagtcaatattgctgccctttttgttttaagaattttccaagctttcgcttccagctctgtgatttctctgggagctggcactgtaacagacgttgttcctccaaaacacaggggaaaggccatagcgtatttcatgatgggtccaaacatgggtcctattatagcacccattgttgctgggcttattttaatgaaaggaaattactggagatggctttttggtttcacttctatcatgacaggaatagcattgatcttggttactgctttacttccagaaacgctacgttgtataattggtaatggagaccctaaatggggtggcaaaaaagatgaacgtgaaaataacgaatctccattcttcgaaggtaataaaatatcacatcggcgtctgttcccagacattggtattcgtaaaccagtcaataatgatgctttcttccaagaaaattttccaaagccgcctaaagcaggtttgacactatattggaaaatgattaaatgtcctccaataataatcacatctgtcagtactgcactcctgttctccagttactatgcgttcagtgtcacgttttcgtattaccttgaacatgactactgttttactatgttagaaattggtgctgcttatgtctgcccaggtgtagccatgttactaggatctcaatctggtgggcacctctcagattatcttcgttcacgctggatcaaaagtcatcctaaaaagaaattcccggcagagtttcgtttattactgaacctaattggaattttactaacaatatgtggcacaataggatacggatgggcaatcttctttcattatcattttgtggttcttttagttttttccgctctcactgcctttggtatgacctggtgcagcaacacatcaatgacatatttaactgagttactccccaaaagagctgctggaactgttgctgttagcagtttctttcgaaatgtgggcgctgccattagttccgttatcattttacagctctgtaacgcaatgggaattggatggtgttttacagggctaggtctctgcagttcaatttcattgattggtatattatatcttctcatttttcaaagaaaatatactgccaaagaattttaa

SEQ ID NO: 75588 - DNA, 1359 bp, Saccharomyces pastorianus
atgggtagaagaaaaattgaaattgaacctatcaaagatgatagaaatcgtacagttactttcataaagcgaaaagcaggactgtttaaaaaggctcatgaattgtcagtactttgccaagtagacattgctgtcattattttaggatccaataatacattctacgaatactcttctgttgatatgagtaacctgcttaatgttcatcaaaacaacactgatcttcctcataatatcatagaaccatctgattatggtgactatgtgaaaaaaccacgtgttgttctgaatgaaaggaagcgcaggcgaagaagagcaaccgtgttgcaaccagcttcccattctgggagttgtacagtttcgagtcaagacccctccagtgtacaaaacaatgggaatttaagcgctccgttggcgtcaaatgacgccgggaacgctggtgtaagtacaccattggtgcattgccacggagcaatatcacgtagcggatccaatcattctgactgtacaagaaatagtgcagattatcaaatgttgcaaggcggtttaaattctggtgggagtttacatgctaatgattataaagaaagcgtagaccaacagcatgttgcaaacgaggctattcataggaattttatgaacaagcggattaggccggatactcatttactactttctgaatctaaccactctaattatcataatttttacccgtcaccttacgagaatttgccaaagccttcattgcctgcaagtttagtgggcaatattccatcctttcaatcgcaatttgtacaggttattccggcaaatagtaacccaatgggaaaaggatttaatggcacgggtgacagcgaaagctttgaagcaaagcaaaagatacacccgacagttgctatatcaaatactttggaaggtccagctccagtgcaggcgatggtccatcacctgcaccaactgaacagcaatagaggaaagctctcagggaagccatatttaaagctaaatattccgaaggccacaaatgacgcttgccagaggtcgccagcaatgtattcaggaactgcatcaccgaaaacggatgtacaagccactcccaatcaaatgctcgccagcaacatgtcctcccctctttctcgttcaaaatttttgggattcaagaacaatgatatggacgacttatatcataatggccgatgtggcagcacttatgtaaataacaaaacattctttctgaaaccgccaattggaagaccgcctaaatttccgaaaagcccgtcttcatctattgtggtttttccttcctcggtagctagttcaactttgaaatccacgagttcgacaaactctccagattaa

SEQ ID NO: 75589 - DNA, 951 bp, Saccharomyces pastorianus
atgggaatatttcgttggaactatccagagagttctgtccccggcgtttggggagaaacaacttccactattgactggtgtgaggagaactatgtcgtttctccttatattgccgagtggtcaaacactttaactaacagcgtattcatactgtcagcgatttacacaacttactctgcttacaagaataaattagaaaaaaggtttttacttattggcttcgggtacggtttggtcggagtaggatcatggctatttcatatgacactgaagtatagattccaactattggatgaacttccaatgatatacgccatgtgcattccgacatggagtttagtatgcgaggccaaagaggcattacttaacggagataatcacaagaaggttcctctatttgaacagatgttcatcggcgtaattatcggcctggccgttacaacagcaagcatactctacgttatttacaaaaatgtcgatatccatcaaattttgtttggcgtacagattgtagttgtggctgctactgcaggaagtttaacgtacagatacgtccatgatccactagctaaaagaaatctcaaggcttcaatggcgctcggcgcaattttgttcttatctggctacatttcgtggctacttgatatacactattgttcgttctgggtgcacgttagaagaagtattttggctttaccacttggtgtactgcttgaaccacacggatggtggcatatattaactggtatggggatttatttctacattgtttctttggaacatttaagggtcattacgctcaacgtcagctgcaattaccagttcatctggagatggaaagtcttccctgaactgatatggaaagggcgcaaaccctcaacaagatattcacttgaactatttggcccatacgtagaagatcaatcaattgaagttaaaaaggagaagtaa

SEQ ID NO: 75590 - DNA, 837 bp, Saccharomyces pastorianus
atgagtgtattaagatctacatgccttttcttccctccaagatccttgttgatatcatttaacaagcggcgattattttcaacttcgaggctaattttgaataaagaaagtgaaattacaaagaagaaagataaaagtaagcagcaagattttaatcctcggcacctgggtgttgctgccgaaatatttatcccctcggcttacaagaaccttccaaatgtatttgcccatcctctcattgttgcaaatgcattgatcagaagactttacacatttggtttgaactctgttcaagtcgcattgtttcgttttcaatcaggcattaaaccttcttttttactctggaaaaacaaagccatagagacgtatatcaatgtaaacacgtcgtttgctcataaaaatttgtcggacatcaaagggttagtttcattatgggttcaggaagctctcgaggctaggtcccgtcaacttccaggtaatgcaacactggactggcagttgataaagtttaatgcagttcctaaactagtctcagtgcaaccaatcatgattcccggaatgccgttagagcatttacagttggtttacaaatttgatacgaagcaaagactaattaaagtcaatcagcaaactaagaagactgagacgttagaccgtgacgttgtagactatattgcctttttgtgtgatgctacaactaatgatatgattttaatgggatctttgtttgaaagtaaaccaaatgataaattaccgaaaagctacgaggacgatgctaaagttgccatacacagaatgaaagttaacggagatatatatcgtttacctccaagctaa

SEQ ID NO: 75591 - DNA, 1134 bp, Saccharomyces pastorianus
atgcctaaaaaatccatagaagaatgggaagaggatgccattgaatcagttccgtatttagcaagtgatgaaaagggctctaattataaggaagctacacaaattccactaaatttgaagcaatctgaaattgaaaatcatccaacagtaaaaccatgggttcattttgttgctgggggtattggaggaatggcgggtgcagttgttacgtgtccatttgatttggtgaagacccgattacaaagtgatatatttttgaaagcatacaaatcacaagctgttaatatcagtaaaggatctactcgtccaaagagtattaattatgtcattcaagcaggaacccatttcaaggaaacactgggaatcataggcaatgtgtacaaacaagagggttttagaagcttgtttaagggtttgggccccaatttagtcggggttattccagcaagaagtattaatttttttacctatggaactactaaagatatgtatgctaaagcgttcaataatggccaagaaacacctatgattcatctgatggctgctgcaaccgcaggttgggcaacggcgacggcaaccaatcctatttggttgattaaaacaagagtacagcttgataaagctgggaaaacatcggtccgacagtacaagaactcttgggattgcttgaaaagtgttataagaaatgagggtttcaccggcttgtacaaagggttgagtgcctcttatttgggttctgttgaaggtatacttcaatggctattatatgaacaaatgaagcggttaataaaggaaaggtctattgagaaatttggatatcaagccgaaggtacaaaaagcacatcagagaaagtcaaggagtggtgtcaaagatcaggaagcgctggtcttgcaaaatttgtggctagtatagcaacatatccgcacgaagttgtcaggacgagattgagacaaacgcccaaggaaaatggtaaacgaaagtatacaggtttagtacaaagtttcaaagttataattaaagaagagggactcttttcaatgtatagtgggttgaccccgcatttgatgagaacagttccgaacagtataattatgtttggtacatgggaaattgttataaggctactatcgtag

SEQ ID NO: 75592 - DNA, 672 bp, Saccharomyces pastorianus
atgtcacaatctactgcatcactggtaccagagggcaatcaaggctccctccaagaagatgttagttttgatttcaatggtgtacctggccaggctttagatgccgtgcgcatgcgtttggctcaattaactcattcattgaggagaatcagagacgaaatgtccaaagccgaactgccacaatggtatacactccaatcacaactaaatgtcacattatcccagctcgtttctgtaacctccactctacaacatttccaagaaactttagactctacagtggtttaccctttgcctaaattcccaaccacctctcatgaaagtttggtcactacccttttgaggaagaagaatatccctgaagtggacgaatggatgaaatatgttagggaaacatctggagtaactacagccttgctaaaggatgaagaaatagaaaagctgctgcaacaggacagagaaataacgaattgggcgcgcactacgtttagaaacgaatatggaaagcacgatttcaaaaatgaagaatccctaagcgaagaacacgcttcacttctagtacgagatagcaaaccttcgaaacctttcaatgtggatgatgttctaaagttcaccttcacaggggaaaagcccattattacgggatctactccaacatcatctagtaattga

SEQ ID NO: 75593 - DNA, 372 bp, Saccharomyces pastorianus
atggatcgaaagaaggacccaagtaataacttaacagaaagaagggtttccaaggttcaacgcccaaataagaaaaaggtacgaaatcaagttgaatcactttctagaaacctagagagaaataaagagggacagcttctgcagactgtatcaaaaggtcatttagaagctgattctggacactcactgggtcgtgaaaaagagaacggtgaactcggtataagaagtatattttacgataaagactggaatccaaggggcactgcaccatcacattacagaaatataccttataatcctgccactttcaaaaggcgaactgaagttcaagccagactaggaaacctcgagaatatcaaaataccaaagtga

SEQ ID NO: 75594 - DNA, 1269 bp, Saccharomyces pastorianus
atgaatcagtgcgcgaaggacataactcatgaagcctccagtatacccatcgatttgcaagaaagatactcgcactggaagaaaaacactaaactactttatgattacctaaacacgaattcaacaaagtggccgtccttaacgtgccagttctttcctgatttagataccacttcggatgagcatcgcatcttgttatcctcatttacatcttcccaaaaacctgaagatgagaccatatatattagcaaaatatccacgttgggtcatataaaatggtcatctttaaataatttcgaaatggacgaaatggaattcaaaccggagaactcgacaaggtttccctccaaacacttagtaaatgacatcagtattttcttcccaaacggggaatgcaatagggcaagatatttgcctcaaaatccagatattatagccggcgcctcttcagatggtgcaatctacatattcgatagaacaaaacacggctctactagaataagacagtccaaaatttcacatccctttgagacaaagctgtttggttcacatggtgttattcaagacgtggaggcaatggatacttcttcggcagatataaatgaggcgacttctttagcctggaacttgcagcaggaggcccttttactgtcttctcactccaacggccaagttcaagtttgggacgttaaacaatattcgcatgagaaccctataatagatttacccttagtgtcaataaacagcgacggaacagcggtgaatgatgtaacttggatgccaacacacgattccctctttgctgcttgtactgaaggaaatgcggtctcactattagatctgaggactaagaaagagaagctccagagtaaccgtgaaaaacacgatggtggagtaaactcctgtagatttaactataagaactctttaattctagcatctgcagattcaaatgggaggctaaatttatgggatattagaaacatgaacaaaagcccaatcgctaccatggagcacggtacttccgtttcaactttagaatggagtccaaatttcgatactgtattggcaacggctggccaagaggatgggttagtcaagctatgggatacctcctgcgaagaaactatatttacccatggtggtcatatgctcggtgtgaacgacatttcgtgggacgctcatgacccttggttaatgtgcagtgtggcaaatgataattcagttcacatatggaaacctgcaggaaaccttgttggacattcgtga

SEQ ID NO: 75595 - DNA, 1665 bp, Saccharomyces pastorianus
atgtccaataactcattcactaacttcaaactggccactgaattgccagcctggtctaagttgcaaaaaatttatgaatctcaaggtaagactttgtctgtcaagcaagaattccaaaaagatgccaagcgttttgaaaaattgaacaagactttcaccaactatgatggttccaaaatcttgttcgactactcaaagaacttggtcaacgatgaaatcattgctgcattgattgaactggccaaggaggctaacgtcaccggtttgagagatgctatgttcaaaggtgaacacatcaactccactgaagatcgtgctgtctaccacgtcgcattgagaaacagagctaacaagccaatgtacgttgatggtgtcaacgttgccccagaagtcgactctgtcttgaagcacatgaaggagttctctgaacaagttcgttctggtgaatggaagggttataccggtaagaagatcaccgatgttgtcaacatcggtattggtggttccgatttaggtccagtcatggtcaccgaggctttgaagcactacgctggtgtcttggatgtccacttcgtttccaacattgacggtactcacattgctgaaaccttgaaggttgttgacccagaaactactttgtttttgattgcttccaagactttcactaccgctgaaactatcactaacgctaacactgctaagaactggttcttgtcgaagacaggtaatgatccatctcacattgctaagcattttgctgctttgtccactaacgaaaccgaagttgcaaagttcggtattgacaccaaaaacatgtttggtttcgaaagttgggtcggtggtcgttactctgtctggtcggctattggtttgtctgttgccttgtacattggctatgacaactttgaggctttcttgaagggtgctgaagctgtcgacaaccacttcacccaaaccccattggaagacaacgttccattgttgggtggtttgttgtctgtctggtacaacaacttctttggtgctcaaacccatttggttgctccattcgaccaatacttgcacagattcccagcctacttgcaacaattgtcaatggaatctaacggtaagtctgttaccagaggtaacgtgtttactgactactctactggttctatcttgtttggtgaaccagctaccaacgctcaacactctttcttccaattggttcaccaaggtaccaagttgattccatctgatttcatcttagctgctcaatctcataacccaattgagaacaaattacatcaaaagatgttggcttcaaacttctttgctcaaaccgaagctttaatggttggtaaggatgaagaacaagttaaggctgaaggtgccactggtggtttggtcccacacaaggtcttctcaggtaacagaccaactacctctatcttggctcaaaagattactccagctactttgggtgctttgattgcctactacgaacatgttactttcactgaaggtgccatttggaatatcaactctttcgaccaatggggtgttgaattgggtaaagtcttggctaaagtcattggcaaggaattggacaactcctccaccatttctactcacgatgcttccaccaacggtttaatcaatcaattcaaggaatggatgtga

SEQ ID NO: 75596 - DNA, 150 bp, Saccharomyces pastorianus
atgtcccgtgtctatatatatccattgacggtattctattttcttgctattgaaatgagcgttttttgttactacgattggttttacagacggaattttccctatttgtttcgtcccatttttccttttctcattgttctcatatcttaa

SEQ ID NO: 75597 - DNA, 105 bp, Saccharomyces pastorianus
atgtgggtagtactttcaaaagaaaaaatattactgaagaaggcatactacgccaagactattttattctcagcacttgttctacgtggggttagaggcgagtaa

SEQ ID NO: 75598 - DNA, 2397 bp, Saccharomyces pastorianus
atgtcacagaagcaaagtacgaatcagaatcaaaatggcacgcatcagccacaaccagtaaagaatcaacgaactaataatgctgctggcgccaattccggccagcagccacagcaacagagtcaaggccagtctcaacagcaggggaggtccaatggtccgttttcggcgtcagacttgaatagaattgtcctagagtacctgaataaaaagggataccaccgtacagaggccatgctgagagccgagagtggacgtacactaacacctcaaaacaaacaatcaccagcaaatactaaaacaggtaaatttcctgaacaatcatcaattcctccgaaccccgggaagacagctaagcccataagcaatccaactaatttgtcatccaagagagatgcagaaggtggtatagtatctagcgggcgactagaagggctcaacgcacctgaaaattatatacgtgcatattcaatgttgaaaaactgggtagattcgtcgctggaaatttacaagccggaactaagctacatcatgtacccaatattcatttatttatttttaaatttggtggccaaaaatcctgtttacgcccgtcgtttctttgatagattttctcccgattttaaggacttccatggctcagaaattaatagacttttcagtgtcaattctatagatcacatcaaggaaaatgaggtcgcaagtgctttccagtctcacaagtacagaattactatgtcaaaaaccactttaaatcttctcttatattttttgaatgaaaatgagagtattggaggttcattaataattagtgtaataaatcagcacctagatccaaatattgtagaatcagtaaccgcaagggaaaaattggctgatggaataaaagttctcagtgatagtgaaaacggaaatgggaaacaaaatttagaaatgaattctgttcctgtcaagctgggacctttcccaaaagacgaggagtttgttaaggagattgaaactgaattgaaaattaaggacgatcaagagaaacaactaaatcaacaaactgcaggtgacaattacagtggagccaacaatagaaccttattgcaagaatataaagctatgaataacgaaaaatttaaggataatactggcgacgatgataaagacaaaattaaagataaaatcgccaaagatgaggaaaaaaaagagagcgaattgaaggtggatggtgaaaaaaaagacagcaatttatcttcgccagcacgtgatattttacctttaccaccaaagacggcactagatttgaagttggagattcagaaggtcaaggaatctcgtgatgccatcaaactagataatttacagttggccttaccaagcgtgtgcatgtatacattccaaaacacaaataaagacatgtcatgtttagatttcagtgatgattgtaggatagcggctgctggctttcaagacagttatatcaagatctggtcactcgacggctcatcacttaataatcctaacatcgcgttaaataacaacgacaaggatgaagacccaacgtgtaaaactttggtggggcacagtggtacagtatattcaacaagtttcagtccggataataagtatttactttctggttctgaagataaaaccgtcaggctatggtccatggatactcacaccgcgctagtaagttataagggccataatcaccctgtgtgggatgtgagtttctccccgctaggccattatttcgccactgcatcgcacgaccaaaccgcaaggttatggtcatgcgatcacatgtatccattaagaatatttgcaggacatttaaatgatgttgattgtgtgtcatttcatccgaacggttgctatgtgtttacaggatccagcgataagacgtgtcgaatgtgggacgtttctacgggcgactcggttaggttatttcttggacatactgcgcccgtcatttctattgctgtttgtccagatggtaggtggttgtccactggtagcgaagatggtattattaatgtatgggatattggtaccggcaaaaggttgaaacaaatgcgtggccatggtaagaatgccatttattccttatcatatagcaaagagggaaacgtacttattagtggaggtgccgatcacacagtccgtgtatgggatttgaaaaaggccactactgagccaagcgcagaaccagatgagccatttattggatacttgggtgacgttactgcatctataaaccaagatataaaagaatatggtcgcagaagaacagtaatacctacaagcgatttagtagcgtcgttctacaccaaaaagacgcctgtttttaaggtcaagttcagcagaagcaatttagcccttgcaggaggtgctttcaggccataa

SEQ ID NO: 75599 - DNA, 1656 bp, Saccharomyces pastorianus
atgctgaaaaacttcaaactctcaaaaagagatagtaatgggtcgaagggcagaattacatccgcagatatttccacaccttctcatgataatgggagtgttataacgcatattaagacagtaccagtgaggtacctttcttcatcttccaccccagtgaaaagccaacgggactcttcaccaaaaaacagacataattctaaagatattacttctccagagaaagttataaaagccaaatacagttatcaggcacaaacttcaaaggaactatctttcattgaaggtgaatttttttatgtatctggagatgagaaggattggtataaagcttcaaatccttctactggaaaagagggtgttgtccccaaaacctattttgaagtgtttgatagaactaaaccttcctctgtaaatggatccaatagttcaagtcggaaggttacaaatgattcattaaacatgggatcgttatacgccattgttttatatgactttaaggcagaaaaagctgatgagttgacaacttatgtgggagagaatttgtttatttgcgcccaccataactgtgaatggttcattgctaagccaattggtcgacttggagggcccggccttgttcctgttgggtttgttagcatcatagatattgccacggggtacgcaacaggtaatgacgtaatagaagacatcaagtcagttaacctaccaactgttcaagaatggaaaagcaacattgcaagatacaaagctagtaatattagccttggttctgtggagcagcagcagcagcaatccattacaaaacctcagaacaaaagcgcaaagctggttgacggtgaattattagtgaaagcatccgttgaatcctttgggttagaagatgagaagtattggtttttagtttgctgtgaattatctaatggtaagacgaggcaactgaaaagatactatcaagatttctacgatctgcaggttcaacttttggatgcgttcccagcagaggccggtaagttgagggatgcaggtggacaatggtccaaacgtataatgccctatatccctggacccgttccatacgttaccaatagtataacaaaaaaaagaaaggaggacttgaatatatatgtggcagacctagtaaatcttcccgattatatatctcgctcagaaatggtgcattccttattcgttgttttgaataatggtttcgacagagaatttgaaagagacgaaaatcaaaacaatattaaaacattacaagaaaacgatacagcaacctttgcaacagcatctcaaacttctaattttgcctcaactaaccaagacaacactttaactggcgaagacttgaagttaaacaagaaactctcagatttatctttatcgggctccaagcaggctccagcccaatcaacttctggattgaaaacaactaaaattaaattttattacaaagacgatatttttgctttaatgctgaagggtgacacaacctataaagaacttcgtagtaaaatcgctccaaggattgatacagataattttaaattacaaaccaaattatttgatggtagcggggaggaaattaagactgattcacaagtcagtaacataatccaagccaaactgaaaatttccgttcacgatatttga

SEQ ID NO: 75600 - DNA, 165 bp, Saccharomyces pastorianus
atgcttttgtgcttccatatgtgtcaaaggataatgtggctccccttcgatttaatgaagtggcgtagatttcattgtggcgctgttcttgttggaacactgagcttacgtaaccgcaacccaaagatactttctctttattttattagcgataggacaggctaa

SEQ ID NO: 75601 - DNA, 636 bp, Saccharomyces pastorianus
atggatgctgtaatactgaatctcttaggcgacattcctttggtcacaagattatggacaattggctgtcttgtactatcaggtctcacaagtctccggattgtggatccagggaaggtagtgtacagttatgatttagtattcaaaaagggacaatatggaagactactttattcgatattcgattacggcgcatttaattggatatctatgataaacatctttgtcagcgctaatcacttgtcaactttggaaaactcattcaatctgagaagaaaattctgttggataatatttttactgttggtgatactggtaaagatgaccagcattgaacaacctgcagcatcactcggtgtgttattgcatgagaatctcgtgtactacgaacttaaaaagaacggaaaccaaatgaacgtacgattcttcggtgtcattgatgtttcaccatctatattcccaatctacatgaatgcagtaatgtattttgtatataagcgtagctggttagaaattgccatgaatttcatgccaggtcacgtaatttactacatggatgatataatagggaagatttatggcatcgatttgtgtaaatctccgtacgactggttccgcaacactgaaacaccctaa

SEQ ID NO: 75602 - DNA, 2538 bp, Saccharomyces pastorianus
atgagtgcggcacttccatcaattcagcttcctgtcgactataataatctttttaatgaaatcaccgatttcttggtgactttcaagcaggatacgttgtcttccgatgcaacacgaaatgagaacgaagatgaaaatttggatgctgagaatatcgaacaacatctattggaaaaggggcccaagtacatggcgatgctacagaaagtggctaatagggaactgaattccgtgattattgatttagatgacattctacagtatcaaaacgaaaagtttctccagggcacacaggcagacgaccttgtgtctgccattcagcaaaacgctaatcacttcactgaattattttgccgtgccattgacaacaacatgccgctaccaacaaaagaaattgactacaaggacgacgttcttgatgttattttaaaccaaaggagactgaggaatgagagaatgctctcggacaggaccaatgagatccgaagcgaaaacctcatggatactacgatggatccaccctcttccatgaatgatgcgttaagagaagttgtcgaggatgaaactgagttatttcctcctaatttaactagacgctatttcctttattttaagcctctatcgcaaaattgtgctcgtcgttacaggaagaaagcaattagttctaaaccattatctgttagacagattaaaggtgacttcctaggccaattgattaccgtcagaggtattatcaccagagtttctgatgtcaaaccagctgtggaagttatcgcatatacctgcgatcaatgtgggtacgaagttttccaagaggtcaactctcgtacttttaccccgttgtcagaatgtacttccgaagaatgttcccaaaatcaaacaaaaggtcaattgtttatgagtacacgagcttccaaatttagtgcctttcaggaatgtaaaattcaggagttatcacaacaagtgccagtgggtcatattcctaggtcgctaaatatccacgttaacgggacgctggtaagatctctatcgcctggtgatatcgtcgatgtaactggtatattcttgccagcgccctacaccggtttcaaagctttgaaagctggcttactgacagaaacttatttagaggcacagtttgtccgtcaacacaagaagaaatttgcgtctttcagtctgacttctgatgtagaagagagagttatggaattaatcacctctggtgatgtatataataggctggcaaaatctattgcaccggaaatctacggtaacttggacgttaagaaagcgttgctgctattacttgtcggaggtgttgataaaagggtaggtgacggtatgaaaatcagaggtgatatcaatgtttgtctgatgggtgatcccggtgttgccaaatctcaactgctgaaggccatttgcaaaatatcacctcgaggagtgtataccactggtaagggttcctcaggcgttggtctgaccgctgccgtcatgaaagatcctgtcacggatgaaatgattctagaaggtggtgccttagtactcgctgataacggtatttgttgtatcgatgaatttgataagatggatgaaagtgacagaacggcaatccatgaagttatggaacaacaaacaatttcgatatccaaggcgggtatcaatacaactttgaacgccagaacctcaatcttagcggcagcaaatccgttgtatggtagatataatcctagattatcacctctggacaatataaatctaccagctgctttactatccagatttgatattctcttcttaatgttagatataccaagtagagatgacgacgaaaaattagccgagcacgttacatatgtgcatatgcataataaacaaccggatttggacttcactccagtagaaccctctaaaatgagagagtacattgcctatgctaagacaaagaggccagtgatgagtgaagctgtaaacgattatgtggtgcaagcttacatcagattaagacaagactccaagagagaaatggattccaaattttcctttggtcaagccactccgagaactttactaggtattataagattatctcaagcgctagcaaagttaaggttggctgatatggtggatatagatgatgtggaggaagccttgaggttggtccgagtctccaaggaatcattgtatcaagaaaccaacaaatctaaagaagatgaaagccccacaacgaaaatctttacgatcatcaagaaaatgttacaagaaactggtaaaaacacgctatcatatgaaaatattgtgaaaactgtaagactaagagggtttaccatgctacaattaagcaactgtatccaagaatattcttacttaaacgtctggcatttaattaatgagggtaacactttgaaattcgtggatgacggtaccatggacacagaccaggaagactcactagtgagcacgcctaaactcgcaccacaaacgaccgcttccgctaacgcgagcgcccaagattctgatatcgatctacaagacgcttga

SEQ ID NO: 75603 - DNA, 2775 bp, Saccharomyces pastorianus
atgtcaagtgcttcaagacttcaaaacgtcaatattgtttctaacaactattctcgttacggaacttccgtttacgataagttgtatcataataacggcagtggtagcaataatgctggtaagaattctaccacagttggtaaactgtcatctatctcacaaaagtccaggagcaaacagcgtcatggctcaaattgctccagatcaatgagtcaatcacccttatcgacgttcaaatctccactcagcaatcaaaatcaatccagcgctcctgatgatttggcttccataggtcagagacgcagtgacgacgtcacatctttagataatgaaactatcataacgatgaattcaaggaaatcaaggattaaaaaaaagtataaatccttaatctccacctcttcaaaaaaatttatgaataaattgtacgatcatggtgcttcatccgactcattttctatattttctttgaagacttcccattctggtaaacatgaaaattccagatttgaaaagctgaggaagagaaaataccatgcttggggcaaatttgccgatatcaacgatttaccagttgaaataattgccaaaatactttctgaattcgagttaggccgtgatcaaaagacactcgtaagatgtctatacgtatcgaagaagttttataaggcgacaaagatcgtcctttataggctaccttacttcacttccacttacagagtggcgcagtttgtcacctcactaagattacatccggataacggggcatacgtgaaagtattggacctatcacacttgaagccgggaattataggccaagactcgaaggattctcaaggcctagacgatgatggccactcaaggcgtcacagacgccgtcgccgtagatctactaacacaagtttgaatctacctccagctaccccgacatctaccatttctaacgaggatgatgccaatagcggattaatcaaagacgacgcttcaaatggcagtgaagttgaagacttggcattagctggttggagagactggagatacagaaatgaacccctttatagctctcctctgttgaacagctttaaactgaaaaaagtggtttctcgttcttcttctatcacttctacatcttctggaaattccaccggtgttcactctacaaggagacaacgttccaatagttccgttgcttccataacgacgagtatcatgtcatccatctataacacctcccatgtctcattgtcttcaaccacgtctaataccagcaatggtaacatctcttctggtagtaatctgtcaagagtttccactgctggatcattgaaaaaagcttctgcgaagtccacaaggtcatctcctcagaaagcaaaacctatatctgacattacgtcatcttcctggtttagaatgaggttaagttcaagaaatagaaaggcaaggacagctaatacgattaatttaaagaactcgaaggataagtctgacgatgactttaaagttataaagcacgattcggggcatccatccaattatcgttcttcgacattaaaatttagcattgaacaaccatttagtacgcatcatccgtatgccaacaaatttcttttaaagtatgctccttataaagatctgcccctaggttatattttacatatgctgaacttgtgtcctaaccttgttgaactaaacctttccaatttagttatttgtaccgatttcaaattaatcaaccaaagatccgaaagaagaaggatgacatcttcactgttgcccgctgtccaggagtctagtgtttctgcaggccctgagaaagatttagaaattgtctatatgaccgattctggcaaaggttatgaatattatgaggggttaagcaagaaacactcacgttcttcaagcctaggtaccaatccatctagttggattggaggtcaggcgaattggacagattacccacctccaatcgatgcacaaacgaaaacaagagaggaacacagacgcaacaataccttgaacaataagaacgtcgtattaaagaagctaaacccttttgaaatttttgaaatgatctgtaatagaaatgaagaaaaaggtggctactgctccttaactaaggtgaaaatgaatgacattgtgtggtgcaggcaatacatggtaaagtattttgtaatgaggacgtttcgccagcatttggattataaatccatggaaaacaactcttatgaaagacacttattcagtttccgggactctggcttggatagaaatttttcctgggcttgtaatgccaaattgcatgaatttgtcgcattgatggttatggatcatctttcaaatttagatgatttaggattagaagagctttttaatatcaagtccgaaaagctatatataaaaaactattgttgccgagacccggatattctcgaaatatcaaacttatttgatattagatatggggccggatctggggctgatgctacttctgattccaatcccgaagcagaatctttacaattcaggttgacaatattaaaaacagaaaagccaacttcattttggctcacaaaagtttccaaagattatgtttctttagtggttaaattatgtgtggatgatgacattgatatggacaaaatgaaagttggaaaaccaactttgagaatagacagtattacacacaatttgattagcaggttgaaggagttgaggagagttgatctaaggagaaatgttggcgaaaataactactatgctgaaagcatcatataa

SEQ ID NO: 75604 - DNA, 1128 bp, Saccharomyces pastorianus
atgaatatggcagaacgtgcagaggcaacaaaaagttggtcctgtgagcccctttctggaaaggcgctagaagtgattgttcaaaatgcagaaaatgcagctgatttggtagcttacattcgcaaaccagaggtagatttggactttaggttgaagtttatcgcagaacatgaggagttttttaatgtacaactatcggatcgaacttcaagaataaggacgtgtcacaacttgagcgataaagggatacggagtgatactgttttcgtcttcgtgcctgggttggctggcaacttagaacaatttgaacccttactcgagcttgtggaatctgatcaaaaggcatttttgacgttagatctgcctggctttggtcatagttcagaatggagcgactaccccatgctgaaagtggtggaacttattttcgttcttgtatgtgatgtcttaagaaaatggtctacagcggtgccaaataatgataatgtaaatccatttaacggtcataagatagtgcttgtaggacattctatgggttgttttctggcatgtcatctttacgagcagcacatggctgatacaaaagcggtacaaacgctagttttgttgacgccccccaaagcacatatcgagcggctttctaaggataaacatattatccagtgggctctctatggtgtgtttaaattgccatggctatttgacgtttatagaaacaaattcgatcaggtaaaaggtctacaaagttccggcatcaagcagtatttttatcaacaaggtgatgatgtcaagttgaaatacaggaagttctggcaatttaaaaacaacataagcaacaaaagtagaaccatcataggttatttactaggatgggaaactgttgattgggttaaattcaatggtgtattgacgcaaacggatatgaaacagaaaattataatatttggcgctgaaaaagatcctatagctcctattgaaaatttggaattttacaaacaaactataaataaagaatgtcttcgtaaagtgattattttacctgactgttctcataatttatgcttcgaccgtccagaattggtgtgtgaaaactttcaacgagaggtgattgataattccaaattgtag

SEQ ID NO: 75605 - DNA, 1215 bp, Saccharomyces pastorianus
atgtctgtgcaccacaaaaagaagctaatgcccaaatcggcattgctgattagaaaataccaaaagggaatcagatcatcattcattgggctcatcatagtgttatcctttttatttttcatgagtggctcaaggtccccagaggtaccaatagctcagggcaccagtgtcagtcgtgtagccagtaaggattatttgatgccgtttactgacaagtcacaaggagtaatccaccccgtggacgatggaaagaaagaaaagggtgttatggtcacattggccaggaattcagatttatggaacttggtaaaatctattagacatgttgaagacagatttaataacagatatcactacgattgggtgttcttgaatgaccaaccatttagtgatgagtttaaacgtgttaccagtgcattggtttcaggcaaggcaaaatatgggacaatcccaaaggaccattggtccattccatcttggatcgatactgaaaaattcgatgagaaaaggcttgcaatgggaaaattggatattccatatggtagttccgtgccttaccgtcacatgtgccgtttccagtcagggttcatatggagacacccattactggaggagtacgaatggttttggagagtggataccgatatcactttattctgtgatattcagtatgacatattcaagtttttaaaagtaaataacaagaaatatggattcattctttcggtaagtgaatatgagcgcacaatcccaaccttgtgggaaacgacaaagaaattcatcaagaaaaatcctaaattcttacacaaaaataacctcatgaaattcatttcgaatgatgatggtgacacttataatatgtgtcatttctggaccaacttcgaaatcggctctttagacttcttcaggtccgatgcatacagagaatactttgattacttagacagttctggtggattcttctacgaaagatggggagatgcgccagtgcactccatcgctgcctctttgttcttggacaagtcagaaatccatttctttgacggtcttggattccatcatccagatttcacctcttgtcctatcgaacagaagattagactacaaaacaagtgtatctgcgaacctagcaaggacgtcacctggactcctgactacttctgtactagaaagtacttttcagcaggaaattacaagcttccaccaggaatttaa

SEQ ID NO: 75606 - DNA, 324 bp, Saccharomyces pastorianus
atgcgccagtgcactccatcgctgcctctttgttcttggacaagtcagaaatccatttctttgacggtcttggattccatcatccagatttcacctcttgtcctatcgaacagaagattagactacaaaacaagtgtatctgcgaacctagcaaggacgtcacctggactcctgactacttctgtactagaaagtacttttcagcaggaaattacaagcttccaccaggaatttaaaaaccaaactacaaatagcgcctgctccgtcaaaacaggtgctaaaacgtcaacatgtatctatctatatacacataattcaatgtag

SEQ ID NO: 75607 - DNA, 1398 bp, Saccharomyces pastorianus
atggcgtttgaggattatttttctttccagatattcttcattttcttaagggaatccttagaaattgttgtcattgtttctatcctgttgacgatcgtcaaacaaggtctgtctgttgaggacgacagcccgtttgaaggaagttcctcttctgctggtcttccaagtccaaatacgaacacaaacgcagattcgaccactgccttcttacaagcagggccttcagacggtaatgctattggaacgtccgctacggctgctaataataaatcgaggccgctaaatgtggaggaagaagaggaaatttacgagtactctaatgagcttagagatcaggaccgcgagtccgatgaacatacggctgacaacgttaagctatatcagaaattaaaaatacaaattctagcgggcggcgcatttggtttgttgctgtgtatgttaatcgggggtgcgtttgttagtatcttttatcatattggaaccgacttatggacactgagtgaacattattatgaaggtgtcttaagtcttgtcgcgtccgttattatttctgtcatggggttgttttttttaagaatggggaagttaagagagaagttcagagtgaaattagcttctatcatttattcaaaggacaataatttgctgggaaacaaaacccaaaaaggtgtgaaattcagtgaaaagtactccttcttcatattaccatttataacgactttgagagaagggttagaagctgttgtattcattggaggtatcggtattgaccaaccactatcatcgattcccctctctatggtccttgctactgcaatcagtacggtgttcggtatttttttcttcaggtactcaagttctctttcacttaagatatgccttgtagtcgccacctgcttcctctacttgatcgcggctggtttgttttccaaaggtgtatggcaacttgaattgcaagactacgtcaacaaatgtaacggtcaagacatgagtgaagtaggaaatggacccggttcgtacgatatatctcgttctgtttggcatgttaattgttgcaatggtgaaaaagatggaggttggatgatttttactgccatttttggttggacgaatagtgctactgtcggctctgtaattagctacaacgcctactggttggtattaatatgcgctttgaaactgctaatgatagaagaaaaatacggatatatcccatatctacctatcagctggcaaaagaaacgtattatgaaaagattaagcattgccaaggcatcgctcgatctcaaacatcatacttctgaactcaactctagcacatcagagtcagacagtcaaagacggtccaaagatagttctgtgcccctaataattgatagcagtggttcagtgaattga

SEQ ID NO: 75608 - DNA, 429 bp, Saccharomyces pastorianus
atgtcaggaaccggattatcgctattcgtgacgggtcttatattgaattgtttgaattccatttgccagatatactttactatattatatggtgatcttgaagcagactatatcaactcaatcgaactgtgtaagagggtgaataggttgagtgtaccagaggcaattctacaagctttcatttctgcgttgtttctttttaacgggtactggttcgtatttctcttgaatgtccctgttctagcatataacgcaagcaaagtctacaagaaaacacatctactggacgccacggatattttcagaaaattgggtagatgcaaaattgaatgctttttaaaattgggattttaccttctcatattctttttctacttctacagaatggtcacagcgttacttgaaaatgatgcaaatttgataagctaa

SEQ ID NO: 75609 - DNA, 975 bp, Saccharomyces pastorianus
atggatagagacactaaattagcttttaggctgaggggcagtcattcaagaaggacagacgatatagatgatgatgttattgtatttaagacgccaaatgctgtttatagagaggagaactcacctattcaatctcctgttcaacccattttgtcttcaccaaaacttgcgaattctttcgagtttcctattaccacaaataacgtaaatgcgcaggaccgtcatgaacatgggtatcagcccttggatgcagaagactatcccatgattgactctgaaaataaaagtcctataagcgaatcgccgcaaaatgttagaaatgatgaagaccttactactcgttacaatttcgatgatatacccattagacagctatcatcgtctatcacttctgtgaccacaattgatgttttatcttctttattcataaacttatttgaaaatgatttgattccgcaagctttgaaggatttcaataaaagtgatgatgatcaatttaggaaactattgtacaaattagatctgcgactctttcaaacgatatcagaccaaatgaccagagacttgaaagacatattagatatcaacgtgtcgaataatgagctctgttaccaactgaagcaggtactggctcgaaaagaagatttgaaccagcagataatatcggtacgaaatgaaattcaagagttgaaagccggtaaagactggcatgacttacaaaatgaacaagccaaactgaacgacaaagtgaagctaaataagaggctaaatgatttgacttctactttgctaggcaaatacgagggagatcgcaaaattatgagccaagatagcgaggacgattcaatacgggatgactcaaatattctggatattgcacatttcgtagacttgatggatccatataacggacttctgaaaaaaataaataaaattaatgaaaatctttctaacgaattacaaccaagtctatag

SEQ ID NO: 75610 - DNA, 2013 bp, Saccharomyces pastorianus
atgatgtctaacgttgctaacgcctcccaaagacaggagaatccatatattattccattgcctccttcatccacagtggaaacttctactgaacccccaagaacgttatggatgggagatttggatccgtccttcgacgaggccacgattgaggagatatggtcaaaactggataaaaaagttatcgttaaactaattagagccaaaaaaaatttgttgattccttgtagctccacctcaagtagtaataacaacacaagtgaggagaatgctgaaaaccagcaatctgcatcaaacagcactgatcagttagataattcccaaatgattaatattaatggaatatccttcattgatccttccactactcaattacatcatgccggatattgttttgtcgaatttgaaactcaaaaggacgctaaatttgccctgtcattaaatgctacacctttacctaatttttattccccaacaactaactcccaaactaatccaacgttcaaaaggactttcagattgaattgggcgtctggagctactttacaaagttctataccatctaccccagaattttccttgtttgttggtgatctttctcccaccgccactgaagctgatttgttatctcttttccaaacgaggttcaaatctgttaaaaccgtccgtgtgatgactgaccctttaacaggatcatctcgttgttttggatttgtcagattcggtgatgaagatgagcgccgcagggcactgattgagatgagtgggaaatggtttcaagggagggccttaagagtcgcttatgccacgccaagaaataatatgatgctgcagttacaggaacaacaacaacagcaacaacaattgcagcaacagcatcagcagctagatcaggaggataataatggccctctcttgattaagactgcaaataatctcattcaaaacaatagcaacatgcttcctctcaatgccttgcataacgcgcctccaatgcatttgaatgagggcggcatttcaaacatgcgtgtaaatgattcactaccttcaaacacctataatacagaccccactaatactactgtttttgtgggaggactggtaccaaaaactaccgaatttcaattacgttcactattcaaaccctttggacccattctaaatgtcaggattcccaatggtaaaaactgtgggtttgttaaattcgagaagaggattgatgctgaagcttcaatacaaggcctgcaaggctttattgtgggcggcagtccaataagattatcatggggacgcccatccagttcaaatgctaaagcaaattcgaccatcatgggggcaagccaatatatgtcctcaaatggcctgagagcgccatctgcggcttcttcagtcgataactccaaacaaattcttgaacaatatgcggaagataaaaggcgactctttttacatcagcagcagcagcagcagcagcaacaggatggtaacttttctatggagcaaatggcgcacaacaactattacaactacaataattacgattatcacaggaacaagaatggcagccatagcgacctcgttaatctgcagagatctaatgtcccgtatatgcaagaagacggtgctctgtacccacaccaatattcaagtccctcatactcgctccatccgacgggcaaccaattctccaatgctaataataacttacctcaatttgggaacgcgatgtcaatttctatgcaactgtccaatggcaacagcaataaaacggcctcaagcatgaacacaaaccctaacacaaacatgatcatgaattctaacatgaacatgaacatgaacgtaaatccagtaccatacggaatgggaaacggtgcaaatatgtatgacgtgtccaggatgatgactcctcccttaaatatagccccgaattccaataattcgaaatcgagcatcatgaacaagcatcctaataggaacaatgttccgccaattcatccttctcttctacattga

SEQ ID NO: 75611 - DNA, 825 bp, Saccharomyces pastorianus
atggtcaaatcgctacagctagcccatcaattaaaagacaagagaatactactaatcggaggcggagaagtcggcttgacaaggttatataagctgatacctacaggttgcaagctgactttagtatctcctgacctacacaaatccattattccgaaatttggaaaattcatccagaacaaggatcagcccgactacagagaagacgctaaacgctttatcaatccgaactgggactccacgaagaatgagatttacgagtatatccgcagtgacttcaaagacgaatacctcgacctagaagacgagaacgacgcgtggtacataataatgacctgtatacccgaccaccctgaaagcgcaagaatatatcacctttgtaaggaaagattcggtaagcagcagctggtcaatgtggcggacaaacctgatctctgtgacttttatttcggcgccaacctggagataggagaccgtctacagattctgatctctaccaacggcctttctccgcgctttggcgctctagtaagagatgagatccgtaacttattcacacaaatgggggatctggcgctggaggacgctgtcgtcaaactaggtgagctaagaagaggaattaggctgctggcaccagacgacaaggatgtcaagtaccgcatggattgggccagacgctgcacagacctcttcggcattcagcactgccacaacatcgacgtaaaacgtctgctggatctattcaaggtcatgtttcaagaacagaactgttccttgcagttccctcccagagaacggttgcttagcgagtactgctcgtcttga

SEQ ID NO: 75612 - DNA, 1872 bp, Saccharomyces pastorianus
atgatagcaattgtccttgataactctaaaagtggtagtaaacagacaaaatcgagtggcaaaatgcaaacgcaaacagatactaatgctgaagttctaaacaccgataacagtatcaaaaaagaaacaggaagtgattctgaggatcttttcaataaattttcaaacaaaaaaacgaacaggaaaatacccaacatcgctgaagaattagcgaaaaacagaaactacgtaaaaggtgcgtctccgtctcccattataatttctggttcctcttcaacttctccgtcaggaccctcttcctccagtacaaacccgatggggataccaacgaatcgatttaataaaaatactgtagaactatatcagcattcaccatcccccgtgatgactactaacaagactgatacagaggaaaagagacaaaacaataaaaatatggataataaaaacaccccagaaagaggatcttcttcctttgctgctaagcaactaaaaatatcatccttgttaactatatcctccaatgaagatagtaaaactttgcatataaacgatactaatggcaacaaaaatagtaatgccgccagtaataatattccatcggcttatgcagaactccatacagagggaaatagcattgaatcactaataaaacccccaagctctcccagaaataaatctttaacgcccaaagttatcttgccaacacagaatatggatggtacaattgcaaaggatcctcatttaggtgataatacaccaggaatactcatagcaaaaactagttctcccgtaaatttggatgttgaaagcactgcacaatctctgggaaaatttaacaagtccactaattctttgaaagctgctctaacaaaagctcctgcagaaaaggtgtctttaaaacgcagcattagctcagttacaaacagtgattctaatattggctccagcaaaaagcctacgtctgaaaaagctaaaaaatcaagttcagcatcagcaatactaccaaagccaacaacgaccaagacatcaaaaaaagctgctagcaatagtaacgattccaccagaaaaaaaaactcttcgaacaagactacatcagccataaagaaagagtcaaatgccggctccaaattgaacactgttaagaaggaaaatagctctttatcttctatcaaagccactgagaaagaaaaagataaaggtggaaatagcacggaagcaaaaaactctaccagcaacgttagaaaggaaccaactgcaaaatccccaaaaaggttagtagccgcaccgacagtcagtccaccaaaaattctacaaacggcagaaaccaaagcaaaggaaccctcgatattgattgacgttccattgtatcaagctgatacaaacgactacctagacgaaaacggtcaggttatttttaatttatcaactttaataaaagagaagtatcacccgaaaagtaaagaactagcacaacttaaagactctaaaagaaatttattaatgcaattatccgatcattctaacggctcactagaaaaggaaaaagatgaagaaggagatgtaatagaacttgatgatgatgaggatatggaagaagatgaaggggaaatagatacagaaactaatactgtaactaccaccatctctccgaagaagaagtcgcatcctatgaaaggtaaaaatttgattggtaaatatgacgttgaagatccgttcattgatgattcggagttattgtgggaggaacagcgtgctgccaccaaggacggtttttttgtttactttggtccattaatcgaaaaaggtcactatgcaagtttggagcgtgcaaatggtaccatgaaaagaggtggtgttaaaaataaataa

SEQ ID NO: 75613 - DNA, 2025 bp, Saccharomyces pastorianus
atggaaccaattgatgacttactttttgaggttactgatgcgttcaaaactcagaaggaggatcttcttgagttggtaacattgattgatatatatggcgagcaagttaaccaagaggggagctatgaagaaaagacgagattcattgaaactttgaatacattgttagaggataatccgagtactactggtgaaatcggttgggatctgcctaagggattattgaagttcttgtcaaaggataatgtcgatgtaaatggaagactaggtacgaatatgattgtccaaggtgtaatgaagtgtttctatgccatctcaatccaaggcgagcccaaaaaatgtttaattactgggttggagttgctttcatccctttgttcaaaagatttttccaagagtgatcaacagaataaggaagactttgttgataaaaaggccaatacgttacctcctgaaggagtgatcgaaaattcctctaatcgaaaagattttccatcctacggtgaaagcaagagttcaaatgaatttttcttgaagttgaaatcctacattttatttgaattcataggggcgagtctgaaaaggatttctactctgtttccttcgaaatatctgggagctgctgtgtcaacaattgagaaatttgtgtatagtcatgcggacacttttgaagatgcccttttccttcttcgtagggtgtacacattctgcaggaactatattccccctgatccaccaaaagatatacaattgaacgaagattttactcgagagatgtttgataaagttgtggaggaagaaagtgaattacaggttagactattgcgtaggctttgtacttttggtatttcgacacccataaaaactgtcaccaccaatgccgacgtgaaatactattgtgcactaaatcaacagaagtttgaattatctgcatattacaccgaatatcttgagctattttgcaggtattaccaaatggcgttctcgcttgatgttgatatagagggagaatttcagaatgtgataaaagaatgtaggattatttataagtctgtaccccaggagatttctgctgttaatgatgaagcaaagttggttttggaaagaatggtatataaattggcttatacattcgaagtacaaaaggccgctaaagaaaaaaatgttggtttggactataatggtgtaatattattttctggtatccactatttggaaaccaatcaacatttagtaaaggaaatgaatataacggatgccatttatctctacttgagatttacaactccatcattatattctaaagtttactataatgtagcagttgaatcagttagtcgctactggctatggtatgccattacaaccgagcccttggaggatgtaaaaaaagaattgaagaatctttcagtgtttgttacaaaaacattattgcatgttctacttcaaaagaactgtattcaggtcaatcagcagttaagaatgataactttcactcttctcaccagattactatgtttaatacctgaaaaagttgcatttgagtttatcttagatgtgcttaagacatctccccttccattggctaagacgtccgtattatgtgtttttaaagacctttcaaggcgacgcatctccaccaaggataacgattctgagacgaatttgattgtcgaaaaattatccaaactgaaggtcaatgatagtaacaaagctcagcaaagtaacatcagacattatatccaactagattcttccaaaatgaaagctgttcatgactgttgtctgcagactatccaagattcatttacggcagatgccaagaagagtgatatattattactgctaacttacttgaatattttcattgtgctaaaaaaaacatgggatgaagatctactgaagattgtttgttcgaagattgattctaatttgaagtcagtcgaacctgataaacttccgaagtataaggaaattgtggataaaaacgaatctctaaatgactattttactggtataaaatga

SEQ ID NO: 75614 - DNA, 561 bp, Saccharomyces pastorianus
atgagtaggatcctagagagcgaaaatgaaacagaaagtgacgaaagctccatcatatccacaaataatggaacggcaatggaaagatccagaaataatcaagaattaagatcatctcctcataccgttcaaaatagattggaactttttagcaggagattgtctcagcttggtttggcgagtgacatttctgtcgaccagcaagttgaagattcctctagtggcacttatgaacaggaagagacaatcaaaacgaatgcacaaacaagcaaacaaaaaagccataaagacgaaaaaaacatacaaaagatacagataaaatttcagcccattggttctattgggcagttaaaaccatctgtttgtaaaatatcaatgtcacagtcttttgcaatggttattttatttcttaagagacggctgaaaatggaccatgtttattgttatataaataattcgtttgcgccaagtccgcagcaaaatattggtgaactttggatgcaattcaagactaatgatgagcttattgtaagttattgtgcatccgtagcgtttggttaa

SEQ ID NO: 75615 - DNA, 3543 bp, Saccharomyces pastorianus
atgagcagtagcaagaaattggccggtcttagggacaatttcagtttgctcggcgaaaagaataagatcttggtcgccaatagaggtgaaattccgattagaatttttagatctgctcatgagctgtctatgagaactatcgccatatactcccacgaggaccgtctttcaatgcataggttgaaggcggacgaagcgtatgttatcggggaggagggccagtatacacctgtgggtgcttacttggcaatggacgagatcatcgaaattgcaaagaagcataaggtggatttcatccatccaggttatgggttcttgtctgaaaattcggaatttgccgacaaagtagtgaaggccggtatcacttggattggccctccagctgaagttattgactctgtgggtgacaaagtctctgccagacacttggctgcaagagctaacgttcctaccgttcccggtactccaggacctatcgaaactgtgcaagaggcacttgacttcgttaatgaatacggctacccggtgatcattaaggccgcctttggtggtggtggtagaggtatgagagtcgttagagaaggtgacgacgtggcagatgcctttcaacgtgctacctccgaagcccgtactgccttcggtaatggtacctgctttgtggaaagattcttggacaagccaaagcatattgaagttcaattgttggcagataaccacggaaacgtggttcatcttttcgaaagagactgttctgtgcaaagaagacaccaaaaagttgtcgaagtcgctccagcaaagactttgccccgtgaagttcgtgacgctattttgacagatgctgttaaattagctaaggtatgtggttacagaaacgcaggtaccgccgaattcttggttgacaaccaaaacagacactatttcattgaaattaatccaagaattcaagtggagcataccatcactgaagaaatcaccggtattgacattgtttctgcccaaatccagattgccgcaggtgccactttgactcaactaggtctattacaggataaaatcaccacccgtgggttttccatccaatgtcgtattaccactgaagatccctctaagaatttccaaccggataccggtcgcctggaggtctatcgttctgccggtggtaatggtgtgagattggacggtggtaacgcttatgcaggtgctactatctcgcctcactacgactcaatgctggtcaaatgttcatgctctggttctacttatgaaatcgtccgtaggaagatgattcgtgccctgatcgaattcagaatcagaggtgttaagaccaacattcccttcctattgactcttttgaccaatccagtttttattgagggtacttactggacgacttttattgacgacaccccacaactgttccaaatggtatcatcacaaaacagagcgcaaaaactgttacactatttggcagacttggcagttaacggttcttctattaagggtcaaattggcttgccaaaactaaaatcaaatccaagtgtcccccatttgcacgatgctcagggcaatgtcatcaacgttacaaagtctgcaccaccatccggatggagacaagtgctactggaaaagggaccatctgaatttgccaagcaagtcagacagttcaatggtactctactgatggacaccacctggagagacgctcatcaatctctacttgcaacaagagtcagaacccacgatttggctacaatcgctccaacaaccgcacatgcccttgcaggtgctttcgctttagaatgttggggtggtgctacattcgacgttgcaatgagattcttgcatgaggatccatgggaacgtctgagaaaattaagatctctggtgcctaatattccattccaaatgttattacgtggtgccaacggtgtggcttactcttcattacctgacaatgctattgaccattttgtcaagcaagccaaggataatggtgttgatatatttagagtctttgatgccttgaatgatttagaacaattaaaagttggtgtgaatgctgtcaagaaggccggtggtgttgtcgaagctactgtttgttactctggtgacatgcttcagccaggtaagaaatacaacttagactactacctagaagttgttgaaaaaatagttcaaatgggtacacatatcttgggtattaaggatatggcaggtactatgaaaccggccgctgccaaattattaattggctccctaagaaccagatatccggatttaccaattcatgttcacagtcatgactccgcaggtactgctgttgcgtctatgactgcatgtgccctagcaggtgctgatgttgtcgatgtagctatcaattcaatgtcgggcttaacttcccaaccatcaattaatgcactgttggcttcattagaaggtaacattgatactgggattaacgttgagcatgttcgtgaattagatgcatactgggccgaaatgagactgttgtattcttgtttcgaggccgacttgaagggaccagatccagaagtttaccaacatgaaatcccaggtggtcaattgactaacttgttattccaagctcaacaactgggtcttggtgaacaatgggctgaaactaaaagagcttacagagaagccaattacctactgggagatattgttaaagttaccccaacttctaaggttgtcggtgatttagctcaattcatggtttctaacaaactgacttccgacgatattagacgtttagctaattctttggactttcctgactctgttatggacttttttgaaggtttaattggtcaaccatacggtgggttcccagaaccattaagatctgatgtattgagaaacaagagaagaaagttgacgtgccgtccaggtttagaattagaaccatttgatctcgaaaaaattagagaagacttgcagaacagattcggtgatattgatgaatgcgatgttgcttcttacaatatgtatccaagggtctatgaagatttccaaaagatcagagaaacatacggtgatttatcagttctaccaaccaaaaatttcctagcaccagcagaacctgatgaagaaatcgaagtcaccatcgaacaaggtaagactttgattatcaaattgcaagctgttggtgacttaaataagaaaactgggcaaagagaagtgtattttgaattgaacggtgaattaagaaagatcagagttgcagacaagtcacaaaacatacaatctgttgctaaaccaaaggctgatgtccacgatactcaccaaatcggtgcaccaatggctggtgttatcatagaagttaaagtacataaagggtctttggtgaaaaagggcgaatcgattgctgttttgagtgccatgaaaatggaaatggttgtctcttcaccagcagatggtcaagttaaagatgttttcattaaggatggtgaaagtgttgacgcatcagatttgttggttgtcctagaagaagaaaccctacccccatcccaaaaaaagtaa

SEQ ID NO: 75616 - DNA, 1683 bp, Saccharomyces pastorianus
atggaacctaagcgaaagagcgggtcactagccaagcatgatttgccgcaattttatcttttaattatgttatatttggctcaaggcatacctgtaggattggccttcggtaccgtaccgtttctactgaaatctttagcaaaggagacctcgtttacatcactgggaattttctctatggctacatatccatattctttaaagatcatatggtcaccaatagtagactcactgtacaacaagcgcatcggtagaagaagatcatggatcattccagtacaatttgttagtggatttgtgctatgggcattagggtggtgcatttcacaaggcataatcttcgatggtgtcgacgatgcgttccataatcgcggtaatggcactttacacagtgtcagtataaaaaatttgacgtggtggtttggcctgttagtttttctgtgtgccactcaagacatcgcagttgatggttgggcgttgacgattttgtccaaagaatccctatcatatgcgtctaccgcgcaaacaataggtttgaatattggttattttatgtcatttaccattttcctgtcgttgaattcctctgatttcgccaataagtatttcagaaacatcccactggatcacgggttcattagtcttggtgggtacatgaaattctcgggcatgctttacattgtaataaccatatatatcatcttttgcaccaaggaaaaaccctacgtagagtatttgcccaaagtggagcccataaatacaagtgacggagggtcgaagccgataagtattgagtatgacgacggtgatgtggtgtcaactcagaatacaagcagtataaagtacatttaccgctgctttataaaagtgttgaaattgaagtccgtaagaagcctagccttcattcacatgatttcgaaatttgcctttcaatgcaacgaagccgccacaaacctgaaactactagagcaaggcttcaaaagagaagacttggctgtgacagtactcatagacctgccgttcgaaatcatatttgggtactatgttgttaaatggagctccgacaaggaccccatgattcgtgacaatagaagattaagaaacagcacgggcactaacaaggtcatcaagttcttagttggggatgccggcgttttaacaccatggttgtggggctttttgggccgtctggcagccgcagtcttgggaagttacgtggtgaagcaattccccaaggatggtgaaatatccacgggttatttttgtctcgtgatattccagcacctcttaggttccttcatgaatactgtccagttcattggaatatcggccttccatacaagagttgcagaccccgtgctgggtggcacatatatgacattgttaaataccctcagcaacttcggtgggacatggccgcggttaatcattatgtccatgatcaactactttaccgtgtatcagtgcactattcctggcacaaataaagtatacgtaactcacggcggcagcatgcaagcgtgcaccgagcttttgaatggcaccgtgaccatcctgcgtgacggctattacatcaccaatctcatatgtattgtagtcggacttttcctatattttggatatttgaaaaggaaaatcctccatttacaaagtctgccaatcagttcctggagatgtacgtaa

SEQ ID NO: 75617 - DNA, 1101 bp, Saccharomyces pastorianus
atgttttccagactgccaacatcattggccagaaatgttgcacgtcgtgccccaacttcttttgtaagaccctctgcagcagcagcagcattgagattctcatcaacaaagacgatgaccgtcagagaggccttgaatagtgccatggcggaagaattggaccgtgatgatgatgtcttccttattggtgaagaagttgcacaatataacggggcttataaggtgtcaaagggtttattggacaggttcggtgaacgtcgtgtggttgacacacctattaccgaatacgggttcacaggtttggccgttggtgccgctttgaagggtttgaagccaattgtagagtttatgtcgttcaatttctctatgcaagctatcgatcatgttgtcaattccgctgcaaagactcactacatgtctggtggtactcaaaaatgtcaaatggtcttcagaggtcccaatggtgctgcagtgggtgttggtgctcaacattcacaggacttttctccttggtacggttccattccagggttaaaggtccttgtcccttattctgctgaagatgctaggggtttgttaaaggccgccatcagagatccaaaccctgttgtatttttagagaacgaattgttgtacggtgaatcttttgaaatctcagaagaagctttatcccctgatttcaccttgccatacaaggctaagatcgaaagagaaggtaccgatatttccattgttacgtacacaagaaacgttcagttttctttggaagccgctgaaattctacaaaagaaatatggtgtctctgcagaagttatcaacttgcgttctattagacctttagatactgaagctatcatcaaaactgtcaagaagacaaaccacttgattactgttgaatccactttcccatcatttggtgttggtgctgaaattgtcgcccaagttatggagtctgaagcctttgattacttggatgctccaatccaaagagttactggtgccgatgttccaacaccttacgctaaagaattagaagatttcgctttccctgatactccaaccatcgttaaagctgtcaaagaagtcttgtcaattgaataa

SEQ ID NO: 75618 - DNA, 105 bp, Saccharomyces pastorianus
atgttctcccacttcgaagtctcggaaaacagaccccggaaacagccgcgacgaaaaagaatcagcttaggcatgataaatactgtggtttcattagatagataa

SEQ ID NO: 75619 - DNA, 1632 bp, Saccharomyces pastorianus
atgacaagtgccgctactgttactgcttcgttcaacgatacttttagcgtatccgataatgtcgccgttattgttcctgaaacggacactcaggtgacctacagggatctatcccacatggtgggtcacttccagaccatgttcacaaatcctaattctccattgtacggagctgttttcagacaagatacagtggcgatatccatgcgtaatgggctggaatttatcgtcgctttcctcggtgctactatggacgctaaaattggcgcgcccttgaatcccaattataaggaaaaggagttcaatttttatttgaatgacctgaaatctaaggcgatttgcgtcccaaagggtaccacaaagttacagagttctgaaattctaaaatctgcctccacgtttggatgttttatcgtagagctggccttcgatgcgaccaggtttagggtagagtatgatatatactctccagaggacaactacaaaagggttatttaccggtctttgaacaacgccaaatttgtcaacacaaatcccgttaaattccctgggtttgcccgttccagtgacgtcgccctgattttgcataccagtggtaccacctccactccaaaaacggtgcctttgttacatttgaacattgtgagaagcacgttgaacattgctaacacttacaagctaacgcccttggacagatcttatgtcgtgatgcctcttttccacgtccatgggttaattggtgttttactttccacttttagaactcagggttctgttgtggttcccgatggattccatccaaagttattctgggaccaatttgttaagtacaactgtaattggttcagttgcattcccacaataagcatgattatgctgaacatgcccaaaccaaaccctttcccacacattagattcatcagatcgtgttcttctgctttggctccagcaacgttccataagctggagaaggaattcaatgcacctgtcttggaggcctatgcgatgaccgaagcatcacatcaaatgacctcaaacaatctgcctccaggaaagagaaagcctggtactgtgggccagccacaaggagtcaccgtcgtcattctagatgacaatgacaatgtcttgcccccgggcaaagtcggcgaagtttccatcagaggcgaaaacgtcactttgggatatgctaataatccaaaagctaacaaggagaacttcactaagagagagaactatttcagaaccggtgaccaaggttatttcgaccctgaggggtttttggtccttacaggcagaatcaaagagcttatcaacaggggtggtgaaaagatttcacccattgagctcgacggcattatgctatcgcatccaaagatcgatgaagccgttgcatttggtgttcccgacgatatgtacggccaagtagttcaagccgccattgttttgaagaagggagaaaaaatgacttacgaagaattggtgaacttcttaaagaagcaccttgcctctttcaaaattccaaccaaggtgtactttgttgataagctaccaaaaaccgctacaggtaaaatccagagaagagttatcgcagaaacttttgctaagagcagcagaaataagagtaagttgtag

SEQ ID NO: 75620 - DNA, 1635 bp, Saccharomyces pastorianus
atgtcacgagaaacaaatttgaatggaactaagaggaagaggtcggatgttgccgagaaagtagcacaacggtggaagagcgtcaggtatagtgctgaaatggagaatatggctccggtcaacagtaacaatgatagcgacgactgcatcatagtcagtgaatcgaaaatcattgatttgactaatcaggaacaagatttgagtgagagaataggaacaaacgatacggcaaaaggtgccgtttttaaactaatgaaatcggacttctatgaaagagaggattttatgggagaagtagaggatatgattacattgaaagatatctttggcactgagacactaaaaagaagcatactcttcagtttccaatacgaacttgatttcttgttgagacaattccaccagaacgtagagaacataaccatcgtcggccaaaagggtactattatgcctatcgaagcccgtgctatggacgcgacactggcagtaatattaaaaaaggtcaaacttattgaaataacgatgcccccattcgcttcccaccatacgaagctgatcataaacttttacgataatggcgaatgcaaaatattcttgccatctaacaattttacgtcaatggagactaatctgcctcaacaggtgtgttggtgcagtccccttttgaaaataggtaaagaagggctaccagtaccgtttaagagaagcttgatagaatacctcaattcgtaccacctgaaagacattgacgaattgattacaaaaagcgtagaggaagttaactttgctcctttgagcgaattagaatttgtatattctacgccctccaaatttcagtcgtcgggtttactgtcgttttacaataaactagaaaaactttctgctggcacaagtgctagtgatactgcaaaacattatctatgtcaaacttcatccatagggacatctctatcaagagcgcgagacgaaaacttatggacacatctaatgattcctctgtttaccggaatcatgtcccctccagcaaaggacaccactggaaggaagaaagcagaaatactgccaacgaattcattgattaatgaatattcgcagagaaaaatcaagccgtacattattttccccaccgaacaagagtttgtcaccagtcccttaaagtggtccagttccgggtggtttcattttcaatatcttcagaaaaagagctactacgaaatgctgcgaaacaagttcaaagtattttacaagcaagaccctgctatggttactagaagacgagggacgacgcccgcgcactctaagttttacatgcactgtgcaacaaactccacagggccctgtgatgcatcgcaggtatttaaagaactagaatggtgcctttatacttcggcaaacctcagccaaacagcatggggcaccgtttcaagaaaaccacgcaattatgaagcaggagtgctttaccatagtcgcaggttagcaaataccaggaaggtcacgtgccgtacttttacacgtgaccgtagaggctgcgcgggtaatcccacccatgtggccgtgccattcacgctgccagtcataccatacgacttagctgaggacgagtgcttttgccttgctcgtcatgagaacgactaa

SEQ ID NO: 75621 - DNA, 120 bp, Saccharomyces pastorianus
atgactggcagcgtgaatggcacggccacatgggtgggattacccgcgcagcctctacggtcacgtgtaaaagtacggcacgtgaccttcctggtatttgctaacctgcgactatggtaa

SEQ ID NO: 75622 - DNA, 516 bp, Saccharomyces pastorianus
atgattttcgattcactgactatgatgcagtcgtcgctatcattgttactgttgaccggagccatattctccatttcagcactatacctgacgctcttccaccgttgtgctactttctcggcaacatccgacctcttcctcttagttccattcaaatttgtttctcgtgacattaataatcggttgaaaacacattatcatcattcttgtctgggctcaccgtttctctgcattattttcctctttataagccctttattaaattaccattttcgcagtttagtgcggccgccgaaaatacatcagaagggatccataccaacacttaccaagaacgctgaaacacgttgttcacttcacctgaaacaagcagcagctactggagaagtgtgtaaagtagtagtaattattaaaggacacatattgaaggattgttcaattttcttttttattatttttcccctcatttatccactttttataaactgctcaagtaaatacaatgggctccaataa

SEQ ID NO: 75623 - DNA, 1563 bp, Saccharomyces pastorianus
atgttgaaatctgcaagccaaaacttttttagagcttattctagtagaattggtcgatatgctgctacagcatcagggaaactggcacagtctcgtttatcgaatatacccactccaaaagcattgaagaaattcctcgatgagtacattgttggtcaagagattggtaagaaggttttaagcgtggcagtttataatcactatttaagaatcaatgacaagcaaaagaaaggggaattacaaaggcagagagaattgatggaacgagagaaaatcgcggatgataaggatgaaccaattttcagtggaaacagcgaatcaaaggctggttggaggaatcttcaaagacagtttaatttagcaggtagagaggttgacgaagatttagagttaagcaaaagtaatgtccttgtcgttggtccctcaggttctggtaagactttgttggcaacaacattggcgaaaatattaaacgttccaattgcaattacagattgtacacaattgactcaagcaggttacataggtgaagatgttgaagtatgcattgaaagattgctcgtaaatgctgaatttgatgttgcgagagcagaaaaaggtattattgttcttgatgagattgataaactagccaagcctgccgcaagcattggcactaaagacgtgtccggagaaggggttcaacagtcattattgaaaatcattgagggccataaagtggaaattaccgttaaaaggcctgttaagcatgatattgacggacaaaaaaatcaaactacaacaaagaaggacgaagtatttgttgtagacacttcaaatattcttttcatgattatgggtgcttttgttggtttagataagcatattgttaaaaggatagaagatatgaagaaaatacagaaggcaggagagtctgttgaatcatcgaatagtaaagaagttgaaaaagaaagagcgaagaagttcagatttagcaatacgcttgagcaggttgaattagataacggaaaaaaagtgtgtgctttagacttgaccacccccacagatttagttagctttggtctaattcctgaattaattggcagagtcccaattataactgctctgcagcctctacaaagagacgatttatttcatatattaaaagaacctaaaaatgccttattggatcaatatgaatatatttttaagcaatttggggtaagattgtgtgttacacaaaaggcgctaaagaaagttgctcaatttgctctcaaggaaggaactggcgccagagggttgagagggataatggaaagacttctgctaaacgttaattatgattgcccgggttctaacatagcatacgttttaatcgacgaagctactgtcgactcgttacaggaaacagagcactctttggcttcccaagtggacgtaaaatactattctggtgatgaaaaggacagtttaattcgtgacgtttctgaagaagataaaaaattaggagctatgctagaaaaagagttgggtcattctgctaacattcataccccaacaattcccaagagaagcttaacataa

SEQ ID NO: 75624 - DNA, 915 bp, Saccharomyces pastorianus
atgtcgcagaaaatacagcagcatcagtttcctgatttttattgttgttatctactacaatcgattaacaagaggcaatcattttacgttggatcaactcctaacccagtacgacgtttgaggcagcataatgggaaattggctgttggaggggcatatcgaaccaaacgtgacggttcaaggccctgggaaatgataatgattgtgcggggcttcccaagtaagatagcagctttacagtttgaacatgcatggcaacatgggtaccaaacgcattatattgccgaaaaagatcgtgtcgtaaagcataaagcaggtggaagaactttacatcacaaagttgcattaatgaagttacttttaaagcatgaattttttcaaaggatgaacttgatagtcgacgtttttaatataaaggcttgggaggtttggaaacaggacaaattttttattgaaagagacagatttccgattaatatacaaataaatgagaatgcgcttgaagaaccaaaggagaaaactgtggatgttctcatggatcatagtgatgagaatttaaaagtggtagaagctgtatacactaaagtcattgaaaatgaaagaaacatattcgaaactttcgaaaagaaactaactacaggggtagtgcgatgtgaaatttgtgagaaagaaattgactacacgtctgaagagcaaaatctgaagccgtttgtagcgttttgcaataataaagactgcgggtctgttaaccacttgaaatgtcttcacaggtactttctagatgatgaacagttgatagtagggagaagaaacttgatacctcgaggtgggaaatgtccgaaatgtgatacgttttgcgactggacgaccctagtcaagttttcgacaagaatgaagttagctcacgggaagtag

SEQ ID NO: 75625 - DNA, 2865 bp, Saccharomyces pastorianus
atggtccttttgaaatggctcgtatgccaattggtcttctttaccgctttttcccatgcgtttaccgactatctattaaagaagtgtgcgcaatctgggttttgccatagaaacagggtttatgcagaaaatattgccaaatctcatcactgctattataaagtggacgccgagtctattgcacacgatcctttagaaaatgtgcttcatgctaccataattaaaactataccaagactggagggcgatgatatagccgttcagttcccattctctctctcttttttacaggatcactcagtaaggttcactataaatgagaaagagagaatgccaaccaacagcagcggtttgttgatctcttcacaacggttcaatgagacctggaagtacgcattcgacaagaaatttcaagaggaggcgaacaggaccagtattccacaattccacttccttaagcaaaaacaaactgtgaactcattctggtcgaaaatatcttcatttttgtcactttcaaactccactgcagacacatttcatcttcgaaacggtgatgtatccgtagaaatctttactgaaccttttcaattgaaagtttactggcaaaatgcgctgaaacttattgtaaacgagcaaaatttcctgaacattgaacatcatagaactaagcaggaaaacttcgcacacgtgctgccagaagaaacaactttcaacatgtttaaggacaatttcttgtattcaaagcatgactctatgcctttggggcctgaatcggttgcgctagatttctctttcatgggttctactaatgtctacggtataccggaacatgcgacgtcgctaaggctgatggacacttcaggtggaaaggaaccctacaggcttttcaacgttgatgtctttgagtacaacatcggtaccagccaaccaatgtacggttcgatcccattcatgttttcatcttcgtccacatctatcttttgggtcaatgcagctgacacttgggtagacataaagtatgacaccagtaaaaataaaacgatgactcattggatctccgaaaatggtgtcatagatgtagtcatgtccctggggccagatattccaactatcattgacaaatttaccgatttgactggtagaccctttttaccgcccatttcctctatagggtaccatcaatgtagatggaattataatgatgagatggacgttctcacagtggactctcagatggatgctcatatgattccttacgattttatttggttggacttggagtatacgaacgacaaaaaatattttacttggaagcagcactcctttcccaatccaaaaaggctgttatccaaattaaaaaagttgggtagaaatcttgtcgtactaatcgatcctcatttaaagaaagattatgaaatcagtgacagggtaattaatgaaaatgtagcagtcaaggatcacaatggaaatgactatgtaggtcattgctggccaggtaattccatatggattgataccataagcaaatatggccaaaagatttggaagtcctttttcgaacggtttatagatctgccggctgatttaactaatttattcatttggaatgatatgaacgagccttcgattttcgatggcccagagaccacagctccaaaagatttgattcacgacaattgcattgaggaaagatccgtccataacatatatggtctgtcagtgcatgaagctacttacgacgcaataaaatcgatttattcaccatccgataagcgtcctttccttctaacaagggctttttttgccggctctcaacgtactgctgccacatggactggtgacaatgtggccaattgggattacttaaagatttccattcctatggttctgtcaaacaacattgctggtatgccatttataggagccgacatagctggctttgctgaggatcctacacctgaattgattgcacgttggtaccaagcgggcttatggtacccattttttagagcacacgcccatatagacaccaagagaagagaaccatacttattcaatgaacctttgaagtcgatagtacgtgatattatccaattgagatatttcctgctgcctaccttatacaccatgtttcataaatcaagtgtcactggatttccgataatgaatccaatgtttattgaacaccctgaatttgctgaattgtaccatatcgataaccaattttactggagtaattcaggtctattagtcaaacctgtcacggagcctggccaatcagaaacggaaatggttttcccacccggtatattctatgaattcgcatctttacactcttttataaacaatggtactgatttgatagaaaagaatatttctgcaccattggataaaattccattatttattgaaggcggtcacattattactatgaaagataagtatagaagatcttcaatgttaatgaaaaacgatccatatgtaatagttatagcccctgataccgagggacgagccgttggagatctttatgttgatgatggagaaacttttggctaccaaagaggtgagtacgtagaaactcagttcgttttcgaaaacaataccttaaaaaatgttcgaagtcatattcccgagaatttgataggcattcaccacaatactttgaggaataccaatattgaaaaaatcattatcgcaaagaataatttacaacacaacataacgttgaaagacagtactaaagtcaaaaaaaatggcgaagaaagttcattgccgactagatcgtcatatgagaatgataataagatcaccattcttaacctatcgcttgacataactgaagattgggaagttattttttga

SEQ ID NO: 75626 - DNA, 912 bp, Saccharomyces pastorianus
atgccagaagtagagacaaagattataccaaacgaaaaggaggacgaggacgaggacggctacatagaagaggaggacgaggacttccagcctgaaaaagataaattaggtggtggtagcgatgatagtgatgccagcgatggcggtgacgactatgatgacggtgtgaacagagataagggtagaaataaagtggactattcgcgtatagagagcgagagcggcggactgatcaagactagaagagctcggcaagctgaggaagaatatgcgaaaacacataagtatgaatcgttaactgttgaatcgatccctgcaaaagtaaacagcatctgggaggagctacaggaagctagtaagaaccgtcttttgagcagttcagggaaagtcggctctgttctcgacggttccaaggaggctaggtcgacaacggccgcgcaacaggaggacaaaatcctcatcgaaagaaactacaagtttgctggtgaaactgtccatgagaaaaaatgggtttcacgcagcagtgcggagggtcaagaatatctaaacagtttgaaatttaagcagcaggcgcctgctgctcctgttcaactggaaaaagcagttaggaccaagtccaatgaaagccggcaacacttgcggtggccactgaaaaggcctccattgttggagcagatcatttctggcgggctacgacccaagctaacgacattagaaaaatctcagctggactgggctagttatgtagaccgtgctggacttaacgacgaattggtgctgcacaacaaggatgggttcttggcccggcaagaatttctgcagcgggtcgggtctgcagaggacgagagatacaaagaattgcgccggcaacaacttgctcagcagttgcagcaggatagcgaagcttcatag

SEQ ID NO: 75627 - DNA, 360 bp, Saccharomyces pastorianus
atgtttattctagcagaggtttcggattttattctagatatagtggcgcccttgtgtcctactatcagtgaagcgtgtttgactaagcacagcattcgtaaatgtacatcagagggaacattgtcgggggaatcgtggtcgttgtcagagtggctgtctgcatccttcagggccacgcgtttgatttctgcttccagttgttcctcgctggtgtcttcaccctttttccttttgagcgtgttgggagaaacgagtacagtagttggtgtggtagtgattgatggttttgtagtctctgtggacataattgagctaaagagtattacagaaagattatttaatgccgcgctggacgattaa

SEQ ID NO: 75628 - DNA, 1242 bp, Saccharomyces pastorianus
atgtccacagagactacaaaaccatcaatcactaccacaccaactactgtactcgtttctcccaacacgctcaaaaggaaaaagggtgaagacaccagcgaggaacaactggaagcagaaatcaaacgcgtggccctgaaggatgcagacagccactctgacaacgaccacgattcccccgacaatgttccctctgatgtacatttacgaatgctgtgcttagtcaaacacgcttcactgatagtaggacacaagggcgccactatatctagaataaaatccgaaacctctgctagaataaacatatcaaataatatcagaggtgttcctgaaagaattgtttacgtgaggggtacttgcgatgatgtagccaaggcgtacggcatgatagtaagagcgctgcttgaagaacatggtaacgaagataacggggaagacattgagatttctatcaacctattgatccctcatcatcttatgggatgtataattggcaaacgtgggtctcggttaagagaaattgaggatttgagtgcagcaaaattattcgcgtccccgaatcaattgctgctttctaacgatagaattttaaccattaacggggttccggatgctatccatattgctactttctacattagtcaaacattgctaaactttcagatggaatctccgcagaaaaatgtgaaaaggtccatatactatcagccaactcagtttaactcagtattaatagaccatagccaaccgaacaccattttccatcaaagaaaccaccaatatcatccaagcgataaactactttcatacaaacccaacaaaaatttaccaatatcatctactctgttgagtatggccacaccgcagtatactactgctagcgttgcaaacgcaacggcctttcaaccgaacttcgttatccctaatgtgacagtcttagacggccctgttatcagtccggcacccggcaaccatttattaatgaactttgtacaacaagagatattcatagatgagaaatttgtcggaaatgtcattggcaaagatggcaagcacataaattcggtcaaggaatccacaggttgttcaattattatacaagatcctgtagaaggctcttcggagagaagacttaccataagaggtacgttcatggcttcccaagctgctattatgttgattagcaataaaattgaaattgatagatcaaatgctgaacgtaaaagaaggtcgcccctctaa

SEQ ID NO: 75629 - DNA, 285 bp, Saccharomyces pastorianus
atggaacacaatctttcacctttacagcaagaagtattggacaaatacaaacagctttctttagatctaaaagctctggatgaaactataaaagaactaaactattcgcaacacaggcaacagcattcacagcaagaaactgtatcgccagatgagatactacaggagatgagggacatagaggtcaagattggtttagttgggacactgctaaaaggtagcgtgtactcgcttatcttgcaaagaaagcaagaacaggagtctttgggtagcaattctaaataa

SEQ ID NO: 75630 - DNA, 3363 bp, Saccharomyces pastorianus
atggttagtaggttttatcagattccaggtacgcatcggccatcgtcggcaatatcttcttcaaatgaatcttcttcactgttgtctgcaaggagaataagtcaaacatatttcaattatcaggcgactcctgaatgccaaaaagtttcctctaagtatgatcctgataacccaaacaaagataagttgggaacatacgatggggtatttgtgcctactgctttaaacgtattgtctatccttatgtttcttcgttttggcttcattttgggtcagttaggtattatatgcaccatcggtcttctgctattgagttacactattaatcttctcaccacgttaagtatatctgctatatctacaaacgggactgttaggggcgggggtgcttattatatgatttcaagaagtttaggacctgaatttggtggacccattgggcttgtcttcttcttagggcaggtgttcaatgcaggtatgaacgcagtgggtattatcgaacctttactctataacttgggttattctgctcaaggcgagccacctgcagctttgggagagctactaccaagaggacattggcacgaatttacatatgccacggtcattcttttcttatgtttttctgtggcttttgttggctcgcaaacagtgtcaagagcagggaatattctttttttggtactggcagcttctatattttccattccactttctgcattgataagatcgccattcactgaaggcggtatcagttatacaggtccttcatggcaaacttttcatgataacctgctccctcacttaacaaaaggtgcagcaggttcgttactcaaaggtcaggaaacattcaatgatttatttggcgttttttttcctgctacagctggtatattcgcgggcgcaggaatgtcaagtgaattgagaaagccctctaaatcaattcctaagggtaccttatggggtttactattcacttttatctgttatgccgttgttgtcttctccatgggttgttccattcccagaagatcgttatatgatgaagtacaaattatacagacgatcagttccgttcaatgggttatattcatgggtgaaatggctacttctcttttctccgtcatagtggggatgctcggtgctgcttatgtattagaagcaattgcaaaggataacattattcctggtttggagatttttgctcattcaccgttatattcattgatttttacttggattctaacacagctatgtttgttttcagacgtcaataaaatcgccacatttatcacaatgacattcttaatgacgtttgtggtcatgaatttggcgtgcttcctattaggtatttcctctgctcccaatttcaggccctctttcaaatactttaacaggtatactacagcaattggcgcattactttctgttgttgcgatgttaatagttgatggtatctcagcatctgtcttgtttttggctatgattttgctatttttattcattcattatttttcaccaccgaagtcttggggtgatgtgtctcaaagtttaatatatcatcaagtgagaaaatatttgcttcgtctacgtcaagacaatattaaatactggaggcctcaaatattgctgtttgtagataatccaaggacgagctggaacttaataaggttttgcaatcatttgaaaaaaggtggtttgtatattttaggccatgttgcagtaactgcggattttccaaagcaactaaatgaattaaaaactcagcagaaagcttggatgaagatcagagacatggctgcaataaaggcttttgtccaagttgggactggtccctcccttatatggggaattaggaatgtttttattggttccgggcttggaggtatgaaaccaaacattactgttgtcggtttttttgacctcgaaagttatagaaagcacatcccacaaagtcgcagccaaaataaccttcagaaacaggtggaaataaaagctacagtgccacgtagtacatgctctgatgtcaaaatcaatgttccattgcctacggatgagtgtaaaaatgaaaccaaagttaatgtacaacaatgggttcaaattgtagaagatctatcactgatgcaatccaatattgccatagcgcatggattcaaaaatttagagataccgaacaaaagggaccgctgctttccaaaaaaaactatagatctttatcccatccaaatgtgcggaaaagttgaggcaaagggtgatcagcctgcggctatcactactaactttgatacgtatacactgattctacaattagctgccattttggttactgttcctgaatggaagcgcacacattcgcttcgagttattttatttgtggaacaagaatatcatagaacgaacgaaactcaacgaatgaaaaagctattacaggttctaagaattgacgcagaggttttggtagtatctttagatcaattcagagtatacaacacaattgtcaagggagacccaatcgtgtttgattatgtcaactcgaaattggccgataatgaatggtggaaagatttggttgaagctcgtgatacattaaaaccgaagcggaggttttccactattgaacctcaaacgatagcaaagcaatttacacaatcaagaaaatatacgtctggggttcagaaattgggtgtctcatttacaatgaatacgagaatgccaactaaccgcattgataccccatgcgagagtgaggactccgatttggatacagatcttacgtcaattcgtgatgccttctcggcatcgactaatatttcagtaggtaaggacttaacgaccaaatcgaagaccggttccgacagaacaaatttactcgtaaagaatttacaaagcgatgtgtcaacacagtcgttaagacccgttttctcgagtaatactttgccgaggacgagagtcgtggaagatggcaccggtgaacagccgacactgatcccaattgccgaacctgacctttcaaatgggaacggtactgggagcggtattggcaacggcaacaaattaaagaaaccggttcttcccgaattatcaccttgtcgttccaaagatagtttagtcacagcgatgcaaaatttaggtttcaatgatcttcccagcactgctcaacatttggttctgaatgatgtgatgacacaaatgtcaaagagttcggatttaattttttcaaccctgccagttccagctcttggaacacatgaagatcacgatgcaagtttacaatatgtcgaggacttggatatttggttggagggcttacctccatgcatgttaatcaattcgcaaaccatgacagtaactactgcattatag

SEQ ID NO: 75631 - DNA, 1311 bp, Saccharomyces pastorianus
atgtcaaccaaaccagagaagccaatatggatgtcacaagaagattatgaccgtcagtacggctcaattactggtgatgaatcgtccacagtctcaaaaaaagactccaaagttactgccaatgcgcctggtgatggtaatggatcattaccagttttgcaaagcagctctacccttacttctaaggtgtctgatctacccattgaggcagaatccgggtttaaaatccaaaagagaagacatgaaaggtatgatcaagaggaaagattacgcaaacagcgtgctcaaaaattgagagaagagcaactaaagagacatgaaatagaaatgactgcaaatagatccataaatgttgaccagattgtccgagagcactataatgaacgtacaataatcgccaatcgcgctaagaggaatctatcgcctattattaagcttcgtaattttaacaatgcgattaagtatatgttaattgacaaatatacgaaacctggagatgtcgttttagaactcggatgtggcaaaggtggtgatttaagaaaatatggtgctgcaggtatttcacagtttattggtattgacatttccaatgcctctatccaagaagctcataagagataccggtccatgagaaatttggactaccaagttgtgctaattactggggattgctttggcgaatcattaggtgttgcagtagagcccttcccagactgtagatttccgtgtgatatcgtttcgacgcaattttgcttgcattatgcttttgagaccgaagaaaaagcaaggagagctttactgaatgtcgccaaatcactcaaaattggtggtcacttttttggcacgataccagattcagaattcattcgttataaactgaataaatttcccaaagaagtggaaaagccatcttggggaaactccatttataaagtgacatttgagaataattcataccaaaagaatgattatgagttcacatcgccttatggtcaaatgtatacttattggctagaagatgctatagataatgttcctgaatatgttgtgccattcgaaaccttaagaagtttagctgatgaatacggtttggaactagtatcgcaaatgccttttaataaattttttgtccaagaaattcccaaatggattgagaggttttcgcctaaaatgagggaaggtttacaaagatctgatggtagatatggtgttgaaggggatgaaaaggaagcggcatcatatttctataccatgtttgcattccgtaaggtaaaacagtatatcgaaccggaaagcgtaaagcccaactga

SEQ ID NO: 75632 - DNA, 2550 bp, Saccharomyces pastorianus
atggaaactattgattcgaagcaaaatattaatagggagtctttattggaggaaaggaggaaaaaactagcaaaatggaaacaaaaaaaagcacaatttgatgctcagaaagagaatcaaacttcacgcaatgacattgttactaacagtttagaagctaagcagactactgaaaagtttacggaaagacaggaacgtgtaaaagaagagcttcggaagagaaaaagtgaatttaggaaatctgacgaacctgtatcggttaagccttcgaagaaaaagtcgaagagaagtaaggtaaagaagaaaatatccttcgacttcagtgatgacgatgattctgaaataggagtttcttttagatcgaaggagcacattcaaaaagctccagagcatgatattgaaaaagatccactggatgagtttatgacgtcattgaaggaggagaaaatgagtaatagtaaaggcatgtacgacagaggcgacattcttgatgtagaggatcaattgtttgaacttggaggaaccgacgatgaggatgttgaagataatacggataattctaatatagcgaaaattgctaaactcaaagcaaaaaaacgtgtaaagcaaatttattactctccagaagagcttgagccgttccaaaaaaaattttatatagaatctgaaacagtttcctcgatgtcagagatggaagttgaggagcttagacttagtctggataatatcaaaataaagggaacaggttgccccaaaccagtcacaaagtggtctcaactgggactatcaacggacaccatggttttaattacagaaaagttgcactttggctccttaacgcctattcaatcccaggctcttcccgctattatgtcaggtcgtgatgttataggaatatcaaaaactggctccggtaagactatctcctatcttttaccattgctaagacaagtaaaagctcaacggccattatcaaaacatgaaacagggcccatgggtttaattctggctccaactagagagctagctttacaaatacatgaagaagttactaaattcacagaagcagatacatccattagatcagtatgctgtacaggtggttctgaaatgaaaaagcagattactgatcttaaaagaggcactgagattgttgttgccacaccgggacgatttattgatatattaacactaaatgatgggaaattacttagtactaaaagaataacgttcgtagtaatggatgaggcagacaggctgttcgatttaggttttgaacctcaaataacgcaaatcatgaaaactgttcgaccggataaacagtgtgttctatttagtgcaacttttccgaacaaactacgtagttttgccgtaagagttttgcattccccaatatctattacgattaattcaaagggaatggttaatgaaaacgtaaaacaaaagtttagaatatgccattcagaagatgaaaaatttgacaatctggtgcagcttatctatgagcgcagtgaattttttgacgaggttcaaagtgaaaatgacggacagtcaagcgatgttgaagaagttgatgctaaagccattatatttgtatcaagtcagaatatttgcgacttcatttcaaaaaagctgttaaatgctggaattgtgacctgtgctattcatgcaggtaagccatatcaagaaaggcttatgaacttagaaaagttcaaacgagaaaagaacagtattcttctctgtacagaggttctctcaagaggtttaaatgttcccgaagtgtcgttggttattatctataacgccgtcaaaactttcgcgcaatatgttcatactactggaagaactgccagaggaagtcgctccggtactgctattactcttctattgcatgatgaactgtcaggtgcttatatcttgagcaaggcaatgcgcgatgaagaaataaaagcttcaaactctctgcaagcaaaagaacttcaggaaatgagtgccaagtttgaatccggtatgaaaaagggtaagtttaggttgtcgaaagggttcggcggcaaaggactggaaaatattaaaagtaaaagagaggaagctcaaaataaagatttggagctcaaaaagaatgataagaggagcgatgacttggaaaagaaaatcaacaatccacacgaagggcatgacagtgagcctgagtcttctgcgcttattccgagactcaattatgaactattcaaagagtctacagacgggtcgatcatcttttacgccaaggtttatattaatgatttaccccagattgtaagatgggaggctacaaagaatacaaccttattatttatcaagcatgaaaccggatgtagtattactaacaagggtaaattttaccctgaagggaaggaaccaaagaatgaaaacgatgagcctaaactatacttattgatcgaaggccaagatgagaaagacatacaattaagtattgaattgctggagcaaaaagttaaagagggggtcgtaaaggctgcaagcttgtctttgaagagtactaagtactag

SEQ ID NO: 75633 - DNA, 2196 bp, Saccharomyces pastorianus
atgatccgtttagctcagcaaacacaagtactgaagggcaaacccccaaaccagtttgttccacatccgacaaagaattcgctgactcatccaatgaaatttaacggtacaatcgctatggagcaccatgaacacaactatgccattccttacacgcctgctacttttaacaatccagccctcgctacttatcaggtaagcccagccaaccattttgttcctcactttggtggcaacattggagccaacaacaacaatcatctagctcagaataacagcaataatagtaacaaccatcataacaataaccgtaatcatcaccacaataacaatcgtaaccatcatcaaaataaccataatcatagcaagtataataactccaatcaaggtaattcaattagcccagactccccatggtttcataaggtttgtgccttcgaagattgcgtttcacagactctttatatgtcacaaactccaaggcgtcaaaacatgaaacaccattcagaacatccaaattccaacgctaatccattattttgggattctataggtagagcaatggggctgtatcatgatctactcactacaccggaattaaattctgatcgtgtctccaagcttgtacatttacttcacaatgggttgagggctaatagaaatcagttgacgagaatgaacaagaaacctgattacgactctcaatcctttcacaaagaaatgacaaactatctttgcaaatctttgagagagatctccgaggacgttctaaacggcaaggtcgaactgaacgaatacggtgctatgcatttgataactgcgtttaaggagcttttgttgtttgaggaagctgtcgacatatggaaagctgcaatcaatgggcgaaatacctacacatctaatatttttctgaatccaagagttgtcggtgttatattacccatcttatacgacaatggtgtctcttatccagaaattcaagctctatatgaaaagtcttcatcgatgattaattacttccatccaaatctttcagttgggatgatcagagcctctttatctgctagtgaaaatgacatggctctcaaattattccaaaaattatgccaagaatcaaccgaaatgaaatacggttatttgatagaaacccatctttccttcattggtgaatgtaaagacttgaatgtggctcaaaccttttttgacaaggctttaaatgatgaaatgccatacaagatagacttgcaagtttcctacgtgaaatcctttttaagaaacatatggagccaaacccgtgatttcaaccacatctatcaaatctggtacaagtcttctttacattatggtagaaacgtcaaccacggtatttcttcatctttgaatgacacttttttcgacatttttcttgaaaattatgctgtggacaagatgcaaggttttcaaacattacaaaatattattcaaacttacaacaacatcaagcatatagatgaacctttctttaacattatcttggctaaatgcactgtctggcatgaccgcagtattttagaatacatcgataagagttacgaggcgtaccacattccaaaaacaatagtcgcttatagaatcttattaaagtctatgggatctgtcgatgatgcttcgaatgcagaaattctccaaagatggatggatttaatccgcaaatcagatgaaattggtcaaagatttattgccaacgcggattgggcggccttaagagatgctactgtaacatggacccaaaatgatagagattccaagaaaagtaacatgaacagcactcaaataagcagaaccgcaactccttcgccatccttaactccaatggatactccagcaccagagcatttgttcaacaatcctcaaaatccaatggacttctactcttatccagcattgcaagcagcgactgcttctggtgcatttgatgaatttgctgcggaggctgcttcttcttccataccagttgacggcagaatggttttgtatttgaaaattgttaaacgttactctccatattgccgtgattccagacaactagccagattaacaacagggaccgctgtcaaatattccgttttgcaagaagttttgaaccaattccaaactttaatcgttaacgatattcctattcctgaattacataatttgaagccaacgtgtgtttaa

SEQ ID NO: 75634 - DNA, 1353 bp, Saccharomyces pastorianus
atggtcaatagtaagaggcagcagagaagcaagaaagtagcgtcatcctccaaagtgccccccaccaaggggaggacatttactgggtgctgggcatgcagattcaagaaacgcagatgcgacgagaatagaccaatctgttcactgtgtgccaaacatggagataattgtagttacgatatcagacttatgtggttagaggagaacatctacaaagtacgcaagcattcactgatcagttcattacaggctcgcaaatcgaaatcgaaaccattgtgccagaaaatctcaaaatcaaggtttaaacaaatgacccattttagacaactatcacccccgacaagtgactgcgaagacagcgtgcacgaggcaagtaaggaaactacgcttcctaacgataatacattcaccataagcgtacggagattgaagatatacaataacgctgtggcctctgtctttggtagcatgacaaatagagattatactcaaaagcgcatagacaagaagttggacgaattgcttaatatggtggaaaacgacatatctgtggtcaacctcaattgctccaaacacgggccttactcagttttcagggccaatccggctgcagttacctctgctcttacagatcagctgccgtcgccaggtcattcgatgtcgtcagcagaggaaaccactactgcagcgctgtcatcgccgccagaagacagcacctctttgatcgatattatccaaggcaaaattttcgggatcctatggtttaattgctacgggaacatgatattgaaccgacaagaatacacgacgtggttcatcaataagatgaggaactcgttgaccacggaattcatacgcttccttgggaaaataattgacgacccggacatcaatatggcctcgtgcctgttcaaagagtgcatcgctcgttggagttgtgtcgattggcaatccatagctataacaatgctggtcatcattcatggatatacctgccccaacttgacaaagcttctaagagtgtggtttctccagcaaaagctattgagattttcgatgtatccgctggtcaactttatcataaacaatacacaagatttagacgttctgtaccattgtaatggattactagggaatgccgacttattcgaggatccctatcaggacgagcttacgtcggagttacatgtcttggtcacggagcgcctagtgaatagttggaaagatacaatattgcaacaactttgctcatgtcaagataccacactttcatgttcccaactgcggtactggcagctacaactgaagtgtaatcaacaattttacaaggatgtatatgccatgcaggactag

SEQ ID NO: 75635 - DNA, 1467 bp, Saccharomyces pastorianus
atggctgaaactgaaagactaatgcctaacggtggttcccgcgaaacaaaaccgttaattacgggccatttaatcttgggcacgatagttgcttgtttggggtcgatccagtacggataccacatcgcagagttgaatgcgcctcaagaattcttatcgtgctccagatttgaggcaccagacgaaaacatctcatacgatgacacttgggttgggcaacacggactcaagcaatgcattgcgttaaccgattctcaatacggcgcaattacgtctatattcagcataggcggactgtttgggtcgtactacgccggtaactgggccaaccgatacggaagaaagtacgtgagcatgggcgcctcggccatgtgcatggtttcttctctgctgcttttcttttccaactcctacttgcagttgctatttggcaggttcctggtaggcatgtcctgcggcaccgccattgtgatcacacccttatttatcaacgagattgcccccgtggagtggagaggcgctatgggatctatgaatcaggtttctatcaatctaggtatcctgctgacccaaaccttggcactcaagtacgcagactcctataactggaggtggcttctcttttccggatccgtgattgcggtagcgaatattttagcttggctcaaagtggacgaatctccaaggtggctggtgagccacggattcgtctcggaagctgaaactgctctgttcaagttgcgtccaggaacgtaccaacaagcgaagcaagaaattcaggattggcagcgtagccatgcgcacaaccgcgacccggagtcaagcgaagagactcattcaggacccacactatggcaatatgttaccgatccctcatacaagaaaccgcgcacagttatactcgccatcttgtcgtgccagcaattttgcggcatcaactctattatcttctacggtgtaaaagtgatcggcaagattctaccggactactcgattcaggtaaattttgccatctccatcctcaatgtcgttgtcactctagcagcatctgcgatcatcgaccacgtcgggcgccgtccattattgcttgcctcgactacggtgatgaccgccatgtcgctgctgatcagtgtaggtctcaccttgagcgtatcctttttactggtcacggccacttttgtctatattgccgcattcgccatcggtctgggacccatccccttcttgatcattggtgagctatcctacccgcaggatgccgctacagctcaaagttttggtactgtgtgcaactggcttgccaccttcatcgtcggatacctcttcccgataggccacggcctcatgggcggctacgtatttgcgatcttcgccgccatcgctgccatgtttgctacatatgtgtacaagcgtgtacccgagacaaagggcaagactacatacagcgaggtttgggctggctactga

SEQ ID NO: 75636 - DNA, 717 bp, Saccharomyces pastorianus
atgacagcaacgatcacaaataagaaatcatgctctggttctgttgaggcaggaaagacacgtttaacaactgaatggaagcctgaaagccaagtaccccaatatgttaaaaatgagctctctaaaccccatccaaactatatcctggcgtttttgaacgtggtacagcaattaaaaattcagagaagaaccggttatcttgacctcggtattaaagaatgtgaaagcatatcagatcacatgtacagattgagcataatcaccatgctgatcaaggattcgcgggttaaccgcgataaatgtgtccggatcgcattggtgcacgatatcgccgaatctttagttggcgatattactccagttgaccctattgggaaggaagaaaagcatcgtcgggaatgggaaaccataaaatatctatgtaatgctctgatcaagccatacaatgagatcgcggcaaaggaaattatggacgattggttggcttatgaaaatgtcacctcattggaagctagatacgtgaaagatatcgataaatatgaaatgcttgtacaatgttttgagtacgagagggaatacaaaggaacgaaaaacttcgatgatttctttggggctgtagctagcataaaaacagacgaagtaaagggctggacaagtgaccttgtcgtgcagcgccaaaaatacttcgccgatttgactcaatcgataactaaataa

SEQ ID NO: 75637 - DNA, 1347 bp, Saccharomyces pastorianus
atgttgcgacttttttcactggcacttatcacatgcttaatctactattccaaaaatcagggcccatctgctcttgttgcggccgtgggatttggtatagcaggctatttagctacagatatgttgattccacgtgtgggcaaatccttcatcaaaataggcctattcggtaaggacttgagtaaacctggccgtccggtgcttccagaaacaataggtgctatccctgctgcagtttatttatttgtaatgttcatttacattcccttcattttctacaagtatatggtcataaccacttcaggtgggggccatcgcgatgtctcagtggttgaagataacggtatgaattctaatatttttcctcatgataaactatctgaatatttgagcgctatcctatgcttggaaagtacggtcctcttgggtatcgctgatgatttatttgatttacgttggagacataagtttttcttgcctgccattgcagccatcccactgctaatggtttattatgtggattttggagttacgcatgtacttattcccggattcatggaacgctggttgaaaaagactagtgttgatttggggctgtggtattatgtttatatggcatcgatggcaattttttgccccaactccatcaacatcctggcaggtgttaatggtttagaggttggccaatgtatagtgttggccatcttagcgctattgaacgatttgctgtacttctcgatggggccattagccacaagagactcccataggttttccgctgttttgattatcccatttttgggtgtatccttggcgctatggaaatggaatcgttggcccgccacagtgtttgtgggagatacatattgttatttcgctggaatggtattcgcagtcgttggtatactgggtcatttttcaaagacgatgcttttgctattcattcctcaaatcgttaattttatttattcatgtcctcagctattcaaattggtcccctgcccgagacataggttacctaaatttaatgaaaaagacggtttaatgtatccatcaagagcaaacttaaaagaagaaccgccaaagagcatttttaaaccgatcttgaagttactatactgtctccatttgattgacctggaatttgatgaaaataatgagattattagcacctctaatatgacgttaataaacttgacattagtatggtttggccctatgagggaagacaaattgtgcaatacaatcttgaagttgcaattctgcattggaattttggctttacttggaagacacgctataggcgctatcatctttggccacgacaacctatggacagtacgttga

SEQ ID NO: 75638 - DNA, 489 bp, Saccharomyces pastorianus
atgaccacatctttttatgatttagaatgcaaggacaagaaaggcgaatcttttaagtttgaccaactgaaaggcaaagtagttctcatagttaatgttgcctccaagtgcggcttcacgccgcagtataaagaattggaagaactatacaaaaaatatcaagataaggggtttgttattttggggttcccatgtaatcagttcgggaagcaggaaccgggctctgatgaacaaattacggaattttgccagttgaattatggcgttacattcccaattatgaagaagattgatgttaacggaagtaatgctgactctgtctataattatttgaaaagccaaaaagcaggtttactaggtttcaagggtatcaaatggaattttgaaaagttcttagttgattccaatggtaaggttgtccaaagattttcctccttaacaaaaccatcgtccttggaccaagaaatccaaagcctgttaagtaaatga

SEQ ID NO: 75639 - DNA, 1164 bp, Saccharomyces pastorianus
atggactctattcaagaatcagatgtactaaatgcagtgaaaacaaaactaccgccgtgttgtttgagaatattcaggaataagatcatccttgttgggacgtatgatttagataagtcaactggatacagatcaggctcactggatgtcttcacaatggacctcaaacttttattttcaaaagatacgtatggcgcaatcttagatttgaagctatccccctttgatgatacattgatatgcacggcccattcgacaggtaatatcatgctatggaggatagggtgcacagataaggatgatttccaatcaaacgaactagatattcatgcaattgcaaatctacaactctttgaaaaagatgttctcattgcctcgtgccatttttccccacttgattgtaagaaattacttgtaacaaatacggcaggcgaagcagctaccattgatataagaacactatctgtacagttcacggcatcagcaatcgcacaggcttactcaaaactagataaaatagattacgaagttcaaggtgcaaccgaaaaagtcatccatgttgaatcggaacaatttttgaaaccccatgaactcgagtgttggactgcggaatttggatctctacagccttttcaagacgttgtatttacaggaggtgatgattcgaggattatggcccacgacttacgttccaaagaattcatttggggtaataatcgtattcatgatgctggtgttgttagcattaagtgtagtcaacctaactttcgaaataataaacccacgtccataataactggatcctatgatgataacattcgttctctggatttaaggatgatgggtgagtccatatttcctggtgaaaatgtcccaacagttaataaattggcgtgtgatcttggtggcggtgtttggagatttgttgaatcccccattgatcaggaacaatctcaccacaacggctccgatcggcttttagtttgttgcatgtacaatggtgccaaggtggtgaccatgaatgataattcagatgagtattttcaaattcaacattatctgaagaagggccatgattcgatgtgttacggtggcgactggtcaaattctttgatcgcaacatgctcattttatgataattccttgcaaacatggatagtttag

SEQ ID NO: 75640 - DNA, 1452 bp, Saccharomyces pastorianus
atggccagagcatcctctactaaagccagaaaacagaggcatgatccacttttaaaggatttagatgcagctcaaggtaccttgaaaaaaatcaataaaaagaagctagcgcagaacgatgctgcaaatcacgatgctgcaaatgaggaagatggatacatagactccaaagcatcaagaaaaattttgcagttggccaaggaacaacaggatgaaattgaaggtgaggaacttgctgaatcagaaagaaacaagcaatttgaagccagattcaccaccatgagctatgatgatgaagacgaagacgaagacgaagacgaagaaggttttggagaagacatctccgattttgaacccgaaggtgattataaagaagaggaagagatagttgaaatcgatgaagaagacgcagcgatgtttgagcaatatttcaagaaatcagatgattttaactctttaagtggtagctataatcttgcagacaagattatggcctctatccgagaaaaggaaagtcaagttgaagatatgcaagatgatgaaccacttgctaatgaacagaatacctcaagaggcaatatttcatccggtttgaagagtggagagggtgttgcacttccagagaaggtcatcaaagcatatactacggtaggtagtattttaaaaacttggacgcacggtaagttgccaaagttgttcaaggttatcccatccttaagaaattggcaagatgtcatttatgtgaccaacccggaagaatggtcaccacacgttgtttacgaagcaacgaaattatttgtatccaacctaactgctaaagaatctcaaaaatttattaacctaattttacttgaacgtttccgtgacaatatcgagaccagtgaagaccactctttaaactatcatatataccgtgcggtgaaaaaatcgctttataaaccaagtgccttcttcaaaggtttcctattcccattggttgaaacagggtgtaatgtacgtgaagcgacaattgcaggaagtgtgcttgctaaagtctctgttccggctttacattcttcagctgccttgagttatcttttaaggctacctttctctccacctacaactgtttttatcaaaatattgctcgataaaaaatatgctttaccgtaccagacggtggacgactgcgtgtattactttatgaggtttagaattttggatgacggtagtaatggggaagatgctacaagagtactcccagtgatatggcacaaggctttcttaacatttgcacaacgttacaagaacgatattacccaggatcagagagatttcttgttggaaactgttcgtcaaagaggccataaagatatcggtcctgagattagaagagaactattggcaggagccagcagggagtttgttgatccacagggagctaatgatgatttaatgattgatgtcaattga

SEQ ID NO: 75641 - DNA, 1113 bp, Saccharomyces pastorianus
atgagtgaatctccaatgttcgctgccaacggcatgccaaaggtaaatcaaggtgctgaagaagatgtcagaattttaggttacgacccattagcttctccagctctccttcaagtgcaaatcccagccacaccaacttctttggaaactgccaagagaggtagaagagaagctatagatattattaccggtaaagacgatagagttcttgtcattgtcggtccttgttccatccatgatctagaagccgctcaagaatacgctttgagattaaagaaattgtcagatgaattaaaaggtgatttatccatcattatgagagcatacttggagaagccaagaacaaccgtcggctggaaaggtctaattaatgaccctgatgttaacaacactttcaacatcaacaagggtttgcaatccgctagacaattgtttgtcaacttgacaaatatcggtttgccaattggttctgaaatgcttgataccatttctcctcaatacttggctgatttggtctccttcggtgccattggtgccagaaccaccgaatctcaactgcacagagaattggcctccggtttgtctttcccagttggtttcaagaacggtaccgatggtaccttaaatgttgctgtggatgcttgtcaagccgctgctcattctcaccatttcatgggtgttactaagcatggtgttgctgctatcaccactactaagggtaacgaacactgcttcgttattctaagaggtggtaaaaagggtaccaactacgacgctaagtccgttgcagaagctaaggctcaattgcctgccggttccaacggtctaatgattgactactctcacggtaactccaataaggatttcagaaaccaaccaaaggtcaatgacgttgtttgtgagcaaatcgctaacggtgaaaacgccattaccggtgtcatgattgaatcaaacatcaacgaaggtaaccaaggcatcccagccgaaggtaaagccggcttgaaatatggtgtttccatcactgatgcttgtataggttgggaaactactgaagacgtcttgaggaaattggctgctgctgtcagacaaagaagagaagttaacaagaaatag

SEQ ID NO: 75642 - DNA, 1572 bp, Saccharomyces pastorianus
atgttgttttcgtcttcatcttcttcacttaattccgaggtttcacaagtgttctcggaaaatatatctagtagatccactactctgactgaaagttccacacaaagcgagataaggcagcattttggtaatgaagatttcagtggtgaactaccaaaaaaattaattcaactcaagaaattaaaaaatggtggcactacaatcaagaaggctaaggaagaccttgagtattgctatgattcactacggctgtacgaaaatccctatgtaacatcatctgtagataaaaaatgtggttacagcattgaattgtatctagataacaagtacaaaacactaatgttctccgatttacaattgaatgctgactatccgttgtattacgattcctcactggataatatatctacaaatgttgaaagagaaagagccactcctctacaaatcaaaggaaagattaggataaacattgatagagaagaccaggccctcttaatcacttcccattcaatttctttaaaatgtttcacaaaggaatatgcatgctttgtaaattcagaaactagcaaaaactcctatagtgacaaaattatcaaagaacttaatcacacagagttttttgagtcttccacctaccccaaacagcagttgagagtcatacaccactcattaaatgataagaaaattctattgacaaagggcacgtacgattacccattcacttttacccttcaagcaaatactttcccagcaagtttctcttccttctttggcaagacccattttcgaatagaaagcttaacaacaataatgagaataccaagtaaacctaaaaacttactcaaatttttgaagaatgaaagttttacagataagatcattttaacagaagaaattaaagttaaaagagtcctgccttcaacgagtatgcttaagtttgaaacatttcaattaaggtcatacaatactgcaagtgatatcgtagtattggtcattggaaactccaagttgattgaaattggtatgcctttccaaatgatattatcaattaccaaaacagattcttccattgaattacaggaagcttctttggcagttgcacagagaatggcaataccaagtattgatttgaagaccaagaaaatactacgagagccatacattaaaaagtccgagtatttactaagaactgtagaaagccaaagtttcgattccgacaagaccattttcggattttgctttgatgacgttgtcatcccaacctatgcggatggtctaccgagctggtttaaaacattctactgtgaaccaagttcattttatcccaatcatgctgccctcaaagtaactcatttgcttttgttcagaataacctatagcaggaatgaattggtggaagggcttgaaatgaaaaaaaattatcgtattacggtgaattttccaattttagttggcgatagtgatatttcgaccagctctttgttacccaaatatgaaaaatttgaaaatattagtgatctacaagatgaacccccactatattctatggtagcaggtgagaatagcttatga

SEQ ID NO: 75643 - DNA, 924 bp, Saccharomyces pastorianus
atgttcaagaggcaattatcgactagtgttcgttatctacagcattatgatgagtcgctattatcaaggtactatcctgaaagtcttttaaaatccataaaacttgctcaacaaacgataccagaagatactaaattcagagtatctcgtaacgtggaattcgcaccaccatatttggatgattttaccaaaatacatcctttttgggattacaaaccaggcatgccccatctccacgctcaagaggagaataataacttcagcatctttagatgggaccaggtacaacaaccattaccaggcgaaggtaacattctgcctccaggagtcagcttaccaaacgatggtggtcggaaatcgaaaagcgccgatgtagctgcagggctacacaagcaaaccggtgtagatccggattatatcactagaaagttgactatgaagccgctggtgatgaaaagagtgtcaaatcagaccgggaagggtaaaattgcgtctttctatgccttggttgtcgttggtgacaaaaacggtatggtaggtttgggagagggtaaatctcgtgaagaaatgtccaaagcgatctttaaagctcattgggatgcggtaaggaacctgaaggaaatacctaggtatgaaaacagaactatttatggtgatatagattttaggtatcatggtgtgaaactacatttaagaagtgcaaaaccagggtttggattacgtgtaaaccatgtaatctttgagatttgtgaatgtgcaggtatcaaagatctgagtgggaaagtatataaatccagaaacgatatgaatatagctaaaggtaccatcgaggctttcacgaaagctcaaaagacattggatgaggttgccctgggtagaggcaaaaagcttgttgatgtcaggaaagtttactattcaagctga

SEQ ID NO: 75644 - DNA, 444 bp, Saccharomyces pastorianus
atgactgctactagcgacaaagtactaaagattcaattgcgctcagcaagcgctactgtacctaccaaaggttctgccactgccgcgggatacgacatttatgcatctcaggatattaccattccggctatgggtcaaggtatggtttccaccgacatatcgttcaccgtacctgttggtacctacggtcgtattgcgccaaggtcaggcctggcagtgaaaaacggtatccaaaccggtgctggtgttgtcgacagagattacaccggtgaagttaaagtagttttattcaatcattcacagagggatttcgcgatcaaaaaaggtgatcgcgtagcccaattgattctggaaaaaattgtcgatgatgcccagatcgttgttgtagactctctggaagaaagtgcaagaggggccggtggctttggtagcactggtaactaa

SEQ ID NO: 75645 - DNA, 366 bp, Saccharomyces pastorianus
atgagcaaccaggcactatatgagaaactcgaacaaaccaggacgattctgtctgtgaagctggcggaattgataaatatgactacgatagccgatagaaatgatgatgacgaggattcattcgcacaagaaaattctgagctcgctgtggccacgaccagtgtgatgatggtgaataaccagaccatgcaattgattaaaaatgttcaagacttgttgatcctgaccagatcgataaaagagaaatggctactgaaccaaattcctgtaacggaacactcaaaagtgactcgttttgacgagaagcagatagaggaattactggataactgtatagaaacgttcgtggcggaaaaaactacgtaa

SEQ ID NO: 75646 - DNA, 528 bp, Saccharomyces pastorianus
atgcctcagtattttgccattattggtaagaagggcaatcctgtctatgaaatcgagtttaccaatgcagaaaatccacagggttttcctcaggatttaaaagaattaaatccgttcatactgcatgcatcactagatatcgtagaagatttacaatggcaaattaatccgacttcacagttaaatgggaacggtggaaacggatccaatggcggtggtgggttccttcgatctagagctataaacaatactgataattgttatctaggtaaagttgatcatttttatggactagcaataacggcttatattagctatagtgggatgaagttcgtgatgatccatgggaactcagccaacagtagcgtagttattgacgacaataatatgaggtcattctaccaagaggtacacgaactatacgtaaagacactaatgaacccgttttataagattacagaccctattaggagcccggcattcgactcgagggtaaggacattagcacgtaagcatttgtccaaataa

SEQ ID NO: 75647 - DNA, 2085 bp, Saccharomyces pastorianus
atgactcatacaaatgagcacgaccataaggctgaacaacaacaaaatggaaggggcgatacaacaacagagactgtaaaccctctgaagatgaaattggttaccaaacttctcattgataataaatttggactaatggacgacttgaattttagtagaccattaaccgcttcttctgagggtgtaccaatatcagcaaagacatcagaattgggtacggagtacctcaagaatcaacaagagaattcagtaagcccaatacttccaatatcaagaagtacaagaataaaagcagacagggtgagaatatatttagactattattataatatattagagcgttgcatttcaattgatagctcccagaatcatcatgagggtgttgaaggggtgtacaacccattacaagttattaggaatcgtaaattaaaaaagaagcatcatgaattacctaccagagagttttatactacaaaacaccctattattgccattaagcagttttcgaaaaaacctaacaaaaaaatgccgtggtttgtagatataaacgagaagtatatggatttgacttggagaacttcgcattgggaagaattagtggatcctcaaggtaagctttggttccagtcttatagtccttccaacgaatcgagcggatcatcatcatcccgccggcatcatggacaccacattcatcccagaagacatttacgacatcactccagggtccgtacagctaattcagtgcactcaaacactcaatcactaacaccgaaacgagtcatgaccaatgaagaagacaataataatcataacaataataacatgataacgaagatcgcaactactccagaagctcagatttcaaggaacaaaaaatctgatctcaatttaagtcacattcatttagaggtaccaataaccaatacagttacaaacacctcatcagatcaggggtcattggtcatcgaagcaaagggcagtagctatggaggtgatcgtcgtggaagtagtaataccagtggaagtggtgggaaaagaaattctaaacattatcgttcaaaatcagcaggccccccggaaaacgagaaatcaagaatgaatgggctcgaaaaaatcattagtaaaacgtcgaaaggatggtctagatcaccaaaaaaaaatacgcctgggcttgaaaaacaggtgcttctgaatcccactattagtaatggaggcaccagcagaaggagcagtaataatggagagagtattagtaccaacagtagcaaaagtagcatgggaattacttttggaaacactgaaacttacaagacgccggttgataatgggaaagatgctataatacggcaaagtttgttgagcgaagtgccagttcataccttgagaggtaaaaccagcaacagatcgttgcgagcagaaggtgaacaagctcttgaaagtgacaaagaattaccaaatggtgctgggagtatttacgaaggtgcgcctagggagaagactactagtcaaggtagcgaaccagtgggattagtaagcgattccttacaggttgacgaacagttacagagatactggcatgatacaaggtatattatgagtaccgtagctatgatgcaacacaggagagagacacatgatatagtgaagaggagagaaattgcacgaagaaacgaaattgaaattacacaagatgcagatacaaacattaggaagactgcagatgctttgactcagtatgataatgaattgaataaagttttaaagctaggtaatgactggacatcaaaacttctgaacgactattcaattcgtgtagaaactttgatatcatctagtgacagaattcttagtgatataaatacaacattgacattgaagttgaaaatgtttcaagagaatacagaaaggtatgttacggtgaaagttatgagagcccaaaaggtgaccaaaaccatatatcggttgctggaatttggcattgttttagttctttggacaatttggtttttgttcagcgtcctgagaagcattcggttcacaatttttttagttctaaaaatcattaaggcattgctgtggtaa

SEQ ID NO: 75648 - DNA, 717 bp, Saccharomyces pastorianus
atgtttactggtattgtagaatgcatggggactgttttggaaaacaacccatatgatgactctgaaagtggaggtcaaggagtttctattactattggcaatgcggggagtattctcaccgattgtcacgttggagattcaatagccgtaaatggggtatgccttactgtgaccgagtttaataacgactccttcaaagttgggatatcaccagaaactataaaacgaagtaatgtcgcttcctggattcaaggcaccaaggtcaacttggagagagcggtatctcaagacgttaggttcggtggtcattatgtacagggtcacgtagacactgttgctaatattgtctcaagaagacctgaggggaattcaattatttttgggtttcagttaagagatcaagagtactttaaatacatagtagaaaagggattcatttgtatagatggaacttccttgaccataatcaaggttgacccactttcgcaaggtggagccttctatattagtatgataaagcacacccaagacaatgttatcatgcctttgaagaaaattggcgacgaggttaatattgaagtagatttgactgggaagattattgagaagcaaattctattaacgttggaaaaccaaatatcaaagaaagatagtactttgaatactatgatctcaaacattatcgaggagaaggttagaaactacctaaataaataa

SEQ ID NO: 75649 - DNA, 840 bp, Saccharomyces pastorianus
atggatagaactcaaacgtttattaaagaatgtcttttcacgaaatgcctggaggaccctgaaaagccctttaatgaaaatagatttcaagatacgttgttgctactgccaactgatggcggattgacttcaaggcttcagagacagcaaagaaaatcaaagctaaatcttgacaatttacaaaaggtctcccagttagagagtgcagacaaacagttggaaaaaagagattaccaaagaatcaacaagaactctaaaatcgcattaagagagtacatcaataattgtaaaaaaaatacaaaaaaatgtgtgaaattggcatacgaaaataaaattactgataaggaagaccttttacactacatagaggagaagcatccaacgatatacgaatcattaccgcagtacgttgattttgtaccgatgtataaggaactatggattaactatattaaagaacttttgaacattacaaaaaacttaaaaacattcaatggatcattagcattattaaaactatctatggcagactataatggtgcgctgttacgcgttacaaagagcaaaaataagactttaataggccttcaaggcattgtgatctgggactctcagaaattttttatcatgattgtcaagggcaatataatagacgaaataaaatgcattccaaaaaagggcacagtatttcaatttgaaatcccaatatcagatgatgacgattcggcattgagatatagtatactaggcgataggttcaagtacagaagtgtggatcgtgcaggcaggaagttcaaaagtcgtcgttgtgatgatatgctatattatatacagaattag

SEQ ID NO: 75650 - DNA, 429 bp, Saccharomyces pastorianus
atggcgtataatcaagaagatagtaaaagactatcagacaagtataagaaggagggacattttgacaagttgaaaagagaaatattgtctaacccatggaataatacagaagagaatagtgaatcttttgaacaagcgcttaggaaaagagttgccagtactgttaaagaaatggttaacgaagatgaagaattaatatttaaaaacagagggctaaccagtgcattgattgaatcacaattggtcaaggacaactacctaaagctgggtagtaaaatggagggggataatggtgatggtgagaagaaatttgacttggatgtctatgtacggtctaagttacaggatcccaaactattggaaatgataaagggacaacttcaggaaacactgaactcttatgaagaggaagcaaatggaagtacgtaa

SEQ ID NO: 75651 - DNA, 2067 bp, Saccharomyces pastorianus
atgtccattgacgaggctgttgccagatatagagatgttataggcaatctagcaactggcaatttaaggcggattgttatacagtcagaaaaactggcccagatcattgcatcttcaaaaggtaccgttcgtttccaccataaaactcgcagcggtaaaacagtaatatacaaatgcatcaaaaaggcgctgctttccagtgtcgcgtctctatcgtcagagttttcctcagaaacagatgttcagcaattcctccatttaaattacatatatcaatctcacttccaagctttgagtggacaaataaacaaatattgcggcatgaagaaatactacgagttaaagtttgcagcaatcgactacttagaaaccgaagtccaaactaccgggcttacactctcaagattctgggtggcatctttagatgagttcattaaaaaagagcgatggccagataatggatctaactttcaaatcttttacaaactaatggctgagtattcgtcttggaaatgggattctgatgataaaaggcaactccagttcatgtacgaatttcgaatgaaactcaaagaatgtttggtgaaattttacgagaattttgatcttcaaaaatctagcgatcctctgaaagaactcattataccttgggaaaagattgtttatgtcgccaactgtatcgatgcattcactggagagcaagttaggatcgacggtgctgaattaatctggacatccaaaaatcttgtgttctcttcgatttcttctgccgttcttagattaaatgaccttcaaaatatgttcagcgcattccagccttatggggaagaagcattagttcaagactttgcgcatatacgatctttaaagtgggatagtaatgataaagttgaaagcttaattcgtgcccttatttttaatgatatgtttccttatttcaataaggaacaggtagatacgaaggcagatggtatattccttttgcgcttactgagaaaaaacttcaaagaacacattaatgacgttaaagattttcatattcaagtgataaagtacttgaattcccaatttaaaaataattacagcacattgatgacgtcatcgaaaactcaggatagaaggaaaagtcataatatgccttcttctatcttagatgatggtaacaaaattggaatgcatgtttcgcctatcgatgaatactcacattttgttgataatgatgaaccgttgtggcgagacaaagtatatccaaagatttacacaaatgagcaaacacctacacctgacgcatcagcaatatttgattctcacaggatatatgcaattatatcgctgctgcgatattacttacctgagaagagaaagttttttcggatttattatctgcccagtatttttaaaaggatattatattacggtgcaaagtttgctcaactatatttcatggaaggttgcttggaacggctagtaatagaatctctccaaattctagaaccctctttggtacatgcgataaataatttgatcaagtctagcatagaatcactgaaaaatgtaacagtgacaagtgatgacaaaacttcatctggtgtcattattttgtcctacaaagaatttaagtcactatctgaagttaacaaagatttcaatgaaccattttggcctaaccaatcaattgcgaatagttggccagatttcgcgaataagcaattaaagaggggtcaaaatttgcaagatgcatttgcattccacctttttgaaattgaactaccaattattatcgatactacaagaaatacgcatttgaaactcgtttccaacatgtgtactacgagcatattgtacttatataatgaagttgattccttatcattaactagcatacaggaaaaattagctgttttaccgacaagtaaacggaatgaaatcttattgtacaatttgaacaggctaacaaaattgaaactattgttgttgaaagagaacgaaaaaggacaaaagttttacgcatttaattttaattacaaaagggatggacagaaaacatcattaataaggttaatttaa

SEQ ID NO: 75652 - DNA, 699 bp, Saccharomyces pastorianus
atggacgtgcctgcagattcccatatcaaatacgaagatgccatcgactattggacggatgtggacgccactgtggatggtgttctaggtggatacggagaaggtacagtagtacccacaatggatgtcctgggatccaataacttcctgcgtaaactgaagtcgaggatgctgcctcaggagaacaacgtgaagtacgctgtagacattggtgcggggattggacgtgtaagcaagaccatgcttcacaagcacgccgctaagatagaccttgtagaaccggtaaagccatttatcgagcaaatgcacgttgaattggctgagctgaaagacaaaggccaaattggacaaatatatgaagtagggatgcaggactggacccccgatgccggcaagtactggctgatctggtgccaatggtgcgtgggacacctaccagatgcagaactcgtcgcattcctgaaaagatgtattgttggtttgcaacctaatgggacaatcgtggtcaaagaaaataacacacctacagataccgatgatttcgacgaaacggattcttcggtcacaaggtcagatgctaagttcaggcaaatcttcgaagaagctggcctaaagctcatcgccagtgaaagacaacgtggcttaccaagagaattgtacccagtgaggatgtacgcactcaagcccatgccaaactag

SEQ ID NO: 75653 - DNA, 321 bp, Saccharomyces pastorianus
atgtcgaaattgggtccgttagcaagatctgtgaagtggactctctctgtgggagtaatcggttctgttttttacctgtaccgatacagtaacaatggctacttctacgatcacgatgctacatggttgaaacaagatcatcaggtacaggacctggtggatagaaaagaagtggtacctggggagaccaggaaccgcaagctagttgtgacggatgatggcactgcatggagtaggaccatgggggagagcataaaagatatttggaatgaacagataagaaactctgtcgattggatctactcctggggtaagaattag

SEQ ID NO: 75654 - DNA, 657 bp, Saccharomyces pastorianus
atgatagtaaaattactccaggaaatacaagtagcacaaaatacggaggaatacgatatggaagcaaccatcaaagtggtactgctaggagattcatcagtggggaaaaccagtatagtgactaggctcaaatcaggtaagtttctagcaaaacatgcggctacgataggtgcggcgttcatcaccaagacaatcgaggttccttctaacgacgcctctacggagaaacgtatccatatggagatatgggacacggcgggtcaggaacggtataaatcactggtgccaatgtattatcgagatgcgaatattgctttgattgtattcgaattgggagacgtatccagtctgcaatgtgcaaagacatggtttcaagatttacaggaccgtgctcagggaacgcaggtaattctcgtgggcaataagtacgatttagtctgcgaagaggattcaggggaagtgactataccggcggagttacagggtctgccgtatgtggccgtaagtgcaaagacagggtacaatttcgatacattgaataaaataataatcagtttggttcccgaaagtcaattcaagacattgtcaaagaacaatgaacagggaaatatactggaaataaataaaaaaaaaagcggcagtggctgtatatgttaa

SEQ ID NO: 75655 - DNA, 963 bp, Saccharomyces pastorianus
atgaagtttacgttagaagaccaagttgtgttgatcactggtggttcacaaggtcttggaaaggaattcgccaaaaaatattataatgaggctgaaaacacaaagattattatcgtcagtaggtcagaggctagactgctggacacatgcaacgaaattaggattgaagctcacctgagaagggaaaccactgacgagggccaagtgcaacataagttggctgcgcccttggaccttgagcaacggttattttactacccatgcgacttgtcctgctacgaatccgtggaatgtttgttcaatgtcctgagagacttggatttactccctacgcaaacgttatgctgtgcagggggggccgttcctaagttatttcgtgggctaagcggacatgagttgaacttgggtatggacatcaactataaaacaactttgaacgtggcacatcagattgcccttgcagagcaaaccaaggaacaccacctcatcatcttttctagtgccaccgcgctttacccatttgtgggctattcccagtatgcgcctgcaaaagctgcaatcaaatcactggtagcaatcttaagacaagaactgacgaacttccgtatcagttgtgtttatcctggtaattttgaaagcgaaggtttcactgtagagcagctaacgaaacccgaaattacaaagttgatcgaaggcccctcagacgctatcccatgcaaacaagcatgtgatatcattgccaagtcgctggccagaggtgatgatgacgtttttacagattttgtcggatggatgataatggggatggaccttgggctcaccgcaaagaaaagccgctttgttccgttgcaatggatttttggtgtcctatcaaacattctggtcgtgccattctacatggttggctgttcctggtatatcaggaaatggtttcgtgaaaatgacggcaagaaggccaactga

SEQ ID NO: 75656 - DNA, 1182 bp, Saccharomyces pastorianus
atgagtagcagtggtgtttatacgtgtaattcatgtgtcctgacctttgatgcaagcgacgagcagcgggcccacatgaagtccgattggcatcgctacaatttgaaaagacgtgttgcacaattgccaccaatatcatttgagacatttgactccaaagtgtctgcagctgctgccagtactagcaagtctgctgaaaaggagaaacctgttaccaaaaaggagttgaaaagaagggaaaagcaagcattgctcgaaaagaaaaagaaactgttggaaattgccagggctaatatgcttgaaaacatgcaaaagagccaagaaggagatactcccgacctaagcaagctctctttgcaagaaaatgaggagaacaaggaaaaggaagaacctaagaaggaggagcctgaacagttgaccgaggaagaaatggcggaaagagtaatgcaagaaaagctacgcaacagagtcgatattccactggaacaatgtctattttgtgagcacaataagcacttcaaagatgttgaagaaaacctggaacacatgtttaggacccacgggttttatatcccagaacagaaatatctagtcgacaagatcggcttggtaaaatacatgtcggagaagattggtcttgggaacatttgtattgtttgtaattaccaggggagaacgttgaccgctgtaagacagcacatgttggcaaagagacactgtaaaattccctacgaaagcgaggatgaaaggttggagatatctgaattctacgattttacaagctcatacgcaaactttaatagcaacacaacaccagacaacgaagatgactgggaagacgtgggcagcgacgaagccggaagcgacgacgaagatctgccacaagagtacttatataacgatggtatagagctgcatctaccgacaggcatcaaagttggccacaggtccttgcaaagatactacaagcaagacttaaagcccgaagtgatactgaccgaaggccaaggtaccctggtcgctgcagagacgagatcgttcttacctgccttcgacaaaaagggcgtgcagactcaacagcgtgtttggcaaactgagaggttcgacaagaaaaggctcgataagagaagtgccaagttcgtcaataaccaaccacactacagagaccaacttctgcagtaa

SEQ ID NO: 75657 - DNA, 453 bp, Saccharomyces pastorianus
atgtgttccaggttttcttcaacatctttgaagtgcttattgtgctcacaaaatagacattgttccagtggaatatcgactctgttgcgtagcttttcttgcattactctttccgccatttcttcctcggtcaactgttcaggctcctccttcttaggttcttccttttccttgttctcctcattttcttgcaaagagagcttgcttaggtcgggagtatctccttcttggctcttttgcatgttttcaagcatattagccctggcaatttccaacagtttctttttcttttcgagcaatgcttgcttttcccttcttttcaactcctttttggtaacaggtttctccttttcagcagacttgctagtactggcagcagctgcagacactttggagtcaaatgtctcaaatgatattggtggcaattgtgcaacacgtcttttcaaattgtag

SEQ ID NO: 75658 - DNA, 318 bp, Saccharomyces pastorianus
atgttggcgcgcagtttgggttacaggttgatatcgaccagtcgtgtcttatataataaacccacggttaagtcagtggtgtcgtcgtgtcctgcgggaacatcgcttaacttaaacatatggaagagcggtaaagacgcagtggcactcgaggacaaggagtatccaaattggttatggagcgtattggatagtgatcacgttgtcgaacatgcggctgaggacccagagggacaggctctcttaaagagaagaaagaacataaggaaggcgaacaggcagcgaatcaagcaaaacaatttcttgagccaactttaa

SEQ ID NO: 75659 - DNA, 1638 bp, Saccharomyces pastorianus
atggcaacagacctaaatcgtaaaagaagtgctacctcaggcgcactgagcgtcacaaacccgaacataaaagcaactaatcgcaaaccagctagagtttatagtgtttcttctgatatagtaccgcaagcgctgacacatcccgacgaagatgtgcatctaaaaacatccaaatctcctcatgatgccgctcctagatggtcacaggtggggtttcaatctatattccatgatggttccaatgcaaggcgctcgacggattcgattgaagaggagtacagccaaggcacggagaataacgatggtcactccgaaataggttcatcaagtagtaatcgaatggaggggaacaccacgtctaatgatagtttattttcttccaactcaaggggcaataaaaggcgactgtccatcttcaccaattcaaaagataatatgagaaatcgaagcagaagcgggtcaaaaaactacggcactgttattaccggcacaagtagtaacaacataagtaggagtggctctaaattgtttcatacgaaatctaatatgagtgtgaacagtttacaatcttcactgtctacaggacattctcattcaaacaaaggcagtaatgtctttagcaaaatggcaaaaaagcttttaccctacaagccgcataattccattggtaaagacgacgttgaatccgtagttcccagcccattcagtaaatttctgcattcttcatatggtaaacataggtcacccgtacagtttatccatacttctactggaggccttattgactctggaaaatctgtatattcctttaaccctagcattaacaacaaccctaatgatacagctctatcgctgatccaagatgatgctttcgacgcgactaatgtttctttactacatgatttactgaaaaacttgccatccttgatagcaaactataaaagcttcaccgtacaggagttatttgttctggaggggaatatctggggtatatactgcagcatagttgtggagctatttaaaaacaagagggtatggcaattgccagcaaaaatagaagatattgaccggctgctggaattttatatcactttgaaaacacaaaccaaggctgccgtaacgcactcaaggtttttggccgaaatcgaggaattcattaccacttcactttacattttagagaaccagattgtgttcaattatgccaatgaggataccgtaaatacggctttgaaaagagtcggcataatctggaaggtgttttaccaacaggtttactacgacatgatggcagtgttactgcccttcgagaaaagcttccaaaaaaatagtaactactggcttgacggatatctatctgaaccttcaaggtacgcaccgtcaattgatgtccttttattaaagtgttttagagactccatcattcttccgtattacgaaagcttcctacatacaaatgacggtgccagtaagagttttcaaagatatattttcagcgaggaagaacagaacggcgtcacagaggaagataaactgacgctgctgcagtgttttgggatcctgaataccataaaaggtaacagcagaaaccaaagaattattggtgaacttcttgagggcatacgcatgagtatataa

SEQ ID NO: 75660 - DNA, 1260 bp, Saccharomyces pastorianus
atgtttgatcctctcgatttgtacacccctgatgacatccaggttgaggctttacagttcaatctagcagagagagagccaaaagatccttgctcaccgcaacgtgacgaaatattaacggctgtagatgaagaacagagtgacgacgatgacaccattatcgataatctggatctgccctccgtgaagtatgctccgccagaagttatcctttgtatactaatacttctgaagcccgatagacaagtaaacttcaatcaggagacagggaagaacaaatctgtactggaggtttgcaagagtcatgggctggaacccgatctgctgaaaagacttttaagttggtatacagaagaatggcctaacaagaggttaaactcgttggaaaagatatgcaataaaatcccaatgctgagatttacagtatcaaaagaactactgttgggctactatactagtgtattgaaaaaatacaataatagttgcggattgaatgacgaaatcatacaagaacttcttaaggaattgagctcaaggatatccgaaaactgtgggagaacggcccaaccatccatagtaagatattttgaattaagaaatctaagcacttccataccgcttcatgaaccctctttaacggccgataatcttggttggaaaacatggggatcatctttaatactttcacaattagtcgtagatcacctggattacctacataccactaatgtgaacatgttagcgaacagcgacatcaaacagattaaagtattagaattaggagcgggcactggtttagtaggactttcatgggccttaaaatggaaagaactttatggaactgaaaatatagaaatcttcgtgacggatttacccgagattgtgacgaatttgaagaaaaatgtgtcattaaataatttaggagatttcgttcaagcagaaatattagattggactaatcctcacgattttatagataaatttggacatgaaaatgaatttgacgtcatattgatcgccgacccgatatattcgcctcagcatccggaatgggtagttaacatgatatcgaagtttttggcggcatcagggacctgtcacctagaaatacctttaagggcaaaatacgccaaagaacgagaggttttgaaattattactaaaagagagtgatttaaaagtagttgaagaacggcattcagagggtgtggatgattggggtgccgttaagtatttatataggcaaatcgttcgcaattag

SEQ ID NO: 75661 - DNA, 1311 bp, Saccharomyces pastorianus
atgttagaagcactgtttagagattctgtggaagaagcaataaacgattccatcaagcaaggcgttgtgctggccgtttacaacactgcacgggatgaccagtggctgaaaagttggtttaaaggagatgatgtctcattagatactttagcggaacatagtatttggttgaggttggtcaaagacactgagcagttccagttatttgagcaagtatttcctaatgtagttgtacccagtatatacttgatacgtgctggaaagatagaattgattattcaaggcgaggatgaccgacattgggagaagttgctgacgtgcataggcatcaaagacaaaaaggctggtgagagttcgtccagggaaaccaatccaggtttggctagagaagaaaagtcatccagagacgtccataggaaaaatgcaagagaacggattgctgagactaccttagagatccaacgtcgtgaacaactgaaacaaagaaagctggctgaggaggaaagagaaagaattataagacttgttagggcagaccgtgcagaaagaaaagctcttgatgaaactcatcacagaacccttgatgatgataagccattggatgttcatgattacataaaagacgcacaaaaactgcacagcagcaaatgcgtcttgcaaatcaggatgactgatggcaagactctaaaacatgagttcaactcgtctgaaacattaaatgacgttagaaaatgggtggacctcaacaggacagatggagactgcccgtactcattccacaggggcattcccagagtgacatttaaggattctgatgaattgaagacgctagagacactagaactaactccaaggtcggcattattacttaaaccactagaaactcaaaactcggggctatctgtgactgggatggagggaccaagccttttgggccgtctttataagggattctctacgtggtggcgcaacgataaagatcctgaagtaacatcacaacgtgaggaaacatcgaagccgaatcgtcacgaagtgaggtcttcaacacctttatctggagctgcttcgtcaagctgtttccaatacaacaatgttcgggaaccagttcaatcatctgctcatgcatcaccaatgctgacacctagcggaaccaggtacccatcggaaaccaaccttactacgtcacgttctgtctcgccaaatgttttccaatttgttaacaacgatcatcaagaagatcctgaagacccaacaacctttaatggtaataatgtccatttagaaaagaaaaaggacgaagataaagaataa

SEQ ID NO: 75662 - DNA, 1584 bp, Saccharomyces pastorianus
atgagtctctcgcaggtgtcacctttaccccatatcaaggatgttgttttaggagatacagtaggccaaggcgcattcgcctgcgttaaaaatgctcatcttcaaatggatccctccattattctagctgttaaattcattcatgttcccacttgcaaaaaaatgggactcagtgacaaggatatcacaaaagaggttgttttgcaatcgaagtgttctaagcatcctaatgttttgagacttatcgattgtaatgtctctaaagaatatatgtggataattctggagatggcagatggtggtgatctatttgataagattgagcctgacgttggagttgattccgacgtggcccaattttactttcaacagctcgttagtgctattaattatctgcacgtagaatgtggagttgctcacagagacatcaagcctgaaaacatcttactcgataagaacggaaatctgaagcttgctgattttgggctcgcctcccaatttaggaggaaagatggtacattacgtgtatccatggatcaaaggggttctccaccctacatggcccctgaagtattatattctgaagagggttattacgcagatcgaacagatatatggtctattggcatcctcttgttcgtattgttgactggtcaaacgccttgggaattaccttcattagagaacgaagatttcgtcttttttattgaaaatgatggaaatttaaactggggaccctggtcaaagatagaatttactcacttgaacctactccgaaaaattttacaacctgacccaaataagagggtgacattgaaggctttaaagttacatccttgggtattacgtcgagcttcattttctggggatgatggtctctgtaatgaccctgaactcttggctaagaaactgttttctcacttaaaagtctcactgagtaacgaaaattatttgaaattcactcaagatacaaactctaataataggtacatttctactcagccaattggtaacgaattggctgagcttgaacacgactcaatgcacttccagaccgtttcgaatacacaacgtgcatttacctcgtatgattcaaatacgaactataatagcggcacagttatgacacaagaggctaagtggacgcaattcataagctatgatatcgctgccttacagtttcattctgatgaaaatgattgtaatgaattagtaaaacgacatttacaatttaatccgaataaacttaccaagttctacacgttgcaacctatggatgttttgttaccaattttggagaaagccttgaatttatcacaaattagagtaaaacccgacctttttgcgaattttgaaagattgtgcgaattattgggctatgataacgttttcccacttattataaatattaaaaccaaaagtaatgggggttatcaattatgcggtagcatttccatcataaagattgaagaagagttgaaaagtgtcggatttgaaagaaaaactggtgatcctttagaatggagaagattgttcaagaaaatttcaactatctgtagggatattatcctaattcccaactga

SEQ ID NO: 75663 - DNA, 5751 bp, Saccharomyces pastorianus
atgtcgaaagatttttcagataaaaagaaacatacgatagatcgaattgatcagcatatcctccgtaggtctcaacacgataattattccaatggaagctccccgtggatgaaaactaacttgccacctccatctccacaagctcatatgcatatacaaagcgatctatcgccaacgccaaagaggcgaaagctagcgtcttcaagtgattgcgagaataaacaatttgatttatcagctattaacaagaatttatatccagaagatacaggaagcaggctaatgcaaagtcttccagagttgtctgcctctaatagtgataatgtatcaccggttacaaaaagtgtagctttttctgataggatagaatcatcaccgatttaccgcataccaggttcctcacctaaaccctctccatcaagcaaaccaggaaaatcaattttgaggaataggttgccttcagtgaggactgtaagcgacttgagttacaataaactccaatatacccaacacaaattacacaacggtaatattttcacatcaccttataaggaaacaagggtaaatcctcgctccttagagtattgggtgagtggtgagatccatggtttagttgataatgaaagtgtttcggagtttaaagaaattattgagggcggattgggcatcttgcgacaagaatctgaagattacgtcgcgaggaggtttgaggtatacgcaacctttaataatattatacccattctaaccactaaaaatgttaacgaggttgatcagaaattcaatattctaattgtgaatatagaaagtatcattgaaatatgcataccgcatctacagatagcacaggacacattattaagtagtagtgaaaaaaaaaatccatttgtaattagactatatgttcaaatagttcgattcttcagtgctattatgtctaatttcaaaatcgttaagtggctaacgaaaaggccagatttggttaataagtttaaagttatttacaggtggaccaccggtgcgctaagaaatgaaaattcaaataagataatcataacagcacaggtctctttcttgagagacgaaaaatttggtacttttttcttgagcaacgaagaaattaaacctatcattagcactttcactgaaataatggaaatcaatagtcacaacctaatatatgaaaaattgctacttataaggggatttttgagcaagtatccaaaattaatgattgagacggtaacttcttggttaccaggtgaggtactacctaggattattatcggggatgaaatttactccatgaaaattctcataacttcaatagttgttttactggaactactaaaaaaatgcttagattttgttgatgaacatgaaaggatttaccagtgtatcatgctatctccagtatgcgaaacaatcccggaaaaatttttatctaaactaccgttaaattcatatgacagcgctaatttagataaagtgacaattggtcatcttcttacacagcagataaaaaactatattgtggtcaaaaatgacaataaaatagcaatggatttgtggctttcaatgaccggattactatacgatagcggaaagagagtttatgatttgacatcagaatctaacaaagtttggtttgatttaaataacctgtgctttatcaataatcaccccaagactcgcttaatgtccatcaaagtttggagaattattacctactgcatatgcacgaaaatatcacagaaaaatcaggaaggaaacaaaagtttactgtcacttttacgaaccccttttcaaatgacgcttccttatgtgaatgatccaagcgctagagaagggatcatctaccaccttttaggtgttgtttacactgcatttacaagtaataagaatttgtcaacagatatgtttgaactattttgggaccacctaataacaccgatttatgaagattatgttttcaaatatgattcgattcacttgcaaaatgtactcttcacagttttgcatttgttaattgggggaaagaatgcagatgttgcattggaaagaaaatataaaaagcatattcacccaatgagtgttatagcctcagaaggtgtaaagttaaaagacatttcaagcctgcccccgcagatcatcaagcgtgaatacgataaaatcatgaaagttgtgttccaggccgttgaagtagccatttctaacgttaatttggctcatgatctgatccttacatctttgaagcatcttccagaggatagaaaggaccaaactcatttagaatcctttagcagtcttatattaaaagtcacgcaaaataacaaagatacacccatttttcgtgacttttttggtgctgttacttcatcgtttgtttatacatttttggacctgttcttaagaaagaatgattcatcattagtaaatttcaatatccaaatttccaaagttggtatttcgcaaggaaacatgacccttgatcttttaaaagatgttatcaggaaagctcgaaacgaaacatctgaatttctgataatagaaaagtttctagaattggatgataagaaaacagaagtatatgcccaaaattgggttggatcaacgttattaccaccaaatatatctttcagagaatttcagagtttggcgaatattgtggacaaagttccgaatgaaaactccattgaaaacttcttggacctatgtttgaagctcagctttccagttaatttgtttacattacttcatgtgcctatgtggtcgaacaataattttatttatttcattcaaagctatgtttcaaaaaatgaaaacaaattaaacgtggatctgatcacgctgttaaaaacttctttaccagggaatcctgaactgttttccggtctgctcccatttttgaggcgtaataaatttatggatattttggagtactgtattcattccaatccaaatttattaaattccatccctgatctaaattcagatctcctaatgaagctgttaccacgtagcagagcttcatattttgcagcaaacataaaactattcaagtgctccgaacagcttacattagttcgttggctgttgaagggtcaacaacttgagcagctaaatcaaaatttttcagaaatcgagaacgttttacaaaatgcatctgatagcgagttagaaaaatcagaaataattagagaactccttcatctggcgatggcaaatcccattgaaccattattcagtggcctattgaatttttgcataaagaataatatggcggatcatttggatgaattttgcggaaatatgaccagcgaagttcttttcaaaataagtccagaactactattaaaattactgacgtataaggagaagcccagtgggaagttactggcagcagttattgaaaaaattgaaaatggagatgatgattatatattggagttgcttgaaaagattattatacaaaaagagatccaaattttggaaagattaaaggagccacttttagttttcttcttaaatccggttagctctaatatgcaaaaacacaaaaagagtacaaatatgctccgtgaattagtcttattatatctcactaaaccgctttctagaagtgccgccaaaaaatttttttccatgttaattagtatattaccgccaaaccctaactatcaaactattgatatggttaatctgttgattgacctcatcaaatcacataatcgtaagtttaaagataagagaacctataatgcaacattaaagacaataggaaagtggatacaggaatcgggcgtggttcatcaaggggattcaagtaaggaaattgaagctatacctgacactaagtcgatgtatattccatgcgaagggagtgaaaataaactttcaaacttacaaataaaagtggattctcaagatatccaggttccggctacgcagggaatgaaagaccctccctcctcatttcaaatatcttcccagattaatgcgaaagattcagattcaatatcgcttaaaaatactgcaataatgaattcttcacagcaagaatcacatgctaaccgaagcagatcaattgatgatgaaacactagaggaagtggataatgaaagcattagagaaatagatcagcagatgaagagtacgcagttagataaaaacatggccaatcatagcaatatttgttctactaaaagcgatgaggtggatgttactgagctgcatgaaagtattgatacacaatcctcggaagtgaacgcataccaaccaatagaagtccttactggcgaactgaaggcggtaacaaatagatctatcaaaacgaatcctgatcataacgttgttaacagtaataatcctctaaaacgaccttccaaggagacgcctacctctgaaaataaaagatcgaaaggtcatgaaacggtggtggacgttttagtttctgaggaacaagcggtgtcgcctagcagtgacgttatatgtactaacatcaagagtgtagccaacgaagaatcttcgttagctttaaggaatagcataaaagtggaaacaaactgcaatgaaaattccttgaatgtcactttagatcttgacgagcaaaccatagcaaaggaagatggaaaagggcaagttgaacatgttcaaagacaggagaaccaggaaagtatgaataaaatcaacagtaaaagttttacgcaagacaatattgcacattacaagagcgtgaagaaagctcgtcctaataatgaggatgaaaacaacaattgtgcttgtaatgttgaacaagcctctccagtaaggaacgaggtgccaggagacggcattcagaccccgagtgggactatacttctcaatagttcaaagcagacagaaaaatcaaaagttgatgacttgcgtagtgatgaagatgaacatggaacggttgcgcaagagaaacatcaaatgggtgcaataaacagcagaaacaaaaataatgacaggatggacagtacacccattcaaggcactgaagaagaatctagggaagttgttatgaccgaagaaggtatcaatgtacgcttagaagatagtggaacatgcgaacttaataaaaatttgaagggaccgcttaacggagataaggatgccaatattaatgacgattttgtacctgttgaagaaaatgtcagagatgagggctttttaaaatcaatggaacatgcggtatctaaagagacaggtctagaagaacaacccgaagtcgctgatatttcagtgttaccagaaattcgtatacccattttcaattctttgaaaatgcaagggtcaaagagccaaataaaagagaaattgaaaaagagattgcaaagggatgagttaatgccaccagattcacctcctcgaatgacagaaaatacaaatatcaacgcgcagaatggcttagacaccgtaccaaaaacaattggtggaaaagaaaaacaccatgaaattcaattaggccaagcccacacagaagcagatggcgaacctttgttggggggagatggtaacgaagatgctacatctagggaagccacaccttcattaaaagtgcactttttttcaaaaaagtcgagaaggttagtggccagattgagagggttcacaccgggcgacttgaacggaatatctgtggaagaaagaagaaacttgagaattgaattattagattttatgatgaggctcgaatattactcaaacagggataatgatatgaattga

SEQ ID NO: 75664 - DNA, 2424 bp, Saccharomyces pastorianus
atggttttggaagtgccctcaatcacacctggtgaactgcatgatcttatgcgactacatcaggatgcagaatggcctgaatgtaaaaaaatgttcccctgggctcatgatatttcctttggtcaaccacccgattttcctcattctcttgcaatagtcaaatcgcaatcagatgctaacaattctgcgcttttgcataattctctcgaagtgaatgatatcttccagtcctggaaagttcgcacttcctttcatagagagggcgatacctgtgaaactggaaatgattctaatggttttcaatatcctaataacacaaaggaacttttgaacttgctaaagtttcagatacgacaattggaattgcaagtggatgatgttgctttggaaaacgctgctacttattgtcacaatcatagcattttaccatttctgaaagtagatcctcgtggactatcattagaacttaaaaggtattctagaaacaaggttgggtctaataccacgctaaaacggagtgggcaggacgtctggggaaggagaggtctattccgaaggttcgacctgcaatgtgccaagatgatagaaatggttgataatatagtaatttattgttcgcagactggtggcagcactgatattcaaacagaatcagcgccagcgtgctcacacgagggaaattgccccaattgtacaacccttgcactacttttacagatctgtttaatgtttgttcaaaagggttatgtagggagtggaggatcgctttacaagacgaatctttttatttgtacttatcagaatttcaatacagatatacctcaaactttgattggtacacctttattagacaacgaatttttcaagaataatactcccttgaatttatgttcgtcacctagtgaaatagtgtgtttcaataacgttgataagaatatggttttgtgcgagaagttagagttgaataagctgacttcagctacacgattggaggaaacagggttgatttgcggtaacaccactgattggcataattatcaaataattaaaaaaaacaatatatctctgccccaccgtttcgaagagaatacaagcatagtaaatttaaagtctctaaattatgatacggacaatccgacaacctccatttctcaactgtataacataccgaatacaaaagaggtgtggaaattgatcataaaatgtacgtcaaactcgcaaatgccgtcgttaacgaaaatccgaacatatctagatcttttattagacgatgatgcgtcaaaatcacaagagcatttgcatttgactttccctgcctcaggtagtataggtttggggaacttaaacattcagtctgtggaaattcttttgaatgtttgttatttaatatttcaagtatcccaagttcaagaattattgacgttcatgtattgcgaagacggatatacagaaacgtcattattattaacagcttatattatattccactttaatattccgttacaagacgctcttttgaggatccatccaagaccatttttcctttttccatcagacttgcaaattttaggccatttacaacctgtcctgcgggagtttagtccgcagaatggaagtaatctaaaattatatgccaatgcattgaaatttagggataaaagctttcaattacacatttcttcagagctttttagtagcatattttttatgaagatacctcttgagtctaatttcgttaatttgaagggcccactgccatcccggattctacgtcacttgtatttgggatccctggatcatgcacaaaatcctgccttacttaagtctctaggaattacgcatatagtttctgtcggtgaagttgtttcatggacattgaataaggataaaattgctcatcctgtaaggccacatcgtgcaataactatgacgaataccaatgaagttgcaggtaatactacatgtaataaaagcagaaatagagctgacactgtggtcagcgataagcaagaaaatggcagcaacgtagtaataagtgaaaattctggatttcaaatttgccagatcgaaaatctagatgacaacggcaaagatccgcttttccaccaaataaacaaagttttggattttattagcaattccgaagcaacaggagggaaagttctggtgcattgtatggtcggagtctccagatctgcaacagtttgtatagctgaatgtatgagatatctccagtgtgacctggcaagtgcgtatttgtttgtgagggtacggaggcttaatgttatcattcaaccaaacttgttcttcgtatatgagctcttcaaatggtggaaaaagcattataatcgcgaaaaagacaaaactatggattggcacatcatctgtaggggtatcgctgaggttaatatgaagtacacatga

SEQ ID NO: 75665 - DNA, 402 bp, Saccharomyces pastorianus
atgtttagttctctcttcttgtcgagtgcgctattcttcttcagttgtttaatggcatcctctagaaacctgaaattatctcttttttcgacacattcttctatagaatttaggcttaatcgtaggcttgtctttcctttcgaattcagttgtgctaagaccagcgattcttcgacgagattctgtacaaataactcagcagcgaatgcggtcgctgatatagctacattagatgtaattacgtattcggggtcgcatttggcaatcttctttactttagatataggaaagacaggtgctttttctttaactaagttggacattttttttgcaacacggttgacccttgcttgtttttatctgttggggcaggcagttgttaaggccattaatttcgcgtaa

SEQ ID NO: 75666 - DNA, 606 bp, Saccharomyces pastorianus
atgtccaacttagttaaagaaaaagcacctgtctttcctatatctaaagtaaagaagattgccaaatgcgaccccgaatacgtaattacatctaatgtagctatatcagcgaccgcattcgctgctgagttatttgtacagaatctcgtcgaagaatcgctggtcttagcacaactgaattcgaaaggaaagacaagcctacgattaagcctaaattctatagaagaatgtgtcgaaaaaagagataatttcaggtttctagaggatgccattaaacaactgaagaagaatagcgcactcgacaagaagagagaactaaacatgcaaccgggtcggagcgatcaagaggttgttatagaagagcctgaattgcatgaggatgatggtgtagaggaagaagaagaagaagacgaggtatccgaagaagaagagcccgtacacaatgaagaacttcttgatgatagtaaagatcaacaaaatgataaatccacgcgcagtgtggcaagcttgctgtcgagattccagtataaatccgcactagacgtaggagaacactccgactcttctgatatcgaagttgaccatacgaaaagcaccgatccttag

SEQ ID NO: 75667 - DNA, 1338 bp, Saccharomyces pastorianus
atgtccaaaaaacaggaatatattgcaccaataaaataccaaaacagcttgcctgtgccacaattacctcctaaacttctggtttaccccgagtctccggagacgaatgcagactcctcccaactaatcaattcactatacatcaaaacaaacgtcactaatctaattcaacaggatgaagatttaggtatgccggttgatttgatgaaattcccaggcctattgaacaaattagattctaaactgctttacggctttgataatgtgaaattggacaaagatgatcgaattttactgagggaccctagaatagatagactgaccaagactgatatatcaaaggttaccttcttgagacgcaccgaatatgtctccaacacaattgcagcccatgataacacatcgttgaaaaggaaaaggcgcttggatgatggagattcggatgatgaaaaccttgatgttaatcatataattagtagggtcgaaggaacattcaataagacggacaaatggcaacatccggtgaagaagggtgtcaagatggttaaaaaatgggacctattgcccgacacagcttcaatggaccaggtgtattttatcctaaaattcatgggcagtgcatcattggatactaaagaaaaaaaatctttaaatacaggaattttcaggccagtggaactggaagaagacgaatggatttccatgtatgccacagatcataaggactctgccattctggaaaacgaattggaaaagggtatggatgaaatggatgatgactctcatgaaggtaaaatatacaagtttaaaaggataagagactacgacatgaaacaagtggctgaaaagccaatgacagagttagctatacgtttgaatgataaggacggcatagcttactacaaacccctacgttcaaagatcgaattaagacgtaggagagtaaacgacatcattaaacctttggtgaaggagcacgatatagaccaacttaatgttactttgagaaaccctagcactaaggaagctaacataagggacaagttaagaatgaagtttgaccccataaatttcgccactgtagatgaagaagacgatgaagacgaggagcaaccagaagacgttaagaaagaatcggaaggcgattcaaaaacagaaggttctgagcaagaaggagaaaatgagaaggatgaagaaatcaaacaggaaaaagagaatgaacaagatgaagaaaataaacaagatgaaaaccgtgcagctgatacgcccgaaacttcagatgctgttcatactgaacaaaaaccagaggaagaaaaggaaactttacaagaagaatag

SEQ ID NO: 75668 - DNA, 1929 bp, Saccharomyces pastorianus
atggaaaagcacatcatgagtgaagttgagagcagagaaaaggagcctgacgcaggattgtccccagatatcgttcaagctacgctaccatttttaagcagtgatgatattaagaacctctcgcagacaaataagtattataatacattactagattttgaccactctaaaattttgtggcatgaactatttcataaggcatttgggacattaaagacaaatgacgagcctttccagtgtcgaaattcggcggaatttaagacctgcacagagacgattttaagagaagcattccccaccttgtcatggcaggaattataccaattacgggcatatgatgcaaagttttatagttggggttatttaaagcatggaaggttgggctataccgcgagttccaataatgaacttgtcgccacttcactaaacgggccaagtccgcggttcaaatatggtgtcaatacccccactgaagttccttggtttaacagtaggacaacatctagaactagtaacttcactccttcagaggacccgttaagcgccatcaagaaggatggagacgaaatcatagctcaagtatctagtggtggtttttctttccaaatattgactgagtcaggtaacctttacagcagcggatccactttttctggagggttaaaaggaccaggtcccagtggttcacagcatgattataatcccttcagagaaatgattcacaatatggaaagatcgtatccgcggatcactagccgcagtaatgggagtactgtcaataccacgggtacattttctggaaggagaatgagcggtagccatccatctactgcttatgaaccaggaaatgcaactacagctcagcatattaccatagatagcggaggtgcgcctgcagcctctcccggagggagccatagtggtgtccctagaactacaatgccttcaatggggccgcatgagaatatttacagccagatagaaatgctggaacgaagtgctaacaaggctgtaccaggaaatagtcatatcaggagaatgttcgcaagaaattctttcccattatatagtggtagggatgaaaatttaggatcatttaatgatattcaatttgtcgcggtaagctctgggagaagtcatttcctagcaatggatacagataacaatatttattcttgggactcaacggaatctgaccaaggtgtcaaaattgagtttgctaacctacctagtcgtgctacgaatcctattttgaaaattgctagtggttggaatttcaattgttgctatatatataaggtcgggttggttgcatggaaagaaagagatgctattcaaaagggcgagagctttgcttttgcaaaatacgagattgtcccgaatacgaatgatgttaatggagactccaggattgtcgactttgcatgtttacaagataactgcgttttcttcattaataacaacggcgataaactatggaagtaccacaatggactgaaccagatagtagatttaaatattgtcggaaaactgtgcaaaattaacgcctgttttgcttcattagtcctcttcaccgatactcactgttatactttgaaagtaacaaatggagatgtcgataaagatagtttaacggagctagacatcaatgaaaatgttatctccgttgcaagtggtgactatcacacggtggcactaaccgaacgcggtcatttgtattcatggggtattgaaagtcaggattgtgggtgcttaggattgggcccttctgaaaaaatagttaacgagctacatattggcaattgggaagggcaaagaaacattagggtcgttaagcccacgaaaatagaactacctgaagattatatttgtgtcagtgtaactgctggtggctggcaaaccggtgcattaatcatcaagaagcattga

SEQ ID NO: 75669 - DNA, 2637 bp, Saccharomyces pastorianus
atgtacgatagcaggggtgtcgcattgcactctgaactaattcataggtggaatcacgctttttccatcttatccattgttgcatttccaaaaaaaagattgttgtttgctggtagccaagactccaagatattggtttttgatcttcccacatataatctaatacatacgattagactaggcgaatcacaagaggaaacgcataccagatcttcggttttgtgcttgacaggatcagaagatgaaaactttttattttcaggcggcgcagattctttggtgagaatttggtccgttggcgaaaagaccattagagatgactttctacctgttactgaaatagccactgtttactcagtgaccgatattggtgatattttctcattggcatatttggattcgttggaaactattgtctttggctgtcaaaatgcaagcttactatatgttgagaacttgattcagaagattgaaaaaaaatcctctgatggagtagaaaatatcaataaattaccgcatagaagatatgataagttctttgattcgttaggtccgactggatatagttcaaattcattatctcaaacttcattgacctctctacaagaaaactgtggcgctgccatcatagaggttccctccgaaaacattattaaatatgcacattatgggtttatttattctattaataaattgtgtcccaggtttaatcagttattggaaaaaagctcacgaacttctggtgcagagcacataatttcatccgctggtgatggaataagcaagctttgggagttctctaaagataaagggcaaaacactgttaaaatctccttgataaacgataaaatcgacaatgaagatagcgtcatatcccaaactattgagttcccatttttatattgcgggttgactgacgggattataaaaatctgggacttaaatactcagcaaataatctcaactctgaaaacaaagcatgaatcggacgtcatttcaatatcagtttatatggaccatgtatttgccattgatgaatcaggcatcacgcatttttaccagaaccaagttaaccattggaaccctcaacaaggaaaaatattaagctcagagattttcagtaaatcaaatgctggatctgttagtttattaacgggtggtagcgatgggtcattgactctctgggatataacctcattattatctgcggtgcctctgtcaagcaactcacccatcaatgcatcatctacattacaaaccaccaatttatgggccgcctatcaatctgcctctctaaataacgaggagatgttaaacacactgagagaacttatttctttccagacagtgtctcaaagcaaagacactactaatactttgtcattaaggcgttgtgcaatctacctgcaacaattattcttgaagtttggagctacaaactcccaattatttccattgcctgatggtggtaatcctgttgtattcgcatattttcaagggaatgggaaagtttcacaggtgaagggtgccaagaaaaagcgtattctatggtatgggcattatgacgttatatcgtctggaaatactttcaactggaataccgacccatttactttaacttgtgaaaacggatacttaaaaggtcgaggagtatcagataataaagggccattggtgagcgctattcatagtgtggcgtatttgtttcaacagggagaattggtgaacgatgtcgtatttttggtggaaggaagtgaagaaatcggatctgctagtttgaagcaagtttgtgaaaagtaccatgatattattggaaaagatattgactggattttattaagtaattctacttgggttgatcaagaacatccatgcttgaattatggattgagaggtgttattaatgcccaaataaaagtctggagcgataagcctgacggacattctggtcttaacggtggtgtttatgatgaacctatggttaatttagtgaaaatcgtgtccaaactacaaaacgaacaaaatgaaattatgattccaaatttttattcaccattgaaagatctgactgaagaagaatatcaaaggtttcagaaaattaccgagcttgcaaatatcgacgaaaatactactgttcaagatttaattaccaactggactaagccttccttgtctatgacaacagtcaagtttagcggtcctggtaacataacagttattccaaaaagtgtcaccatgggtatctccatcaggttagtacctgagcaaagtgtagaacaagtcaagagagatctcaaagcgtatttagaagaaagtttcaagcaattgaaatctcaaaatcatctagaaattaaagttttaaacgaagcagaaggttggttgggtgacccaacaaatcatgcataccaaatattaaaggacgaaattactactgcatgggacgtagaaccattgctagtaagagaaggaggttctatttcatgtttgagaatgttggaaagaatattcgacgcgccagctgttcaaataccatgtggccaatccactgacaatggccatttagccaacgaaaatctcagaatcaaaaattggtctaatttgactgagattttgtctaaagtattcaataggttataa

SEQ ID NO: 75670 - DNA, 441 bp, Saccharomyces pastorianus
atgaaaggctcacccatttcgcaatttagtaagacctctattaatgctcttaccaggccttggaagaaatacagagatggtgaattattttatgggttatcaaaagttgggaataaaagagtgccgttgaccacaaagcaaggtaacaagacgatgtacaaagggacaagagcttcagggattggtagacatacaaaattcggtggttatgtgataaactggaagaaagtcagaacctatgttaccccagatatggttaatttcgaattaaagccctacgttaacgcaaatgtaccacctctaaaacacgaatttaaaggatttagcggcggcccattagatcctcgtttacagttattaaagataaaagaatacatagtaaacgggagagtacaaagcgaaggggccaccgacacttcatgttataaggagcgtggataa

SEQ ID NO: 75671 - DNA, 1473 bp, Saccharomyces pastorianus
atgtctggttttcgtctaattgatatcgttaagcctatcctaccgattttaccggaagttgagttaccttttgaaaaattaccatttgatgacaagattgtctatactatttttgcagggttaatttacctttttgcacaattcccacttgttggtttgcccaaagctaccacacctaatgttaatgaccccatttattttctaagaggtgtatttgggtgtgaaccaagaaccttgctagaatttggcctttttcccaacatttctagtgggttaatcttacaattattagccggtttgaaagtaattaaagttaatttcaagatccaaagtgatagagaattatttcaaagcttaacaaaagtttttgccattgttcagtatgtgattttgaccaacattttcatatttgcaggttattttggtgatgatttatctgtggtacagatcgggttgatcaactttcaattggtcggtgctggcatattcaccactttgttagctgaagtcattgataaaggatttggattttcttctggagctatgataatcaacactgtggtaatcgccactaacttggtggctgatacttttggtgtttctcaaattaaagttggcgaggacgaccaaaccgaagcccaaggtgccctaatcaatttgattcaaggtttaagatctaagcacaagacatttattggcggcatcatctctgcattcaacagagactatctaccaaacttgacaactactattatagttttggcaattgccattattgtgtgctatttgcaaagtgtccgtgtagaattgccaatcagatcaacaagagcccgtggtacaaacaatgtttacccaattaagctactatacactggctgtttatctgttttgttttcttacaccatcttgttctacatccacatttttgctttcgttttaattcaattggttgccaagaatgaaccaactcacatcatctgcaaaataatgggccactatgagaatgctaataatcttttagcagtcccaaccttcccattatctcttttggctccaccaacatctttcttcaaaggtgtcactcaacaacctttaaccttcatcacctattcggcctttatattggttactggtatttggtttgctgataagtggcaagctatttcaggttcctctgctcgtgatgtagccttggaattcaaagaccaaggtatcactttgatgggacgcagagaacagaatgtcgctaaagaattgaacaaagttattccaatcgcagctgttacgggtgcatccgtcttaagtttgatcaccgttatcggtgaatctttgggtttgaaaggtaaagctgctggtatagttgttggcattgctggtgggttttctttgctagaagtcattaccattgaatatcaacaaagtggcggtcaaagtgctttgaatcaagtcttgggtgttccaggtgctatgtaa

SEQ ID NO: 75672 - DNA, 2394 bp, Saccharomyces pastorianus
atggtacagaacaatgaatcggtttttttcgttgaatgcgactcttataaggagagcccttccacttcaccaatacgcttggacgacctggatggaaatgacgctgtgtcggatcagggtttagctttcgacggggacgtaggaattacatcacaagctcgagtaagaaatcctcgagctcaaatcttcgaggatagtaatactgacgtagtattgcatttggatgatcttgatatggtcccactaaatacgaagttcgatatgcagatggagatgggttcacccatggcgatgccggcagaaacgccacctcctgtcgaacctttaaaaacaaaagatctagcatattcatccttggctcaccttcctagctatttctttgagcaaacacatttccgcatagaccgcaaatgcctgttggaaatgtctaagttaaggcgaaattatctaactataagtaaacaagatgctttgtcatgtccgcagcttcattcaagagtggctgggggttatcttaaacctgtaaaagaaaaattatttggaatacgtcactttcttgatctagaggaaagtaatactgtaaacctcctccaggatggaaattatatgacggaattgttcaacagtcagattaatatccccacttttaaagaatttagggaagattttgaatggtgcttgaaaattataagagatagaagcctatcaaggtttagcgaaaaaagattacaatatcttgtaaataagtttccagtttttcaacacctacattccaaggaagaaatgagacagagcaaaaaggtgccacacaaggatttttacaactgtagaaagattgatctgaatcttctgttaagcggctgtttctcacagtggcaattgactgagttcatttggaccaagttgagaaaagaaccggacagggttatccatcaagcttttaatggtagtcatataaccttgagccaattattcaaagtgaatttcgaggagaccggtcagttcttcaatgggttgaaaattattgacgattcatttttggagtggtataaagttatttatcccgcaaaatatcatttggttaacgatgaaatggaaatacacacaggctcacacggtaagcagcttcgatattatttgattgcgaaaacatttttggagtttgataactatattaatggtgaatacttagcggaactactgaaaacgtttttaataaaaccgcaagaggagtcgaaatatcagttatgtcaactctctgtggacttccaattttatctgcattacgataattctgatgtggacaattggtggatggtctttgccaattggctgaaccactataatatattttctaacaatattcgctggaatattcgcatttctagaatttatccagaactgtatcatactggcaaggtgaagaattttcaggagtatttaaatttaatcttcaaaccacttttcaatgccgaaaattatctacacaagtcattaggacctattcttttgaaatttctttctcaagtatcttcgattgatctatgtattcaagatacggacaactatatttggaaaaacttcacagcagttagttgcttgccaaaagattggacatctggcggtgataatccaaccatttcacaatatatgtattacgtctacgtcaacctaacaaaattgaaccatatccgccaagcccttcatcaaaataccttcactttgagaagttcatgttctcccacctcaatgaatcgaacttcacagtttagtaatacactgaacttcacagaacatacggaaactattttaaacaatttcttgctcgcctgtggagggtttctaaatgcagaaaatctctggaatgcaccaccatcactggtgtatcttttctatctaagtcaaattcccatggttgtggcgcctttgaattccatagtagattcaaaccctacaatgctacaagaacaagccccgacggggcttgtcctagagccctcaaagccttataagaagaaccctttcatgaagttttttgaaatggggttcaagatatcgctgagctcagaatctatcctctacaacaattcgtatacgaaagaacccattatagaagagtatagtgtagcggctagtatataccgtttacattcagcagatttatgcgaacttctaagaaacagtgtcataaccagtggattttcaagtaccctaaagaacaaatggctcggcgtttccttagccagccatgactacttcgtggaaaacactgggtttgtagacaagtggtatgattgtaaaccaaatacaagtttagagcataacgttccgatcatcagacgtcaatatcgcagtagcactctcgcaggggagtggcgactcataattgcgtga

SEQ ID NO: 75673 - DNA, 435 bp, Saccharomyces pastorianus
atgaccatattttctaggttctcatattttgatagtctattctcctttaaaaagcaagagccttcccccattgaaataatctattgcaatgaaaacaatggtttcataaacataaaatccttagaaagccccactgacgatagcatggaggcggacatttcagatagagaaatggctacaatcctgactagaaacagaaacaatttgggtaaggttgccattgataagaaaggcgttaataatcattgcatagatttgaatgagctgaaaaagggccttgtcgccaatgaacacaaattggataacgataactcaacacggcaccagaacacatattcaccagaggattccgtggaatttgataggttcgatgataaacaaagcagaatactaaagtgtagcactagaaggagctacttgagatacaagaaataa

SEQ ID NO: 75674 - DNA, 1284 bp, Saccharomyces pastorianus
atggttgaaacatttagttttgctcatttggcttatttggtctttgagtccgttttacaggtagtcattatcgcactcgctggtttttggagcgctagttctggtctgctgcccaaacaaagtcaaaaaatcatttctctgttgaacgtggacctttttacaccatgtcttatttttagtaagttggccaaatccctgtccatggccaaaatctttgaaatagccatcattcctattttttttggtttgactactggtatttcatttatttccggaaagataatgagccgtatcctagacttggataaagatgaaactaattttgtggtggcaaactctgtctttggtaacagtaactctctacctgtgtccttgacattatctttggcttacactctgcccaacttaacttgggaccaaattcctaatgataacagagataacgttgcatcaaggggtattttatacttgctgatctttcaacaaatcggacaaatgctgaggtggagctggggttacaataagctaatgaagtggtctggagagaacactcagcatatgccaccttctcaagtgcaatctttgttggaaaggacgcccaacattgataacgaggaacttgtcaatgaggaacaagaggaacaagaattgcttgaagaagaaaataacagaatgaactcatcttttttgagttcgagttccatcggtgataagatttggcaaaaatcatgcgctgtatttgagagaatcagagcgaaccttaatcctccgttatattccatgatttttgctgttgttgtggcagcaattggtccgttgcagagagagctatttatggaagatgggtttatcaataacacatttgccgaggctgttacgcagctgggttcagtttctatcccattgatcctggttgtcctcggttctaacttatatccttctgcggaagtcttccctaagacggttcaccatagcaagttattgatcggctccatcatcggaagaatgattttaccgtcttgcttccttttgcctattattgctattgctgttaagtacataaacgtgagtattttggacgatccaattttccttgttgtcggttttcttttgactgtttcccctcctgccattcaattaactcaaatcactcaactgaatgaatttttcgaggcagaaatggccgatattctattttgggggtacgctgtcttaagtttgcctgtaagtattattgttgtctcaggtgcaatttacgttttacagtgggctaacccaacttaa

SEQ ID NO: 75675 - DNA, 1452 bp, Saccharomyces pastorianus
atgtatttgtcattctatatcactgatacaaagaacaaacttattttccagtatcttttaggtgcaacagctccctccttcaagcacctgtggacccgcgttcagtccacatgtcctcaattgctcgaagatagcagtagtgatgattatttagaccattcaatggttggaagagatttagaggtctataagtatttctcagttataaataagctcaattattggtgcttagcctccacttcgaagtcaaaaggcccgcttgattgttttacctttttagagactatagatcgtatcctgttagaatattttgacaaggataaattaagtatcaagaaaattgttaataattatgatagaatcagtttgatttttaactgttgcgtcgaagcgggtgaaccaaatgtgagtgatatgctctatgttaataaaattaaagaagctgttcctgaaagatcggatttatcgaagttcataagttctacagcccataatttacagcaggctgtgcaactcccacaacaaaggcaacagcagctacaacaaaatcagatttctcgtggtagtaattcactaatcgaaaatgaagagattgttccctggagaacttcaagggctagcaaacatgagaataatgagctttatgtggatttgttagaaacattccatgttgtatttgaaaagaaaaaatcacatctaaggttgctcactggaagtattcatggaatagtggacgtgagatcttatttgaatgataatcctctagttgcagtaaaattaaacactatgggaaatgatataggtatacccagtttgcatgactgtgttgaaatcaatgatggtgtgttttctccctctaatataacgtttataccaccagatgggaagttcagattgctggagtattccgtcgatttaagttctcaagtaaagcaatccggagtaaggatgaattctattggcttgatgtctttacacttccaaaatggattgggtaaagattctgatgaatttgagttatccttaaatattgaaaatttcaaaaaagtttcacaagttgatgacctaaaaatagatttacagttcaatgttgagaatgctgatccaaatgaaatagcatataagataaaaatattgcgcaatactcatggccgttttgaaaatagcattatcatgggtcaaggacaatggatttttgataaatcaactgccactggaacggtacctgtactacgtggctgtattgagtatgaaaatactgggccaaattttacaaaaaaagttgatttacaaacagtctccttagaatattcttacataggacaatcagccagtgaaatctatgtagaagccatcgatattgtatctggattaacaattggcaaaaatacaaagctgtacaagggtgcaaagtataagacccagacaggcaattttcaagtaaggctgtag

SEQ ID NO: 75676 - DNA, 2742 bp, Saccharomyces pastorianus
atgaataatcagccgcagggtaccaacagcgttccaaatagtattggaaatatatttagcaacattggaactccatcttttaacatggcgcaaattccgcaacagctgtatcagagcctcacaccacaacaattgcagatgattcagcaacgacaccaacagttactgatgagtcgtctacaacaacaacaacaacaaacttcaccgtcaccgcaaacgcatcaatctccaccccctcctccgcaacaatctcaacccattgctaatcaatcagcgacttctacccctcctcctcctccagcaccacacaacttacatccccaaattggtcaagtgcccttagctccagcgcctattaatttgcctccacaaattgctcagttacctttggctacacagcaacaagttttgaacaagttgaggcagcaggccatagcaaaaaataatccacaggttgtgaatgcaattactgttgcacaacaacaagtgcaacgccaaattgagcagcaaacgggacagcaaacggcacaaactcagctagaacagcagaggcaattgctggttcagcagcaacagcagcagcaacttagaaaccaaatacagcgacaacagcaacaacagtttaggcatcatgtgcaaatacaacagcagcaacaaaagcaacaacaacagcagcagcagcatcagcaacaacaacaacaacaacaacaacaacaacaacaacaacaacagcaacagcagcaacagcagcaacagcaacagcagcagcaacaacaacagcaacaacaacaacagcagcagcagcagcagcagcagcagcagcagcaaggacaaataccgcaatctcagcaagttcctcaagttagatccatgagtggacaacctcccaccaatgttcagccaactattggccaacttcctcaacttccaaaattaaacttacccaagtaccaaactattcaatacgatccaccagaaaccaagctaccatatccaacctattggtcagacaaaaaagcagatacggatactttgttgtacgaacaaattatccagcgtgataaaattaacaaatattcgctaataagagaaaccaatggttacgatccgtttagcatttatggatttagtaataaagagtatattagtagactgtggcatacactgaagtattatcaagatttgaagaacactagaatgaaatctatcacaagcacttctcagaagattccttcggcaagtatttggggaaatggttactcagggtatggtaatgggattacgaatacaactaccagagttattccacaagtagaagttggaaataggaagcattacctagaggataaactaaaagtctataaacaggccatgaatgagacatcggaacagttagttcccataagattggagttcgatcaagatcgtgacagattcttcctcagggacactttgttatggaacaaaaatgacaggcttattaaaattgaagactttgtggacgacatgttgcgagattaccgatttgaggacgctacgagagagcaacacattgatactatttgtcaatctatacaagagcagattcaagagtttcaaggaaatccatatatagagttgaatcaggaccgtctaggcggtgatgacttgagaattagaatcaagctggatattgtcgtgggacaaaaccagttaatcgatcaatttgagtgggacatctctaatagtgataactgtccagaagagtttgcagagtccatgtgtcaagaattagaactaccaggtgagtttgtgactgccattgctcactccataagagagcaagttcatatgtatcataaatcactggcactgttaggttacaattttgatggatcagcgatagaagatgatgacattagaagcagaatgctcccaacgattactcttgatgatatttataggcctgcagcggaaagcaaaatttttactccaaacctattacagatttcagctgcagagttagagagattggataaagataaggacagagacacaagaaggaaaagaagacaaggtagatctaacagacgtggtatgctcgcattatccggcacatctgcaagtaatacatctatgaacggcgttcacaacacagtagcagcaggaaatgcttcatcgttgccaccaggtgagattttactgccagatattgcagatattccaagaactttcaggactccagtaccaagcactttaatgcctggtggtgttgacgtaggcccttctgtggaatcgtacgaattgagaaacacaaccacttataaaagcaggccagataggcccaagccagtttcacctccttgttatattattgaccatattccgggacattcgctactactttctattaaactgcctgggaaagttgatacaaaagaagagctcgcagcagcgcctaatgacacaagtagtggcaccaatgcaatgcttccgagtccagaatcgctgaaaactaagctgaatagtaacattcgcgctggtgtgacgatatcttcaatcccaaacccgattgccaatcacactgttactaattcacccaatcccacactgcagccagtgatcccaggtggggcagctagtaaatcggtacctacacctagtcttcctatagcacctccagtagcaccacatgatagcgaagcgacattattgactaatagcaataatggtagcagtaacaataatactcagaatacatag

SEQ ID NO: 75677 - DNA, 900 bp, Saccharomyces pastorianus
atgtccagtaaagctaccaaaagtgacgtagatccattgcactcgtttctggcagggtccctagccggtgctgctgaagcatgtataacatatccttttgagtttgccaaaacaaggctgcagctgattgataaggcctccaaggcatcaagaaatcctctggtattgatatataaaactgcaaaaactcagggcattggttccatttatgtcggatgtcccgcatttattattggaaacaccgctaaggcgggtattagatttcttggctttgataccattaaagacttgctaagagatagtgaaactggagaactaagtggtacaagaggggtgatagctgggttaggtgcgggactattagaaagtgttgccgcagtgactccttttgaagcaatcaaaactgctttgatcgatgataaacaatctgctacaccaaaataccataataatgggcgcggtgtagtacgaaactattcatcattagtccgtgataaaggattttctggtctttatcgtggtgttttgccagtttccatgagacaggccgcaaaccaagccgttagattgggttgttacaataagattaagaccttgatccaagattatacggattcgccaaaagacaaacctttatcatccgggttaaccttcttagtgggtgcatttagtggtattgtgacggtctattccaccatgccccttgatactgtgaaaacaagaatgcaaagtttggattccaccaaatactcctctacaatgaattgttttgcaaccattttcaaagaagaagggttaaagacgttttggaaaggtgctacgcctagacttgggagattggtcttgagtggtggtattgttttcactatctatgaaaaggtcttagttatgctagcctga

SEQ ID NO: 75678 - DNA, 1425 bp, Saccharomyces pastorianus
atgagtatttcaaattggatcaccactgcgtatttaattacatcaacatcttttcaacctctttatgggtcattttctgatgcacttggtcgaagaaactgccttttctttgctaatggggcttttaccattggatgtctagcctgtggtttctcgaaaaacatctacatgcttagttttatgagagcattgacaggcataggaggtggtggcttgatcacactttctacaatcgtaaattcagacgttattccaagttcgaaaagaggaatttttcaagcgtttcagaatttacttttgggatttggtgccatatgtggagcgtctttcggtggcacaatagcgtcgagcattggttggaggtggtgttttctcatccaagtacccatatctgtgattagttccatattaatgaattattatgtacctaatcagaaagaatataatcgtcaaaattctagcatattccaaaatcccggaaaaatactcagggacatagatgttatgggctcaattcttattataactggtctcacactacagcttctttacctgagcctggggtgttctacttctaaattatcatggaccagcccttctgtgctactgctattagttgggagtgtaataatcctcttactgttcatattgcacgaaaggaaaacaagtgctagagcgattattcctatggagctggtcaattcctcctacggtgtcgttgtactttcgataagtatacttgttggttttgccagctacgcgtatctttttactttaccattattctttcagattgtacttggagattccactgcaaaagcaggattacgtcttacgattccttccttatttactccggtaggcagtctcataacaggattttccatgagcaagtacaactgtctaagattattactctacattggtatttctttgatgtttttgggtaactttttattcctgttcattgaaaaaacttctccgaactggttgattggtctatttttgatacctgcaaatctaggacaaggtatcacttttcctacgaccttgtttactttcatatttatgttctctaagagtgaccaagctactgcgacatcaactttatatttattccgtagtattggatctgtatggggtgttgcaatttcagctggcgtcattcaattatctttcgcaggtttattgcgtagtaatttgaaaggtctactggatgaaaacaagataaagaaacttattgttcagcttagtgcaaactcctcatatattggatctttacatggcgaagttaaaaacacagtcataaagagttttgatgaggcaacaaagagggctcatctaatgtctacattactctctttattggccctgatactctgcatccttaaagacaatctggcgaaacctaaaacaagaagataa

SEQ ID NO: 75679 - DNA, 3651 bp, Saccharomyces pastorianus
atgaagccggaaaaactcttctccggtttaggtaccagcgatggcgagtatggagtggtaaatagcgagaacatatcaatagatgctatgcaagataatagaggcgagtgtcatcgtagatccatagaaatgcatgctaatgacaatctgggattggtctcccagcgagactgtaccaatcggcccaaaattactcctcaggaatgtttgagtgagactgagcagatatgccatcatggcgagaataggactaaggctgggttagatgtagacgatgctgaaaccggtggtgatcacaccaatgaatccggtgtagatgaatgttgtgctgagaaagtgaacgacactgagactggcttggatgtggacagctgttgcggcgatgctcaaacaggtggtgaccacaccaatgaatcctgtgttgatggatgctgcgttagagattcttcagtgatggtcgaggaagttacaggcagctgcgaagctgtatcttctaaagaacaattgctgaccagctttgaagttgttccaagcaaatctgaaggtctgcaatctattcatgatattagagagacaactcgctgcaataccaattccaaccaacacacagggaagggtaggctctgcatcgaatcaagtgactctacacccaagaaaagaagttgtaaagttagcagacagaaaattgaggtttccagtaagcctgagtgctgcaacatttcatgtgttgagcggattgcatctcgtagctgtgaaaagaggacttttaaaggtagcaccaatgttggaatttctgggagtagctctaccgacagtttaagcgagaagttcttcagcgaacagtactctagaatgtacaatcgttactcctcaattttgaaaaatttaagttgtatctgtaactatttgcgtactttgggaaaagaatcttgttgtctcccaaaggtgcgtttttgtagcggggagggtgcttctaaaaagacaaaatactcctaccgcaacagttctggatgtttaacaaagaaaaagacccatggagacaaagaaaggttgagcaatgacaatggccatgctgattttgtttgttctaaaagttgttgcactaaaatgaaggattgtgctgttacctcaactatttctggacactcttcgagtgaaatttcaagaatcgtatcaatggaaccaattgaaaatcatcttaatcttgaggcaggatctaccggtaccgagcacattgttcttagtgtttcaggaatgacctgtactggttgtgaatcaaaacttaagaaatcatttggcgcgctcaaatgtgttcacggtttgaagaccagtttaatattatcgcaagctgaatttaatctggatcttgctcagggatctgtcaaggacgttatcaagcacttgagcaaaactactgaattcaagtacgaacagatttcaaatcatggttcaactatagatgttgttgttccttatgcagcaaaagattttattaatgaggaatggccacaaggtgtcacagagctgaaaattgttgagagaaatatcgttcgtatttactttgacccaaaggttacaggtgccagagatcttgtcaatgaaggatggagcgtgcctgttagtattgctccattcagttgtcatccaaccattgaagtgggaaggaagcatttagttcgtgtaggctgcacgaccgctttatccataatattgacgatcccgattctcgtgatggcttgggctccacagcttcgtgaaaaaatttccactatctccgcgtcaatggtgctagcaactattattcaatttgttattgcaggaccgttttacttaaatgccttgaagagtttgatattttccaggctcattgaaatggatctactaatagttttaagcactagcgctgcctacatattttcgattgtatcatttggatatttcgttgttggacgcccgttatctacggagcagttttttgaaaccagctctttgcttgtaactctcatcatggttggtcgctttgtgagtgaactagctagacatagggctgtaaagtcaatatcagtacgttccttacaggcctcttctgctattctggtggataaaactggtaaagagacggaaattaatattagacttctccaatatggcgatatttttaaggttttacctgattcaagaatcccaactgatggaacagtcatttctgggtcttctgaagtcgacgaagcgttaatcacaggtgaatctatgccagtcccgaaaaagtgtcaatcaattgttgttgcaggatcggtgaatggcactggtactttgtttgtgaagctgagcaagcttccagggaacaatactattagtaccatagccacgatggttgatgaagcaaaattaactaagccaaagatccaaaatatcgctgataaaattgcaagttatttcgtgccaactatcattggaatcactgtcgtcaccttttgcgtttggatagcggttggaatccgtgtggaaaagcaatcccgctccgatgccgtaattcaggccattatatatgccattacggtacttatcgtttcgtgtccctgcgtgattggacttgccgttcctatcgtatttgttattgcaagtggcgtcgctgcgaaaagaggggtaatcttcaaatcagcagagagtatagaagttgctcacaacacttcgcatgttgtcttcgataaaacgggtaccctaactgaaggaaaacttactgtagtacatgaaactgttaggggtgatcgtcataattctcaatctttgttgcttggattaactgaaggaataaaacacccagtttccatggcaatagcatcctatctcaaagaaaaaggtgtttctgctcaaaatgtttctaatacaaaagctgtgactggtaagggggtagaaggaacatcatactctggtttgaagttacaaggagggaactgtcgttggcttggtcataacaatgatcctgacgttcgaaaagcccttgaacaaggatattctgtattctgttttagtgttaatggttcagtcactgcagtttatgcattagaggactctttacgggcagatgctgtctccactattaacttgttacgccaaagagggatttcactacacattttatcaggggatgacgatggagccgttcgttctatggcagcccgtcttggaattgaaagctccaatattcgttctcacgcaacgcctgcagaaaagagtgaatatattaaggatattgtcgaaggaagaaattgcgatagttcttcgcagtcaaaaagaccggttgttgttttttgcggtgacggaacaaacgacgcaattggtttgactcaagcaacgattggagttcatatcaatgagggaagtgaggttgccaagctagctgctgatgtagttatgttaaagccaaagctcaacaatattttgactatgataactgtaagtcaaaaggccatgtttagagtcaaattgaatttcttatggagttttacttacaacttatttgctatccttttggcggctggtgcctttgttgactttcatattccaccagagtatgcgggtttaggggaactagttagtatcctccctgtaatttttgtagctatacttctgcgttatgcaaagatttag

SEQ ID NO: 75680 - DNA, 1725 bp, Saccharomyces pastorianus
atggctttacatcaatttgactatatttttgccattgccatgttatttgcatttttggatgcctttaacatcggggcaaacgacgtggcgaactcattcgcgtcgtcgatctcttctagatctctaaaatactggcaagccatggttttggcgggtctctgtgagttcttgggtgctgtcttggcaggcgcaagagtttctggtactatcaagaacaacattatagattcctccatttttaccaacgaccccgctgttttaatgcttactatgaccagtgctttgattggctcgtcttgttggttaacatttgctactgcaatcggaatgccagtttctactacacattccattgttggtggtacaattggcgctgggattgcagccggtggagctaacggtgtcgtttggggttggagtggtgtttctcaaattattgcgtcatggttcattgctccgattttggcaggcgcgatcgcagctatagttttttcaatttctaggttttctgtccttgaagttaagtctttggaaagatcgattaagaatgctttactgctggttggtgttttagtattcgccactttctctatcttaacaatgttgattgtctggaagggttctccaaacctacacttggacgatttatctgaaactgaaactgccgtatctattgttctcacaggtgcaattgcttcgatcgtttacttcatctttttctacccattctacagaagaaaagttttggaccaagattggacactaaagttgattgatattttcagaggtccatctttttactttaagtccactgatgatatcccaccaatgccagaaggccatcaattaacaatcgattattacgagggcagaagaaatcttggaacaactgtttctgttgaagacgaagaaaataaggcagccagtaattctaatgattccgtcaaaaacaaagaagacatccaggaagtggacctggttagaactgaaactgaaccagaaacaaagttgtcaacgaaacaatattggtggtcattattaaagcaaggacctaaaaaatggcccttattgttctggttagtaatctctcatggttggactcaagacgtcattcatgctcaagttaatgatagagatatgttatctggtgacctgaaaggaatgtacgaaagatctaaattttacgacaatagagtagaatatatctattcggttctccaagccattactgcagccactatgtcttttgctcatggagctaatgacgttgccaacgctactggtcctttgtctgctgtgtatgtgatctggaaaactaacactattgggtcaaagtccgaagttcccgtgtgggttctggcttatggtggtgttgccttagttattggttgctggacttatggttacaatattatcaaaaatctaggtaataagatgattttgcagtcgccatcaagaggcttttcaattgaactagctgttgctattactactgtcatggctacccaattaggtattcctacctcaacaacccagatcgccgttggtggtattgtcgctgttggtttatgtaacaaggatctcaaatcagttaattggagaatggtagcctggtgttattctggttggtttttaactttaccaattgctggtttgattgccggtatcataaatggtatcattttgaatgctcctcgctttggtgtggaataccaaatgacataa

SEQ ID NO: 75681 - DNA, 120 bp, Saccharomyces pastorianus
atgaaagtgctagatgattggttttcaaggaagttctcaaaagctgtacacggaaacaatcacggcaccatttccttgtcaactctgtcttatatcagagtccataaactagtaaaatga

SEQ ID NO: 75682 - DNA, 1848 bp, Saccharomyces pastorianus
atgaagggattatcctcattaataaacagaaaaaaagacaggaacgactcacacttagatgagatcgagaatggcgtgaacgctaccgaattcaactcgatagagatggaggagcaaggtaagaaaagtgattttgatctttcccatcatgagtacggtccaggttcactaacaccaaacgataataatgaagaagtccccgaccttctcgatgaagctatgcaggacgccaaagaggcagatgaaagtgagaggggaatgccactcatgacagctttgaagacatatccaaaagctgctgcttggtcactattagtttccacaacattgattcaagagggttatgacacagccattctaggatctttctatgccctgcctgtttttcaaaaaaaatatggttctttgaatagcaatacaggagattatgaaatttcagcttcctggcaaattggcttgtccttatgcgttacggctggtgaaattgtaggtttgcaaatgactgggccttttgtagattatatgggtaatcgctatacattgattttggcattgattcttcttgctgcattcacctttattctgtatttttgcaagggtttgggtatgattgctgtgggacaagtattgtgtggtatgccatggggttgtttccaatgtttgaccgtttcttatgcttctgaaatttgtcctatggccctaagatactatttgacgacttattctaatttatgttggacgttcggtcaacttttcgctgctggtattatgaaaaactcccaaaataagtaccctaactcagaactaggatataagctaccttttgctttgcagtggatctggcctgctcctcttgcaataggtattttttttgcaccagagtctccatggtggctggttaaaaaaggaaggattgatcaagcaaggagatcacttgaaagaacattgagtggtaaaggacccgagaaggaattactggtaagtatggagctagataatatcaaagtaaccattgaaaaggaaaaaaagctgtcagactcagaaggttcctattgggattgtctgaaggacagtgttaataggagaagaacgagaatagcttgtttatgttgggtcggtcaaaccacctgtggtacatcattaattggtaattcaacttacttttatgaaaaagctggagttggtactgatacggctttcactttcagtattatccaatattgtcttggtattgccgcaacatttctttcttggtgggcttcaaaatattttggtaggtttgacctttacgcatttggattggctatacaaacagtttcattgtttatcataggaggtttgggatgctccgactcgcatggcgctgaaatgggaagtggttctcttttaatggttctttccttcttctacaatttgggtattgctcccgttgtgttttgcttagtgtccgaaataccatcctcaaggctaagaactaaatcgattattctggctcgtaacgcatataatatggcatctattgtaactactgttttgatcatgtaccaattgaactcagaaaaatggaactggggtgccaagtcgggctttttctggggagggttatgttttgccactctagtttgggccgtaattgacctaccagaaactgctggcaggacttttattgagataaatgaattgtttagacttggtgttccagcaagaaagttcaagtcgactaaagtcgacccttttgcagctgccaaagcagcagctgcagaaattaatgttaaagatccgaaggaagatttggaaacttctgtggtagatgaagggcgaagcaccccatctgttgtgaacaaatga

SEQ ID NO: 75683 - DNA, 1845 bp, Saccharomyces pastorianus
atgaagggattatcctcattaataaacagaaaaaaagacaggaacgactcacacttagatgagatcgagaatggcgtgaacgctaccgaattcaactcgatagagatggaggagcaaggtaagaaaagtgattttgatctttcccatcatgagtacggtccaggttcactaacaccaaacgataataatgaagaagtccccgaccttctcgatgaagctatgcaggacgccaaagaggcagatgaaagtgagaggggaatgccactcatgacagctttgaagacatatccaaaagctgctgcttggtcactattagtttccacaacattgattcaagagggttatgacacagccattctaggatctttctatgccctgcctgtttttcaaaaaaaatatggttctttgaatagcaatacaggagattatgaaatttcagcttcctggcaaatcggtctatgtctatgctacatggcaggtgagattgtcggtttgcaaatgactgggccttctgtagattacatgggcaaccgttacactctgatcatggcgttgttctttttagcggctttcattttcattctgtatttttgcaagagtttgggtatgattgccgtgggacaggcattgtgtggtatgccatggggttgtttccaatgtttggccgtttcttatgcttctgaaatttgtcctatggccctaagatactatttgacgacttattctaatttatgttgggcgttcggtcaacttttcgctgctggtattatgaaaaattcccagaacaaatatgccaactcagaactaggatataagctaccttttgctttgcagtggatctggccccttcctttggcggtaggtattttttttgcaccagagtctccatggtggctggttaaaaaaggaaggattgatcaagcgaggagatcacttgaaagaacattaagtggtaaaggacccgagaaagaattactagtgactatggaactcgataaaatcaaaactactatagaaaaggagcagaaaatgtctgatgaaggaacttactgggattgtgtgaaagatggtattaacaggagaagaacgagaatagcttgtttatgttggatcggtcaatgctcctgtggtgcatcattaattggttattcaacttacttttatgaaaaagctggtgttagcactgatacggcttttactttcagtattatccaatattgtcttggtattgctgcaacgtttatatcctggtgggcttcaaaatattgtggcagatttgacctttatgcttttgggctggcttttcaggctattatgttcttcattatcggtggtttaggatgttcagacactcatggcgctaaaatgggtagtggtgctcttctaatggttgtcgcgttcttttacaacctcggtattgcacctgttgttttttgcttagtgtctgaaatgccgtcttcaaggctaagaaccaaaacaattattttggctcgtaatgcttacaatgtgatccaagttgtagttacagttttgatcatgtaccaattgaactcagagaaatggaattggggtgctaaatcaggctttttctggggaggattttgtctggccactttagcttgggctgttgtcgatttaccagaaaccgctggcaggacttttattgagataaatgaattgtttagacttggtgttccagcaagaaagttcaagtcgactaaagtcgacccttttgcagctgccaaagcagtagctgtagaaattaatgttaaagatccgaaggaagatttggaaacttctgtggtagatgaagggcgaagcaccccatctgttgtgaacaaatga

SEQ ID NO: 75684 - DNA, 1755 bp, Saccharomyces pastorianus
atgactatttctgatcatccagaaacagaaccaaagtggtggaaagaggccacaatctatcaaatttacccagcaagttttaaagactccaataacgatggctggggtgatttaaaaggtatcacttccaagttgcagtatattaaagatcttggcgttgatgctatttgggtttgtccgttttatgactctcctcaacaagatatggggtatgatatatctaactacgaaaaggtctggcccacatacggtaccaacgaggactgttttgagctaattgacaagactcataagctgggtatgaaattcatcaccgatttggttatcaaccactgttctacagaacacgaatggttcaaagagagcagatcctcgaagaccaatccgaagcgtgactggttcttctggagacctcctaagggttatgacgccgaaggcaagccaattcctccaaacaattggaaatctttctttggtggttcagcttggacttttgatgaaactacaaatgaattttacctccgtttgtttgcgagtcgtcaagttgacttgaattgggagaatgaagactgcagaagggcaatctttgaaagtgctgttggattttggctggaccatggtgtagatggttttagaatcgataccgctggtttgtattcgaaacgtcctggtttaccagattccccaatttttgacaaaacctcgaaattacaacatccaaattgggggtctcacaatggtcctaggattcatgaatatcatcaagaactacacagatttatgaaaaacagggtgaaagatggtagagaaataatgacagtcggtgaagttgcccatggaagtgataatgctttatacaccagtgcagctagatacgaagtcagcgaagttttctccttcacgcacgttgaagttggtacctcgccatttttccgttataacatagtgcccttcaccttgaaacaatggaaagaagccattgcatcgaactttttgttcattaacggtactgatagttgggctaccacctacatcgagaatcacgatcaagcccggtcaattacgagatttgctgacgattcgccaaagtaccgtaaaatatctggtaagctgttaacattgctagaatgttcattgacaggtacgttgtatgtctatcaaggtcaggagataggccagatcaatttcaaggaatggcctattgaaaagtatgaggacgttgatgtgaaaaacaactacgagattatcaaaaaaagttttggtaaaaactcgaaggaaatgaaggatttttttaaaggaatcgccctactttctagagatcattcgagaactcccatgccatggacgaaagataagcccaatgctggatttactggcccagatgttaaaccttggtttttcttgaatgaatcttttgagcaaggaatcaatgttgagcaggaatccagagatgatgactcagttctcaatttttggaaaagggccttgcaagccagaaagaaatataaggaacttatgatttatggttacgatttccaattcattgatttagacagtgaccagatctttagcttcactaaagagtacggagacaagacgctgtttgctgctttgaatttcagtggcgaagaaattgaattcagcctcccaagagaaggtgcttctttatcttttattcttggaaattatgatgatactgacgtttcctccagagttttgaaaccatgggaaggtagaatctacctcgtcaaataa

SEQ ID NO: 75685 - DNA, 498 bp, Saccharomyces pastorianus
atggcggcaacaccagcagcgattgaagttagtttgaccattgtatttgttttgttttttagtgctgatgtaagcttaacaagaaatagtgaaatgaaagcgcatacctcaaagatggatagctacagcagctctatttatatgaatgtcttgccaacttccctggcacaaacgagttatcatctggcacccatctctcacctaaaatgtctcagtgtacaattttcatcccacattcattattcatattattacggtgcttctgtacttgaacgatgcgtctttcataggtcccgtatacgaggcgcacgcttcatagtgcctataccttttattgcatttccaaggcacaagaatgttttctcacagtgtacatacttccgaagaatccctttagggtgccttcagagatgcagctgcagcttttggccaagaaaaagccaaaaccaaatttgctttgaaccctcgttaagaggccacctaatctttgtgctctaa

SEQ ID NO: 75686 - DNA, 363 bp, Saccharomyces pastorianus
atggtcaaactaacttcaatcgctgctggtgttgccgccatcgctgctactgcttccgcaaccaccactctagctcaatctgacgaaagagtcaacttggttgaattgggtgtctacgtctctgatatcagagctcacttggcccaatactacatgttccaagccgctcatccaactgaaacctacccagtcgaagttgctgaagccgttttcaactacggtgacttcaccaccatgttgaccggtattgccccagaccaagtgaccagaatgatcaccggtgtcccatggtactccagcagattaaagccagccatctctagtgctctatccaaggacggtatctacactatcgcaaactag

SEQ ID NO: 75687 - DNA, 1083 bp, Saccharomyces pastorianus
atgtcgatagtctacaataaaacaccattattacgtcaattcttccccggaaaggcttctgcacaatttttcttgaaatatgaatgccttcaaccaagtggctccttcaaaagtagaggaatcggtaatctcatcatgaaaagtgccattcgaattcaaaaggacggtaaaagatctcctcaggttttcgctagttctggcggtaatgccggttttgctgctgcaacagcatgtcaaagactgtctctaccatgtacagtcgtggttcctacagcgacaaagaagagaatggtagataaaatcaggaacaccggtgcccaggttatcgtgagtggtgcctactggaaagaagcagatacttttttaaaaacaaatgtcatgaataaaatagactctcaggtcattgagcccatttatgttcatcccttcgataatccggatatttgggaaggacattcatctatgatagatgaaatagtacaagatttgaaatcgcaacatatttccgtgaataaggttaaaggcatagtatgcagcgttggtggaggtggtttatacaatggtattattcaaggtttggaaaggtatggtttagctgataggatccctattgtgggggtggaaacgaatggatgtcatgttttcaatacttctttgaaaataggccaaccagttcaattcaagaagataacaagtattgctacttctctaggaacggccgtgatctctaatcaaactttcgaatacgctcgcaaatacaacaccagatccgttgtaatagaggacaaagatgttattgaaacctgtcttaaatatacacatcaattcaatatggtgattgaaccggcatgtggcgccgcattgcatttgggttacaacactaagatcctagaaaatgcactgggctcaaaattagctgcggatgacattgtgataattattgcttgtggcggctcctctaatactataaaggacttggaagaagcgttggatagcatgagaaaaaaagacactcctgtaatagaagtcgctgacaatttcatatttccagaaaaaaatattgtgaatttaaaaagtgcttga

SEQ ID NO: 75688 - DNA, 1272 bp, Saccharomyces pastorianus
atggcaacccaagccctagaggatatcacggagaggcttttaataaggtcgcaagaggctatcttgcaattagatctgtggatacaacgtcagcagagatcatcaatatgccagacaacagatcaagagtcattggataagttatcccaacagtacaaccagtatatgtctcaactgaactctttatatgttagatcggaatctgttcgagacaagttgagcaaggaacaacaacgcagattgatcacagaggataatgagcatcaacgcatagaagacttggttcgtgaattccaggatatcactttgaggttgaacgagctggccaccgtcccaaatgaagcgtctaatgattctccacaatcgcaatccaccagaagtagtttagggtcatttcaacctcgaccattgaaaataattgagaggcaacgtctctgtatggtaactccatcgaaaccaccaaaaaaatcggtaggctttaaccccatcaatgaagtcgattgtccttcgaaaactaactctttaccgtgctcacctaaaaaacaacctgcaagaaatcgcactttacgtgcagccaaatcacatgatactggcttgaacaaaagtaagaaaccgtcttcctcggatacgtatgagtctttcttcaaaaatagacaaagactttcgttgaccttctttgatgaaatggatgatgaagattttgattctgatcaagatactatcattctaccaaacataagtacccctccacatgttggtgtgaccgcaaagggtgctgaattcgaacctttaaggagatataactctcacgaaagtatactatctaacaaaccagcaccttctaagtcgctcaatctgggaagtttctccgcctcattcttcaagccatctaatccgacgtttggaacttcgatatcaaatgtccaagtgaactgtcatccaactgttgcagcgacaatggctcctagtcgtaatggtcctcgtattccaagttctaaggcgttgttatcatcattcattgcacgatcagatacacatacggtaaaagaggacaacacaaatcttaagcatgcatcttttatggataagtttaattcatcgttaagcacaatatcagaatcttttcaaagtaagagggggagaaagaataagggcatgaatgaagaacgaatatcaaatcataatgtagcacaggaacaaaaaaataatatggatataagcgtctctatagaagaattgcaagatgctttgaatacagaactgctgttttaa

SEQ ID NO: 75689 - DNA, 951 bp, Saccharomyces pastorianus
atggtgtctacacataacagagataaaccttgggatacggatgatattgataaatggaagatagaggagtttaaggaagaggataacgcatccggtcaaccttttgctgaagagtccagttttatgactttgtttcctaaatacagagaaagttacttgaagacgatttggaatgatgtaacaagggctctagacaaacacaacatagcgtgtgttctagatttagtcgagggttctatgacagtaaaaacaactagaaaaacatacgatcccgctatcattttgaaagccagagatttgatcaaattattggcgagatccgttcctttcccgcaagccgttaagatcctacaagatgacatggcatgcgacgttattaaaattggtaatttcgttactaacaaagaaaggtttgtcaagagaagacaacgtcttgtaggccctaacggtaatactttaaaggctttggaacttctaactaaatgttacattctagtacaaggtaacacagtaagtgccatgggtcccttcaagggcttgaaggaggtccgtcgagtagtagaagattgtatgaaaaatattcaccctatctatcatatcaaggaattaatgataaaaagagaattggcaaaaaggccagagttagccaatgaagattggtcaagattcttgcccatgtttaagaagaggaatgtggccagaaagaaacccaagaagatcagaaacgtcgaaaagaaggtctatactccatttcctcctgcccaattgcctagaaaggttgatttggaaattgaaagtggtgagtatttcttaagcaagagagaaaagcaaatgaagaaattaaatgagcaaaaggaaaagcaaatggaaagagaaatcgaaaggcaggaagagagagcaaaagatttcatagctccggaagaagaagcatacaagccaaaccaaaattag

SEQ ID NO: 75690 - DNA, 459 bp, Saccharomyces pastorianus
atgcagtaccattccgctctatatgtatatatttacgtaactttcaccactgttccctataaggaaaagccggatatcatttcgatctgcttcagcatgctgtcgtttgtttttgatttttctgtccgaatttgctctcgtaccttggagtccttttcctggtccttgatcagctcctcggctttcaaagtagtctcagctttcagtttagctggctcttgtgtacttgcctcccgcagcagcgtcggtatcattgtttcactacttttgtttaacttttccacttgtaactttgttctcttcctttcagcggtgctgatcgacctctttttttgtactttcttgccaacaccaacattcttgcccacacctttctttttcatgctacacttgcccattttttccttgctaaattcccttgagttattgtaccttattatagcaggcttgcacatctga

SEQ ID NO: 75691 - DNA, 399 bp, Saccharomyces pastorianus
atgtgcaagcctgctataataaggtacaataactcaagggaatttagcaaggaaaaaatgggcaagtgtagcatgaaaaagaaaggtgtgggcaagaatgttggtgttggcaagaaagtacaaaaaaagaggtcgatcagcaccgctgaaaggaagagaacaaagttacaagtggaaaagttaaacaaaagtagtgaaacaatgataccgacgctgctgcgggaggcaagtacacaagagccagctaaactgaaagctgagactactttgaaagccgaggagctgatcaaggaccaggaaaaggactccaaggtacgagagcaaattcggacagaaaaatcaaaaacaaacgacagcatgctgaagcagatcgaaatgatatccggcttttccttatag

SEQ ID NO: 75692 - DNA, 294 bp, Saccharomyces pastorianus
atgtccgaacaagcacaaacacaacaaccagcgaaaagcactccctccaaggattctaacaagaatggcagctccgtgtccacgatcctcgacactaagtgggatattgtcctgtccaacatgctggtcaagactgccatgggttttggcgtaggtgtgttcacctcagtattattcttcaagcgccgtgcatttcctgtatggctaggcattggatttggtgttggaagaggctacgccgagggcgacgccatctttagatccagtgctggcctcagatcctcgaaggtttag

SEQ ID NO: 75693 - DNA, 2139 bp, Saccharomyces pastorianus
atgcgattgttgctgtgcaagaattggtttgcgtcacctgtaatctcaccactactgtatacccggtccttatattcaatggctaacactactagtttccctattgctccccaggccccgcctaattggtcgttcactcccagcgatattagtgggaaaaccaacgaaatcatcaacaacagcaacaatttctatgattctatgagtaaggtagagagcccttccgtgagtaattttgtggagcctttcatgaagtttgaaaatgaattgggcccaataattaaccaattaactttcttacagcatgtgtcgtctgataaagaaattagggacgcatctgtgaactcctcaatgaaattggatgagttgaacatcgatctatctctgcgtcacgacatctttttgcaattcgcccgcgtctggcaggatgttcaatcgaaggcagattctgtggaaagagaaactttcaaatacgttgagaagtcttacaaggactacattcattctggtttggaacttgacgagggaaaccgattgaaaatcaaagagattaaaaagaagatctccgttaactctattaatttttctaagaatctgggagaacaaaaggaatacatcactttcaccaaagaacaattggaaggtgtgccggattctattttgacgcagttcgagacaataaaatctgacaaagagagcgatgaaaccttgtataaagtcatcttcaaatatccggacatttttcccgtgatgaaattggcatcctcagctcagactagaaagcaggcctttttggccgaccaaaataaggtccctgaaaatgaagctatactgttggatacattgaagctgcgtgacgaattggcctcgttattgggctatgacacgtatgcgaactacaacctgtatgataaaatggctaaagatagcactacggtaatgaactttttgaatgatttgaaggacaagctaattccgctgggcagaaaggaactacaggtcttgcaagatatgaaagccgaagatgttaagaaacttaatcagggtgcagatccaaactactacatttgggaccaccgttactacgataacaaatatttgttagaaaacttcaatgtggacctagaaaagatttctgaatattttccactagaggctacgattactggtatgctggaaatatacgaaacattgtttaatttgaagtttatcgagacgaaagattctcaaaacaaatctgtttggcatgacgacgtcaaacaaatcgccgtttggaatatggatgatccaaagtctccaaactttgttggttggatttatttcgatttacatcctcgtgatggtaaatatggccacgctgccaattttggtttatcgtcatcattcatgattgatgacaccacaagatcgtatccggttactgcattggtttgcaatttctccaaatctacgaaggataaaccttctctactgaagcataacgaaatagtgacctttttccatgaattgggccatggtatccatgacctggtgggacaaaacaaggaatcgaggtttaatggccccggatctgttccatgggattttgtggaggcaccttcccaaatgttagaattttggacttggaataagaatgaattaatcaacctctcatcgcattacaaaacgggcgaaaaaattccagaatctttgatcaattcattgatcaaaactaaacacgtaaatggtgctttattcactctaagacaattacattttgggttatttgatatgaaagtacatacttgtaaagacttgcaaaacctgtcaatttgcgatacctggaaccaattgagacaggaaatttctttgatttctaatggtggtacgttatccaagggttatgattcatttggccatataatgtcagactcttactctgccggttattacggttatctatgggcggaagtctttgcaactgatatgtatcacaccaaattcgctaaggatccgttaaataccaagaatgggatacaataccgtgatatcgtgttggcccgtggtggcctttatgatattaatgataatctgaaagaatttttgggtagggaaccttctaaggatgctttcttgaaggagctgggcttacagaactaa

SEQ ID NO: 75694 - DNA, 435 bp, Saccharomyces pastorianus
atggtttcgaagaaaaatacggctgaaatcagtgcaaaagatatatgggagaatatatggagtggtgtaagttcgctgcttgatttcttcgcagtattggaaaacctaggcgtggtcaacgataagttatatgtaagtgggctattacggaaagtttggctgtgttactcatgcatttcagtgataaaatgtgtatggaaattaataaaattatgcaaggtgaaatttaaaatcgatcaacgattggatggggagggaaatggtctagtaaaggataagttgataaacttcaagaaaaaatataacgaacatatcagacatattactgctgctttactccaagatttgagctatttaatggttttaatctatccagggacgaggttatttaaaagattatctaacataataacactttgtagaataattgtataa

SEQ ID NO: 75695 - DNA, 1008 bp, Saccharomyces pastorianus
atggcattccaagatccaacttacgaccagaataaaagcagacacatcaacaacagtcacttgcaagggccaaaccaggaaacaatagaaatgaaatctaaacacgtatcattcaaaccctctagagacttccatacaaacgattactcgaataactacattcatgggaagtcgctaccgcaacagcatgttactaatattgagaatagggttgatggctatccaaaacttcagaaattatttcaggcgaaagctaaacaaataaatcaatttgccactacgccatttgggtgtaaaatcggaatagattccattgttccaacgttgaatcactggatacagaacgaaaatttgactttcgacgtggtgatgattggctgcttaacagaaaatcagtttatttacccaattttaacccaattgccattggataaattgatctccaaaccaggtttcctgttcatctgggccaattctcaaaaaatcaatgaacttactaaacttttgaataatgaaatatgggctaaaaagtttagaagaagtgaagaattggtttttgttcctattgacaagaaatcaccgttttatccaggtttagatcaggacgatgaaacgttgatggaaaaaatgcaatggcactgttggatgtgtatcacaggtacagtaaggaggtctacagatggacatcttattcattgtaacgtagacactgacttgagtatcgaaacgaaggacaccactaatggtgctgtaccatcccatttgtatcgtattgcagaaaacttctctaccgcgactagacgattacatattattcctgcaaggactggttacgagacacccgtcaaagtaagacctggctgggttatagtgagcccagatgttatgttggataacttctcacccaagagatataaagaagagatagctaatttaggttcgaatatcccattaaaaaatgagattgagctgttaagaccaagaagtccagtacaaaaagcacaataa

SEQ ID NO: 75696 - DNA, 1251 bp, Saccharomyces pastorianus
atggtgacaagacatagagtgactgtactctacaatgcccctgaggatatcggtaatcatatgcgccaaaatgacactcatttgactgttcgtggaggttctggtgtggttttacaacaaaggtggctattagagaggactggaagcttggataaatcctttacgagaatcacttggaggcccagagcggacttggctagaagtttaagcgttatagaaaatgaactgagtgctggcttttcagtttactcaaattcttcggatgtgccggaaaggtttattactaacccagtctacaattcatttcacagtgagaagtttgacatagagcagtacttgcctcccgaagtagatttgaatctgtcatggaatccagaagattttacatatgatatatcagtggagcccacacaaatccaaattgttgaatatcgtctgttgaaacagggtgaagaatttacaattgcaagagtgaaagatgagaaactcgaagtaggtgtattctttgtggatgcaagtgatgaaagtgatgtcgatattggtggaatacgttgtaattggaggatggacgatggtaaaatggaaagatgtcagaaaacatccttattgtataaacagggccatatcgcatacaatcactcgacgactacgacatcactatatctgaatgaacctatcggtttgcatccaaaaatcatgattgatctcacagatttcgaagaacgccctaaatgcatgtatctaatgcacctgcaattgccgttagaattatttatcgataaattccaatcctctcccttactactttttggagaagacgacttagaattaccagaatactctcttcgagataaggcatggggttctgaaagtatctttgaattgaaagccggcacaatgaatgaagtgacattgcatactagatatattgagccttctaataataaaggggataaattggaagtttcatttgatccagaagttatattagcctgcgacacaggtgacaataaagtttcccataatccattttataaaaaagatctaggatatgaatctctctttacagacgatactacattccaccatttgaactcgacaactcttctagtaccaattccaaggcctgacacaaaggattattccaagatcaaaaatggtacgttactatgcttactcatctccatcatatacattttctccaaggtatttggtaacaacaagaagaaaagatcagtaaaacgggaataa

SEQ ID NO: 75697 - DNA, 1752 bp, Saccharomyces pastorianus
atgcccaatacgcatactcaacatgtgcaaatatcagagccaaattctgtaaatactttgtctacaccatccaaaagaggtcaccgccatcgcagatcgctagcaatatcaggagattttgattttttgaaacagcctgcagcaattgtgaatttaccacctccacaggcggctgaaaattgtccttcaactgccccaactgctgtatcaagtacattatcgccaatacgctacaatagatttccttgcaaaaccaatgaagacgctggaacgttagatttgcctgaaccaagattttatccgttatcaccaaagaacaatctgcaaacaccaagtccacgatttttcattagtgaagagccaagtttttcatcgccagttaaaggcgtcccagatgccattattaaccttgacgatgccttgaagacaaggcctaggtcatttaaatcacatagaagatctgaatccgctcctcctgatttggaggttatggtagataagggcaattgtgcagccggttctaactctatgattaaagaagaagaggactccttaattgaaccagaatcgaaaaatgaatattatgagcaaaagcttccaacagcactattatccccactgcggccttccctttgtgtatctgaacaggccattgatgtagatgattcagctctcaatgggtcaccgacccatcacaaccatgggatgcaaaacgccaatgcacggaattccaacacattcaattcgttgaagatcaaaggccaaaagcaaagatattatcattatacgaagcagctacctttgaccgtaggctgtgactcgcaatctccaaaagaacaaaggtcggctgcttcaatgacaatcaatcaggcaatgacaccttcttccctggcctataccccttctaaactagcatctactcccgcaacaccagtatccttttatgacagcaatgcggacattaacttagaaagtgataattttccactaaaagataaccctagatatgccaaggatggttatcctaaaaagtgtggcaattcacagcttaatcgtgtgctggatagcgataaaagacaggattttagtggagaatcgagaagaagaagatcgggcagtcctatctcccacatgcaacaccgcaacctgattgataatatgaaaggtagacgaaacagtaacacgataaactcaatcttcaactacaagagtcaacattatgaaatgccatatgatgatatgatgaaaaatgaaaacattaatgcacagtccatgcccttttcagtcaacggtgtcaacaatgaaaatagtatcggaggggttattacgagagcggacgatgcaccccttcaacactctgtggtcaaatcctgtacgcctgatggcaaggaagaaatgaataggcttaaaagtaatgacagtaatgaatattccaagtctgaagggcagatcagaaccaattcgcaactaagtaaggacattctcatgggtgaaccaggtgatatggttgatctgtcctcttttgtcaacacgcagagaaaagcctcaaatgaaactggtgacttagtctttagtttatcccaggatgatgacgcactgaaaacgttccatgcgagcaacagcgcagcaacaagcaatgaaagctggtgtattagcgatgatgcgttaggaaagcaggcgcaggacagtgaagttaggaggaaaagaaaatccaaattaggactctttagacatattttttcaaggaagtaa

SEQ ID NO: 75698 - DNA, 966 bp, Saccharomyces pastorianus
atgagtatccccgctgacattgcatctttaattagtgacaagtacaaaagtgccttcgataatggtaacttaaaatttatccagactgaaacaacgaaaacaaaggacccaaaaaccagcatgccatacttgattagccacatgccaagtctgatcgaaaagccagagcgtggccaaactccagaaggagaggatccactaggcaaacctgaggaagaattaacggttatcccagaatttggtggtgccgataacaaagcgtataaattgctattaaacaaattccctgtaatccctggacacactttattggtaactaacgaataccaacatcaaactgatgccttgaccccaaccgatttattgactgcttataagttgctgtgtgccttggacaatgaagaatccgacaagagacacatggtcttttacaattctggtccagccagtggttcttcattggaccacaaacatttgcaaattttgcaaatgcctgaaaagttcgtcactttccaagatagactatgtaatggtaaagaacatttcctaccaactttcaatactgaacctttgcaagatgctaaagtctcgttcgctcattttgtcttgccaatgccggagtccgaagaaactgttgatgaagacctattagctatgtgttacatctccatattgcaaagagctttgacctttttccaggactggttgaacgaaaatccagaactaaagaaatcctacaatcttatgttaaccaaggaatggatctgtgtcgttccacgttcgaaggccttttctgatgaaatgaagataggtttcaactccacaggttattgtggtatgatcttaaccaaaaatgatgaagttttctccaagattactgaaaaacctgaattgattaacgatatcttattggaatgtggtttcccaaacacttctggtcaaaaaccaaacgaatacaactattga

SEQ ID NO: 75699 - DNA, 939 bp, Saccharomyces pastorianus
atgtttagtaaatacctcgtaactgcatcttccctctttgtggctttgacctctgcagcatctaccgttgatctagatgctctgcttcttctaccaggggtcgagtcccacgacggcgttgatactgtattttcgaccaaaaacttttatcaagtgtcattcgtcaaatccattgctcctgctatcgtaaacagctccgtaatcttccaggatgtttctcgtggtgtggctatgggcaatgtcaagagcagagcaagtatcttcaacccagaggaaacgtattacgattgggaacagtaccaagtagtaaataatggagactggcgaaccgaatgggcacctgcctctgagtgcatttggagggaggagaaggataacagcgacgaaacaccggacagattccccatctcggtgccatataattggacgtcacagtactcaattgtagattatgacacagacgctaacgaagacaatttagatttcaggtttattaaatcattgctagataagaaaaattggttgaaaaaaattaaccagactgtttcccaatccagtattatggtagcaccaatgattaagccatacaatgtggtccagctttggtattcaaaatatatggtttgggcaaacgttcaaagacaatattgtagcggtgtttatccaggagggactcaatgtagcgcttggtccaggtactaccatgttgatgcacctacctgcgatgagcctgtcgcctcttacatgactaaaatgtcggaaaatgaggttcagtgtcccaatgagagaaacgcaactaccctagagcctctccgcctgaataagcagggagactctgatttttctttgactttcgaggaagaggaagaggaagagacaggatctaaatctctttggagtacattgaaaaaatttttctctaaaagaagtataagttga

SEQ ID NO: 75700 - DNA, 1392 bp, Saccharomyces pastorianus
atgaaccgtattactaggaaaagttgtttattcgcgattatatttgcatcattatttgtgacacatgcattgggtgccgctattgatccgccaaggcgaccacataatgtgaagccttttcataacggtaatctcgaacttcaaagaagagcaaatgaaccgttttttgaaatagatgtcaagagtctgaacacaaactcaccgatatcagagttgtgtaaaaaagatttgcacgtcattgaatcgtctcatgatctttttcatttacaaaaccaatgtgaattcatcttggggtcattaaaagtcacaaactatgattctaacattttggatttgaacagcttgagggccattggtggtgacctgattattcaggattcacctgaactgatcagaatccaagccgggaacttgaataaaatcgaagggctcttccaattacagggactaacctctttggtttctgttgaaattccaactttgaaattttgtcagtcactggagtggaaagttgttcccatcttgaactacgtctccatggattctcagaatattgagattataaaggatattgtcatatcggatacttcattagcaaacatcgagaatttcaacaaggttcaggaaattgatactttcaatatcaataataacagatttttagaaactattcattcgaacgttaaaaccattaggggacaattcagtgtacatgcgaacgctaaggagctagaacttgaaatgccacacttgagagaagtggaaaacataacgattagggacacatcattggtctaccttccacaattaacaaaagtgaaaagctctttagagttcatcgaaaattacttttacgaattgaacctgaacaatttgcagaagattggtggaacattaggaattatcaacaatgtaaatttaataaaagttaatttggagaacgtaacagacattcaaggtggcttgatgatcgccgataacgaatccctcgaggatattactttcctgccaaacttgaagcagattggaggtgctattttctttgaaggttcgttcaaagatatcatgttcgatagcttgaaactggtgaaaggtagcgcttttattaagagttcatcaaacgtgttggattgcaataaatggacaaacccatcaaatggaagatcaatcatcaggggtgggaaattcacttgtatttctggtaagaaggaaaatacgctgaatgttaaacaggatggtacaatcatagaaaaagggtacaaagatttaacgcaagaaggtgaagactccaagaaaagagtgatttcaaaatacgcgaactcagcaaatccaagcatgcaattggacccccttctttttggtacatgccttgttgctatgttattgttttaa

SEQ ID NO: 75701 - DNA, 777 bp, Saccharomyces pastorianus
atgaagaagacgttcgagcagtttcgaaaaagcaatttactatttcaggttctcaaaggaccccagcatctagaatgtcagaagttatttgtccttgattcttcattcaatccaccacatctggcccattttcaactactatcgcagactattaaaaacttcaaattgaaagacacccgttcgcatgttttattactgttagcggtgaataatgcagataagttgcctaagccggcatcttttccaactcgtctggaaatgatgtgcttattcgctgactaccttcaggagaagctcccccaatctgtagtatctgtcgggttgactgttttctcgaaattcatcgacaaggacaaaatattacatgagcaatttgttaaaggatgcagtgcagatataggctacttagttggttttgatacaattgctaggatctttgatgaaaaatattatcatcctttaaaaatcagtgatgtaatggagagcttcatgtcgggatctcaattatattgcttggcgagaggcgattgccatctcagtgctgaatcgcaactaagatatgctagtgacatccttgagggaaaattcgaaccggtaatacccagagaatggggcgctaggattcatgttatgcaaaatgattatccagcattaagaaatgtttcatcatccgagattaggaacaaactgaagaatgggcaagtggagagtttgaaagacgagttgccattgtgcatatacgattatttgatcaataataagacaatatttgattga

SEQ ID NO: 75702 - DNA, 2283 bp, Saccharomyces pastorianus
atgaagataacgtgtacagacttggtgtacgtcttcattttactcttcctaaacacgagttgtgtccaagccgttttttcagatgatgcatttatcactgattggcaactggctaacttaggtccttgggagaaagtcatccctgattctcgagaccgcaacagggttctcatcttatcgaaccctaccgaaacttcctgcttagtttcttcgtttaacgtttcttccggacagattcttttcagaaacgttttaccctttaccattgatgagattcaactggatagtaatgaccataacgcaatggtttgtgtgaactcttcaagcaaccattggcagaaatttggtttacacgattggtttttactagaggaaggcgtagataatgccccttctacgaccattttacctcaatcctcatatttaaacgatcaagtatctattaagaacaatgaactacatattctcgatgagcagtcaaaactggcagaatggaaattggagttacctcaagggttcaataaagtggaatattttcatcgtgaagatcccctggcgttagtgttgaacgttaatgatacccaatatatgggattctctgccaatggcacagaattgatccccgtttggcaaagagatgaatggttgactaacgtggtagactatgctgtattggacgtcttcgattctagggatgtggagttgaacaaagatatgaaagcggaacttgattcaaattcgctttggaatgcttactggcttagattgacaactaattggaatcgccttatcaacttattgaaagaaaaccaattctcaccaggacgtgtcttcactaaactcctagctctagacgctaaggataccacggtatcagatttgaagttcggattcgccaaaatcttaattgttttgacgcatgatggctttatcggcggccttgatatggtcaataagggccaacttatctggaaactcgatttagaaattgatcagggcgtcaaaatgttctggacggataaaaaccatgacgaacttgttgttttttcgcatgatgggcattatttgacaattgaagttactaaagatcaaccgattatcaaatcaagatcccccctatctgaaaggaaaactgttgattccgttattaggctgaatgaacatgatcaccagtatctgattaagtttgaggataaggatcatttactgttcaaattgaatcccggcaagaatacggatgtaccaatagttgccaacaaccattctagttcccacatattcgtcacagagcatgacacgaatggcatttatggctacataatcgaaaacgatacggtaaaacaaacttggaaaaaagccgtaaattcgaaagagaaaatggtggcatatagcaagagggaaacaacaaacctaaacactcttggtattacactaggtgacaaatcggttctttataaatatttgtaccccaacctagcggcttatctgatcgctaatgaagaacatcatacaatcacttttaacttaattgataccattacaggagaaatcctcattacccaagagcacaaggattctccggattttaggtttccaatggatattgttttcggtgaatattgggtcgtttattcctatttcagttctgaacctgttccagaacaaaagttagtagtggtggaattatatgagtcactaaccccagatgagcgtttgtctaactcaagcgacaatttttcttatgatccattgactggacacattaacaaacctcaatttcaaactaaacaattcatttttcccgagattatcaaaacaatgtccatttccaagacaacggatgatattaccacaaaggcaatcgttatggaattagaaaatggacaaatcacctacataccaaagcttttattgaatgcaagaggtaaaccagcagaagaaatggccaaggataagaaaaaagagtttatggctaccccatacacgccagttatcccaattaatgataatttcattatcactcatttcagaaatctattgccaggatccgattcgcagttgatctccatcccaaccaatctggaatccacaagcattatatgtgatctaggccttgatgtattttgtacaaggatcacaccttcgggccaatttgatttaatgagtcctactttcgaaaagggtaaattgcttattactatattcgtcttgttggtgatcacgtattttatccgtccttctgtttcaaacaagaagttgaaatcccaatggctaattaaatag

SEQ ID NO: 75703 - DNA, 324 bp, Saccharomyces pastorianus
atggtaaagggtaaaacgtttctgaaaagaatctgtccggaagaaacgttaaacgaagaaactaagcaggaagtttcggtagggttcgataagatgagaaccctgttgcggtctcgagaatcagggatgactttctcccaaggacctaagttagccagttgccaatcagtgataaatgcatcatctgaaaaaacggcttggacacaactcgtgtttaggaagagtaaaatgaagacgtacaccaagtctgtacacgttatcttcattgctatgggggaaggggaggatgaaagtgttgatatgaatgtaggtattagttattaa

SEQ ID NO: 75704 - DNA, 1254 bp, Saccharomyces pastorianus
atggctgtatttactcctccatcaggtaatagcaattccaccgaccatactcacacacaagatgaccacgacaaagatgataatgatatcaagaaattctacataaggccaagtttaggcttaaaactgtggggtccgctcgtacccgctcctgataacctaccgggactatacactctaatcactatccaatctgcagtgggtttctttgccctttggagactgagaaggctctacaaactaccgccaccgcgccgcattgccactggcactcactcggatttatcctttggcgaactacccagtgaaatgattgtcaatggcaagactaaaatcaaaaaggatattgctgactttccaactttgaaccgcttctccaccacccatggtgacattgtgctcgcccctcctcccatcatacctcgccaatctcgattcgtcagcgtcagaaagctcttatgggggttgtttggctctttgctactttctcagtcactgttggagcttactcgcctgaactttcttaaatacgacccctggtgcgacgaaatgaaatccgtacgtgacaagaagtttttcaacaatattgtcaaatattatcacgagggcatagaccccaccaaaataaaagtcaaggatgctatgaacggtactcctctctcgacaaatatcccagaggtcaaacaaagcgtcgctctcgctagagcgcaagttgaggcgcagaatcccattattaaatggttcggacccttggaatacaagcccatgtctttcaacgagtacctcaatcgcatggaatttcacttggacatgttcgagttttttcaaaataaaagaaacattagagaaaattccattgaactcatcaattccatatcccacaatccgcagtcttcttctactggccttgaaggtctttccgagtccaaaaaactccatctacaaaatgtggaaaaaagactgcatttcttagcatcttcgggagattccatttccgcaccagtaaagaagagatccagcaccacactctcccgaggtgtcattttgccccatgacacgaaaggcccgcaagatattgatctcgatacaataagatcgctttatgatccatggatgactttggccttagaaacttcgctaagcatcaaattcataccaactaccatgccctcccataccaagacacccactagcacggaccagccgttaccagggcctacccccaaggctctcactaatgaaaagacacattag

SEQ ID NO: 75705 - DNA, 2238 bp, Saccharomyces pastorianus
atgtcacacactaataagatcgcatacgtgttgaacaatgacacggaggaaacagcctcgccctcttccgttggttgttttgacaagaaacagctcactaaattactgatacatactttaaaggagctgggctacgactccgccgctgaccagttactgctagagagcggcggatatcaaaatgagtctaaccacatccagactttcttcaaactcatcaagaccggccaattccatcttattaattggcagattgtttgctcgctgccccttgcccatagctctccgctaaggtccgaatggcttcaaaggctgctcattcccacgccgacgcccgccacgacttcacttttcgaccacatgctcctgcaactgcaatacctgcaacagctgatgagctctgtaaattcatctacttgttcggacgcagagatcgccacgctcagaaattacgtagagatcatgattctagttaatagacaaatattcctcgaattcttccatccagtcacaaattccgcctctcacaagggccctcacactgcactgcccgtcctgtatttgcgcaaaatcctcaaaaacttcatcgagatatgggattccctgctggtgtctaacgatcagttcctaaatgaagaaaacatcttcaacccggaaacgaccttgagagaactgtcgacgtacctgaccaacccaaaactaaccgcgcagttgaacctcgagcgagaccatctgattgacgccatctccaaatatatcgatccgaacgaactcgttcccaagggtcgcctcttgcatctcttgaaacaggccatcaagtatcaacaatcacaagacatttttaatatcatcgatccggatgatgacgcctctttctcctctccaccccaccggatcaaccttttgcaggataacttctcacacgatctgactgtgacctttcaagaatggaagactatccaagacaccacagacgaaatttggtttttgacattttcgcccaatggcaagtatttggcttctgcgacttccgagtcttcaagaggctacttcattactgtttatgatgtggaacaagacttcaaaatttataagacttgcgtgagcttgtcacaatccgtattgtacctcatgttttctcctgatagccggtatctggttgcttgccctttcagcgaagatgttaccatttacgacatgaatgccacctccctgcccgatgcgtctgccacagactcgttcctaccatacccttctaccaggctctcgcccatggactcgtttaaactggacaccaccacgtacccagatgataccgaatcatcagcatcatcttcctcgaggccggcaaacgcgaattctaatcaatcaagagtatggtgctgcgatgccttccacactgcggaacgtgcgggctggatggtggttggatcgcccgacagagaagctattgtacactcactcaccacgaaagaatcactttttagcttaaaaggcaggacttgtatcgcgttgggccacgatgaaaacatctctgggagaaaatcaatcgatcctgcaaaagtcctttacaaaccaacaagtagcaatggtaactggcaatatgtggaggacgacgaaacctttccacgtgtgcacgacgtgaaaatcagctatgacgataaatgcgtgcttttaatgacccaccagggcgttatagatgtctacgatttcagtgggttcccctccaaagaggagctatctaagcaaacagtggatcccaaaaactttctgattccaagaatcgcaagattggatgtgggcaaaaacatgacttgtatctcattaccgctaaataacacgcatcaaggcttccataggcaacaaatatccgagtctcaacatttggtactagttagccttcaagataacgaattacaaatgtgggactataaagaaaatatcctcatacaaaagtactttggccagaagcaacagcactttattatcagatcttgcttcgcctacggtaataagcttgtcatgagcggatcagaagatggtaaaatttacatttgggatagaattagaggtaacttagtatctgttttatccggtcattccacggtaatgagtaattccacaaaacccatggggaaaaattgtaacgtagttgcatcaaaccctgcagataaagaaatgtttgcttctggcggtgatgacggtaagataaaaatctggaaaatttcaagaaattaa

SEQ ID NO: 75706 - DNA, 1701 bp, Saccharomyces pastorianus
atgcaggttcaaaaaatggtgagagataacagtaataacggtagcgataaaagcgtccattgggagaggaggaataataacggcgcaggccaccgttatcgttccagaagcggtaataccggtgctttggcaacaaaactaagtagtgggacgctctctgtcagaggattagtgaaggaccgaacaggaagcggcaagatcgcgggctgcgtggaggcgtttctggatgccaggacccaattgaatacgccctgggaccgtgctaagtgcaattggctggaccagatagattactatgtacagttgagaaagaccgcgttttctaaggaattggaccaactaaggaagcccatgatcgatgcatatgtggcggagatgaggcagaagtttgatgcctcctatggacaatccagggcgcaattggaagccaaactggcgctggtggacagtgaatggcatatggtacatggtgatgtgcatgcaaaactggaaaaactcgtggaagaacgccggtttttgaaaagattaagcgacacgatcgtaccacccaggtccaaaagatcacagcggctgtctccattgaccaaagaggaccgagccaactgtatctgtccgcagcccaaaggaatgagcgacaccgcttggttcgaagccattcagaagaaaatgttaggaatgaatggtaccatcaagctcctagagacagaacagaaactactggctgacgagaaaaacagcgtgaggaagacgttctggcccatggtggaagcacattcacgcttgaatgaatttgcttatctggagaaatgcatcaggctgatggcctctcagagagcaatatgcttttgtcttgatatagaggctttcgaaacaaaccagaacgtaatcaccgaaattggaatttcaatttatgaccccagggaaaatatggtgccgtcaatggttccaattacaaagaattaccacctaattatcgaggagtccctggaacttagaaaccaaaaatgggtctgtgactacaaggattgctacttattgggagaaagctatgttttgagcttgaaagagtgcgtgcatttcattcaatcactaataaactattacttggtcccggtgaccgaagaagacaagacatggtcaagggcatttgttggtcatcacgtgagcggggaccttaagtggctggagactattggtgtcaaattccctggcagagggtatgaaggccatctggaccatacgctgcttttggctgaaactcccggtgatctagacgtgttcatcttggacactgagcagttttacaggaaatcgtatggcgaaaaggggagcagtctgggcaagattctgcggttgttcgagataccgcatgcgtttctacacaatgccggtaacgatgcctactataccctgcatttgttcatgaagttttgcgatgttaatttcaggaaaataagcggcatggacgatgttcttaaagtaatgggccaagtaaaagtttggggagaacgagacgtacgagagcctaaagtggtgcccatgtcgtatgccatctccatcgaggaggcagtcaaaaatcggacgtaccgcaagggcgtcaagagcagcaggaaggaaagagtctgccaaacggaattcggtgggttaacgtatttcggaaccgctaaagacgccttcataagcactcttccgacacactaa

SEQ ID NO: 75707 - DNA, 333 bp, Saccharomyces pastorianus
atggtatctcaagaaactatcaagcacgtcaaggaccttattgcagaaaacgagatcttcgtcgcatccaaaacgtactgtccatactgccatgcagccctaaacacgctttttgaaaagttaaaggttcccaggtccaaagttctggttttgcaattgaatgacatgaaggaaggcgcagacattcaggctgcgttatatgagattaatggccaaagaaccgtgccaaacatctatattaatggtaaacatattggaggcaacgacgatttgcaggaattgagggagactggcgaattggaggaattgttagaacctattcttgcaaattaa

SEQ ID NO: 75708 - DNA, 1065 bp, Saccharomyces pastorianus
atggggtttctttcggatcatccgcatacagctatcaccgagacgatctttcgaattgtctcttcaagggactatacgctagaagtggagttagctcccttgattcagcttatcaaagcagatcacaacgattataactataccgtgaaccaagaagaagctgcgcgagcacttagaaagaaaataaagtatgggaatcggctgcagcagtccaggactctggacctcttggatctattcatctcacaaggcgtgaagtttacagtcatgtacaatgatgacaagctgctgcaaagactgagagggatggctacgaactctgaaaacagcgggtccggtgaaaagtatgagcctaggattattaagaagtgcgcggcgtatgctatctcgtggctaaactatataacgcagaacaaccttgagaatgcgagggcgtattcaggtctttatcaattgggtcaaacagtcaaacagaggtactcgaagagcagccgttcccgccgtagcggcggaggctctggcggacggtctaacttcatggatgatagcgccgacgacactttgtaccagtccaactcgctgactaatgccgatagattgtataggattccacagatcaacatgaacaaagaggcacccaggattcggctcataatcagcgatgctctcgcgtctgctgtgtcgttacagaactcgctgatcggactgcccaagggcaagttctccacggacgatgaagaggccacgtccaagttcatccaggcaagggcgatcagaaggaaagttcttagatatctgcaattggtcacggagggtgagtttctgggtagcttaattcatgccaatgatgaactggtggctgcgttgactgcatacgacgaccgaagcgctcaggacgatagcagcgatgaaagtgatcacggctcgtacgatgacggtatttatgatgaaaacgagcaggataacagcaggtatattgatagcgagtcctcagaggaagagagcttgtcttcttatcagccgtccacgatctcaaacccattcggtgatcataacaaaatttga

SEQ ID NO: 75709 - DNA, 1041 bp, Saccharomyces pastorianus
atggaggacggtaaacaggctatcaatgagggatcaaacgatgcttcgccggatctggacgtgaatggcacaatattgatgaataatgaagacttttcccagtggtcggttgatgatgtgataacttggtgtatatccacgctggaggtggaagaaaccgatccattatgccagagactgcgagaaaatgatattgtaggagatcttttgccggaattgtgcttgcaagattgccaggacttgtgtgacggtgatttgaataaggccataaaattcaagatactgatcaataagatgagagacagcaagttggagtggaaggacgacaagactcaagaggacatgataacggtactgaaaaacttgtacactactacatctgcgaaattgcaagaatttcaatcgcagtacacaaggctgaggatggatgtcttggaggtaatgaagaccagctcaagctcttctccgattaacacacatggagtgtctactacggtaccttcttcaaacaacacaattatacccagtagtgacggtgtgtctctttcacaaacagactatttcgacacagttcataaccgacaatcaccgtcaaggagagaatccccggtaacggtatttaggcaacccagtctttcccactcaaaatctttgcacaaggatagcaaaaacaaagtaccccaaatatctacaaaccaatctcacccatctgccgtttcaacagcgaacacaccggggccatcacctaacgaggcgttaaaacagttgcgtgcatctaaagaagactcctgcgaacggatcttgaaaaacgcaatgaaaagacataacttagcagatcaggattggagacaatatgtcttggttatttgctatggggatcaagagaggctgttagaattgaacgaaaagcctgtgatcatattcaagaacttaaagcaacagggtttgcatcccgccattatgttaagaagaagaggtgatttcgaagaagtagcaatgatgaacggaagtgacaatgtcacccccggtggaagactctaa

SEQ ID NO: 75710 - DNA, 894 bp, Saccharomyces pastorianus
atgggtattgaagacattagcgccatgaagaacgggtttatagtggtgccgttcaaattaccggatcacaaggcactacccaaaagccaggaagcttcgttgcatttcatgtttgctaaaagacaccagagttcaaattccaacgagtctgactgtttgtttttggtcaaccttccattattatctaacatagagcacatgaagaaatttgtcgggcagctctgtgggaaatacgatacagtatcgcatgtagaggaactactatataacgatgaatttggattacatgaagtagatttatcagcattgacctccgatctgatgtcctccactgacgtcaacgagaagagatacacaccaagaaacacggcgctattaaaatttgttgatgctgcaagtataaataactgctggaatgctttgaaaaaatactcgaatttgcatgccaagcatccaaatgaactatttgaatggacatatacgactccatcattcacaacttttgttaacttctacaaaccactggatattgattatttgaaagaagatattcatacacatatggcaatttttgaacagcgtgaagctcaagcacaagaggatgttcaaagttctatagtggatgaggatggattcacattagttgtaggaaagaacaccaagtcattgaattccataagaaagaaaatattaaacaaaaatccattatccaaacatgaaaataaggccaagccaatttcaaatatagataaaaaggcaaagaaagatttctatagatttcaggtcagagaacgtaaaaaacaggagatcaatcaactgttaagtaaatttaaggaagatcaagaaagaatcaaggtaatgaaagctaagagaaaattcaatccatacacttaa

SEQ ID NO: 75711 - DNA, 582 bp, Saccharomyces pastorianus
atgtctgctgttgcaacttatttgaaaactttaactgctcgtcgtactatttacgctttgaaaccggagttacctggtgaaattactatcaacgacatccaatccgtcgtccaaaccatcattaaagaaacacccaccgctttcaactcccagccaaatcgcgctgttatcttgactggtgaaactcacaaaaaagtttgggacgaagtgactaaggctatagaaagccctgccggtcaaaagaggcctgcttcagcaagggatgaggcctttggttctgtaatcttcttcaccgacgacaaggtaactgaaaagctaaaggctgacttcccagcgtacgcagctgcattccctagtttcgcggaccatacctctggtgccgctcaaatcaactcgtgggttgccttggaggcaatgggcctgggtggtcacctacaacactacaatggttacataaaagctgctttgccaagcaaaatccctgagtcttggaccgtacaagctcaattagtcttcggtaccccagccgcacctccaggtgaaaagacctacatcaaaaacgatgttgaaatcttcaattaa

SEQ ID NO: 75712 - DNA, 582 bp, Saccharomyces pastorianus
atgtccccaactggaaactacttaaacgctattacaaaccgtcgtaccatctacaatttgaagcccgaattaccacaaggtgtcggtttggatgatgtaaagagaactgtacacgttattctcaagaatacgccaacagcttttaactcacaagtgaatcgcgctgtcattatcgttggtgatacacacaaaaggatatgggatgctgttgcgagcgcaatgccaactgctgaagccaagaagagaccagagtcttgcagagatgaggcttacggttcagtcattttcttcactgatgaaggaccaactgaaaaactgcaaagagattttccagccttggcagccgctttcccaacatgcgccgctcatacgaccggtgctgtgcaaattcagtcttggactgccctcgaactattgggattgggggctaatttgcaacactataatgactacgtcaaatctgctttgcctcaagatgttcctattgcgtggactgtacaatctcaattggtctttggtgttccaactgccttgccagaagaaaagacttttatcaataacgtaatcaacgtttatcactga

SEQ ID NO: 75713 - DNA, 348 bp, Saccharomyces pastorianus
atggcccgtgcgctcatgttgcgcaagttggaccttgccggtgctaccaaagcccagtgtttcaccaagcttccatgggcctatagtactcgatggtttagcagcagaatgggtctcggtattcactacagtcatactgcagtagttctggtaatttacgtcagcactattatcaagcctatacacgtttattgcacactatattatgctattctacgctgttgtatccaaatttacatcttcttttttagttttcatgtagttttcaagagagcccttttactgagactgcgttacgcgctttcttgcacagcacgcgaaaaaaagaacgagatgttttccttttaa

SEQ ID NO: 75714 - DNA, 378 bp, Saccharomyces pastorianus
atggttctaaccgatgccgaagaactgcgcagtccggttataacgtctgacatgtccttttttgatttggaatccaaccactcaagcgactctgttcatttactttgcgaaaaatatacccacaaattgcccatcgaaagtgaatcgcaaaccaccttcagactggcaccgacaaagcaaagattatacagacagagtactttacacgtaccgttaagtctcaagcaaagggttttcttatttactgaacgggtaaagagtatctgggccggcttgccaagatgcaaaccgaataagtatttcaaagttgcatttgccttagccgtgctgacaccattggctatttggatattttatattgactttcgtgtacattga

SEQ ID NO: 75715 - DNA, 1095 bp, Saccharomyces pastorianus
atgtctgcccctaagaagatcgtcgttttgccaggtgaccacgttggtcaagaaatcacagccgaagccattaaggttcttaaagctatttctgatgttcgttccaatgtcaagttcgatttcgaaaatcatttaattggtggtgctgctatcgatgctacaggtgttccacttccagatgaggcgctggaagcctccaaaaaggctgatgccgttttgttaggtgctgtgggtggtcctaaatggggtaccggtagtgttagacctgaacaaggtttactaaaaatccgtaaagaacttcaattgtacgccaacttaagaccatgtaactttgcatccgactctcttttagacttatctccaatcaagccacaatttgctaaaggtactgacttcgttgttgtcagagaattagtgggaggtatttacttcggtaagagaaaggaagacgatggtgatggtgtcgcttgggatagtgaacaatacaccgttccagaagtgcaaagaatcacaagaatggccgctttcatggccctacaacatgagccaccattgcctatttggtccttggataaagctaatgttttggcctcttcaagattatggagaaaaactgtggaggaaaccatcaagaacgaattccctacattgaaggttcaacatcaattgattgattctgccgccatgatcctagttaagaacccaacccacctaaatggtattataatcaccagcaacatgtttggtgatatcatctccgatgaagcctccgttatcccaggctccttgggtttgttgccatctgcgtccttggcctctttgccagacaagaacaccgcatttggtttgtacgaaccatgccacggttctgctccagatttgccaaagaataaggtcaaccctatcgccactatcttgtctgctgcaatgatgttgaaattgtcattgaacttgcctgaagaaggtaaagccattgaagatgcagttaaaaaggttttggatgcaggtatcagaactggtgatttaggtggttccaacagtaccaccgaagtcggtgatgctgtcgccgaagaagttaagaaaatccttgcttaa

SEQ ID NO: 75716 - DNA, 1143 bp, Saccharomyces pastorianus
atgtccatcaacctacattccgcacccgagtatgatccatcttataagctgatccagttgacaccaaagatactggatataatacaggatccggttcaaaatcaccagttaaggtttaagtcattggacaaagacaagtctgaagttgtactgtgttcgcacgacaagacttgggtgctgaagcagcgcaaacattcaaacacagttctactaatgagagaatttgttcctgaacagcctattactttcgacgaaacgctcttgtttggactgtccaagccgtacatggacgtcgtgggattcgccaagactgaatcagaatttgagaccagagagacacatggcgaattgaacttgaattcagtaccaatatacaacggagaactggatttctccgacaaaatcatgaagaggtcatctacaaaggttatcgggaccctggaagaactacttgagaactcaccatgttctgcgctagaaggtatatcaaaatggcataagattggtggatctgtgaaagacggtgtgttgtgtattctttcacaagacttccttttcaaagcactgcatgtactactgatgagcgcaatggcagaatcactcgatctacagcacctgaatgttgaggatacacatcacgctgtggggaaggacattgaggacgagttcaatccatacacaagagaaatcatcgaaacagtgctgaataaatttgctgttcaagagcaagaggccgaaaacaatacgtggcgcttgagaataccgtttatagctcagtggtacgggattcaagcgctaaggaaatatgtttctggaataagcatgccaattgatgagttcctcatcaagtggaagtcccttttcccacctttcttcccatgtgacattgacattgacatgctgcgaggctatcatttcaagcctaccgataagactgtccagtatatagcgaaaagcacactaccaatggaccccaaagaacggtttaaagtcctgtttaggctacagtcacagtgggacttggaggatatcaagcctctaattgaagaactaaattcaagaggtatgaaaatagacagtttcatcatgaagtatgcccgccgtaaaagactgggcaaaaagaccgtggtcacgagcaggtag

SEQ ID NO: 75717 - DNA, 1284 bp, Saccharomyces pastorianus
atggagagagagctagggatgtatggaaatgataggagtagatcaagatcacctgtacgtcgtcgtttgagcgacgacagagacaggtacgatgattataacgatagtagcagtaataatggtaatggcagtcgtcgtcagagacgcgaccgaggctcccgtttcaatgatcggtacgatcagagttatggtggcagccgctaccacgatgataggaactggccccctcgccgaggaggccgtggcagaggaggaagcagatcattcagagggggacgcggtggcggtaggggtcgtactttaggtccaattgttgaaagagacttagaaaggcaatttgacgcgaccaagagaaattttgaaaatagtatcttcgtgagaaacttgacttttgattgtacccctgaagaccttaaggaattgtttggtacagtgggcgaagttgtggaggctgacattatcacatcaaagggccatcaccgtggtatggggactgtggaatttaccaaaaacgaatctgtccaagatgccatatcgaaatttgatggtgccctctttatggaccggaaactaatggtaagacaggataatcctcctcctgaagctgccaaggaattttctaagaaagctactagggaagaaatagataatgggtttgaagtgttcatcatcaatttaccgtactctataaattggcaatccttaaaagatatgtttaaagaatgtggtcatgtcttgcgtgccgatgtagaattggatttcaacggattttcaagaggattcggttctgtcatttatcctactgaggatgaaatgattagagctatcgatacattcaacggcatggaagtagaaggtagagttttggaagttagagaagggcgtttcaacaagagaaagaacaatgatcgttataatcaaaggcgtgaggaccttgaagataccagaggtactgaaccaagtcttgcgcaggatgtcgctgtccacattgatgaaaccgcagcaaaatttactgaaggtgtcaatccaggaggggatagaaactgtttcatttattgtagtaatttaccattctcaacagcaagaagcgatttattcgacttgtttgggcctatcggcaaaatcaataacgcggaattgaaaccacaggaaaatggtcaaccaactggtgttgctgttgtagaatatgaaaatttagtagatgcagatttttgtattcaaaaattaaataattataattatggtggttgtagtttacagatctcttatgctagacgtgattaa

SEQ ID NO: 75718 - DNA, 780 bp, Saccharomyces pastorianus
atggacggatattgggatgttgtagtgtcgtccttgcaagacatatacaatgccaacgaggtcattccctttgatgatgagctgcaaacaaaaaaactaaatttccttaatatgtcaaaggatcagctgcaattgcatctcaacactttccaagaacacatggaaaacgtcaacagagtgcaccgaatccttgacaatgtacgttccaatttgtcgttgatgttgaatcagtcacgagaggaaaagagtgaggaaaatactgaagatgcagaagaaggagaagggacacgcatggcattgtcgcagggcaagaaagctgtggggaaagttggcagatcgtactggaccagcgaatacaacccaaatgcacctattttggtgggctcagaggttgcttataagcccagaaggggcagtgccgacggcgaatggatacagtgtgaagtactcaaagtcgtagcagatggtacacgatttgaagtgagagatcctgaacctgatgaattgggcaactcaggcaaggtgtataaatgtaattggaaagaactactgttgatcccgccaggctttcccactaagaactacccgccagggactaaggttctggcaagatatcctgaaacgaccactttttatcctgcaattgtcatcggaaccaagagggacggcacttgcaggcttcgatttgatggtgaagaggaggtggacaaagagacggaagtgactcgccgtctagtgctgccttcgccaacggcttcggcaaacctagcaaggaaatag

SEQ ID NO: 75719 - DNA, 771 bp, Saccharomyces pastorianus
atgtttgtggtggattggagcgtgcagctatgcatgggagtgatttcacctctcttccgtgccctcgtgcaactgcctttatcaattttcgtatggaatgggtttcagcttgtggcattgcctatcaacatcccattgaggttgttcctggggacgtcgctgagccgtttagttgcacaaacaagcacattagacttctatgtgatattgacgttgtttcaatattttgctgtgctttgtgcttttggcagcatcataggactcatctttgggtttatattgggtgtgttccactcaatctgcggggtacccagtgtatacataagtctagaatggaaacggtggtttgctccgatacgtacggtccttgaacgtgcttccactagtattgtcaacattatgcgaggacaaactattgcgccaatacccatgcctaagcccaatcccacgcatatatcaaagcctaacatgaaaaaattccacgatgagcctggagctgatgatatgactataacgcatgatgtgaactgctacatcaccccttgccaaacgcctactaacgaaaaaattcagcattataataatgattcattcaacacgaccaccacagacgatgaacccactgatatttgggataggtctgacacttaccaaaattcattcgtcaccaatgaaactttgatgtctctttctaatagagctaagcttcgaagaaatgccagtgatgcggacatcgttaatataaagattttacgaaggaattctaggtaa

SEQ ID NO: 75720 - DNA, 567 bp, Saccharomyces pastorianus
atggattacgatagctctgatacaatgaacggtggttcaagtaaccccttaatcactaagatgaatacaatgaaattattatatcaacactatttggataaagtcactcctcacgctaaggagaggtgggctgtattgggtggtttgttatgtttgtttatggttcgtattacaatggccgaaggctggtatgtgatttgttatggtctaggtctatttttattgaatcaatttttagcctttttgaccccaaaattcgatatgtccttacagcaagatgaagaaaacaacgaattggaagctggagaaaaatcagaagaattccgtccattcatcagaagattaccagagttcaaattctggtataacagcattagagccactgtcatttccctcttgttgtcgctattttcaatcttcgatattccagtattttggcccatcttattgatgtatttcatattattgttttttttaactatgagaaggcagattcaacatatgataaaatatagatatatacccttagatatcggtaagaagaaatattctcattcttctaactga

SEQ ID NO: 75721 - DNA, 315 bp, Saccharomyces pastorianus
atgttatatcttctgaagaaattgaaacatattgattcttatggtgagagctatttatcaatgttttatcttaagttctactgcccttggaaattatgtcctttgcttcccattttatatggaagaaacaaatcagtacaaaatgcttggtcatgtcataagcttcatcgatttattgacttcccaactccttcggctaatatgaatttttttttctttataagagtttgctatggaactgtctcgctgtttatttcaacgtttctaaagaaaatatccttttttatttatgtgaacttcactgtatacttttag

SEQ ID NO: 75722 - DNA, 969 bp, Saccharomyces pastorianus
atggatcctctcaggtcagtacagcctgcttcttatgttggttttgataccatcacgaatcagatcgaacatcgtctgttgaagaaaggttttcaatttaatataatggttgttggccaatccggattgggtaaaagtactctaataaatacattatttgcctcacatttgattgattctgctactggtgatgatatttctgccctgcctgttacaaaaacaactgaaatgaaaatttctactcatactcttgtggaggaccgcgttcgcttgaatattaatgttatagatacacctggatttggtgactttattgacaattctaaagcttgggagcctattgtgaagtacattaaggaacaacattctcaatacttacgtaaagaattgacagcccaacgtgaaaggtttattactgatacaagagttcatgcaattctttatttcctgcaaccaaatggaaaggagttgagccgccttgacgttgaagccttgaaaagattgacagaaatagctaatgttataccagttattggcaagtctgatacattgactttagatgaaagaacggagtttagggagcttattcaaaatgaattcgaaaaatacaatttcaagatttatccttatgattcggaagaactaactgacgaggaattagaactaaacagaagtgttagatctatcattccgtttgcagtggttggttctgagaatgagattgaaataaacggtgaaaccttcaggggaagaaaaactcgttggagcgctattaatgttgaggatatcaaccagtgtgattttgtatatttaagggaatttttgattcgaactcatctccaagacttaatcgaaacaacttcctacattcattatgaagggttcagaacaagacaattaattgccttgaaagaaaatgcgaatagtcgttcctcagctcatatgtctagcaacgccattcaacgttga

SEQ ID NO: 75723 - DNA, 744 bp, Saccharomyces pastorianus
atggtaaagattgcgataattacttactctacctacgggcacatagacgttttagcccaagctgttaagaaaggtgtggaggcagctggtggtaaagctgatatatacagggtcgaggaaactttacctgatgaagtcctcaccaagatgaacgctcctcagaaacctgaagatattcctgttgctactgagaaaacgttgctcgaatatgacgcctttttgttcggtgttccaactaggtttggtaatttgccggctcaatggtccgccttttgggataaaaccggtggattatgggccaagggctctttgaacggcaaagctgcggggatattcgttagtacttccagttacggaggtggtcaagaaagtaccgttaaagcctgtttgtcttatttagctcatcacggaattatctttttaccactgggttataagaattcatttgctgagttagccagtatagaagaggtacacggtggctctccatggggtgctggtacccttgcaggacctgacggctcaagaactgcgtctcctcttgaattgagaattgctgaaattcaaggtaaaacattctacgaaaccgccaaaaaacttttccctgcaaaagaagccaagccctccactgaaaagaagaccactacttctgatgcggctaagagacaaactaaacctgctgcagctacaactgcagaaaagaaggaggacaaaggattattatcctgctgcactgtcatgtaa

SEQ ID NO: 75724 - DNA, 720 bp, Saccharomyces pastorianus
atgcagcctcatttagacaacaacagtaataatgacgatgtcaaattggatacattaggggaacaaaatgtgttatcatccgcagaaaatatcactttacctgaagacacctttaaatcatatacgacctacttgctgtacgagatggctcattacaaaccgatgatattttccttcttggcactttcagtttcaattttaatagttgtgatctttcataatgttaaagcttgtgatgtcgtttttggtttttcaattttcgtcacttctattttgtttttgtccacgttgattccgtttaatgtgtatatctcggatgagggtttcagaattaagcttttgctggaagttatcatccacaggccagcggtaaagggaaaagaatggagagcaatcacagacaatatgaatcaatatttacttgataatggtttatggagtactcgctattacttttatagtagtgaaagatgctacaaattcttcagatttcttgtgaaagaaaaacccccaggtgtgaatgtaaattcatcggtaaaggacgccacaagtacgcagatagatgcaccagcaaatgaggcttcaaatgaggtaataaaatgctttagtttcagttctgacccaatattcgaagcatactttgttaaagcagtagaagttgagaaacaagcacaacaggaatattggagaaagcaatatcctgacgccgatataccatga

SEQ ID NO: 75725 - DNA, 798 bp, Saccharomyces pastorianus
atgagttgggaaggttttaagaaggctattaacagagctggtcacagtgtgataattaagaatgtcgacaagaccattgataaagagtatgacatggaagaacgtcgttataaagttcttcaaagagcaggtgaggcattacaaaaggaagccaaaggtttcttggactcattgagagctgtgacagcatcacagactaccattgccgaggtcatctctaacctctatgacgattcaaaatatgttgctggtggtggttacaacgttggtaactattatttgcaatgtgttcaagattttgatagcgaaactgttaagcaattagacgggcccttaagagaaaccgtactagatccaataacaaagttttcgacgtatttcaaagaaattgaggaggccataaaaaagagagaccataagaaacaagacttcgatgctgcgaaggcaaaagttcgtagattagtggacaaacctgctaaagatgcctctaaactgccaagggctgaaaaagaattgagcttagctaaagatattttcgaaaatcttaataaccaattgaaaactgaactaccacagttagtttcattaagagtaccttacttcgacccaagttttgaagctttaatcaagattcagctaaggttctgtactgatggttacactcgtttagcgcagattcaacaatatttggaccaacaatcaagagacgactatgccaatgggttattagacactaaaatcgaagaactattaggacaaatgacaagcctagatatttgtgcgctcgggataaaataa

SEQ ID NO: 75726 - DNA, 3150 bp, Saccharomyces pastorianus
atgggaagtcatcgacgttatctctactatagtatattatcatttctattattatcctgctcagtggtacttgcaaaacaagataagaccccattctttgaaggtacttcttcgaaaaattcgcgtctaactgcacaagataagggcaatgatacatgcccgccatgttttaattgtatgctacctatttttgaatgcaaacagttttctgaatgcaattcgtacactggtagatgtgagtgtatagaagggtttgcaggtgatgattgctctctgcccctctgtggcggtctatcaccggatgaaagcggtaataaggatcgtcccataagagcacaaaatgacacctgtcattgtgataacggatggggagggatcaattgtgacgtttgtcaagaagattttgtctgtgatgcgttcatgcctgatcctagtattaaggggacatgttataagaatggtatgattgtagataaagtattttcaggttgtaatgtgaccaatgagaaaattctacagattttgaacggcaaaataccacaaattacatttgcctgtgataaacctaatcaagaatgtaattttcagttttggatagatcagttagaaagcttctattgtggcttaagtgattgtgcctttgaatacgacttggaacagaatacctcccattataagtgtaatgacgttcaatgcaaatgcgttcccgacactatgttgtgtggtgctaaggggtctatagatatctcggatttcctgacagagacaataaaagggccaggagatttcagctgtgatttagaaacaaggcaatgtaaattcagtgagccttctatgaatgatttgatattgaccgtgtttggtgacccttatattactttgaagtgtgaatccggtgaatgtgttcattatagtgagattccaggttacaaatctccttcaaaagatccaacagtgtcatggcaagggaaattggtgttggcattgactgctgtgatggtcctggcactttttacatttgctaccttttacatttctaaatctccgttattcagaaatggattgggttcctcaaagtctcccattcgtttgccagatgaagatgcggtgaataatttcttacaaaatgaagatgacacactggcgacattaagttttgaaaatatcacttatagtgtcccctcgataaattcagatggtgttgaagaaactgtgctgaatgaaataagtggtatcgtgaagcccggccaaatattagctatcatgggtggatctggtgcgggtaaaactactttattagatatcctagcaatgaaacggaaaacaggtcacgtttcgggttccataaaagttaacggtattagtatggaccgtaaatctttctcgaaaataatcgggttcgtcgatcaagatgactttttgctgcccactttgactgtttttgaaaccgtattaaatagtgcgctgttaagattgccaaaagcattgtcattcgaggccaagaaggcaagagtttataaggtgttggaagaactaagaattattgatatcaaagatcgtattattggtaatgaatttgatcgtggtattagtggaggtgaaaaacgccgagtttccattgcatgtgaattagtgacatctccattggttttatttttggatgaacctacatctggtttagatgctagtaatgccaataatgttattgaatgtttggtaaggttatccagcgactataacaggacattggtgctatctattcatcagccaagatcaaatatattttatttattcgataaattggtcctgttaagtaaaggtgagatggtctattccggaaatgccaaaaaagtgtcagaatttttgagaaatgagggatatatctgtccggacaactataatattgctgattatttgattgatattacttttgaagccggtcctcaggggaaaaggagaagaatcagaaacatttccgatttagaagctggtacggatactaacgatattgataatacgatacaccaaacaacatttactagcagtgatggtacaacacagagagagtgggctcatcttgcagctcatagagatgagatcagatctttactcagagatgaagaagatgtagagggaacagatggaaggcgaggtgctactgagattgacttaaataccaaactactacacgataaatataaagatagcgtctattatgcagagctttcacaggagatcgaggaagttttaagcgaaggtgatgaggaaagtaacgttttgaatggagatttacccacaggtcaacaatctgctggttttctgcaacagttatcgatattgaattcaagaagttttaaaaacatgtacagaaaccctaaactattattgggtaattatttactgacgatcctattgagtttattcttgggaacactatattacaacgtctccaatgatatcagcggttttcagaacagaatggggctgttcttctttatactaacgtacttcggttttgttacattcacaggtctcagctcgttcgctctggaaaggatcattttcataaaagaaagatccaataactattactcgccacttgcatactacattagtaagataatgagcgaagtggtcccgctacgtgttgtaccacctatactcttgtcattgattgtttacccaatgactggtttaaacatgaaagacaatgctttttttaaatgtattggaatccttatactgtttaaccttgggatatcgttggaaatcctaactatcggcataatttttgaagacttgaataactccataatattaagcgtgctggtgcttttgggctcactactgtttagcggactatttatcaatactaagaatattacaaacgtggccttcaagtacctgaaaaacttctctgtgttttactacgcctacgaatctttattgatcaatgaggtcaaaacattgatgctgaaagagagaaagtacggcttaaatattgaagttccaggcgctactatcttgagcacatttggatttgttgtccaaaaccttgtatttgacatcaagatcctggctctgtttaatgtggtgtttttaataatggggtatctagcccttaagtggatagttgtggaacaaaagtag

SEQ ID NO: 75727 - DNA, 1251 bp, Saccharomyces pastorianus
atgtctttatcttcaaagttgtctgtccaagatttggacttgaaggacaagcgtgtcttcatcagagttgacttcaacgtcccattggacggtaagaagatcacttctaaccaaagaattgttgctgctttgccaaccatcaagtacgttttggaacaccacccaagatacgttgtcttggcttctcacttgggtagaccaaacggtgaaagaaacgaaaaatactctttggctccagttgctaaggaattgcaatcattgttgggtaaggatgtcaccttcttgaacgactgtgtcggtccagaagttgaagccgctgtcaaggcttctgccccaggttccgttattttgttggaaaacttgcgttaccacatcgaagaagaaggttccagaaaggtcgatggtcaaaaggtcaaggcttccaaggaagatgttcaaaagttcagacacgaattgagctctttggctgatgtttacatcaacgatgccttcggtaccgctcacagagctcactcttctatggtcggtttcgacttgccacaacgtgctgccggtttcttgttggaaaaggaattgaagtacttcggtaaggctttggagaacccaaccagaccattcttggccatcttaggtggtgccaaggttgctgacaagattcaattgattgacaacttgttggacaaggtcgactctatcatcattggtggtggtatggctttcaccttcaagaaggttttggaaaacactgaaatcggtgactccatcttcgacaaggctggtgctgaaatcgttccaaagttgatggaaaaggccaaggccaagggtgtcgaagtcgtcttgccagtcgacttcatcattgctgatgctttctctgctgatgccaacaccaagactgtcactgacaaggaaggtattccagctggctggcaagggttggacaatggtccagaatctagaaagttgtttgctgctactgttgcaaaggctaagaccattgtctggaacggtccaccaggtgttttcgaattcgaaaagttcgctgctggtactaaggctttgttagacgaagttgtcaagagctctgctgctggtaacaccgtcatcattggtggtggtgacactgccactgtcgctaagaagtacggtgtcactgacaagatctcccatgtctctactggtggtggtgcttctttggaattattggaaggtaaggaattgccaggtgttgctttcttatccgaaaagaaataa

SEQ ID NO: 75728 - DNA, 648 bp, Saccharomyces pastorianus
atggggaaagagaaaagaaaaaaattgatctatcgatttcaattcaattcaatttatttcttttcggataagaaagcaacacctggcaattccttaccttccaataattccaaagaagcaccaccaccagtagagacatgggagatcttgtcagtgacaccgtacttcttagcgacagtggcagtgtcaccaccaccaatgatgacggtgttaccagcagcagagctcttgacaacttcgtctaacaaagccttagtaccagcagcgaacttttcgaattcgaaaacacctggtggaccgttccagacaatggtcttagcctttgcaacagtagcagcaaacaactttctagattctggaccattgtccaacccttgccagccagctggaataccttccttgtcagtgacagtcttggtgttggcatcagcagagaaagcatcagcaatgatgaagtcgactggcaagacgacttcgacacccttggccttggccttttccatcaactttggaacgatttcagcaccagccttgtcgaagatggagtcaccgatttcagtgttttccaaaaccttcttgaaggtgaaagccataccaccaccaatgatgatagagtcgaccttgtccaacaagttgtcaatcaattga

SEQ ID NO: 75729 - DNA, 954 bp, Saccharomyces pastorianus
atgaaaaccattattatttcagattttgatgaaacaatcacaagagttgacacaatctgcaccattgctaaattaccgtatctactgaacccgcggttgaaacctgagtggggtcattttaccaagacatatatggacggataccataaatacaaatacaatggaacgagatcactgccgttgttatcttcaggcgtacctacgataatttcgcagtctaacttcaataagttgtttgcggacgaattaaaatatcaaaatcataacagggttgttgagttaaatagtgtaaatgaaattacaaaacaacagatttttaagtcgatttctttggatcaaatgaaaacgttcgccagagatcagaatcacgaagattgtttactaagagatggtttcaaaacgttttgctcttcagttgtcaaaaattttgaaagtgatttttacgttttatctataaattggtcaaaagagtttattcatgaagtcattggtgacagaagacttaaaaatagtcatattttttgtaacgatctaaaaaaagttagtgacaagtgttctcaaagctacaatggtgaatttgattgtcggttattgacaggctctgataaggtcaagatactgggtgaaatattagataagatcgactcaggttgcaataaagaaggaaattcttgcagctattggtatataggggatagtgagactgacttgttgtccatattacatccatctactaatggtgtactgctaataaacccgcaagaaaatccttccaaattcataaaaattaccgaaaagattattggtatcccaaaggataaaatctcgagttttgaagctgataatggtccagcgtggttacagttttgtgaaaaggaaggcggtaaaggtgcctaccttgtgaaatcctgggactctttaaaagatttgatcatgcaggtaacaaaaatgtag

SEQ ID NO: 75730 - DNA, 666 bp, Saccharomyces pastorianus
atgcgatataataattatgacaactctggaagttccttcttaactagagtagttaaaaagtcagatatagagaaaacgttattattaaatagagaaattgatgactggaagtcaaacgataaaaagaaggcatataaggaacgcggaagagtttatgcaagttgctcatttattgaagtatccttttctcaaataagggctgttgatgtagaaaaaaaaattgagaatgccgaacaactaagagatcttacaaggaatattgttaagaacaaaaccagctctttgcacgaaattacaccctcaaagaatcgtgtaactagtgcatgcaattccgagagacgtacgactagccaagaagcaaacaatcttgaaggctaccatagttgtgcacaaggaactagtcggtctgccagtattacgaagaaatacagcaaaaagactactagtcgtcctaaaagagaaaagagacaaacaatcctcccaaatggtgagataaaggaatgctctaaatgtaaagacacttggacaattcaatggcgtagtggacccgaccaaaacagggaactttgtagtccctgtggactcgcctatggaaaaagactgaagaaggagaatgaaaaaaaaaggcaagcagcagataaaaggatagatcgaaacaatccatag

SEQ ID NO: 75731 - DNA, 648 bp, Saccharomyces pastorianus
atgagctgtaccaccgataagttaatacaaaagtacgacgcccttgttaggaaaaccacagaacataaattcgctaaggaactatgtgccggaacattgaaggaccgtagtttgtacatctatttatcacaagatctgcaattttttgaaactagcttaaggttgatatgtaagacgacttctttagcaccaactactcacgctttaataaccttagccaaaaagattggatttttttctaatgatgaaaactcatactttcatgactgcttagaattattggcaccatccctcaccaaggaagaaagagataattttgacaataaagcgatccccggcgttgatgcgtatattaatttcttagatgagctgagaaaggactcctcaattacatggccatccttagtaaccagcttatgggttgccgaggaactctattggagatgggctcgtgatactcctagagccccagggttgcattggaaatatcaaaaatggattgatttacatgatggtgagcattttcaaacttggtgtgaatttctaaaggctgaagttgacaagtttcccgtcgaagaagtggaaagcatatttgtgaaggtttcacagttcgagttcgaattttttgaatcttgttacaacgcctaa

SEQ ID NO: 75732 - DNA, 237 bp, Saccharomyces pastorianus
atgtcacagaacaacacaatcagctcaatgaatcctgaaagagcttacaacaatgtaacgctgaaaaatttaacagcatttcagttattatctcaaagagaaaacatatgcgagttattgaacttggtagaaagtacggaaagacacaatagtattatcaatcctgaaaggcaaaggatgagcttggaagaaatgaaaaaaatgctcgatgctttgaaaaatgaaaggaaaaagtag

SEQ ID NO: 75733 - DNA, 1479 bp, Saccharomyces pastorianus
atgtttcatgctttcaccttccttaaaggtggtagattttactcttcactaacagttaaatcattgtacgagcaggtacaccatactagccatgatcccatttcaattaatggatggatcaaatccataagactattaaaacgtatagcgtttttggatttacaagatgggacttctgtgaacccattaagaatagttattccactcacaaatactgatgaagtacagttcctaaaaattctgaaaactggtcaaactttatctatatctaatgctacctggcaaagcacccctaatagaaaacaaccttttgaattgcaaatcaaaaatcctgtcaagtcaattaaacttgtgggtcccgtttcagaaaactatccattacaaaagaaatatcaaaccttacgttatttaaggtccttacctacactaaaatacagaaccgcttacttaagtgcaattttacggttaagatcatttgtagaattccagttcatgctatatttccagaaaaaccacttcaccaaagtttcaccaccaatattaacttcaaacgattgtgaaggtgccggcgagttgtttcaagtctccaccaatacgtcgccaactgcatcctcgtactttgggaagccgacttatttgactgtgtccactcaattgcacttggaaattttagcgttatcactgtcaaggtgttggacgttatctccttgctttagagccgaaaagagtgatactccaagacacctttcggagttttggatgcttgaagtggaaatgtgctttgttaatagcgtcaacgagctaacatcgtttgttgagactacaataaaacacataattaaagcttgtatagataaccaacaagaactcttgccgaagcaatttatctcttcacaagaaaataatgcatcgtcagagctatcaataaatcaagagacacaacaaattaaaacacgatgggaagatttaataaatgaaaaatggcacaatataacgtataccaatgcaatagaaattctcaagaaacgccacaatgaagtttcacactttaagtatgaacctaaatggggacagcctttgcaaactgaacatgaaaaatttttagccggagagtattttaagtccccagttttcgttaccgactatccacgtctttgtaaaccattctacatgaaacaaaattccactcctgacgatactgttggatgctttgatctactggttcctggaatgggtgaaataattggtgggagtttaagggaagatgactatgacaagttatgtagagaaatgaaagcacgcgggatgaatagatctggagaattggactggtatgtttctctgagaaaagaaggaagtgcaccacacggaggctttggtctagggtttgagagatttatctcatacttatatggcaaccataatataaaggatgccatacccttttatagaacatctgcagaatccatcgatttttga

SEQ ID NO: 75734 - DNA, 123 bp, Saccharomyces pastorianus
atgactttaccaggtggtgttattttagttttcattttggtcggtttggcttgtattgccattattgctaccattatctacagaaaatggcaagctagacaaagaggattgcaaagattctaa

SEQ ID NO: 75735 - DNA, 411 bp, Saccharomyces pastorianus
atgtcgtcatttggacatcgagcatttttcagctgttgtcctttaccagaagaagaaactttgcattcaataaaattgcgcaaagaggcaacataccaacctcaatccgggtggccggttcgatggccgattcggtatccgcgcgcacttcccctagaatcccacgtgcacccataccatatgatcgttaaattaccgcacccacgcacccaaccgcggctgtttctatggctgtcgttgcattggacaggaattccttttttgggaaagccgggaataggtcgcaatcgggtaaaatcaaaacaattttcgcatttccaacagagtaaaatcaaaacaactatgagaaaaaaaacaacaaacagaaagcagaaagcagaaagatgtcaatatagacttgtcactgcgtaa

SEQ ID NO: 75736 - DNA, 630 bp, Saccharomyces pastorianus
atggaatacgccactatgtcttcttcgaactccacacataactttcagagaaagattgctcttataggagctagaaatgtcggcaaaaccacattaacggttcgcttcgtagaatcgcggttcgttgaatcctattatcccactattgaaaatgaatttaccaggataattccttataaaagtcatgactgtactctggaaattctagatactgcaggccaagatgaagtttctctattaaacattaaatcgttgacgggcgtacgaggcataatgctgtgctatagtataataaatcgtgctagctttgatcttattcccattctctgggacaagctggtagatcagctgggtaaggataacctcccggtaatacttgtgggtaccaaagctgatttgggaaggagtacaaaaggtgtaaaaaggtgtgtcacgaaagctgaaggagagaaactagcttcgacaattggcagtcaagataagaggaaccaggcagcatttatagaatgcagtgccgagttagattataatgttgaagaaacttttatgctccttttgaaacaaatggaacgtgtcgaaggaactctggggcttgatgccgaaaataataataaatgttctataatgtga

SEQ ID NO: 75737 - DNA, 2613 bp, Saccharomyces pastorianus
atgacggaacaaagaaccaaatatgcagatagcatattgactactaagagtccttacgaggctaccgaaactattagaatcaggttatcgcaggtcaaattgttgaataaagacttttacctgttatttaaggaattggcaaatctgaagaggaactatgctcagcaattgagaaaaataatagctgaaaatgaagatataacaaagatcttaaacgctcaaatgattgaaagtaatgttttgactccgcaggaaatgagtgcattcagattcaactcgctgggagagctaagaaatgtatgggatactgtaattgaagaactaaaatcagatttgaagtcaagtacagaatactacaacactttggaccagcaagtcgttcgtgaattgaaggaatccgtggagaacaatactagctggagagaaagcaaggacttacattccaagcttagtaaaaatgcagcttcaattgagcactatagtaagaataacgaaaactctagtcacttagaagaggcaagaaggcaatgggaccagcaaagcccctatttgtttgagctgttcgagactattgactataaccgtttggacactttaaaaaactgtatgcttagatttcaaaccagttttagcgattatttactaaatactaccaaagaatgcgaaacggtgatgacgaaattcctggcattcgaaccgcaaagtgaaattgatcgttttgccaaagatgccagtcaatacaacttccaactatcctcttcttccaaagaagtagttcctaataatgcttcgccagcttctgccactggtgcccgcccggtctctgtatccaatggtgccgctaatacggaaagagaaaagaaatccccgcaaaaggataagcgtaagagtgcatttggaaacattggacatcgtcttgcctctgcatcttccagtctcactcataatgatctcatgaataacgaatattcagactctactaataattcttccttgaaatcaaaaaagtcgtcccacaccctaagatctaaagtgggctcaattttcggtagaaataagaccaagaacaagagacaacaacaatcatcatcaaactctcatattcaggcatccatcactgagactccgaataattcttccaccagagtgtcttcaactgcaacttcttctatttatcagaagcaacgtcgacccacctattcatcatcaaaatcaaacaattggaccccgggtgaagctaatgacactcctcctcttcctccccatgctactcctaaaaacgtagatgcacctgttactgccgatacacctcctgcacaaacttttactccttctgaagtgcctccttcaacgccacaacaaagttctccacccactgcgaaagaaccagactcaagtaagttacccaagacagtaccgatatcaatttctcaacctccactccagccacaatcaaaaacaaaaccattaccagttgagcctgcctctcccagtatttcacttcctactgctacggttgataacgaaccttcaggtcaagttgattcaaggcccttgcatatccgcgcacctgctttaccaccctcaaggaaacaaaatttcattcataacagggattctcaactctatgactctttgcctaatcacggctcaggcgctacccctacttcttcttccttgtcctctattccccaggaacgtccagcttccacactctcctctcagattactggcgagctaagagaactaaatcctcaagccacgggctcttcaacatctttagttggtcaatcgttgtttcagcactcctctttagatacatctcaatttgggttgaatgctagtatcgcagaagtgctcaatgcttctttcaaagacggtatgttgcagaactcccaactgattggggaaattgccctcaactatttacccaattctgtcatgaattcgcctttacctatcggtattaatttgagaatcaataatggcgctaagttcgaaaaggtcattctgaaccaagcctttattgagcgtgttgctccagaagaattcaaagttaacccttcatttatcgattctagaaccttaggagctattaaatattccataaaggagccgatcgcgcctattgttattcatccggtctggagatttgaatctcaccaggcaagtgttgtattgactgtcaagatgtcaccaagcttacccgatgaaatatcacaaatcgtaatagaagacctcgttgtctttgtgaatatcgatggtgctaatgcaacaagcgctttatcaaaacctcagggctccttcagtaaagaaaagaagagaataacgtggagatttaaagaaccagttgttttgacaagaaatggtgaaggtcaaagattaatcgccagatttattacagacggcctggcacatgaatccgctaaaggcgtgattaccaaattcactatcagtgagacggataacgtggctctaccccatagcggagccggcagtggaatcaccttgacttgtcaggagctggatgaaaacaatccatttggtggtgagtggctcgatgtaaacacaaaaagaactttgaccactggtaactaccatggtctcgcttga

SEQ ID NO: 75738 - DNA, 1044 bp, Saccharomyces pastorianus
atgaattcactcgttactcaatatgctgctccgttgttcgagcgttatccccaacttcatgactatttaccaactttggagcgaccattttttaatatttcgttgtgggaacatttcgatgatgtcgtcactcgtgtaactaacggtagatttgttccaagcgaattccaattcattgcaggtgaattaccattaagcactttgccccctgtgctatacgccatcactgcctattacgttattatttttggtggcaggtttttgttaagtaagtcgaaaccatttaaattaaatggccttttccaattgcataatttggttttaacttcactttcattgacgcttttattgcttatggttgaacaattagtgccaattattgttcagcacgggttatacttcgctatctgtaatattggtgcttggactcaaccgctcgttacattatattacatgaattacattgtcaagtttattgaatttatagacacctttttcttggtgctaaaacataaaaaattgacatttttgcatacttatcaccatggcgctactgccttattatgttacacccaattgatgggcaccacatctatttcttgggtccctatttcattgaaccttggtgttcacgtggttatgtattggtactatttcttggctgccagaggcatcagggtctggtggaaggaatgggttaccagatttcaaattatccaatttgttttggatatcggtttcatatattttgctgtctaccaaaaagcagttcacttgtatttcccaattttgccacattgtggtgactgtgtgggttcaacaactgccacctttgcaggttgtgccattatttcttcatatttggtactatttatttcattttacattaacgtttataaacgtaaaggcaccaaaaccagtagagtggtaaagcgtgcccacggcggtgttgccgcaaaggttaatgagtatgttaacgttgacttgaaaaacgttcctactccatctccatcaccaaaacctcaacacagaagaaaaaggtaa

SEQ ID NO: 75739 - DNA, 333 bp, Saccharomyces pastorianus
atgctgaagtacgtggtgacggatattgggaagatgtgtttgtacatttggccttatagagtgtggtcgtggcggaggttgtttatctttcgagtactgaatgttgtcagtatagctatcctatttgaaaatccccatcgtcttgctcttgttcccaatgtttgtttatacactcatatggctatacccttatctacttgcctcttttgtttatctctatgtatttgtataaaatatgatattactcagactcaagcaaacattcaattcttagcatccttctttgttcttatcttaaccataaacgatcttgatgtgacttttgtaatttga

SEQ ID NO: 75740 - DNA, 4218 bp, Saccharomyces pastorianus
atgatgtccttttccaaaaacgccactcctagagccattgttagtgaatctagcactttgcatgagatgaagtttagaaattttagagttgcccatgaaaaaatctcgttggatatagatctagctactcactgcattaccggtagcgctactataataatcattccgttgatccaaaacctagaatatgtaacttttgattgcaaggaaatgactattaaagatgttctggtcgaaaatcgtcgatgtgatcaatttattcatgacgacccacttcaaacaaatttgaatggattgacttcacaaaatgtattatacagcgacaattccattgaacagtcacattttttgagatctaagtttgctagcttgaatgaatacccagaaacggactctaaatcccagttaactataaaaataccatcttccatcaaaatatctttggaggacgccaatgcattaagtaattacactccgattactccttcaattaagactacccctgggtttcaagaatctgttttcactccaattacattacaaattgaatatgaaatcagaaacccaaagtcgggtattaaattcgatactgtgtatgctgacaagccctggttatgcaacgtttacacttcaaatggtgagatttgtagttctgcatcatattgggtcccatgtgtcgatttgcttgatgaaaaatctacatgggagttagaattcagcgtaccgagattggttaaaaatataggtacttcgaaattaatcggacaaaatggagaagagagtgaaaaagagaaggaggatacgcctgagcacgatgaagaggaagaggggaagccggcaagagttatcaaagacgaagataaggattctaacttgaaaaatgacgaagaaggcaaaaatagtaaaagcaaagatgcacaagataatgatgaagaagaagaggaaggcgaaagtgacgaagaggaagaggaagaggaaaggcggaatattgaggaaagcaacaatccgaatttgagggatgtgattgtgtgttgttcagaatattcaaatattaaagaacttccgcacccgattgatttgacgaaaaaaaaatgcatatttcagataattaatcctgtggctccacatcacattggttgggctataggcgcctttaattcatggtctttacctttgatatcacctccaagtgttgatgccgaggacgaagtagaggaggacaagttgagagagaatgttgtggacaatgttaacgatactatggatgacgacattggttcggatattatacccattcaaattttcacacttccgacgcaggaaacagatgagttaacagttataaattcgacagttgtctgccaaaaaattatagatttctactcgaaagaatttgggtcttatcctttcacttgttactctatggtgtttttacctaccgcaccttctaagcatatggattttgcagcattaggcatttgtaataccagattattgtaccctctagaagttattgataaagcattcagtactacgaatgagttagcatgggcacttgctaaccaatggtcttgtgtgaatataactcctttagatatgaacgactactggtgctgtcttggtattgctggttatatggtgtttcaggtaaccaaaaaattaatgggtaataacacgtataaatatcaattaaagcgtaatagtgaggcgattgtggaacaagacttcgagaaaccgcctattgggagcacttttaccggcagttctaggccaatatcttggtcttctaaagatttgtcctttatacaattgaaggcaccgatgatactacacatacttgacagaaggatgactaaaacagaacgatctttcggtatgtctcgagtattacctaaaattttccttcaagctatgtctggtgatttacccaataattcgttgacttcatcgcattttcaacatgtttgcgaaagagttaataaaagtaaattagagaattttttcaacgaatgggtatatgggtctggggtacccatattacgtgtcacccaaagatttaataggaagaggatggttatagaactgggtataaggcaagttcaagatgaagaacttggcgacgaaaaagtggtaggggaggaaggatttttcaaaagtgcactagaccacttagaacatccagatttgaaccgaaccgaatgcttcacgggctcgatgactataaggatccatgaacacgatggtactccgtatgagcatattgtggaaatcaaagatacattcacaaaaatagatattcagtacaatacaaagtacagaagattaaggaaaagaggtggtggtgcaaatgatgaaaatggtgttgaaaacaataatgaggagaagcctattgttgtggatgtgaattgtctaggaaatgtatacatgtcgcccgaagagtgttcccgattcagtttgacggaatttaatcgtacgtctgagagtaatgaattgcttaagcaaaacgaagcatttgagtggatacgcatagactctgatctggaatggatttgccaaatgcacattaatcagccggattacatgttttcttctcagttgagacaagatggggacatagaggcccaactagaagccatacgatattatgaggacgtcgttgttaatggtggtgtgaaatcacttgtttattcaagtattttgtttagaacggcgatcgacgagcgttacttttttggcataagactcgcggcgtgcgaagcgcttagtaaatacgtatatgatccggattttactggcggtgttaagcatttaattcagatttttcagattttgttttgcctagaagactctaatattccaaagagtaataactttgagaatcctaagttgtatttcttacagtgtaatattcccaaatatttggctaaagtgaaaaatgaaaatggtaaatgtccaaaattggtgaagcaatttttactggatattcttgtttataatgagaatggtgaaaataaatacagtgatgatgcgtacgtccgcagcttgattgaaaatgttgttaaagttgctttaaatgagtataaagataaagcatatatggaaaaagttaagactcagttattgaggtacgaaaatttggtgaattggctttcatcatacgagtctttgattaagactactatcatgtatgctaagtacaaattgcataaagtgggtgcttatgactttacggaattgacaggaatgataatgcatacattaacattaggtataaataacggagatatttccagggaaagctttcagaatgagtttttaatggttttgaaaatcatgcttttagaaggtggtttaaaaaacaaggatgcccttgttttgtttactgaaatactttgcttccatgaggattcttacattagggataaaagtgttgatgtgctttctgaatgtgtaaatctagttgttatggatggtagtttggataccataagtgacgatattaagtcctccgtccaatctgtgcacaatgaagttaaaaatataaaaagtgaggatgatattgagttgtttttaagtggtcattacgtcgatgatatgaaaataaaaatagaaaagattggccgtcaaaatattagtgggttaatacaaatatgccgagatatgtttaaagggtatagccctttgaagatattactctgggatgttttgaatttacctgttcttagcttgtaccagaggaagcaaatacatgaccttgttagggtgatgtacaccctaatcaacagttttgtagttagattggaagcaccaagggagagaagacttgtggcgaagatgaatagtaatgaagaaggtaaacttgatattgttataaagcgtgaaagtatcctaaaagtacatattaaaaaggaagtaacctctactgtggaggcacccaagaaggcgaataagataaagataagtttgaaaggtgataaacctgttagaaaagtggaaaaacaaattgtgaagccgaaggtaactagcaaacaaaggaaagtcaaaagtcatgtgaaccgcatgggcagtttacctttacggtttgttaagatccaacaacaacctagagtaatggtgcatttgtcatccgtcccatatagccaattcgttcaaattacaaaagtcacatcaagatcgtttatggttaagataagaacaaagaaggatgctaagaattga

SEQ ID NO: 75741 - DNA, 384 bp, Saccharomyces pastorianus
atgatcccagctccacttgatgcttccttattgagagaacatgcattccaaggaactaatgatctaagcacagttttgagtccaagtacgtttaccgatgaaggtggatataaacctgtattgaaatacggactcggttatttcaattatggactggttatagacgatgaagtgtatgattattcagtgtgtgatatcataaggggtcacgtttacgatcatttttggtgttatttctgttgtttcatgattttgtttactatctggttaataagtttaaattggtgtcccagcagcaagaaaagcaagtttgattggagcaagaagaaggacgactttaagatggaaggaggtgatttagagtaccaacatgtaaagatctaa

SEQ ID NO: 75742 - DNA, 1074 bp, Saccharomyces pastorianus
atgaggttagctgtggttgtgaccctacttgttcactgtttcctagtgacatgctctccaggagataatttagatgagtttatagactgtacgtatgcgtgcgagtataacagaagatgtccgaattcccaaataaactacattgaccctgaaaccaacatgtttcatgatattgagtttttcgataccccgcctttgtactctaagttattgttctgggattgtatctcagattgtgattaccaatgtcagcacatcattacgcgctggagaattgacgaagaggaagaaatataccaattccatgggaaatggccatttttgagagtattggggactcaggaattcttctcgacgatattcagtataggtaactttattccacattataagggatttgtaaagttttctagaatcatacgcgaagagggagataggaggagaaaaaacagcagaagtatactgatttggaactacctttacgttactgtggcgggaatgttggcttggacagcaagctcggtctttcactgtcgtgatttgatcataacggagaagctagattactttttcgcaggtttaactgtcctaacagggtttcatgcaatatttgcaagaatgacttccatgttcctgtaccccaagatagcacaagctttcactgcgtcagttgcggcaatctttgccctgcacatcttgagactctatgttgactggtcgtacacatacaacatgagattcaacatttttttcggtgttttacagtatattttattgataatgttatcatgccaaaactaccatgctctgcaaaagcaaaagctaatgggcgaattcaagaaaaccgcgtactccagcttcaaggggcaaatcttcaaactgtgtgtcattccaattcttcttgtgattgtaaccacaatggccatgtcattggaactgtttgacttttttagttacgaatggcagattgatgcccatgcgctatggcatctgtgcacaatatggccctcgtgggtattgtacgactttttcctcgaggattatgcctatgggggtaatagacaattgtactaa

SEQ ID NO: 75743 - DNA, 1476 bp, Saccharomyces pastorianus
atgaagccacagtgcatactcatctctttgctggtcaacctcgcatacgcagaggagtatttggtgaggttcaaaaatcccacagcattccaacaattcacttcgaattccaacaggtcatggagacagttcatcgacaacaaaattgagaagaaattctccatcggatccttccgcggcgtgaccatgaacctgtccaagaacttagtgaacaagctgaagaaaagcccactggtggctgatattgtgcccaacttcaggttcgaagcttttgaaggcgacagtgtaaatagcgccgagtcgagttatacgtttaacgctaccgccaaatactcgtacgaagacgtcgaggaagagcaaaatataacgtatcaaccagacgcaccccgtcacttggcccggatttcccgccactaccaactcccattcgacgttggggacaaggaccgctacaaaagctggttcaattactactatgaacacgactatcaaggtcaagacgtcaacgcctatatcatggatacgggtatcttcgcggaccatccggaattcgaagacagagtcatccaggggattgacttgaccaaagaagggtttggcgaccagaatggccacggaacgcacgtggcgggactcgtaggttccaaaacgtatggagcggcaaagagggtcaatcttgtggaggtcaaagtcttgggcaaagacgggtctggcgaggccagtaacgttcttagtggtctggagttcatcgtggaacattgcacaaaggtcagtcgcccacagggtaaaaaatgcgtggccaatctaagtctagggagtttcaggagccccataatcaacatggcagtggagggggccattgaagaaggtattgtatttgttgccgcggcggggaacttcaatttagacgcctactgggcctcacctgcgtctgcagaaaacgttatcaccgtaggggcctttgatgaccacattgacacgattgccaagttcagcaattgggggccctgtgtaaacatctttgccccaggcgtggaaattgagtcgctatctcatctgaactacaacgacactttaattttgtcaggtacatctatgtcgacgcccattgtcaccggagttgcagcgatcctactctcgaagggaattgagcctgaaatgatagcacaggagattgagtatttgtccacgcgtaatgttttccatagaagaacgttgtttttcaagccttctacgccaaaccagattctttacaacggcgtcgataaactggacgatccatatgacgacgaaacgttccctcgattgaacatagaggcaattgctaaggaactggaggagtacaatgccactttacaaactcctatgtctgagaatcttcaatctggttcaaaactgtggggttggaataacgatgtcacactacctcttggtgagattcgattgaagaggcgtgattttatgaaaaatttgtag

SEQ ID NO: 75744 - DNA, 351 bp, Saccharomyces pastorianus
atggccccctccactgccatgttgattatggggctcctgaaactccctagacttagattggccacgcattttttaccctgtgggcgactgacctttgtgcaatgttccacgatgaactccagaccactaagaacgttactggcctcgccagacccgtctttgcccaagactttgacctccacaagattgaccctctttgccgctccatacgttttggaacctacgagtcccgccacgtgcgttccgtggccattctggtcgccaaacccttctttggtcaagtcaatcccctggatgactctgtcttcgaattccggatggtccgcgaagatacccgtatccatgatatag

SEQ ID NO: 75745 - DNA, 510 bp, Saccharomyces pastorianus
atgtggagcaggaacgtcagattgcttggatcatggacaaggtcctacatggtccccgccaccaagagaaaaaccatccccgtgtacccacctgtgcagcgcatagcttcgtcgcagattatgaaacaggtggccctctcagaaatagagtctctggatcccggggccgttaagaggaagctcatcagtaaaaagaacaaggaccgcttgaaggcaggcgacgtggtccggattgtgtacgactcgtccaagtgctcgtacgacacctttgttggctacatcctttccatagaccgcaaacaactggtgcaagacgcctcgttgctgttgcggaaccagatagccaagacggccgtcgagattagagtgccattgttttcgccgctggtcgagagaatcgacttgctaaccccccacgtctcgagcagacaaagaaacaaacactactacatcagaggtacaaggttggatgtcggcgacctggaggcaggtctaagaagaaagaaatag

SEQ ID NO: 75746 - DNA, 828 bp, Saccharomyces pastorianus
atgtcacgtcctgaggagttggcaccaccggagattttctacaatgatagcgaagcacacaagtacacgggttcgaccagagtgcagcatatccaggcgaagatgacgctgagggcgttggagcttttgaatctgcagccgtgcagtttcattctggatatcgggtgcgggtccggactgtctggggagattttgacacaggagggagaccatgtgtggtgtggtttggatatatcgcccagcatgcttgcgaccggtcttagtagagagctggagggcgacttgatgttgcaggatatgggcaccgggataccgttccgggcgggctcgtttgacgcggctattagtatcagtgcgatccaatggctgtgcaatgcggacacttcctacaacgatcctaaacagcggttgatgaggtttttcaacacattgtatgctgcactgaagaagggagggaaatttgtggcccagttctacccgaaaaacgacgaccaggtggacgacatactgcagtctgccaaggtggcagggttcagtggcgggcttgtggtggacgacccagagtctaaaaagaataagaagtactaccttgtgttgagcagtggggccccaccgcagggggaggagcaggtgaatttggacggtgtgaccatggacgaggagaacgtcaacttgaagaaacaactgcgccagcgcttgaagggaggcaaagacaaggagtctgccaagagtttcattctaagaaagaaggagctcatgaaaagacgtgggaggaaagttgcgaaggactccaagttcaccgggaggaaaagaagacacaggttctag

SEQ ID NO: 75747 - DNA, 207 bp, Saccharomyces pastorianus
atgctgggcgatatatccaaaccacaccacacatggtctccctcctgtgtcaaaatctccccagacagtccggacccgcacccgatatccagaatgaaactgcacggctgcagattcaaaagctccaacgccctcagcgtcatcttcgcctggatatgctgcactctggtcgaacccgtgtacttgtgtgcttcgctatcattgtag

SEQ ID NO: 75748 - DNA, 429 bp, Saccharomyces pastorianus
atggcgctgtccaggagcgtggggcgaggatcaaaactcacgtccccaaaaaaagacacatacttgctagcatcctttcggtggaacctcgaccgagacttgctcttcaggtgtgaaaggtacttttgcatgtgggcgtccacagggtactcctcctcctgctcctgcttccctgccacacgttccgcctcactcgactccactggctccaccagcgacgtggtagacgaccgtggagaaacctccatggactcctgtggcaggatcacgttatcgtacgtgaccgaatgccgtttgttgggctctgcggaattgagtctgcggatcttaagaaactcttcgtcttgcaacaaatccttagtctccgtcattcttgcaatctgttttggcgctcttgctgcaagccgtgctgaacaaccacctgcgtga

SEQ ID NO: 75749 - DNA, 1815 bp, Saccharomyces pastorianus
atgacggagactaaggatttgttgcaagacgaagagtttcttaagatccgcagactcaattccgcagagcccaacaaacggcattcggtcacgtacgataacgtgatcctgccacaggagtccatggaggtttctccacggtcgtctaccacgtcgctggtggagccagtggagtcgagtgaggcggaacgtgtggcagggaagcaggagcaggaggaggagtaccctgtggacgcccacatgcaaaagtacctttcacacctgaagagcaagtctcggtcgaggttccaccgaaaggatgctagcaagtatgtgtctttttttggggacgtgagttttgatcctcgccccacgctcctggacagcgccatcaatgtgcccttccagacgactttcaaaggtccggtgctggagaaacagctcaaaaatttacagttgacaaagaccaagaccaaggccacggtgaagactacggtgaagactacggagaaaacggacaaggcagatgcccccccaggagaaaaaccggagtcgaacttttcagggatctacgtgttcgcatggatgttcttgggctggattgccatcaggtgctgcacagattactatgcgtcgtacggcagtgcatggaataagctggaaatcgtgcagtacatgacaacggacttgttcacgatcgcaatgttggacttggcaatgttcctgtgcactttcttcgtggttttcgtgcactggctggtgaaaaagcggatcatcaactggaagtggactgggttcgttgcagtgagcatcttcgagttggctttcatccccgtgacgttccccatttacgtctactactttgatttcaactgggtcacgagaatcttcctgttcctgcactccgtggtgtttgttatgaagagccactcgtttgccttttacaacgggtatctttgggacataaagcaggaactcgagtactcttccaaacagttgcaaaaatacaaggaatctttgtccccagagacccgcgagattctgcaaaaaagttgcgacttttgccttttcgaattgaactaccagaccaaggataacgacttccccaacaacatcagttgcagcaatttcttcatgttctgtttgttccccgtcctcgtgtaccagatcaactacccaagaacgtcgcgcatcagatggaggtatgtgttggagaaggtgtgcgccatcattggcaccatcttcctcatgatggtcacggcacagttcttcatgcacccggtggccatgcgctgtatccagttccacaacacgcccaccttcggcggctggatccccgccacgcaagagtggttccacctgctcttcgacatgattccgggcttcactgttctgtacatgctcacgttttacatgatatgggacgctttattgaattgcgtggcggagttgaccaggtttgcggacagatatttctacggcgactggtggaattgcgtttcgtttgaagagtttagcagaatctggaacgtccccgttcacaaatttttactaagacacgtgtaccacagctccatgggcgcattgcatttgagcaagagccaagctacattattcacttttttcttgagtgccgtgttccacgaaatggccatgttcgccattttcagaagggttagaggatatctgttcatgttccaactgtcgcagtttgtgtggactgctttgagcaacaccaagtttctacgggcaagaccgcagttgtccaacgttgtcttttcgtttggtgtctgttcagggcccagtgtcattatgacgttgtacctgaccttatga

SEQ ID NO: 75750 - DNA, 309 bp, Saccharomyces pastorianus
atggcggcagttcataaggtcaggtacaacgtcataatgacactgggccctgaacagacaccaaacgaaaagacaacgttggacaactgcggtcttgcccgtagaaacttggtgttgctcaaagcagtccacacaaactgcgacagttggaacatgaacagatatcctctaacccttctgaaaatggcgaacatggccatttcgtggaacacggcactcaagaaaaaagtgaataatgtagcttggctcttgctcaaatgcaatgcgcccatggagctgtggtacacgtgtcttagtaaaaatttgtga

SEQ ID NO: 75751 - DNA, 669 bp, Saccharomyces pastorianus
atgaacgctaatatatgggtggctgcttcagatggtaatttggaccgagtggaacatatcctccgcgagagtaacggcgccatgaccccgcaatccaaggacattaacggctacactccaatgcatgctgccgccgcatacggccacctggatttgctgaagaaaatgtgcaatgagtacaatggagacattaatgtgttggacaacgacggcgataccccgttgcaccatgtggaggatgtggccactgccaggttgatcgtggaagagctgggtggagacttcactatcaggaatgcggagggccaaacgccatacgactcgttcgtcgagaacggtgaagatggtgagctaatcgagtacatgaggattaagtccggcgtggccgaagttcacggagtggacggcgtgcagggtgagggtgtcatcgacagcaaattgctggaagagttcaaggacaacgtgagatacaccttggaaaatgaccctgaggaaggagccgacgaggccactctgcaacgcaggaggcagttggaacagatcattacgggagacaacgctgaggaggagttggaaaggtacatccgtgccatggtcagagagcagatgctgggccagggctccatggcgggttccggggacgaaccagattccaagagaagaaaataa

SEQ ID NO: 75752 - DNA, 1452 bp, Saccharomyces pastorianus
atggtaacacaaaccaatccggtccctgttacatacccaacggatgcttatatccccacgtatctgcccgatgataaggtctccaatctggcagatttgaaaaaattgatagaaatggattccagactagatttgtatctgacaagaaggaggctggatacgtccatcaatttacctacaaacaccaagaccaaggaccatccccccaataaagagatgctgaggatttacgtctacaacactacggaaagcagccctcgcagcgattctggcaccccagcggactcaggcaagactacatggacactgagaatagaaggtaagcttctgcacgagtctgcagacgggaaacacccatttagtgagtttttggaaggtgtcgcggtcgactttaaaagactgaaaccgctgggcatgggcaagaagaggaaacgcgattcgtcattgagccttcctttgaatctgcaacaacccgaatacaatgatcaagatatcaccatgggcgataacgataacggcgaggatgaggacagtgcagaggcagaatccagggaggaaattgtagacgcactggaatggaactacgatgaaaacaacgttgtggagtttgatggtatcgacatcaagaggcaaggcaaggataatttgcgatgcagtataaccatccagttgaggggtgtcgacggtggaaaagtacagtactcgcccaacttagctaccttgataggtatgcaaacgggctccgttaatgacgcggtttattcgatctacaagtacattttgatcaacaatctgtttgttacggaacaaacagaggctcaagatggttccaacgatgccgaagacagcagtaatgagaataacaataaaaacggtgctggtgacgatgatggcgtcgagggaagtactccaaaggataagcccgaattgggtgaagtgaaactagattcactcttacaaaaggtattggatacaaacgctgcgcacctccccttgatgaatgttgtgcaaaccgtgaacaaactggtatcacccctaccgcccatcaccctagattatacaattgatctttccaaagataccccctatggtgctaccaccttggatgtagatgtgtcgcacattctccaccagcctcaaccccagccaaatttacaaaaagaggaagaaacagatgctgaagacacagcaaaactacgtgaaatcacaaagcttgccttgcagttgaactctagtgctcaaaaataccagtttttccacgaattgtctttgcatccaagagaaacgctgactcactacttatggtcttccaagcaaaacgagcttgtgctgcagggcgaccaatacttcaatgaagatgctgcaagaacgagtgacatatacagtaacaacaacaatgacaggtctctaatgggcaatatctcactactctactcccaaggaagactataa

SEQ ID NO: 75753 - DNA, 1545 bp, Saccharomyces pastorianus
atgcctaacgcttcccaagtttacagatctaccagatccagctctccaaagaccatctcttttgaagaggctatcattcaaggtctggccactgacggtggtcttttcattccatcaactattccacaagtggaccaagccactcttttcaatgattggtcaaagctctccttccaagacttagcctttgctatcatgagattatacattgcccaagaagagattccagatgctgatctaaaggacttgatcaagagatcttattctactttccgttctgatgaagtcacccccttggtgcaaaacgtcactggtgacaaggagaatttgcacattttagaattattccacggtcctacctacgctttcaaagacgttgctttacaatttgttggtaatctttttgaatacttcttacaaagaaccaacgccaatttacctgaaggcgagaaaaagcaaatcactgtggtcggtgctacttccggtgacactggttctgcagccatctacggtttaagaggcaaaaaggacgtttccgttttcatcttatatccaaccggtagaatttctccaattcaagaagaacaaatgaccaccgttccagatgaaaacgtccagactttgtctgttaccggtactttcgacaactgtcaagatatcgtcaaagctattttcggtgacaaagaattcaactctaaacacaacgtcggtgctgttaactccatcaactgggcaagaatcttggctcaaatgacctactacttttattccttcttccaagccaccaacggtaaggactccaagaaggtcaagttcgttgtgccaagtgggaacttcggtgatatattggccggttattttgccaagaaaatgggtttgcctattgaaaaactggccatcgctaccaatgaaaacgacattttggacagatttttgaaatctggtctatacgaaagatcagacaaggttgctgctactttatccccagcaatggatatcttaatctcttctaactttgaaagactactatggtacctagctcgtgaatacctagctaatggtgatgatttgaaagccggtgaaatcgtcaacaattggttccaggaattgaagaccaacggtaagttccaagttgacaaatccatcattgaaggcgcatcaaaggactttacatcagaaagagtttccaatgaagaaacatctgaaacaatcaagaagatctacgaatcatctgtaaatccaaaacattacatcttagatcctcacacagctgtcggtgtttgcgccacagaaagattgattgcaaaagataatgacaagtccatccaatacatttctctatctaccgctcacccagctaaatttgccgatgctgtaaacaatgcattgtctggattttccaattattcatttgaaaaggatgttttgcctgaggaattgaagaaactatccacattaaagaagaaattaaaattcatcgaaagagctgacgttgaattggtcaaaaacgctattgaagaagaacttgctaaaatgaaattataa

SEQ ID NO: 75754 - DNA, 1692 bp, Saccharomyces pastorianus
atgcctatgaacaattttctagatgaattcaatttatttgattcaatcattaccatgatgaagaacgacccatgttgcgtcgaggattatgagccaatcgtcgaaaacctgaaccgtatatttcaaaggacgtttaatgatgaagaacataggaaatcaatggctaactcccagcttttttgggaacgattaagagacaccttggaagcaatgctgttgccagcgtcgttaaatgagaatagctcaataccgtatacaagaacagtgaggggccttatcttaatgatgagaaaccttgccgctgaaaaccaggaaataccccaaaagcttttactacaaaacctcgtaattcgtggttttctgcatgcaactagtgagtatgtcgttgacactccgctaatcaaacatctatacatcgcatgtttaacgtgccttttcaatatacagcagaactactctacagtggatatgactacttttccagctcttttacaatttcttcaatacccttatgggatcaaattggaagacggtgaagaagaagagcatttctggctaccatatttatttcttttcaagacgtatctcaacaatgatgaattttccaacgaatttttcagggataatgatacaccccagaaagactattattgtgttagggatagaatatttttcgatatagtgacagccaaattcatccaggatcaagagaattcctttttaattgagaagggcagaaactatctggatgattcaaaattggaaataacttctattgacctatctgtcttagaatgtattagcaaaagtcttataactgcttcttttggtaaatacctcaatgggttagaagaaagacagccaggaaaattcaccactttgttgcagatattgcaattggttgtaacgagtaaagaagattggaatacctatgagttgactgcaattatgtcatggtgctaccccattctgcaacgtcttgcatgcaaggatattcctgcctttttcaataaaagttgtaacgattatgctccttcagttgccatccaattacactccactttactttcttgcctggacataatttctgacttgtgcaaattcaatcatgttagaaaattcttaatttcgtatgactctgtgaaaatattggtatctctcttggatactttccaaaagaatttgttgaggattaattttttgaaaggaaacggtgatacggtgaatgaaattaaaatcacagatcatgaaggtaacaaaatcgaggaccggttattaattttcaaccgtgttaataccaacgaatcctttattagggctgataattttccccattgtaaattagtaataatcgaaatattggcatcgttagtgtatgcacatcctgaaatccaagatcaaataagagaattaggtggtcttgcattaattctttccaattgtgtcatcgatgataatgatccgtttatcaaggaaagatctattgtttgcttgaagtttttgttaaagaataatgccaagaatcaggaatatgtcaaaaaaatggaagctcaagacgttgttcaagacgatgcattgagcaaagctgggtttgaaatatcagttgaaaagggcgggaaagttagattagtatctaaagaagaagaccctgggaacgagaattctgagattattagcatagatgaagattaa

SEQ ID NO: 75755 - DNA, 2772 bp, Saccharomyces pastorianus
atgaaatccgatttcaagttctctaaccttttaggtacggtctacaggcaaggtaacatcaccttttccgatgatggcaagcaactactctcaccggtggggaatagggtcagcgtgtttgacttaatcaacaacaaatcgttcacgtttgaatacgagcatcgcaaaaatattgctgccattgatctgaacaaacaaggcacattgctgatttctattgacgaggacggtcgcgccatccttgtcaatttcaaagcccgtaacgtgcttcaccatttcaacttcaaagaaaaatgctccgctgtgaagttcagccctgatgggagactctttgcattagcctcaggcaggtttttacagatttggaagactccagatgttaataaagacagacagtttgctcccttcgtccgccatagggtgcatgcgggacactttcaagacataacgtctttgacgtggtcacaagattccagatttatccttacgacttccaaagacttaagcgcaaaaatatggtccgtagattcagaggaaaagaaccttgcggcgacaacatttaatgggcacagagactacgttatgggtgcgttcttcagtcatgatcaggaaaaaatctacactgtaagcaaagacggtgctgtctttgtctgggaatttaccaagaggccatccgatgacgacgaaaatgaaagtgaagacgaagacaagcaagaagaagtagatatttcgaaatacagctggagaatcacaaagaaacattttttttacgcaaaccaagccaaagtaaagtgtgtcaccttccatccagcaacaaggcttttagctgtcggatttactagtggggaattccgtctttacgatttgcctgatttcactttgattcaacagctttctatggggcaaaacccagtcaacaccgttagcgtcaaccaaaccggcgaatggctggcgtttggttccagcaaactgggccaattactagtttacgaatggcaatcggaatcgtatatcttgaagcagcagggccatttcgattccacaaatagtcttgcatactctccggatggttcacgtgtagtgacagcatccgaagatgggaaaatcaaagtttgggacattacatcagggttttgtttggccacttttgaagaacacacctcttcagttactgctgtacagtttgcgaaaaggggtcaggtcatgttctcatcatcgttagatggtacggtgagagcgtgggacttaatcaggtatcgtaattttagaacattcactggtactgaaagaatccaattcaattgtttagcggtggatccatcaggtgaagtggtttgtgccgggtccctggacaattttgacattcatgtttggtccgtgcaaactggtcaattattagatgctttgtccggacatgaaggccctgtttcgtgtctttcatttagtcaagagaacagtgtcttagcttctgcatcatgggataaaacaattagaatctggtccatatttggtagaagccaacaagtagaacctatagaagtttattccgatgttttagccttatcaatgagaccagatggtaaagaagttgcagtatctaccttaaagggtcaaatatccattttcaacatagaagatgccaagcaggtgggcaacattgactgtagaaaggatataatatctggtaggtttaatcaagataggttcactgccaaaaattctgaacgatccaaattttttactacaatacattacagttttgatggtatggctattgtggctggtggtaataataactccatttgtctatatgatgttccaaatgaagtcttgttaaaaagattcattgtgtccagaaacatggctttgaatggtactctcgaatttttaaacagtaagaaaatgactgaagcaggttcattagatttgattgacgatgcaggcgaaaattcagatttggaggatcgtattgataattctttaccagggtctcaaagaggtggcgacctgtccacaagaaaaatgagaccagaggttagagttacttcggtgcaattctccccaacggcgaatgcatttgccgctgcttcaacggaaggtttattgatatattccaccaatgacacgatattatttgatccctttgatctggatgtggacgtcaccccccattctactgtagaggcgctacgagaaaagcagtttttaaatgcattagtaatggcgttcaggttaaatgaagaatatttgatcaataaagtctatgaagccatacctattaaggaaatccccttggttgcaagtaatattcctgcaatatatttaccgaggattctgaagttcatcggtgattttgccattgaatcccaacacattgagtttaacctaatttggatcaaagctctattatctgcgagcggtggttacataaatgaacacaaatatctcttctcgacggctatgaggtcgatacaaagatttattgttagagtggctaaggaagtagtcaataccactactgataacaaatacacctatagatttttggtatcaactgatgggtccatggaagatggcgcggctgatgatgacgaggttctattaaaagatgacgcagatgaagataacgaagagaacgaagagaacgatgtagtcatggaatctgacgacgaggaaggatggattggtttcaatgggaaggataacaaattacccttgtctaatgaaaatgattccagtgatgaagaagaaaatgagaaagagcttccttga

SEQ ID NO: 75756 - DNA, 777 bp, Saccharomyces pastorianus
atggatgacgatcacgaacagttggtcgaagaactggaggccgtcgaggccatctatccggatcttctctccaagaagcaggaagacggaagcatcatcgttgtgaaagtgccgcagcatgaatacatgacactgcagatctccttcccgacacactacccctccgaggaggctcctaatgtcatcgaagttagtgtctgcacttctttggctaagcgcgacctctacgataccaagtaccttcagcatttgttccaggaagtgatggactctgttttccaccgcggatctgtctgtctatttgacttcctcacagaactcgacggtgtcttgtacgttgaaccagaggaggagacagaaccggtccagcagagtgacattcccacagaccccttcgagggctggaccgcgtcggaccccattactgatagaggctcgactttcatggcctttgcagcacatgttacctccgaggaacaagcgtttgtcatgctagacctactgaagaccgactccaagatgcgtaaggcaaaccatgtcatgagtgcatggcgaatcaagcaggatggctctgcggcaacatatcaagattccgatgatgacggtgaaacggccgccggctccagaatgctgcacctcatcaccatcatggatgtgtggaacgtcatcgttgtggtggcccgttggttcggcggtgcccacataggtcccgaccggtttaaacacatcaattctacggcaagagaagctgttgtcagggccggcttcgactcgtaa

SEQ ID NO: 75757 - DNA, 336 bp, Saccharomyces pastorianus
atgagccaatttgaaaagcagaaggaacagggcaattctttgttcaaacagggcctgtatcgcgaggctgtgcactgttatgaccaactaattactgctcaaccgcagaacccggtcgggtacagcaacaaagccatggcgctgatcaaactgggtgaatatacacaggctattcaaatgtgccagcaaggactgcggtacacctcaacggcagagcatgtagctatcagatccaaattgcaatatcgtctagagctggcacagggagcggtaggttcagtacagatccctgttgtagaggttgatgaactaccggagggatacgaccggtcctga

SEQ ID NO: 75758 - DNA, 1896 bp, Saccharomyces pastorianus
atggtgcgttttgtttcaattttaagtttattcggctgcgcggcgacgcttgtcacggcccatgatgacatggacatggacatggatatggacatggatatggacatgaatatcgatacgacaacgtctcaatccatagatgtctcatccacggcttcaatcgtccccgtgccacatgaaccaaaacatttgcatggccttcctatactgcaatcgccctcgcttacccctgcggagagattgtactgggaaaactacaacaccacaacctactttactacacaggctgggaataggtctgcccttcgctaccacattattacgctgctcttggttgcatttgtgctctaccctgtgtccctggcgctaagcgccgcccgttctaggtggtacttacccctgctgtttgttaatctatgcatttgtatttcgtccgtaatggcattgtccgtgttcaaaaatactttcccggaagaagactggtatgcgcataatatctatggcaccacttctgtgctacttctcgtttttatgcttgttcacttcttcgctgcggtgctttctgtccccgtctcattagcatcgaaaaaggagtaccgtccggttgacaccatccctctgaatgatcttgaatctacgcccgtcatggtgaataatgcacgtggctctccaagtccttcttccaacagagacacgttgttctcgctctcttcagacaccacgaccgccacggccaccaataataataaacggagacgcgctgaaggcgaagacgagggtgataacacctccaaccacgacactttgcgcgacgaagactacgataatgatgacgacgaaattgcttccattgaagcgccacctctgcttcctcaagacatacccgttttccgaatcttgtttaccaacacgaagtaccagatgcttgccgcgcacctctcgtgcgtcgccaacgtggtctttcacatgcttacctacccgctattcatgtacatctttgtagacctaatcatcggcttcgctgtaggtaacttgctcggcaagggcatccgcatctttaatctcttggcccactggattaagggcggcgtattttttactctgggcgttgtctctttagcaagatactgcggtttcgcagctaagtacggctgggcatggaacaacatcagcttcacctctcaactcacacaaacgcgttcctccaatcttcttttccggtttgctcctgcggggactttcaccatggaattcgttgaatccttcctcattttcttttacgggtccaccaacatcttcttggagcacctggcaggaaacggcggcgcatggactgccaaggatttacagcatgtgtcgatcgcgtttatgttcataggaaccggattgtgcgggctactcacggagtacaagctcaaccattggcgattcgagcatgcccgcaaacggccacagaccgatgtagttgctgccacaccggggtactctccaaacccgttccccgctttcaccatattttggactgggactctgatgtcccagcacgcacagtcctcgcaattttctactaccattcacacgcaatggggatacttgttgtcctatgggtccttcttccgtctgctaacatttttgattctgtttttggtgcccaacaccaacagtgccgcatccaagcctttcacggagttgatcacctcgttctgtctcctctgtggtggtctggtatttatggagtccacggatcagtccattgaagccatggaatatagggggtttacccccatgttcactttcaacctcagtgttggattcgtttctttgttgatggcttgggaaatgattttatttatttggaaagactggctcatcaaaaccaggaaaaccagtctttaa

SEQ ID NO: 75759 - DNA, 411 bp, Saccharomyces pastorianus
atgtatctagagcgctggtggtggagttgcattatctcccagagctgctcattgaactttgctgcgagcttagacgacttgtccttttgggcatctctgagttggatttcgaaatctgtgagggttggcttgattttttcgaacccgtcaggtgcaggcttggatcttctggtctttatgcgcggcatgtcgttttgtgaggtgagctttgctagtcttgacggctgtagaggtgtttacattgatgatgagtccctaagaaaatttttctttttttttcagtatttcactttccgttgtgaacgacaaatgtactatgcgttcaagagccaacgcagtatcatcgtcaaagttcctaccacaacgcgtgtaattaatcttgtactggttgtaaatgtgctaagtctgtga

SEQ ID NO: 75760 - DNA, 474 bp, Saccharomyces pastorianus
atgccgcgcataaagaccagaagatccaagcctgcacctgacgggttcgaaaaaatcaagccaaccctcacagatttcgaaatccaactcagagatgcccaaaaggacaagtcgtctaagctcgcagcaaagttcaatgagcagctctgggagataatgcaactccaccaccagcgctctagatacatatatactctgtactacaagagaaaggccatctccaaagacctttacgattggttgataaaggaaaagtatgctgataaattgctaattgccaaatggcgcaaaaccgggtatgaaaaactgtgctgtctgcgctgcattcaaaagaacgaaactaacaacggtagcacttgcatctgcagggtgcctcgtgcacagttagaggaagaagcacgcaaaaagggcacacaggtgtccttccatcagtgcgtccactgcggctgccgtggatgtgcaagcacagactaa

SEQ ID NO: 75761 - DNA, 1695 bp, Saccharomyces pastorianus
atgatgaatgaagacatatccatcattgatggccataatagttttttaacggaaaaaagcaccgtgctattaacccaagccaagagaacactagaagacgaaaaggaaatgattactcccccgagctcaactgtgagaaaaacaatgaaggaagtaaataagaggccgtcgcatcccctctcaccggatcactcgtccccaattgctccatctaaggccaagcgccaaagatcggacacatgcgctcggtccaatggtaacctaaccttggaagaaattcttcaatctttggaaagaagaagaataaatggtgaactcgccaagaaacctccatattcgtatgcaactttgatttgcttggccattttgcaatctcaggagggaaagctaacgctatcccagatatatcattggatccacgttcacttcccttattacaagcagaaagatgctagttggcaaaattcaataagacataacttgtctttaaatgatgcgttcatcaagactgaaaagtcctgcgatggtaagggtcatttctgggaggtcagaccgggtgccgaaacaaaatttttcaaaggtgaaaatcgtggttatgaatttgtaaaggactccttacaagacattgggaagtattttgaaatagattctacacttgatgaattagaacaagttgagagtggagaaggcaatgatgatcttcctgacgaggaagaaagagaggaagcagggaaattcccttccattgaaattcaattgaactcctcccctatactgagagtttcccagttacatcacataccgcaattgaaaacagacaacagtgtactgaaccctcacgaaaacctagaatcgatgcggaacatgatagaaaacgatgtcaacaatatagattccttggaacctccttatgtcatgaagaaatatcatacttctttaggcttaccgtcgctggtggatgccaaagatcatttccaggcgggtgtgaaaaacaataatatcacccaggcaaatagatttaatacactccctataactagcgcaaagtctcctcagaatttcagaaaatatttcacctcattcaattcaaattttgaagatttatctccacttcgaagtaatgtaggggctggttctctactcgacccacttccgtattccccattgaagctgtacgatcagaaaaatcttgcgctcatgtcgaaaccacaatctcagcaatcatattccaattctcaacttccacctccaccttcctctcatggttcggacttacttaaaacacccaagatgaggcattccgatggcttagagaaaacgccatcgcggttgataagcacacctaaggacggtaactcgattttgaggaaatggcagactccttcacacctttttgaagatttgtactgttctccgctatttagagctatagagactccaatcaggtatatcacgacgccggggggcactttggaaacccaaatttcaccaagaaagtcctctgcacccgatgtcctcacaagcgcaacgaattccaaatttgcttcaagcgggctgtttggcgtggatgtttattctgtttggaagcgcgcaactgaaaagatttctgatggtaacaatactacggatagcaatcaaaaacatcatccttatcataatcacccttccaacgatagcggtaatgaaaagaattga

SEQ ID NO: 75762 - DNA, 1464 bp, Saccharomyces pastorianus
atggaccaccaaataaccactgcaagcgacttcacgactacttcaataccgagcctgtaccaattggatacacttttgagatgtcacatttgtaaagattttctaaaagtccccgtcttaacaccttgtggccatacattttgttccctttgtattagaacacatttgaataaccaaccaaattgtcctctctgccttttcgagttcagagagtccttgctgagaagtgagttcctggtcagtgaaataattcaaagttatacatccctacgatcttccttactagatgcactaaggataccgaagcctacccctgtccctgagaatgaggaagtaccaggtcctgaaaattcttcattgatagaactcatatcagagtctgaaagtgacagtgtaaatgccgctgatgatgacttgcaaattgttgcaacaagtgaaagaaaacttgccaaaagatccatgactgatatattaccactgagttccaaaccatccaaaaggaattttgcaatgttcagaagtgaacgtatcaagaaaaaatcaaagccaaatgaacaaatggcccagtgccccatatgtcaacaattttatcctcttaaagcccttgaaaaaacacatttggatgaatgcctaactttacaatcactaggcaaaaaaccaaaaatttctaccactttccctacagagtcaaatccacataacaaaagttcatccagattcaaggtacgaactccagaagtcgacaaaagctcatgtggtgagacctcacatgtggataagtatttaaactcaatgatgagtgcagaacaccaaagattgccgaagatcaattttacgtctatgactcaatcccaaataaaacaaaaactgtcatcgttgggactgtcaactaatggtactaggcaaaacatgattaaaagatacaatcactacgaaatgctttggaattctaatttttgtgattctctagaacctgttgatgaagctgaactaaaaagacagttgttaagctgggatgtttcacacaataaaaccccccaaaatagtagcaacaagggtggaatttctaaattaatgataatgaagagtaatgggaaatcttcttcatataggaaattacttgaaaatttcaaaaacgataaatttaataggaaaggatggatggttatgtttcggaaggattttgctaggcttatcagggaagcaaaaatgaaaataaaaacaggttcatcggacagttcaggttcagtgggacattctaatgatggagatggtgttgaaaaagttcaaagtgaccagggaaccgaggatcagcaaatggagaaggatcaggacactgttatcaacgaagatagagttgctggtgaaagaaatttgcctaacgaagattcaactgatgctgactcatcaagagaattaatggacttgaatgaatatagtaaagacccacccggtaacaattaa

SEQ ID NO: 75763 - DNA, 3165 bp, Saccharomyces pastorianus
atgagtggcaactctgcaaactatgacgtcggatatccgatatatggtgctaaatttataaatgaaggcactctactggtggctggtggtggaggccagttcaattcctcgtttccaaacaaaattacagctttaaaggtgaacttccagaaaaagaaacacattagaaggtttcgtgagatcacattagattcgattgacgatgcgcccacttcattggattgtaataataacctgattctagttggttgcaatgaactgtttaatgattcctccatggagaacgttaaccaccacttgaggaagtttgtgtttgaacaagaacatctaaaattcgtggccagtattgatttcaacagaactacagacccatccgttttcactaagtttgtttacattaatcaaagggccacagtagctgcaattgcgtcctctgaagtgcccactgtgataagaatcattgacccgcgtaatttgacggaaaattacgaaattgaaacgggtagggaagttaatgatttgcacttcgcccctaacggtattcttttgtcatatatcacttctaattctttggaagtagcgtctgttagggacggaaattttgtagcaaggaaaacggattttgataaaaatcttgttctttctaatatcagatttctcaatgacaatacgctattggtggctgcatcattatcgaactctgatggagtttccttgttaaaactaggtgtgagttccaaaggtgttaaaattttaaaaactgcatccttcatgttcgatttgaatggaataacatcgatggatgtctccccaaataagaagttcgttgcattatcatctaacgataactcggttgccatcgtcagcgttgaaaagctaaagcttgttcagttggttccaagagtacatgaatctactataacaaaagttactttttctccagattctagatatttggcaagcacttctatggggaacacgatcaacgttctgaagctttccggtacatcgtcatcaattttacgaaatatttggaaatttttcttgaattttgttttgttagtggttttggctggcgctattcaactaggctacaaacataatgtgcacggctttatttacaaacatgctcatgatatatataagtcgaaattcaaggaaaacattaccatagaccaaggatcttcttcttatttcactattaatgacgattacagaggcattactgaaagtgcagatatcatcagcgctacagatgttgctagcgatatagagactgaattttcctcatttgacactagcactatgagaaccaccacagaagatgagcaaaaatttgtttggatatcgtcatcagctgattcacaattcacttctgcagatatcccaacatcagcttcttcttcttcttcttcttcttcttctttctatgaagagagtgtcactaatgaaccaattgtgtcttcacctacctctgaaattacgaagccgctagcctctcctacagaaccgaatattgtcgaaaaaccatcgcttccactgaattcagagtcgatagatttgttatcctcatcttcaaattctatcacagaatatcctgagccgactcctgacttggaggagaaattgtcctcgttaatagtagaacaatcagaaagcgaaataacaacagatagagaaagcgtttcaaaactcttaagtactgaatcaccttcgctatcacacatgccgtcttcatcttcatcttcattatctctttcctcatcgtcaacaactagccctactacagcattatccacaagtaccgcgactgcggttaccaccacacaaacaaaccccaccaatgatgcagccaacacatcttttctagacaactcaaaaccggcatccacgagagagatttataagacaaaaataatcactgaagtcattacaaaaattgagtataggaatatacctgcatcagattccaatgcagaagccgagcagtatgttacaacatcttcttcaatgttgttgacgcccacagacactatggtttcttcgcccgtctccgaaattgatcccatagcatcagaattagagcgtatggttgaaacacctacgcattctatttctatagcatccgaatttgactcagttgcgtctaatttgatcccaaatgaagaaattttgtcaacatcagcatcccaggactctatttcctcgcatccgagtacattttctgattcatctataacctctggcttccagtcaatagaagtatcgactgtaacttcttctgttcttgcttctgaatcaatcccttcaatctcagattccactttttctaaatttcattccatctctgaacctgtttcatcagctattgtggagacggcaactagctcattctcaaaaacagaaacgaagacttcgagagtaattgctttctctaccgaggattcagaacgctccagtgccttgattgataattcggaatacaccagtgtgttggctgacaatttggaacccactagtgttttggctgacagttcggaacccactagtgttttcactgatgctgtacaatcacctaagacgagtgttggtcaatcttccctatcagaatccacaaatattgaagggacttctatggcatctatgatctttagtagtagtggtgcttcaattggcgctctgtctgatataggcaagggaactttatccgtggagagcgcgtcaagcacagtagctcagccgatgccaggtgtaaccacaacagcaccatcttttgtaagtagccctcacaaaatatctgctagttcaattgatgcatcaggatttgtacagaaagaaataatgatagaagtacagtcatcaaaagattcatctgaagcgtttggggtacgccacaaaatcagcgaaaatgtaaatactcctgtttcccgaatgcttacgacggaaatgcaggcatctggtacggtagatgttaccgaagacgtctctctatctagtgaagttatttcagcacttaacgtggagatcacttctttgcctaatccagtggcccctccgcaaacaattgcagcacctttgaataataattcgaatacaaacattgtcaacgatgataatgcagtagcaggaaccgtaaactacgctggccttcatgacgaattgtga

SEQ ID NO: 75764 - DNA, 1563 bp, Saccharomyces pastorianus
atgttgcataaaagcccttcaagaaagagatttgcttctcctttgcatctaggatgcattctaacgcttacagtgctctgccttattgcttactactttgctttaccagattatttatcggtagggaagagctcatccaggggtgccatggatcaaaaatctgatggaacctttagacttaagtctatctacaggcatggcgtcggagcaaaccatcggctacaccagaggctggaggtcactccagaagttatttctgccgctggaatgctgtatcaagaaaccacaactcaaggacaggatttcgaagaccaagaacccctatggactactaatgccgaatatgccaccactaacccattcgattttgagtttgagctacgaaggatgccgctaatgatgaagcggatgaaggaaagagatcctgaatttatagagtcgtacatttacggagaaacatacatgacggaggaggaagaacacgccatgtggatagatgatgacattgtggcacccaacatcacagatagaggtacagtagtgtcgttagcattaatgtcgtctaatgcttacgtgagaataccgcaaacgggagactggcgtaacgtcacggagccgtggaatgaaacagagccggaagattttggttgggatggtgatggtatacgtggtcacgtcttttacaatgaagtggagaatatcgtggtactctcgataaagggaaccagcgctcagggtttgccaggatctggcgaagatgagacaactggaaacgacaagatcaacgataatttgttattttcgtgttgttgtgcaagagtgagctacctgtggactactgtgtgcgattgctatgtgaagtcgtatacatgcgatgagtcttgcctggaaaaggaactgagacgtaaggatagattttactctgcagtcgttgacatatacaaaggcgtcctcaaagaataccccgatgcggccatatgggtcacaggccactcactgggaggcgcattggccagtttactgggccgcacttttggattgcctgcggtcgcattcgagtcccctggagagctactaccttcaaaaagacttcacttaccattcccaccgggacttccctcatacatggagggtatttggcactttggtcacaacgcagacccaatcttcatgggtacatgcaacggagctagttcaagttgctcactggtgggctacgctatggaaaccgcgtgccacactggtagagtctgtgtctacgatgtggtcaacgacaagggctggagtgtaaacatgttcaaccacagaatccacaaagtcattgacgaagttctccttggatacgagcgggctgccaagtgcgttgaaccagagccctgcgtagattgctacaactggaagtttattccaagcagagactgggaatcctcatcgaggctcattaccaagactaaaagccacgccgcaccaaccacgacgactcgcaccactgctactactacctcttcatctacctgtgtaggccgcaattggcttggcttctgcaccaaatacgagttgtaa

SEQ ID NO: 75765 - DNA, 957 bp, Saccharomyces pastorianus
atgtggttgaaatccttgctgctctgcctgtactccttagtactctgccaagtccacgctgcaccttcatcagggaagcagattacctccaaggatgttgatcttcagaaaaaatatgagcccagtccccccgccacacatcgtggaataatcactatcgaatactttgatcccgtttcgaagtcgatgaaagaggcggatctgacttttgagttgtacggtactgtcgtgtccaaaactgtgaacaactttgctatgctggcccatggtgttaaggcagttatcgaagggaaagatcccaatgatatacatacttactcgtaccgtaagaccaaaatcaacaaggtttaccctaacaagtatatccagggtggtgtggttgcctcagatgtgggtcctttcaccgtctatgggcccaaatttgatgacgaaaacttttacttaaaacatgacaggcctggaagactcgcaatggcctattttggacctgattctaacacctcggaattcatcatcaccactaaagccgatggaaatgaggaattggatggcaaaagtgtcgtgtttggtcaaataacttctggtctagatcaactaatggatgctattcaatacacagaaacagacgaatatggaaagcctcagcatgaattacggttcctgtatttcgttctagaaatcttaaaaattagtaacatcttagatttgcacgctgcgtacacagaaaaagtcgagaagtttagaaatggcgatgtgtctgttggctccactttggaaaacatcttccgtaacgataaagcctacacacctttaaccacctccactggaaccaccgcctatgatttaaaccacccaatttccagagccttgatgtgtttaactgttcttggcctttgtttcattgcctacaagggcatgcacgaaaagcctcatacggtttcattaagacacaagtaa

SEQ ID NO: 75766 - DNA, 441 bp, Saccharomyces pastorianus
atgatcagttcgtgtgttactagatgttttggtaggggtaaatgccttccagggcctgccactgcctcgatatatcaaacgataagatgtatatccactaattcaaataaagctgctgaggcgccaatatttccaaagctggaagacgtgaagatgcatgagctcataggaaacaacaattttggtaaaaagacctactacgtggaaagaagcaggaccggaaatctaccggtgtattccgcttataaaaatggaggtaacaaaattatcacggagatcagaaagattgaaggagatgtaattcaactaagaaatgacttgcaggagcaactgcctttcatacccaaaaaatcatggtctgtggtgatgcaatcgaaaaaaattattatcaagggcaatgcagtagaggctgtcaaaagggtattaaccaagaaattttag

SEQ ID NO: 75767 - DNA, 1548 bp, Saccharomyces pastorianus
atgtccaccctgattcctccaccttctaagaaacaaaagaaagaggctcaacttcccagagaagtagctattattccgaaagatttacccaatgtttcaatcaagttccaagctttagatactggtgacaatgtaggtggcgccctgagagttcccggtgctatctccgagaaacagttagaagaacttttaaatcaattgaacggtacttcagacgatccagtgccatataccttcagctgtacaattcaaggtaagaaggccagtgaccctgtgaagacgattgatataacagataacctatattcttcattaataaaaccaggctataacagtacagaagatcagatcacgctactgtatacgccaagagcagttttcaaagtcaagccggtaactagaagttcatcagccattgcaggtcacggttccacaattttgtgttctgccttcgcaccacatacgagttctaggatggtaaccggtgcaggtgataatactgcaaggatttgggactgtgacacccaaacgccaatgcatactctaaagggtcactacaattgggttctctgcgtttcctggtcccccgatggagaagtaattgctacgggatccatggacaataccataagattatgggacccaaaaagcggtcagtgtctaggtgatgctctcagaggtcattccaagtggatcacttctttaagttgggaacctatacatcttgtgaagccgggctccaaaccaagattagcttcatcttctaaggatggtactattaagatttgggacactgtgagcagagtttgccagtatacgatgagtggtcacacaaattcagtgtcttgtgtcaaatggggcggccaaggtctattgtatagtggctctcacgatagaaccgtacgtgtatgggacatcaattcgcagggcagatgtatcaacattttgaagtcgcatgcgcactgggttaatcacttatctttatctacagattacgcattgcgcattggtgcattcgatcatacaggtaagaagccttctacaccagaagaagcccagaaaaaggcattggaaaattatgaaaaaatctgtaaaaagaatggaaattcagaagaaatgatggttactgcaagcgatgattataccatgtttttatggaacccactaaaatctaccaagcctatagcaagaatgactggtcaccaaaaattagtcaatcatgtggcgttcagccctgatggtaggtatattgtctcagcgtcttttgataactctatcaaactttgggacggtagagatggtaagtttatctccacatttagagggcatgtagccagcgtataccaggttgcgtggtcatcggactgccgactactggtgtcatgttccaaagataccacgttgaaagtgtgggatgtaagaactagaaagctttctgttgacctccctggtcataaagacgaagtttataccgtcgactggagtgtcgacggtaaaagagtgtgtagtggtgggaaagacaagatggtaagattgtggacgcattga

SEQ ID NO: 75768 - DNA, 948 bp, Saccharomyces pastorianus
atgactacgacggtacccaagatattcgcgtttcacgagttttcagacgtggcagaggccgtagctgaccatgtagtccacgcgcaagacggtgcattggctccaaagaacgagaggaaacactctgttcccaacatcagcatgaatgcactggatatgacgagagaggcgtcttgcaaaagcacagcatctgccgcggaagggaaaagtggcagcagtggtagtggcagtggtagcagtaagcccaaaaaggagaaacggttcaagattgctctctccggtgggtcattgatcgaagtgctacacgaaggtctgctaaaacgagacgatgtacggtggggagactgggacatttactttgcagacgagagacttgtacccttcagctcgaatgaaagcaattatggatgcgccaaaaggaagattttggacctgatagacacggcgaagtatgggactccgaaggtgtaccacattgacgagtcattgattgacgacccgcaagaatgcgctgataactatgaaaagatgctaatccgcgggtttgccggtagagattccgtcaaacttccgatgttcgacttgttcctgcttggttgtgcccccgatggtcatatcgcatcactcttccctaacttccaggacaatctacgtgagaaacttgcatgggtggtgcccgtggagaacgctcctagtgggccctcgaccagaatttcgctgactatacctgtaatctgccattctcacagggttactttcgttgtcgaaggtgcaaccaaggcgcccatcatcaagaccattatggaaaggcctgaaaagggcctacctagcagtattgtcaacgaaggtgctgctggtcgtgtatcatggtttgttgacgacgatgctcttacggacgtcctcgtcaccaaaaaaaagtataaatttcaccaaggtttgtctatttaa

SEQ ID NO: 75769 - DNA, 783 bp, Saccharomyces pastorianus
atggtgtcgttagacgatatactaggtatcgtgtatgttacgtcatggtcgatatcgatgtatccaccgataatcaccaattggcgccataagtcagcgagcgcgatatcgatggattttgtcatgttaaatacggcaggttactcttacctggtcatatccatatttttgcaattgtactgctggaaaatgacgggtgatgagtctgacttgggcaggcccaagttgacgcaatttgatttctggtattgcctgcatgggtgcttgatgaatgttgtcttattgacccaggtggtagctggagcgagaatctggcgatttccaggtaaaggtcaccgcaagatgaatccatggtacctaaggattttactcgcatcactggccattttttcactgctaaccgtacaatttatgtactccaactactggtacgattggcataactcaagaactctggcgtattgcaacaatttgtttttactcaaaatatcgatgtcactaatcaagtacatcccacaagtgacgcataactcgacaagaaaatctatggattgtttccccattcagggtgtgtttctagatgtcactggcggtatcgcctcgctgctccaattgatttggcagttgtctaacgatcaaggtttcagtctggatacgttcgtgacaaattttggaaaagtgggactgtcaatggtaactttaatattcaacttcatctttatcatgcagtggtttgtatatcgatctcgaggccatgacctggcgtcagagtacccgctgtag

SEQ ID NO: 75770 - DNA, 228 bp, Saccharomyces pastorianus
atggaagcggaaaaacaatctgatattaagggaaccattgctttcgatactcacggtaacgttatagagtctaccggcgtgggcagtcaaaggatcgaagatatcggtgatttatcgaaagttacgctggatgcagaaggttttgctcaagttcaaggagattcgctactcgtacacctgtacaaacgcaatgatatcactttagctgtatataccagcgctcaataa

SEQ ID NO: 75771 - DNA, 753 bp, Saccharomyces pastorianus
atgattgagaataaggttgaactggtagcagaactagtgttggagtccatcggtaaaactgaggtggtgtcacgccatacagagggaaccaaatcatgccaagtgagttttcgcattaaagattctcccagtgagaagggttcaacatcgtttctctctgagctagtggtgattcagactctggatgacaatgacaagtatactgttgttattcgtcatggtacgtcgatcaccatggcatgtgtggtgggttacagcgattttaaattgcccacagaattgaaatggccactagaaagagaaagcttacctgtggagccagacctgaaacctataatgacacaacttaaaagacaaactgcaggtagtgcggacatgccaaaatttgacgatgagtaccaggcacaagcaagacaaaaccagggaacagcaccgttgaacccatatcccggacttacggtaactgaaccgagcttcgctaacccagcaggagggtatgcggatcgtgatctgtatcctgttggcacaagccatccggattggtctggagggcttcccaatcctctggggaatccaagtagccaaggcggtatgattttcgatccaaatagaagacctgccccaagatgggaagatatgccgccaggatggatgcctggatccaagtacgacgaaccatttggtcctggatctggcggatttggaggttcaggatccggcggatttggagggtcaggatctggctttatttaa

SEQ ID NO: 75772 - DNA, 2391 bp, Saccharomyces pastorianus
atgtccttctttgggttagaaaatagcggtaatgcgcgggatggtcctctggactttgaagagagttacaagggctatggcgagcacgaacttgaggagaacgactatttgaacgacgaaacatttggtgataatgttcaggttggtaccgactttgattttggaaatcctcacagcagcggcagcagcggcaacgcaattggcggtaatggcgtcggtgccacggctagatcatatgttgcagctactgcggaaggaattagcggccctaggaccgatggaacggcagcagcaggacctctagacctgaagccaatggaatctttgtggtctactgcaccacctccagcaatggcgccctcaccccaaagtacaatggctccggcgccggctccgcagcaaatggcccccctacagccaatcttgtcgatgcaagacttggaaagacaacaacgtcaaatgcagcaacagtttatgaatttccacgccatgggtcatccgcagggtctcccacagggtccgcctcagcagcaatttccaatgcagcctacgtcgggtcaaccaggtccctcacaatttgcgcctccacctccacctcctggcgttaatgtgaatatgaatcaaatgccaatgggtcctgtacaagttccagttcaagcttcgccttcacccatcggtatgtctaacactccttctccaggccctgtggttggcgcaactaaaatgcctctgcaaagtggacgcagatcgaagagagatttgtcgcctgaagagcaaagacgtttgcagattcgtcatgccaaagtggagaaaatcttgaaatactcaggtttaatgactcctcgtgataaggacttcatcaccagatatcagttgtctcaaattgtcactgaggacccttacaatgaggatttctacttccaggtctacaagattatccaaagaggcggtatcacgtccgaatccaacaagggtttgattgctagggcgtatttggaacattctggacacagactcggtggtcgctataagagaaccgatattgccctacagagaatgcaaagtcaagtagaaaaggctgtcactgtggctaaggaaagaccttctaagttgaaggatcaacaagcggctgctggtaactctagccaggataataagcaagcaaacacggttctgggcaaaatctcttccactttgaacagcaagaatccaagaagacaactgcagatccccagacaacagccttctgaccccgatgcgctaaaagacgtcactgactctctgaccaacgtggacttggcctcttcagggtcctcctctacgggctcttctgccgctgctgttgcttctaagcaaagaagaagatcttcatacgcgttcaacaacggtaatggtgccacaaatttgaacaaatctgggggcaaaaaattcattcttgagttaattgaaacagtttatgaagagattttagacttggaagctaacttgaggaatggccagcaaactgacagcactgcaatgtgggaggcccttcacatcgacgacagttcatatgacgtaaaccctttcatttcgatgctatcatttgataaaggtatcaagattatgcctagaatttttaatttcttggataagcagcaaaaattgaaaatcctgcaaaaaatcttcaatgaattatcacacttgcaaatcatcatattgagttcctacaagactacaccaaaaccaactttgacacaattaaagaaagtcgatctgttccaaatgatcatattaaagatcattgtctcgtttttgtctaataactccaattttatcgaaattatgggtctgttgctacagttaatcagaaacaacaacgtttcgttcttgaccacctccaaaattggtctaaatttgatcaccattttgatttctcgtgccgcattaatcaagcaagattcatcaagatctaatattctttcctctcctgaaatctccacatggaatgagatttatgataaattattcacttcattggaaagtaagattcagctgattttccctccaagggaatataacgaccacatcatgcgtttacaaaatgacaagtttatggatgaagcatacatttggcagttcctagctagtttagcactaagtggaaagctaaaccaccagagaatcattattgatgaagtacgtgatgaaatctttgccactattaacgaggcggagaccttacaaaagaaagagaaagaattgagtgtattacctcagaggtctcaagaattagacacagagttaaaatctattatttataataaagagaaactataccaagatttgaatttgttcctaaacgttatggggttggtgtatcgcgatggtgaaatttcagaactaaagtaa

SEQ ID NO: 75773 - DNA, 1329 bp, Saccharomyces pastorianus
atgcggctggggaatgcttatgcgtattgcaagccgtcgcaaaatgttgggctgaagctggacttgttacggggtcttccagggtacgtgggtcacgccacgagtaggatcaaccggttagagaaccaggacaattactccattaaaatgatgcggtcgtggcctaatgcttatggaagtgccctgaactgctctgtattcgatggccatggggagaaaggtgcgcaactgtcacagttgttagccgataaattgtgcagtagcctggatttccctgaaccctcctgggacaagcaggacttgaagaagttggtacaggaatatgcaagaaggtttcccgagggaaattactggaaacataagctgtccacgtttgaaaaattctacaacaagtttataaagaactgcaactcgaaacaagaactgctgctgatgaaggagggcgatagtgcgatccttggacaaaatggtggcaggatgatttttgataaaatggggaatattattgacaaaattgcactgctcactgagctagaccgtctgcgattgttctacgggtttgccaggttcgatctcgaccaatgctgcggcctgggcaccgcagcggggtccacagcgtcgtccatatttctatatccgtatgatgatccgaatgcacccattgatgaggggaaagacgatgactcgtggatcatatcgcactctggattgctcaaactcattgtcacgcaggtgggcgactctaagatcatcctctgcgatcaagacgggattgcacacgcattaacaacaactcaccacatcaattccagtagggaacgacaccgtttgagcatagacccttctcgattggacccagacgcctttggagagacaaggtttttgaataatttcgccaacactagatcgtttggtgatgtcgctgggaaaccgtatggtatatctagtgagccggatattttctcgtttcttgtcggaaataccttgcatttgccgcgatctgaaaggtcgaagctgcccttcaatggtgatgaatgcttcctggcgcttgtcaccgacggcatcaccaataaacttgcagaccaagaggttgttgacctcatcacctctacggtgaactcctggggactgaaaaaggcgactcctcaatttgttgcagaggagacaatcaaatttattcaggcaatagccactaaacactcagacaacgccacttgcgtggtggttaggctttccaattggggcaactggcccaatgttgacagaactggcccccaaagagaaaccaaactaatgaatgcacaatctaacgaaacaaaattaaactaa

SEQ ID NO: 75774 - DNA, 4284 bp, Saccharomyces pastorianus
atgaataacggttctggtcgatacttgctgactcccccagatgatcttcacccctatgtgccaagctcgaaacctcaggaacaagtataccctgatttcaagccttgggagcacactgcagcagaagatcaaatcctagcaaactttgtggctaagggcttttaccatacaccaatggtaagtttcgagtccatatctgcgagatcatctgttcatgaatcattagtcactcaatccaacattctttcccagcaattcgacaaaattatcaagattagagaagaccacattaataagatcccctcaaattccgcgacgacattacacgggcctggttttcagttgcctaatagaataacccttactgatcatagaaaggaaacgtggttgcatgaattgagttcgtctcacacttcgctggtcaaaattggcaagtttatacctcacggcttgaaaagaaggcaagtcatcgagcagtgctatttaaaatttataccattgaaaagggcgatttggttgataaagtgctgctattttatcgaatggaaatcgaaccacaaaaagaagaggtcaaatgctgctggggcagacgatgccatttccatgcacctgctaaaggactggacggatacctttgtatacatcctggaaaagctcatctttgatatgacaaatcactataacgattctcaacaactgcgtacgtggaagaggcagatttcttattttttaaaacttttggggaattgctactcactaagattgatcaataaggaaatctttcatcattggcttgtagagtttataaataagatggaaaacttcgaatttttgccattatcattacatattttgatgattttttggaacgacatctgccaaattgatacaaatgctcctgttgcggctacaataacatcaagtcaaaaagagcccttctttctggtaacaaaaatcactgatatgctattgcacaaatattatattgtttccagcagcaaatcaatgataaatgacgagaactacatcatcaatgatataaagaaaaacaacaagataaagttgaatattctcaaaatattatccagtttaattttgaaaatttttcaagaacaatctttagaggtgtttatatttcccacatctaactgggaaatttacaagcccttactttttgaaatagtctcaaacgccgacactaatcaaaattctgatatgaagaaaaaattagagttaattagttacagaaacgagtcattgaagaataattcttctatacgaaacgtaataatgtctgccagcaacgcaaatgactttcaattaactatcgtcacctgtaaacaatttccaaaactatcatgcattcaattaaattgtatagatactcagttcaccaagctactggacgataaccctacagaattcgattggcccacttacgttgaccaaaatccccttacaatgcataaaattattcaattaattctctggtccatacatccatcaaggcaatttgatcactatgaatctaatcaactggtagcgaaattattactattgcgaataaattcaacagatgaggatttgcacgaattccagatagaagatgccatttggtcattggttttccaattagccaaaaatttttcggcccaaaagagggtggtatcatatatgatgccttctttgtatcgcctgcttaatatactaattacttatggcatcattaaggtccctacgtatatcagaaagctaatcagttccggcctactttatctccaagattccaatgataagtttgtgcatgtccagctgttaattaacttgaaaatttcaccgttgatgaaaagtcaatacaatatggtattgaggaacgttatggaatatgacgttaaattttatgaaatttttaatttcgaccaactcgtggaaatcacagaacaaatcaaaatgcgaatactctccaatgatataactaatttgcaactgtcgaaaactcctctgagcattaaaatcatggttgcagaatggtacttatcacatttatgttccggtattttatctagtgttaaccgcacagtgttgctaaaaatattcaagattttttgtatcgatctggaggttttccaccacttttttaagtggatcgagtttattgtctaccatcaattgctaagtgatatagaatctctggaggcattgatggacatcttgctatgctaccaaaaattgttctcacaattcattaatgaccatattctttttacgaagacgttcatattcatttacaagaaagttttgaaagaaaaagacgtgcctgcttataatgtgacttcatttatgccattctggaaattttttatgaaaaacttcccttttgttttaaaggtggataacgatttaaggattgagttacaatctgtttacaatgatgagaaattgaaaactgagaagctgaagaatgataaatcagaagtcttgaaggtgtattccatgatcaataattcaaaccaagctgttggacagacttggaattttcccgaggtgtttcaagtaaacatcaggtttctactacacaactccgagatcattgatacaaatacaagcaaacagttccagaaagcacgaaacaatgtcatgcttttgattgccactaacttgaaggagtacaataaatttatgtccattttcttgaaaaggaaagactttactaacaaaaatttaattcaattgatctctctaaaacttctaacttttgaagtgacgcagaatgtgttggggctcgagtatattattcgattattaccaataaacttggaaaataatgacggctcatatggtctgtttttgaagtatcataaagaacaattcataaagtcaaattttgagaaaattttacttacatgttatgaattagaaaaaaaatatcatggcaacgaatgtgaaataaattattatgagatcctattgaaaattttaataacttatgggtcatctcccaaattacttgcaacatctacaaaaatcattatgttgttattaaatgatagcgtggaaaactcatctaatattttggaggatattttgtactactcaacttgtccgtcggaaaccgatcttaacgatattccattgggtagtggacaaccagacaatgacactgttgtaaccaacgatgataaaagtgacgatgatgatcacacagtcgacgaaattgatcatgtagaatattacgttatgatggactttgccaatctttgggttttccaagcgtttacctgtttctgcatcaaaaaaatcatggagaataatgagccagcaatggcaatggaagacttgaagaacttcatattccaaattatcgaaataactaattctaatgatttatgttcacaaatatttgaccaactgaaggatatgcagaccattgagatgataacccaaatagtggagaaagatttctgcacttcttgtttgcaaaacaacaaccaaaagatagatgataattacatcgttgtggtgatcgagattataacgtcattatcgatgaggtttcaaagagaaacttctggtatgatagttatttccacggagaactatcatttactaataaagatcataagacaattaagtgaactgaacgaaggaaatttatctaagagagaaatccaaatagatgccgtcttgaaaattttcagctttcatcaggattccattttccaacgcatcatcgctgatttatcagctgataaacccacaagtccattcattgatagcatatgcaagctgtttgataaaatatcatttaatttaagattgaagctgttcttgtacgaaattttgtcttcattgaaatcattcgccatctattcatccacaattgatgccccagcattccacacaagtggtaaggtcgaactaccgaagaaattgctcaacttaccaccattccaagtgtcctctttcgttaaggaaacaaaacttcatagtggcgactacggggaagaagaagatgcagaccaagaagaatcgtttagtttaaatttaggaatcggcatagttgaaatagcgcacgaaaacgaacagaaatggctcatttatgacaaaaaagatcataaatatgtctgcacattttccatggagccgtaccacttcatctccaactataataccaagtacacagatgacatggctacaggcagtaatgacacgactgcgtttaacgattcctgtgtaaacctgagtctttttgatgctcggtttgagaggaaaaatccacattga

SEQ ID NO: 75775 - DNA, 237 bp, Saccharomyces pastorianus
atgtggatttttcctctcaaaccgagcatcaaaaagactcaggtttacacaggaatcgttaaacgcagtcgtgtcattactgcctgtagccatgtcatctgtgtacttggtattatagttggagatgaagtggtacggctccatggaaaatgtgcagacatatttatgatcttttttgtcataaatgagccatttctgttcgttttcgtgcgctatttcaactatgccgattcctaa

SEQ ID NO: 75776 - DNA, 387 bp, Saccharomyces pastorianus
atgatcaccccaaagggaacgcacgatgctgtagccaagtttcaaaaaactgacctgcatcaagatctcgattacatcgtactgcaacaacgaagaacacagctagagacgcttattaacgaaagagaatcttttgtcaagaatctgtgttctcttttccacaaaattcaaaataccaagaattaccaggaatttgttgatgtattggcggagaatagggatttactgcgagaaattttcactgtagagaacggatttcaaaagcaaaaatggattagcaacgacgacattccccagatagactgggacaagtttgccctagatatcaacgcttatatagcagagaacgatcaattgttggctttgtatgaagatggcttattatga

SEQ ID NO: 75777 - DNA, 384 bp, Saccharomyces pastorianus
atgttgttctataagcctgtgatgaggatggcggtgagaccgctaaaaagcataagattccagtcctcatacaccagtattactaaattgacgaacctaacagaatttaggaatttgatcaagcaaaatgataaactagtcatcgacttttatgctacttggtgtggcccctgtaagatgatacaaccacacttaacgaaattaattcaggcttatccagatgtaagatttgtcaagtgcgacgtggacgaatcaccagatattgccaaagagtgtgaagtgacggctatgcccacctttgttcttggcaaggatggccaactcatcggcaagatcattggagctaaccctactgctttagagaagggaatcaaagatctataa

SEQ ID NO: 75778 - DNA, 2142 bp, Saccharomyces pastorianus
atgactgccagcgtttcgaatacgcagaataagctgaatgagcttctcgatgccatcagacaggagtttctccaagtctcacaagaggcaaatacctaccgtcttcaaaaccaaaaggattacgatttcaaaatgaaccagcagctggctgagatgcagcagataagaaacaccgtctacgaactggagctaactcacaggaaaatgaaggacgcgtacgaagaagagatcaagcacttgaaactagggctggagcaaagagaccatcaaattgcatctttgaccgtccagcaacagcagcaacagcaacagcagcaacaggtccagcagcatttacaacagcaacaacagcagctagccgctgcatctgcatctgttccagttgcgcaacaaccaccggctactacttcggccaccgccactccagcagcaaacacaactactggttcgccatcggccttcccagtacaagctagccgtcctaatctggttggctcacagttgcctaccaccactttgcctgtggtgtcctcaaacgcccaacaacaactaccacaacagcaactgcaacagcagcaacttcaacaacagcaaccacctccccaggtttccgtggcaccattgagtaacacagccatcaacggatctcctacttctaaagagaccactactttaccctctgtcaaggcacctgaatctacgttgaaagaaactgaaccggaaaataataatacctcgaagataaatgacaccggatccgccaccacggccaccactaccaccgcaactgaaactgaaatcaaacctaaggaggaagacgccaccccggctagtttgcaccaggatcactacttagtcccttataatcaaagagcaaaccactctaaacctatcccacctttccttttggatctagattcccagtctgttcccgatgctctgaagaagcaaacaaatgattattatattttatacaacccggcactaccaagagaaattgacgttgagttacacaaatctttggatcatacttcagttgtttgttgcgtgaagttcagtaacgatggtgaatacttagccacaggctgcaacaaaactactcaagtgtatcgcgtttcagacggttctctggtggcccgtttatctgacgattctgctgccaataaccatcaaaattcgatcactgaaaataacaccaccacgtccacggataacaatacaatgacaaccactactaccaccacaattactaccacagcgatgacttcggcagcagaattggcaaaagatgtggaaaacctgaacacttcgtcttccccatcatccgacttgtatatccgttcagtgtgtttttctccagatgggaaatttttggcaacaggtgctgaagacagactgattagaatttgggatattgaaaatagaaagattgttatgattcttcaaggccacgaacaagatatttattcattggactactttccctcaggtgacaaattagtctccggttctggtgaccgtaccgttcgtatttgggacttacgtacaggccagtgttcattgactttatccattgaagatggtgttaccaccgtcgctgtatcaccaggtgatggtaaatacatcgctgctggttctctagatcgtgctgtgagagtttgggattccgagaccggattcttggtggaaagactagattcggaaaacgaatccggtacaggccacaaggactctgtttatagcgttgtcttcacgagagatggacaaagcgttgtatccggctcattagatagatctgttaagctctggaatttgcagaatgcaaacaacaagagcgattcgaaaactccaaattccggcacttgtgaagttacgtatatcgggcataaagactttgtattgtccgtggccaccacacaaaatgatgagtacatcttgtccggttccaaagatcgtggtgtcctgttttgggataagaaatccggcaatccgttattgatgttgcaaggtcataggaattcagttatatctgtggctgtggcaaacgggtctccgctgggtccagaatataacgtttttgctactggtagcggtgattgtaaagcaaggatttggaagtataaaaaaatagcgccaaattaa

SEQ ID NO: 75779 - DNA, 354 bp, Saccharomyces pastorianus
atgttgttcttatatacatatgtttatgtctttttatgtacaaataatgatgtttacaatgaaacatctgttatgctatcaaaaacgtcagcgcattgttttatagctgaagaggttacaacggataacggtctgatttgcggcctggcaatgcttggtaaaactaaatatcaattttacgaattatttactgtatatagtattcagtccctcactcaactggcgtcaagagtgaagaagggcggcctcattatggctcgccttattctgttcaccctctgcgctcttcccgtattatttcattttattttgtttatgcttcaatatcttgtatttgtttacattgaaaaatga

SEQ ID NO: 75780 - DNA, 573 bp, Saccharomyces pastorianus
atggatccattgactgtatacaaaaactcagtgaaacaacagatcgattccgcagacttactagtggcaaatttggtaaatgagaatttcgtactgtcggagaagctggatacaaaagcaaccgagatcaaacagctgcagaagcagatagactcgctaaacgcacaagtcaaggagctgaagactcagacttcccaacaggcagaaaattcagaagtcataaaggacctttacgagtacctctgtaacgtacgtgtacataaaagctacgaggatgattctgggttgtggttcgacatctcgcagggcacccactcagggggatcttccgatgattattcgataatggactataaactcggatttgtcaagggccaggcccaagtcacagaagtcatctatgcgcccgttcttaaacagcgatccaccgaggaactatactcgctacagtcgaaactaccggaatacctcttcgaaacgttgagtttccccctctcgtcgctaaaccaattctataacaaaatcgctaaaagcctgaataagaaaagagagaaaaaagatgaaaccgagtaa

SEQ ID NO: 75781 - DNA, 435 bp, Saccharomyces pastorianus
atggttacgttcaactgtgaggtgtgcaatgatactgtgcccaagaagaataccgaaaagcattattatagatgtcctaacgcgtactatacatgcatagattgctccaagacgtttgaagatggcgtgagttacaagaatcacacgtcttgcatcagcgaggacgagaagtaccagaaagcgttatacaagggcaacaagaagcagaagcagaagcagcagcagcagccagtggcaactcctgcaaagaaagtggagaagcctgtgatcaagaaggcagagaaagtggaaaagacctcgaacggaatcgagcttcacaagggcaagtcgttgtacaaaattttgaaaaccatgaaggataaaggggcaaaaaagaccttcttgaaaagtctggttgtggattctgaggggcaaatcaggtatgcaaaggaataa

SEQ ID NO: 75782 - DNA, 1779 bp, Saccharomyces pastorianus
atggctttggaacctattgattacactactcactcgagagagatcgacgcagagtacctgaagattgtcagaggctccgatcctgacaccacctggttgattatttcacccaatgcgaaaaaagaatacgaacctgagtctaccggttcctcctttcacgatttcttgcaatcgtttgatgaaaccaaggtccagtacggactggcacgtgtgtccccaccagggtcagacgttgagaagattattatcattggttggtgtcctgattctgcgccattgaagacgagggcctctttcgccgccaattttgctgcagttgctaataatctgttcaagggttaccacgttcaagttaccgccagagacgaggacgatcttgacgaaaatgaactgttgatgaaaatcagtaacgcggccggtgcccgttattctattcagacttcctccaagcaacaggggaaggcttccactcctcccgtgaagaaatccttcacaccttccaagagccctgctccagtttctaagaaggaaccagtcaagactccttccccagcacctgctgctaagatttcttcccgtgttaacgacaacaatgacgacgacgattggaatgagcctgaattaaaggaacgcgacttcgatcaggctcccctgaagccaaatcaatcatcttacaaaccaattggcaaaatcgacttgcaaaaagtgattgctgaagaaaaggctagggaggacccacgtcttgttcaaaagccaaccgctgctggttccaagattgatcctagttctgatatcgctaatttaaagaacgaatcaaaattaaagagggactccgagtttaactcctttttgggcaccactaaacccccctccatgacggaatcttcattaaagaatgatgatgataaagtcattaagggttttagaaacgagaaatcacctgctcaattatgggccgaaagaaagacaaagcaaaacagtggcaacgccgaaactaaggctgaggcaccaaaacctgaagttccagaagatgagcctgaaggtgaacctgacgtcaaagatttgaaatcaaaatttgaaggattggccgcttcagaaaaagaggaggaagaaatggaaaacaaatttgctcctcctccaaagaaatcagaaccaactattatctcaccaaaatccttctccaagccacaagaacctgtgaaaactgaagaagctcagcagcctaagactgattacaagaagatcggcaacccattacccggtatgcacattgaagcggataatgaggaagaaccagaagaaaatgatgatgactgggatgatgatgaagaggaggctgctcaacctcctttgccttcgaggaatgttgcgtcaggagcaccagtgcaaaaagaagagcctgaacaagaagagatcgccccaagcttaccttctagaaactcgatcccagctccaaaacaagaagaagcacctgaacaagcacctgaagaagaaattgaagaagaagctgaggaagccgctccacagctgccatcaagaagctctgcagctcctcctccgcctccaagacgagcaactccagagaaaaagccaaaggaaaatccttgggccacagcagaatatgattacgatgctgcagaagataacgaactgacctttgtggaaaatgacaagattatcaatattgaatttgtcgacgatgactggtggctaggggaactagagaaagacggctcaaaaggtctcttccccagcaattatgtgtctttgggcaactag

SEQ ID NO: 75783 - DNA, 4911 bp, Saccharomyces pastorianus
atgaactcatttgcgtcattaggtcagatatattcagtagtaaaccttttaactagagtagaggctcaaattgtgttctaccagaatagtagtacttcactgcctgtctctactttagtatccacctcaatagcagattttcacgagtcctcatcaactggcgaagtgcagtattcatcctcttattcgtatgtgcagccctcaatagactccttcacttcatctagcttcttaacaagttttaaagctcctaccgaaacttcttccagctatgcagtttcttcctcattgataacttctgatactttttcttcatactctgatatcttcgatgaagaaacaagttcattaatatcaacgtcagctgcctcatcggagaaagcctcgtccaccctttcttcaactgcacaacctcataggacatctcactcttcctcttcattcgagctaccagtcactgctccatcatcctctagtttaccgtcctcaacttcattgacatttacgtcagttaatccatctcaaagttggacttcatttaactcagaaaaatctagcgctctttcctcaaccatagattttacttcttctgagatttcaggttcaacatctccaaagagcctggaaagtttcgataccaccggtactataacttcatcttattctccttctccttcttcaaaaaattctaaccagacctcactactcagcccattggagcctctgtccagttcttcaggagatttaatattgagttcaactattcaagctactaccaatgaccaaacttcaaaaactattccaactcttgttgacgccacatcgtcattaccaccaacattgaggtcatccagtatggcaccaacaagtggttctgattcaatctcacacaactttacgagccccccctctaaaacaagtggtaactacgatgttttgacttcaaactcaatagatccttctctatttacaactacgagtgaatattcatctacacaattgtcgagtttaaatcgggcctcaaaaagtgaaacagttaatttcactgcttctattgcttccacaccatttggtacagattcggctacttctctaatagaccccattagttcagtgggttctacagcatctagctttgtgggaatttcaaccgccaattttagtacacaagggaactcgaactatgttcctgaatcaactgcaagcggaagttcacaataccaagactggtcaagctcttctcttccgctgtcacaaaccacttgggttgtcatcaacacaactaatacacaagggtctgtaacgtcaaccacatccccggcttatgtttctacggccaccaaaacggttgacggggtgatcaccgaatatgttacatggtgtcctctaacacaaaccaaatcacaagcaattggggtcagttcgtctatttctagcgttccacaagcctcctcattcagcggtagttccaattccaccactcttgctgcctcgaacaacgttcctgaatcaactgcaagtggaagttcacaataccaagactggtcaagctcttctcttccgctgtcacaaaccacttgggttgtcatcaacacaactaatacacaagggtctgtaacgtcaaccgcatccccggcttatgtttctacggccaccaaaacggttgacggggtgatcaccgaatatgttacatggtgtcctctaacacaaaccaaatcacaagcaattgggatcagttcatccacgattagcgccacacaaacctctaaaccatcttcaatattaacattggggatatcgaccttacaattgtctgatgccacatttaaggggactgaaactataaacacccttctcatgaccgaaagtactttaatcacagagcccacctattttagtggcacatcggatagcttttatttgagcaccagtgaagttaatcttgcgtcttccttatcttcttatccaaatttttcatcttcagaaggctctacggcgaccattactaactctaccgttacatttggatcgaccagcaagtatccatctactagtgtatctaacccaacagaagccagccaacatgtgagctctagtgtgaactcactcactgattttacttcaaattcaaccgaaaccatcgcagttatatctaatattcacaaaacttcgtcaaataaagactattcatcgacgactacgcaattaaagaccagcggaatgcaaacgcttgagctttctactgtcacaacaacggtgaacggtgctgctacggaatacacaacgtggtgcccggcaacaagtattgcttatacgacatccatatcatataaaacattagttttgaccactgaagtctgctctcattctgagtgtactccaacggttattaccagtgttactgcaacaagctctacaatcccccttttatcaacctctagctctacggtattatcttctacagtatccgaaggtgcaaaaaatcctgctgcttctgaagtaactattaatacccaagtttctgctacttccgaagctactactactagcactcaagtgtctgctacttctgcgacggccactgctagcgagagttcaaccacatctcaagtttctgctacttccgaagctactactactagcactcaagtgtctgctacttctgcgacggccactgctagcgagagttcaaccacatcccaggtttctactgcttccgaaactattagcactctcggtactcaaaactttaccactactggaagcttacttttcccggctttgtctactgaaatgataaatactactgtggtttcccgaaaaaccctaattattagtacagaggtatgttcccattccaaatgtgtcccaacagtcattaccgaggttgttacttcgaaaggcacgccttctaatggacattcttctcaaactctacaaacggaggcagtagaggtgacattgtcatcccatcaaaccgtaactatgagtaccgaagtatgttctaattcgatttgcacaccgactgttattacatctgtgcaaatgagaagtattccttttccatacttaacttcttcaacgtcaagttcctctttagcctccaccaaaaaaagttccttagaagccttctcagaaatgtccaccttttctgtcagtacgcaaagtttgcctttggcattcacaagttcagaaaaacgctccaccacatctgtctctcaatggtcaaataccgtttcaactaatacaataatgtcctcttcttctaatgtcatatcaacaaatgaaaagcccagtagtactacctctccatacaacttctcttcggggtactctttaccttcttcttctacaccttcccaatattcactatctacagctactacaacaatcaacggaatcaaaactgtgtacacaacttggtgtccattggcagaaaaatctactgtagctgcttcttctcaatcttcccgcagtgttgacaggtttgtttcgtcgtcaaaaccatcctcatctttatctcagacctctattcaatatacattatctactgctaccaccaccataagtggtttgaagactgtatacacgacttggtgtccattaacaagtaaatcgactttaggtgctactactcaaacttcctcgacagccaaagttagaattacttccgcttcatctgcaacatctacttctatttctttgagcacttcaacagaatcagaatcttcatctggatatttgtcgaaaggagtatgctcaggtactgaatgtacgcaagatgtgccaacacaatcatcctcacctgcttcaacgttagcatattccccctctgtttctacatcatcatcatcatcattctcaacaacaactgcatcaacactaacgtcaacacacacctctgtcccgttattaccatcatctagctctatatcagcatcttcgccatcatcaacttcgttgttatccacttctttaccatctcccgcttttacgtcatcaacacttccaacagcaacagcagtatcttcctccactttcatagcgtcttctctaccattgtcctctaaatcatcattgtcgttatcgccagtctcgtcgtctattttgatgtctcagttttcatcatcatcatcatcatcatcatcattggcatcgttgccatctctttctatatcaccaactgttgacactgtttctgttctacaaccaactacttccatcgcaacactaacttgcacagactcacaatgccaacaggaggtatccactatctgtaatggatccaactgtgacgatgtgacttcaactgccactactcctccatctacggttactgatactatgacatgtactggatctgagtgccagaaaaccacatctagcagctgtgatggttactcgtgtacagtatccgaaacgtataaatcaagcgctacaatatctgcatgtagtggagaaggatgccaagcttccgctacaagtgagctaaattctcaatacgtcacgatgacgtctgtcattaccccaagtgccataacaacaacatcagtggaagtgcattcaactgaatccactatatcaattactacagtgaagccagttacatatacatccagtgatactaatggagaactgataaccataacaagttccagccaaactgtaattccatcagtaacgacgataataacgagaacaaaagtggccataacttcagcaccaaagccaacaactacgacctatgtcgagcaacgactttcctccagtgggattgctacttcttttgttgctgctgcatcctcaacttggattactacacccattgtcagtacgtatgctggttcggcgtcaaaatttctctgtagtaagttctttatgataatggtaatggtgatcaacttcatttaa

SEQ ID NO: 75784 - DNA, 549 bp, Saccharomyces pastorianus
atgccgttatttttggttctgaaagcaacattatcagaaaacgtgaccaaggtttcaattgagaatacaaacgaatcaagggcagaatttgccttcgatctacaatgtaccagttgtagagaattacacgattctaaagtcatcatcaatacatttgaagaatatgctatgccggcatcaaaaggtaccgcatctttcttgatgaagtgtaaattttgttcaaaagaattgtcagttaacctgtgcgcttttgaggatgaatatttaactgatcagagtgacgacaaatgggctaagataaaagatgtgcggaagaagcatggtttatcgaaggtcaaagacgattctttcattcctttaagccttgattgcagaggttgtgagttaatcaaattttatcccgacaccataacgtttgaagtttctctaagttcggggaaagtaatgtcatgccaactagaggataatgaatggtatgattatgatgacaaccttggggaagaagtaacaatgactgatttctcatcaagcattattaaaggtaagtaa

SEQ ID NO: 75785 - DNA, 2163 bp, Saccharomyces pastorianus
atgactcagcaagaataccgttccccctcacaacgcttatccaaggggaggggcatgtcgctacccaaaatatttgctcgtaatttgagatctctgcaaaacaatgcacctcctggcaaaaacatcgatgtcaattgtttgaacgtcaattcttgttcgttgtccgcaagcccaagctcacaaattaatatggcttgtaatggaaacaagcaagatcttcccataccgtttcccctgcatgcagaatgcaacgatagctggtcaagctccaaactcaacaagttcaaatcaatgtttaatcataacagatcaaagagcagtggtactacagatgcgtcaacttcagaaaaaggtacgcataagcgtgaaccccggtcgacgatacatacagagctgttacaaagttccattatcggtgagccaaatgtccatagtactacaagtagcacacttatacccaatgaggcgatatgctccacacctaatgagatctcaggtagctcttctccggacgcggagttatttacctttgacatgcccacagacccgtcatccttccacactcctagctccccaagttatatagcaaaggacagtagaaacctgagtaatggatctttgaatgatattaacgaaaatgaagagctccaaaatttccatagaaaaatcagcgaaaatggcagtgcctcccccctggctaacttgtcattatccaattcaccaattgattccccaaggaaaaatagcgaaaccagaaaggatcaaatacctatgaacataacaccacgtttaaggagggccgcttccgaaccgttcaatacggcaaaggatgggttaatgcgggaagattacattgccttgaaacaacctccaagcttgggagatattgtagaaccgaggagatctcgtcgtttaagaaccaagtcattcggtaacaagttccaagacattactgtcgaacctcaatccttcgaaaaaattagactacttggccaaggtgacgtaggtaaagtgtatttagtgagggaacgcgataccaaccagatattcgccctgaaagttttgaataaacatgagatgatcaagaggaagaaaattaaacgagtactcactgaacaggaaattctcgcgacaagtgatcatccatttattgtgacactgtatcattcctttcaaaccaaagactatttgtatctctgtatggaatactgcatgggaggggaattctttagagccttacaaacaagaaaaagtaaatgcattgcagaagaagatgcgaagttttacgccagtgaagtagtagcagctttggaatatttacacctactgggcttcatatacagagatttgaaacccgaaaatatattactgcatcaatctggtcatgtcatgctttctgactttgatttatccatccaagcaacgggatcaaaaaaacccaccatgaaagactctacgtatttagatacaaaaatttgttcagatggattcagaactaattcctttgttggtactgaagagtatttagctccagaagtaatcagagggaatggccacactgcagcagtagactggtggactttaggaatattgatttacgagatgctatttggctgtactccatttaaaggagataattcaaatgaaacattctctaacattttaaccaaggacgtcaaatttccacatgataaggaagtttcgaagaattgtaaagacctgataaagaaactactaaacaaaaacgaggcaaaaaggcttggttccaaatcaggagctgcagacataaagagacatcccttcttcaaaaaagttcagtggtcgttcttaagaaaccaagacccccctctaatacctgcattaaatgataacggctgcgaacttccttttatattgtcttgcaataaacacccgaaaaggaactcagtgagtgaacaggaaaccaaaatgttctgtgagaaagttgcaaacgatgatgaaattgatgaggctgatccattccatgattttaattctatgagtttaacgaagaaagatcacaatattttaacctactctgaaaattatacctacggaaaaattctatacaaagcaacttgtacaaggccaaggcataacagctcacatagaagtttctttaaagacattatacctgaactataa

SEQ ID NO: 75786 - DNA, 3144 bp, Saccharomyces pastorianus
atggtgataggtaatgcacctaaactggtacttttgagagccaaaagcagtgcaaatagatttattttgttgaatctattaacaataatggcgggacaacccacaataagcaggtttttcaagaaggcggtaaaagcagagctgacgcataagcaagaacaagaagttgcggttggaaatggcgctggtagcgaatccatctgccttgacactgatgaagaggacaatttatcttctgttgcaagcacaacagtaactaatgatagctttccactcaaagacagtgtttcttccaagaattcgaaaaattcagaaaagactagtggtacttcgacaacatttaatgatattgactttgctaagaaattggataggattatgaaaagacgaagtgatgaaaatgttgaggctgaagatgatgaggaagagggtgaggaagatttcgtaaaaaaaaaagccagaaagtcccctacagcgaaacttactcccttggacaaacaggtgaaggacctgaaaatgcatcatagagataaagtgcttgttattagagtaggctataagtacaaatgttttgcagaggatgcagtaacggttagcagaatacttcacatcaaacttgtgcctggaaaattgactatcgatgagtctaatcctcaagattgcaatcataggcagtttgcgtactgttctttcccggatgtcagattaaacgttcacctagagagacttgtgcaccataatttaaaggttgccgtggtggagcaagcagaaacaagcgctattaagaagcatgatccaggtgccagcaaatcaagcgtttttgaaagaaagatttcaaatgtctttaccaaagctacatttggtgttaattccacctttgtccttagggggaaacgtattctcggtgatacaaacagtatatgggctttgtcccgtgacgtacatcagggaaaggtggctaaatattccttaatttctgtcaatttaaataacggggaagtcgtgtatgatgaatttgaagagcctaatcttgctgatgagaaactacagatacgaatcaaatatttacagcccatagaagtactgataaatacagatgatcttccattacatgtagcgaaatttttcaaagatacttcatgtcctttaatacacaagcaggagtatgatttggaagatcatgtagttcaggcaataaaagtaatgaatgagaaaattcaactctcgccgtctctcatacgcttagtttctaagttatattcgcatatggttgagtacaataatgagcaggtgatgttgattccttctatctattcgcccttcgcatcaaaaatacatatgttacttgaccctaactccctgcaaagtttggacatttttactcatgatggtggtaaaggttctttgttttggttattggaccacacaaggacatcgtttggatttagaatgttgagagaatggattctcaaacctttgattgatgtacaccaaattgaagagcggcttgatgccattgagtgcattacatccgaaatcaacaacagtatattttttgaatcgttgaatcaaatgttgaatcatacccctgacttattaagaactttaaatcgcataatgtatggtacaacttctagaaaagaagtctatttctatttaaagcaaataacttctttcgttgatcacttcaagatgcatcaatcttacctgtcagaacatttcaagtcatcagatggaaggataggcaaacaatcccctttactttttagactatttagtgaattgaatgaactactttctaccactcagttgcctcattttttgaccatgatcaacgtttctgcggtaatggaaaaaaattcagataagcaagtaatggatttttttaatttaaataactatgattgttcagagggtataataaaaattcaaagggaaagcgaatcagtacggtcacagttaaaggaagaattggcagaaatacgaaaatatctcaaacgtccatatctaaattttagagatgaagttgattacttgatcgaagtgaaaaactcgcaaattaaggacttgccagatgattggataaaagttaacaatacgaagatggtcagtagatttaccactcccagaacccagaaactgactcaaaagctagaatattacaaggacttattaattcgggaatctgaactacagtataaagaattcttgaacaaaattacggcagaatatacagagctccgtaaaattacactcaatttggcgcagtatgactgtattttgtcgttagcagccacatcatgcaacgtaaattatgttagaccaacttttgtgaatggtcaacaagccataatcgcaaaaaatgcaagaaatccaattatcgagtcgctggatgttcattatgtaccaaatgatatcatgatgtccccagaaaacggtaaaatcaatattataacggggccgaatatgggtgggaaatcatcttatattagacaagtggcactgcttactataatggcacagatcggctcatttgtccccgcagaagagatcagattaagcatatttgaaaacgtactcactcgaatcggtgcgcatgatgatattataaacggtgattctacttttaaggtggaaatgcttgatatcctacacatcttgaaaaattgcaataaacggtctttactattattagacgaagtgggaagaggtactggcacacacgatggtatagcaatttcttatgctttaataaagtatttttctgagttaagtgactgccccttgatattatttactacccattttcccatgctgggagaaatcaaatctccgttaataaggaattatcatatggattacgtggaagaacaaaaaactggcgaggactggatgagtgtaatttttctatataagttaaaaaaaggattgacttataatagttatgggatgaatgtggcgaaattggcacgcctggacaaagatattataaatcgggcattcagtatttcagaagaattgcggaaggaatccattaacgaagacgcgttgaaattattcagctctttgaaaagaatattaaaaagtgataatataacagcaacggataaactcgcgaaattactatcattggatatccactga

SEQ ID NO: 75787 - DNA, 6327 bp, Saccharomyces pastorianus
atgctatcggccacataccgtgatttgaacacagcatctaatttagaaacatcaaaggaaaaacaggccgctcaaatcgtcattgcacaaattagtttattattcacgactcttaacaacgacaattttgaatccgtggaaagagaaattagacatattttagacaggtcgtccgtagatatttacataaaagtttgggaacgattattaaccttaagttctcgggatattttacaagcgggaaaatttttacttcacgaaaatttactacacagactactattagaatttgcgaaggatttaccgaagaaaagcacagaccttattgagcttttgaaagaacgaaccttcaataaccaggagtttcaaaaacaaacaggaattacattatcacttttcattgatctatttgataaatctgcaaacaaggacattatagagtcacttgaccgctcctctcagattaacgatttcaagacaattaagatgaatcatacaaattatttaaggaatttttttcttcaaaccacaccagaaacactagagtccaatctacgcgacttattgcattccttggaaggtgaaagtctaaatgacttattagctcttttactgtccgaaatactttcacctgggtctcagaatttacaaaatgatcccacacggagttggttgacacctccgatggttttagacgcaacgaaccgtgggaacgttatagcaagatctataagttctctgcaagccaaccagataaattggaatcgtgtgtttaatttaatgtcaacaaagtatttcttgagcgcaccattgatgcctactacagcatctttgagttgcttatttgcagcattacacgatggtccagttattgatgaatttttcagttgcgactggaaagttattttcaaactagatttggccattcaacttcataagtggtcggtacagaatggttgctttgacttattaaatgcagaaggtaccaggaaagtttctgaaaccatcccaaacacaaagcaatctttactctacttattatccattgcatcattgaatttagaattgttcctacaaagggaggaattgtctgatggtcctatgctagcttattttcaagagtgcttctttgaagatttcaactacgcccctgaatatcttattttagcattagtcaaagaaatgaagcggttcgttttattgatagaaaacaggacagtcatagacgaaatacttattaccttattgattcaagtgcataataaatcaccatcatcgttcaaggacgttatttctacaataaccgatgattctaaaatcgtagatgcagcaaaaatcataatcaactcgtatgacgcacctattgccaactttttaaaatcgttgttagatacgggaagattagatacggtcattaataaacttcctttcaatgaagcttttaaaattttgccatgcgcaagacaaattggttgggaggggttcgatactttcttaaaaacaaaagtttctccatctaatgtcgatgtagtgctggaatcactagaggctcaaacgaaaatgactgatacaaacactccatttaggtcattaaagacatttgacttattcgcttttcattcattaattgaagtattgaacaaatgcccactagatgttctccaattacaaaggtttgaatccttggaattttccttattaattgcttttcctagattgatcaattttggttttggacacgatgaagctattttagccaatggtgacatcgcagggattaataatgatattgaaaaggagatgcagaactatttacagaaaatgtatagtggtgagttagccattaaagatgtaatcgaacttctgagaaggttaagagatagcgacttgccaagggaccaggaagtcttcacatgtattacccatgccgttatagcagaatcgacattcttccaagattatccattggatgcattggctactacatctgttctttttggatccatgattctctttcaactgttacgtggattcgtattagacgtcgcatttaggataatcatgaggtttgccaaggagcctccagagtccaagatgtttaagtttgctgtacaagctatttatgcatttaggatacgtttggccgaatatccacagtattgtaaggacctcttgagagatgttccggctttgaagtctcaggctcaagtttaccaatctatcgtcgaagctgctaccctagcaaatgctccaaaggaaaggtcaagacccgtccaggaaatgatcccattaaaattttttgctgtagatgaagtttcatgtcagatcaatcaagaaggtgctcctaaagatgtcgtagaaaaagttctttttgttctcaacaacgttactctggctaacttgaataataaggttgatgaattgaaaaaaagtttgacaccaaattatttttcttggttttccacatatttagttacgcaaagggctaaaacagaacctaactatcatgatctttatagcaaggttatagttgctatggggtcagggttgctacatcagttcatggtcaacgttactttgagacaattatttgtcctactatctacaaaagacgagcaagccatcgataaaaagcacctaaagaatttggcttcatggttaggatgtatcacattagctttgaataaaccaattaaacacaagaatatcgcattcagggaaatgttaatcgaagcttataaggaaaatagacttgaaatagttgtgccttttgtaacaaagattttacaaagggcttctgaatcaaaaattttcaagcctccaaatccctggactgttggcatattaaagctgttgattgagttgaacgaaaaagcaaactggaaattaagtttgactttcgaagttgaggttttattaaaatcttttaatttgaccaccaaatctctcaagccctcgaatttcatcaatactccggaagttatagaaactttatccggtgctttgggatcaatcactctggagcaacaacaaacagagcaacaaaggcaaattatactaatgcaacaacaccagcaacagatgctaatatatcaacagagacaacaacaacaacaacaaaggcaacaacaacaacaacatcatattagtgcaaatacaatcgcagaccaacaagcggcatttggcggcgagggttcaatttcacacgacaatccttttaacaacttacttggttctactatttttgtaacccaccctgacttgaagagggtatttcaaatggctttagccaagtcagttcgcgaaattttgttggaagtagtcgaaaagtcatcaggaattgctgttgttacgacgacaaaaataatacttaaagactttgccactgaagttgatgagtctaagttgaagacggctgcaatcattatggtaaggcatttggcacaaagtttagctcgagctacttcaattgaaccattgaaagaaggcatacgttctactatgcaatcactagcaccgaatttaatgtctctttcttcttcacctgcagaggagcttgacacggcaataaatgaaaatattggcattgctctagttttgattgagaaagcatctatggacaagtctactcaagatttagcagaccaattgatgcaagcgattgctattcgtcgttatcacaaggaaagaagggcagaccaaccatttattacgcaaaataccaatccatattcactgtctttaccagaacctcttggtttgaaaaacactggtgttactcctcaacaattcagggtatacgaagaatttggtaagaatattccaaacttggatgttattccgtttgcaggattgcccgctcacgctccaccgatgactcaaaatgtgggtttaactcagcctcagcaacaacaagcgcaaatgcctacccaaatcctaacctccgaacaaataagagctcaacaacaacagcagcaattacagaaaagccgtttgaatcagccatcccagtcggctcaacctccaggagtgaatgtcccaaatcctcaaggtgggattgctgcagttcaatcagatttggaacagaatcaacgtgttctcgttcacctcatggacattttagtttctcaaattaaagaaaatgctacgaagaataacttagctgaattaggcgatcaaaaccaaattaaaaccatcatttttcaaattttgacattcattgcaaaaagcgcacaaaaggatcaattagctttaaaggtatcccaagctgtcgttaatagcctttttgccactagtgagagtcctctctgcagagaagttttgtccctacttttggaaaagttatgttctttatccctcgttgctagaaaagacgttgtctggtggttagtttatgccttggacagtaggaaattcaatgttcccgttatcagatcccttctagaagttaatttaattgatgctacagaattagataacgttttagttactgcaatgaaaaataaaatggagaactcaactgaatttgctatgaaattaattcagaatactgtcttgtctgatgatccaattttgatgagaatggacttcattaaaaccttagaacacttggcctcttcggaagatgaaaatgtaaagaaattcatcaaagagttcgaagatactaagataatgccagtgaggaaaggtaccaaaaccacaagaacagaaaagttttacttagtatttacggaatgggtaaaattacttcaaagagttgagaataacgacgtaatcacaactgtttttatcaagcaattaatcgaaaagggtgttatcagcgatactgataatttacttacatttgtcaaaagttctcttgagctatcagtttcttcattcaaagaaagtgacccgactgatgaggttttcatcgctattgatgctctaggatcgctaattataaaattgttgattttacagggtttcaaagatgatacaagaagagattacataaatgcaatattttctgtgatcgttttagtgtttggtaaggatcatagccaagagggtaccacattcaatgaacgaccatatttcagactattttctaacatcttatacgaatgggctaccatcaggacgcacaattttgttagaatatctgattccagcactaggcaggagctgatcgaatttgattctgtattttacaacactttctcaggatatttgcacgctctgcaaccatttgccttccctggattctcatttgcatgggtgacactattatcacacagaatgttattaccaattatgctaagattacccaataaaataggttgggaaaagttaatgcttttgattatcgatttgtttaaatttttggaccaatacacaagtaaacatgcagtctctgacgctgtttcggttgtttataagggaacactgcgtgttattttaggcatttcgaatgatatgccatcctttttgattgaaaatcactatgaattaatgaacaatctacctccaacatatttccaactaaagaatgttattttatctgctattcctaagaatatgaccgttcccaacccatatgacgtggatcttaatatggaggatattccagcatgtaaagaactacctgaagtcttctttgatcctgtaattgatttacactcattgaaaaagccagttgacaactacctacgtattccctcaaattcattattaagaacaatactaagcgctatttacaaggatacctatgacataaaaaagggcgtaggctacgactttttatctgttgatagtaaattaattcgcgctattgtattacatgtgggcattgaagctggaatagagtataagagaacttcttcaaatgcggtatttaatacgaagtcttcttattatactttattgttcaatctgattcaaaatggtagcatcgaaatgaaatatcaaattattctgtctattgtggaacaattgcggtatccaaacatccacacctattggttcagctttgtgttaatgaatatgttcaaaagtgacgaatggaatgatcaaaaacttgaagtccaagaaattattttaagaaactttttaaaaagaattattgttaacaaaccacatacctggggtgtttcagttttctttactcagttgataaacaataacgatattaatcttttagacctgccctttgtacaaagtgttcccgaaattaaactaattttacaacaattagtaaaatattccaaaaaatacacaaccagtgaacaagatgaccaatccgccaccatcaatagaaggcaaacccctctacaatccaacgcataa

SEQ ID NO: 75788 - DNA, 1176 bp, Saccharomyces pastorianus
atggtttcattgttcaaaagaggtaaggctccaccgctcacgaaagaaggccccacttctaaaaagcctcctaacacagcgtttagacaacaaaggcttaaggcatggcaaccaatactgtctcctcaaagtgtgcttccgttgttaatattcgttgcatgtatatttactcctattggtattggactcattgtaagcgctactaaggtacaagatctaacaattgattatagtcattgtaatacaaaagcatctacaactgcttttgaagatataccaaagaagtacattaaatatcactttaaaagtaaagttgaaaataaaccacaatggaggctaaccgaaaatgaaaatggcgaacaatcatgcgaactgcagttcgaaatcccaaacgatatcaagaaatccatttttatatattataaaataaccaatttttatcaaaatcatcgcagatatgtccaatcgtttgacacaaagcaaatattaggggagcctatcaaaaaagatgatctggatacaagctgtagtccaataagaagtagggaagacaaaataatatatccctgtgggttgatcgctaattccatgtttaatgatacattttctcaggtgttgagtggtatagatgacacagaagactataatttaactaacaagcatatatcatggagtattgatcgtcacagatttaaaaccaccaagtataatgctagcgatattgttccaccgccaaactggatgaagaagtatcccgatgggtacacagatgaaaatcttcctgatatccatacttgggaagagttccaggtatggatgaggactgcagcctttcccaagttttacaagttggcgttgaaaaatgaatctgcttctttaccgaagggtaaatatcaaatgaacattgagttgaattatccgatttcactctttggtggcacaaaatcatttgtactgactacaaatggagctattggtggtagaaatatgtcactaggcgtactgtacctcatcgttgcagggctttgcgccttatttggcatcatttttttggttaaattaatcttccaaccaagagcgatgggtgatcacacttatttgaattttgatgatgaagaaaacgaggattatgaggatgtacacgcagagaatacaacattgagggaaattttatag

SEQ ID NO: 75789 - DNA, 1089 bp, Saccharomyces pastorianus
atgctggttccacctgctaactttgggattgctgaagaaggaatatatagatgttctaaagtggagacattaaatttatcctttctggaaactctcaatttaaagacagctatatttattggaggtcaagaaccatccaagtttttcaaagattttttcacaagatcatccataaaatggattgttttaaggatgtctgatttctcggctgcggcagttccggtaaaaagctcttctgtatctaacgcaaatttatattcgaataataacagtactctatcattacaggaagaaaagaaaaaatccactgcaaatgggtcacaaaattctactacaggggatcctgtaattcaggaggaattggcttaccacttgactgacaatgatgacttaatgctgattaagagcacgtgtttaaaaagaactttcaaaacattattgaatgtggataattataatgttttattggtagataagaccgcgttggtcattggtatacttcgaaaaattcagaaatggaatattgcatcaatcataaatgagtacagattattttctggtaagaatagaaattattttgcggaaacatttctagaaataattaacattgagatagaacaggagaaggataataagacaattgtggacaacaaagcaaaaaaattgccccttgagaataataggacgcattcgatagagtataaggccaattctggcaaacttattagagtaaatgaagatgacctttgcagagagccagaagtgcctcagcggcttttgacattaataaatcaaatcgaaaccaaagtgaaaaataataaagtattacaagtaagtggagttctaggagacgatttgaagaaaacctcttctgaccttggaatatttggccataggtatagattagcatttaataaaaaagaaaatggagattatggctattataaagcaaggggaaaagataacgtcaaaataaggataccctgtgattctgaattaccagattggttcaagtttcaacgagatttgtgggaaaaagaaaacgttccggaagagcatcacttttatagggaacatatttttacatag

SEQ ID NO: 75790 - DNA, 267 bp, Saccharomyces pastorianus
atgctgaagtacgtggtgacggatattgggaagatgtgtttgtacatttggccttatagagtgtggtcgtggcggaggttgtttatctttcgagtactgaatgttgtcagtatagctatcctatttgaaactccccatcgtcttgctcttgttctcaatgtttgtttatatactcatatttctatgtgtttatacaattgctattgtttatataatgtagtgacattttctcttaatcttatactaatttctatgacatttatataa

SEQ ID NO: 75791 - DNA, 1557 bp, Saccharomyces pastorianus
atggaagataaagatatcacatcggtaaatgagaaggaagtgaacgagaacactaattctagaataataaaatatgatgccgagaggcgtgcaacccgtactgaaacctcaaagaaagataaatggaaaaacatagttacaatcattgcgtccggttttgctctaataagtgatggttacgtaaatggttcaatgagtatgctgaacaaggtttttgttatggagtacggtaagaaaaactatagctcaaaagtgtcgactagagtttccaacgcagccttagttggtattatttttggccaattctttatgggtatcgctgctgattattatagtagaaaatcttgtatccttgtggccactgctatcttggttattggtagtgctctgtgtgctgcctctcacggtactactgtacctggcatgttttggatgttaacagttatgagaggtttggtaggtattggtgttggtgcagaatatcccactagtacattaagtgctaatgagtctgctaatgaatataccactaccaaaagaggtggtatcctggttatggtgacaaatttgccactagccttcggtggtccatttgctacgatcatctttttaatcgtctacaaaatctgttcaggaacaaaacatttagaggcgatctggaggactgtttttgcaatagggtgcttttggccattgagtgtgttctattttagatggaagactgctactacagaagtctatgaaaaaggtagaatcaagagaaatataccatatttcctagcattgaaattttattggaaaaggttacttggtacatgtggtacatggtttatgtatgattttgttaccttcccaaatggtattttcagttcaacaattataagttccgttatcaaggaccaaaatgatttagtaaaagtggcagagtggaacttactgttgggagttttagctgtactgggtgtaccaattggtgcttatctgtccgatcgtattggtcgtaaatatacgttgatgtttggtttctctgggtacatcatctttggtctaatcattggatgtgcgtacgaccaattgaaaaaaatcacccccttgtttattatcttctacgcattcatgaatatgttaggtaatgctggaccaggtgatatgcttggtgttattagtagtgaagcgtcagcaaccgctgttagaggtgttttctatggtttatctgctgtgactggtaaaatcggttctgtagtaggcgtcgaatgtttccaacccattagggataatttgggtgcaagatggacttttattattgctgcaatttgtggtcttattggtatcattattacatatttctttgttccacattctcttgaaagcgatttaatgaagcaagacgttgaatttcacaactatttggtatccaatggctggactggtaagatgggatttgatgagacagatgaagaatcaatggttagaactattgaagttgaagagaatggtactaattgtagtaagaaaaacgcagaaataatttcagtcagacaggtcgatcaaagttga

SEQ ID NO: 75792 - DNA, 468 bp, Saccharomyces pastorianus
atgcgatcgatttttctgctgcatttgactataaaacgtgtgaggaggaagattttcgaagactggaatttggcagatgggaaatgccttaatggcgccaaatacatgtataaaaggaggaaagaggacgcccgttgtttggtaaaaaggacattcaaagatatgattttgcatgaaataccttgtgacagttgtactgaatccgactacgaatgctcttctgaatttgttagagatgcaaagggtgactgtataccagattatgatcagattgccctttccgatatatgtgacaaagctaatggcgaaactgtatcattagagccattacaattaattaaaggagataaatgcaaaaagcccatggaaattgaggccatgaacattccatgtgaaaaaatcctgagggagagctcgaatggcaagaaaatagtaaccattgaaaacaagtttgactttgaaatttaa

SEQ ID NO: 75793 - DNA, 1107 bp, Saccharomyces pastorianus
atgaaggctgtcgtcattgaagacggtaaagcggttgtcaaagagggcgttcccattcctgaattggaacaaggattcgtattgattaagacactcgctgttgctggtaacccgactgattgggcacacattgactacaaggtcgggcctcaaggatctattctgggatgtgacgctgccggccaaattgtcaaattgggcccagccgtcgatcctaaagacttttctattggtgattatatttatgggttcattcacggatcttccgtaaggtttccttccaatggtgcttttgctgaatattctgctatttcaactgtggttgcctacaaatcacccaatgaactcaaatttttgggtgaagatgttctacctgccggccctgtcaggtctttggaaggggcagccactatcccagtgtcactgaccacagctggcttggtgttgacctataacttgggcttgaacctgaagtgggagccatcaaccccacaaagaaacggccccatcttattatggggcggtgcaactgcagtaggtcagtcgctcatccaattagccaataaattgaatggcttcaccaagatcattgttgtggcttctcggaaacacgaaaaactgttgaaagaatatggtgctgatgaactatttgattaccatgatattggcgtggtagaacaaattaaacacaagtacaacaatatctcgtatttagtcgactgtgtcgcgaatcaaaatacgcttcaacaagtgtacaaatgtgcggccgataaacaggatgctaccgttgtcgaattaactaatttgacagaagaaaacgtcaaaaaggagaataggaggcaaaatgtcactattgacagaacaagactgtattcaataggcggccatgaagtaccatttggtggcattactttccctgctgacccagaagccaggagagctgccaccgaattcgtcaagttcatcaatccaaagattagtgatgggcaaattcaccatattccagcaagggtctataagaacgggctttacgatgttcctcgtatcctggaagacattaaaatcggtaagaactctggtgaaaaactagttgccgtattaaactag

SEQ ID NO: 75794 - DNA, 198 bp, Saccharomyces pastorianus
atgtatttgctgagaggaaaagtttggaagaacaaaaagtatttctttaatggagctgattatcaagcattctttacggggagctttcgaaattttttatattcaaggacatttatgttgtgtgggttattaaacgtgggactttggaaatacatccaagaagcacaattgagctctaacgatgaaccgttaccataa

SEQ ID NO: 75795 - DNA, 198 bp, Saccharomyces pastorianus; identical to SEQ ID NO: 75794

SEQ ID NO: 75796 - DNA, 372 bp, Saccharomyces pastorianus
atgaacgtaactgaaaatgctctattgtttaagtgcggtagcaagggctatattaatcaaacctatacgccgacagaaatttataattgtggggtagctgaaggaaagaaaactgctaaagaaaagaacccaacttattcaattttttatgatacatttctcactgggcagcctgctgaaagtcctgaaacgtttacgtgtggttcgcatggcttcacaaatgcgagttatgtggcaagcgacttttatgcatgtggttttctgcaagggaaaggtacagaaaccaatgcgggaatacataatacaaggccttctcattctctcgccaaatttatcatactgttcatgctagtgttgtatacaattgtctaa

SEQ ID NO: 75797 - DNA, 138 bp, Saccharomyces pastorianus
atgacgtttcagatcctgttcttatttgttttccattttgtttacatcttccgtgcccatcaatacccggcatactttgaagacgaaaaagatacctacataaagataaggatatactcgccaagattgatttcttga

SEQ ID NO: 75798 - DNA, 939 bp, Saccharomyces pastorianus
atgactgctcaacaaggtgtaccaataaagataaccaataaggagattgctcaagaattcttggacaaatatgacacgtttctgttcgattgtgatggtgtattatggttaggctctcaagcattaccatacaccctggaaattctaaaccttttgaagcaattgggcaaacaactgatcttcgttacgaataactctaccaagtcccgtttagcatacacgaaaaagtttgcttcgtttggtattgatgtcaaagaagaacagattttcacctctggttatgcgtcagctgtttatattcgtgactttctgaaattgcagcctggcaaagataaggtatgggtatttggagaaagcggtattggtgaagaattgaaactaatggggtacgaatctctaggaggtgccgattccagattggatacgccgttcgatgcagctaaatcaccatttttggtgaacggccttgataaggatgttagttgtgttattgctgggttagacacgaaggtaaattaccaccgtttggctgttacactgcagtatttgcagaaggattctgttcactttgttggtacaaatgttgattctactttcccgcaaaagggatatacatttcccggtgcaggctccatgattgaatcattggcattctcatctaataggaggccatcgtactgtggtaagccaaatcaaaatatgctaaacagcatcatatcggcattcaaccttgatagatcaaagtgctgtatggttggtgacagattaaacaccgatatgaaattcggtgttgaaggtgggttaggtggcacactactcgttttgagtggtattgaaacggaagagagagccttgaagatttcgcacgattatccaagacctaaattttacattgataaacttggtgacatctacaccttaaccaataatgagttatag

SEQ ID NO: 75799 - DNA, 504 bp, Saccharomyces pastorianus
atgtctactattccctcagaaatcatcaattggaccatcttaaatgaaattatatctatggacgatgatgattccgatttttctaaaggtctaattattcaatttatcgaccaggcacaaacaacttttgctcaaatgcaacgacagctggacggtgaaaaaaatcttaccgaattagacaatctgggccattttttaaagggttcttctgctgcattaggcttacaaagaattgcctgggtttgtgaaagaattcaaaacttgggaagaaaaatggaacatttcttccccaacaagaccgaattggtcaacactctgagcgataaatcgattattaatggaatcaatattgatgaagatgacgaggaaataaagatacaagtggacgataaagacgaaaattccatatatctcatcttgatagcaaaagctttgaaccagtctaggttcgagttcaaactggcgagaattgagttatctaaatattacaacacaaacctataa

SEQ ID NO: 75800 - DNA, 111 bp, Saccharomyces pastorianus
atgatctctgatgaacagctgaactccttggccatcaccttcggtattgtgatgatgactttaattgtcatttaccatgctgttgactccaccatgtctcctaagaactaa

SEQ ID NO: 75801 - DNA, 1008 bp, Saccharomyces pastorianus
atggcagctgcaccatggtatattagacagcgtgacacggatttattgggtaaattcaagttcatacagaatcaagaagacggcagattaagggaagctacaaacggaacggtgaattcacgatggtcgttgggggtcagcatagaacctcgtaacgatgctagaaacagatacgttaacattatgccgtatgagaggaaccgcgttcatttgaagactctatccgggaatgattacattaatgcctcgtatgtcaaagtgaacgtgccagggcagagcatcgaaccgggctactatattgctactcaaggtcccacgcgtaaaacttgggatcagttttggcaaatgtgctatcacaattgtcctttagacaatattgtcattgtgatggtcacgcctctggtagaatacaatagggagaagtgctaccagtactggcctcgcggtggtgtagacgatacggttagaatagcatcaaaatgggaaagtccgggcggcgccaatgatatgactcaatttccctctgatttgaaaatagagtttgttaacgtacataaggtgaaggactattatacggtcaccgatatcaaactcacacccacggaccctcttgtaggacctgtcaaaactgttcaccacttttacttcgacctttggaaagatatgaacaagccagaggaagtagtacccataatggaattatgcgctcactcccacagcttgaattcccgcgggaaccccattatcgtacactgttccgcaggcgtgggcagaacggggacgttcattgccctagatcatctcatgcatgataccttggattttaaaaatattacagaacggtcaaggcattcagacagggctacagaggagtacacacgggacttgatcgaacagatcgtgttacagttacgctcgcaaagaatgaaaatggttcagacaaaggatcagttcctatttatctaccatgctgccaagtatcttaacagtctttccgtgaaccaatag

SEQ ID NO: 75802 - DNA, 642 bp, Saccharomyces pastorianus
atgaatgcagtctcaacgagaagacatggccttggtgacaactctcttcaaaccaacttcagcctttctcaattcatcagcagatgggtcttcgatttgcaaagcagccaaagcgtcggacaaagcagcttcaatcttggacttggaacctctcttcaatttagaagacaagactgggtcagtgacagtttgttcgatggaggcaacgtaggattccaatctttgtctagcttcgtgcttcttggcaaaagcttcatcggcagccttgaactcttcagcttggttaaccatcttttcaatttcttcagaagacaatctaccaacagcgttagagatagtgatgttagaagacttaccggtagacttttcgacggcagtaaccttcaagataccgttagcatcaacttcgaagatagcttccaagactggttcaccagctggcatcattgggatgttcttcaagtcgaattcacccaacaaagtgttttctttacagttaacacgttcaccttggtagactgggaattgaacggtgttttggttgtcagcacatgtagtaaaggttcttctcttgatggttggaacagtagtgtttcttggaacaacgataccgaacatgtcaccttgcataccaacacctag

SEQ ID NO: 75803 - DNA, 1761 bp, Saccharomyces pastorianus
atgctttctgaaaacacgactattctgatggctaacggtgaaattaaagacatcgcaaacgtcacggctaactcttacgttatgtgcgcagatggctccgctgcccgcgtcataaatgtcacacagggctatcagaaaatctataatatacagcaaaaaaccaaacacagagcttttgaaggtgaacctggtaggttagatcccaggcgtagaacagtttatcagcgtcttgcattacaatgtactgcaggtcataaattgtcagtcagggtccctaccaaaccactgttggaaaaaagtggtagaaatgccaccaaatataaagtgagatggagaaatctgcagcaatgtcagacgcttgatggtaagataataataattccaaaaaaccatcataagacattccaaatgacagttgaaggtgagtttgccgcaaaacgcttcatagaagaaatggagcgctctaaaggagaatatttcaactttgacattgaagttagagatttggattatcttgatgctcaattgagaatttctagctgcataagatttggtccagtactcgcaggaaatggtgttttatctaaatttctcactggacgtagtgaccttgtaactcctgctgtaaaaagtatggcttggatgcttggtctgtggttaggtgacgatacaacaaaagagccagaaatatcagtagatagcttggatcctaagctaatggagagtttaagagaaaatgcgaaaatctggggtctctaccttacggtttgtgacgatcacgttccgctacgtgccaaacatgtaaggcttcattatggagatggtccagatgaaaacaggaagacaaggaatttgaggaaaaataatccattctggaaagctgtcacaattttaaagtttaaaagggatcttgatggagagaagcaaatccctgaatttatgtacggcgagcatatagaagttcgtgaagcattcttagccggcttgatcgactcagatgggtacgttgtgaaaaagggcgaaggccctgaatcttataaaatagcaattcaaactgtttattcatccattatggacggaattgtccatatttcaagatctcttggtatgtcagctactgtgacgaccaggtcagctagggaggaaatcattgaaggaagaaaagtccaatgtcaatttacatgcgactgtaatgttgctgggggaacaactttacagaatgttttgtcatattgtcgaagtggtcacaaaacaagagaagttccgccaattataaaaagggaacccgtatatttcagcttcacggatgatttccagggtgagagtactgtatatgggcttacgatagaaggccataaaaatttcttgcttggcaacaaaatagaagtgaaatcatgtcgaggctgctgtgtgggagaacagcttaaaatatcacaaaaaaagaatctaaaacactgtgttgcttgtcccagaaagggaatcaagtatttttataaagattggagtggtaaaaatcgagtatgtgctagatgctatggaagatacaaattcagcggtcatcactgtataaattgcaagtatgtaccagaagcacgtgaagtgaaaaaggcaaaagacaaaggcgaaaaattgggcattacgcccgaaggtttgccagttaaaggaccagagtgtataaaatgtggcggaatcttacagtttgatgctgtccgcgggcctcataagagttgtggtaacaacgcaggtgcgcgcatctgctaa

SEQ ID NO: 75804 - DNA, 1059 bp, Saccharomyces pastorianus
atgtcagattggaaagtggacccagatacccgtaggcgtcttttgcaattgcaaaagattggtgcaaataagaaatgtatagattgtggtgcgccaaatccacaatgggccacgcctaagtttggagctttcatttgccttgaatgtgccggtatccatagagggcttggtgtgcatatatcttttgtaagatctatcactatggatcagtttaaaccggaggaacttcttcgtatggaaaaaggtggtaacgaacctttgactgaatggttcaagtcgcataatattgacctgagtttaccacaaaaagtgaagtacgataaccccgtcgcagaggattataaagaaaagttaacatgtctttgcgaagatagagtatttgaagagcgtgagcatttggattttgatgcttccaagttatcagcaacctctcaaacccctgcatccgctacgcctggtgttgctcaaagtcgagaagggacaccactggagaaccgtcgatctgcaacaccagcaaactctagtaatggtgccaattttcaaaaggagaagaacgaagcttattttgctgagctgggcaagaagaaccaatctagaccagatcatttgcccccttctcaaggtggtaaatatcagggctttggaagtacacccgcaaaacctccacaagaacggtctgcagggtccagcaatactttgagcctggaaaattttcaagctgatcctttgggaacattgagcagaggatggggcctcttctccagcgctgtaaccaaatcgttcgaggacgtaaacgaaacggttattaagcctcacgtccagcaatggcaatccggagagttgtcagaagaaacgaagagagcagctgcccagtttggccaaaagtttcaagaaacgagtagttatggattccaagcatttagtaacttcactaaaaatttcaatggtaatgcagaggatagctctacagcagggaatacaacccatacagaatatcaaaagattgataataacgataagaagaatgaacaggacgaggacaaatgggacgatttctaa

SEQ ID NO: 75805 - DNA, 930 bp, Saccharomyces pastorianus
atgattttcaaaaggttcgttaatttgcttgtgtttttattcctactcggtgctggcttattgacgttttttcttattctgtcaggaggcagagaatctggaacgctgaaaaatttttattggttacaggctgatacaaacggctttaacagcgctccatcgaccacgagatggtacaattacaattggtgcggctacgaagacggccagctagctaattgctctagcagggcgcccgccaagcctttctctcccagagacaattttggtaactctgtcaatttaccatcgtcgttcagaaacaaccgggatacctactattatctatccagggttggatgggccatgctgctgatttccctatttttcatcgtactggcgctggtacccggctttctggctaccttccttcctttcaaggcagtgccagtcctgtactgtgtgttgtcctggttggcctttttcttcattatattggctgcatgcttgtacacaggttgctatgtgaaggccagaaagaccttccgcaacagcgggaggtctgcaaggctgggacccaaaaactttgcgttcatctggacttcggtcttcttgatgctcgtgaacgccatttggtccactatattcagtgctacccacaaggcccactctacctactcggaccacgacatgtatgcccaatatgaaagcccttctgttgacaccggtgctcaaatggagaaatccacttacaatagtggggcgacggacggcgcgggccctgtcacagccgcacctgtggttggacagcctcaacctacaaccaccactactccggctggcaatggcaagttctttcaaaaactgaaaacaagaaagcaggtgccatcagctgagttagaaccagctggggatggtggtcttgccgggccagtgacggtacgcgactag

SEQ ID NO: 75806 - DNA, 552 bp, Saccharomyces pastorianus
atgcccctcctcattccagactatccttgttttagcatcaagaaggaaggaagacccttcattggctcttgcttcttaccactcccctctttcccttttccttcgtgtgaaaacgttccactcccttatattcagagcacccttaaatttggttatttggtcttttttttttatattactccgagacgtcactgcaatttggcaccgccgcgttgggctgcgcggatcatgtcttacgaggtgggaacggctccggcgtcatcgttattatcctcctcctttttcacggtgacgccattttgcgcggcaagaagtctcagaggattgacggtagcattaattgcgcaatcaagactccctgaatcaggagccgctgcaaccttcggatgggccagctgttgttgcaattcccgaaaggtgcattcaattgggcaccagatctggagtgccacggtagtgtcagggaacagcgtgagcgaggaggttatattgaatttaaatgaatggccgagaaattgtgccaattgcgtatatttttcctcaagaggctga

SEQ ID NO: 75807 - DNA, 624 bp, Saccharomyces pastorianus
atggtgtacacaggatttggtttggagcagataagtccagctcaaaagaaaccttataatgaactaactccggaagaacagggtgaacggggtgctgaaatgatcatgaacttcatgacttcctgtcctggaaaatcagttgtgagtggtgtaacagggtttgcactgggtggtgttttaggcctgttcatggcgtcaatggcatatgatacacctcttcatacacctacacctgcaaatacagcagcaactgcaactgcgggaaatataggcgtgggtggaatatcaagaacagttcagcaaatatctgatttacctttccggcagcaaatgaaacttcaatttaccgatatgggtaaaaaatcctactctagtgctaagaattttggctacattggtatgatatatgctggggttgagtgtgtcatagagtcacttagagctaaaaatgatatttacaacggagtaaccgcagggttttttaccggtgctgggctggcatacaaagctggaccacaagctgctttaatgggtggtgccgggtttgctgccttttcagctgcaattgatttgtatatgaaaagtgaggatggtagaccaccacaaaacgattttaaagaatga

SEQ ID NO: 75808 - DNA, 3279 bp, Saccharomyces pastorianus
atgctttttgataacaaaaatcgcggtgctttaaactcactgaacacaccagatattgcttctttatcaatatcatccatgtcggactatcacgtgtttgattttcccggtaaggacctgcagagagaggaagtgatagatttgctagatcagcaaggatttattcccgacgatttgatcgaacaagaagtagattggttttataactcattgggtattgacgatttgttcttctcgagagaatctccccaattaatctcgaatatcatacattctttgtatgcttcaaagctagatttctttgcgaagtccaaattcaacggaattcagccaaggctattcagcattaaaaacaaaattataactaatgataatcatgccatctttatggaatctaatactggtgtcagcataagcgattctcagcaaaaaaactttaaatttgctagtgaagccgtcggaaacgatactttggagcatggtaaggataccatcaaaaaaaataggattgaaatggatgattcttgtccaccttatgaattagattccgaaattgatgaccttttcctggataacaagtctcaaaaaaactgcagattagtttctttttgggctccagaaagcgaattaaagctaacttttgtttatgagagtgtttaccctaatgatgatccagccggcgtagatatttcctctcaggatttgctgaaaggtgatattgaatctattagtgataagaccatgtacaaagtttcgtcgaacgaaaataaaaaactatacggtctcttacttaagttggttaaagaaagagaaggtcctgtcattaagactactcgctccgtagaaaataaggatgaaattaggttattagtcgcttacaagcgattcaccactaagcgttattactctgctttgaactctttgttccactattacaagttgaaaccttctaagttctatttggagtcgtttaatgttaaggatgatgacatcattatcttttccgtttatttgaacgagaaccagcaattggaagatgttctactccatgatgtggaggcagcattgaaacaggttgaaagagaagcttcattgctatacgctatcccaaacaattctttccatgaggtttaccagagacgtcaattctcgcccaaagaagctatatatgctcatattggtgctatattcattaaccattttgttaatcgtttaggctctgattatcaaaaccttttatctcaaatcaccattaagcgtaatgatactactcttttggagattgtagaaaacctaaaaagaaagttaagaaatgaaaccttaactcagcaaactattatcaacatcatgtcgaagcattacactataatttccaagttgtataaaaattttgctcaaattcactattatcataatagtactaaagatatggaaaagacattatcttttcaaagactggaaaaagtggagccttttaagaatgaccaagagttcgaagcttacttgaataaattcattccaaatgattcacctgatttgttgatcttgaaaacactgaacatcttcaacaagtctattttaaagacaaatttctttattacaagaaaagtagcaatatcattcagattggatccttccctggtgatgacaaaattcgaatatccagagacaccctatggtatattttttgtcgttggtaatactttcaaagggttccatatcaggttcagagatatcgcaaggggcggtattcgtatagtctgttccaggaatcaggatatttatgatttgaattccaagaacgttattgatgagaactatcaattggcctctactcagcaacgtaaaaataaggatattccagagggtggctctaaaggtgtcatcttattgaacccaggattggtagaacatgaccagacatttgtcgccttttcccaatatgtggatgcaatggttgacattctaatcaacgatccattaaaggaaaactatgtcaaccttttaccaaaggaggaaatattattttttggcccagatgaaggaactgctggtttcgtggattgggcaactaacaatgctcgtgtgaggaactgcccatggtggaaatcatttttgactggaaaatccccatctttgggtggtattccccatgacgaatatggtatgacttctctgggtgttcgtgcttatgttaataaaatttacgaaactttaaacttgacaaattctactgtttacaaattccaaactggtggtccggatggtgatttaggatccaatgaaattcttttatcttcgccaaacgaatgttatttggcaattctggacggttcaggtgtcctgtgtgatcctaaaggtttagataaagatgaattatgccgcttggcacatgcaaggaaaatgatttccgatttcgacacttccaaattatcaaacaacggattttttgtttctgtggatgcaatggatatcatgctaccaaatggtacaattgtagctaacggcacaaccttcagaaacacctttcatactcaaattttcaaatttgtggatcatgtcgacatttttgttccatgcggtggtagaccaaactcaattactctaaataatctacattattttgttgacgaaaagactgggaaatgtaaaatcccatatattgtggagggtgccaatctatttataacgcaacctgctaaaaatgctttagaggaacatggctgtattctgttcaaagatgcttctgccaacaaaggtggtgtcacatcttcatcaatggaagtgttggcctcactagcgcttaacgataacgacttcgtgcacaaatttattggagatgttagtggtgagaggtctgcgttgtacaagtcgtacgttgtagaagtgcagtcaagaattcagaaaaatgctgaattagagtttggtcagttatggaatttgaatcaactaaatggaacccacatttcagaaatttcaaaccaattgtccttcactataaacaaattgaacgacgatttagttgcttctcaagagttgtggctcaatgatctaaaattaagaaactacctattgttggataaaataattccaaaaattctgattgatgttgctgggcctcagtccgtattggaaaacattccagagagctatttgaaagttcttctgtcgagttacttatcaagcacttttgtttaccaaaacggtatcgatgttaacattggaaaattcttggaatttattggtgggttaaaaagagaagcggaggcaagtgcttga

SEQ ID NO: 75809 - DNA, 678 bp, Saccharomyces pastorianus
atggggtccgaggaagataaaaagttgaccaagaagcagctcaaagctcagcagttcagaaaaagtaaggaggaaaaagatcaagagaaagacgtaaaaaaagagcaagcaccagaaggaaaaagacccaacagtgcagccggaaatgatggtgaagaacccgtgaagaaaaaaagaaaaacacgtagaggccgtggtggtaagggcaaaaatggtaaaaagggcaacagatttattgtctttgtcggtagcttacctagagacatcactgctgttgaattgcaaaaccattttaaaaatagttcacccgaccagatccgtctcagagctgacaaaggtattgcatttttggaattcgatgctgacaaagatcgcaccggcattcaaagacgtatggacattgccttattacaacatgggaccttactgaaagagaagaagatcaatgtcgagctaactgttggcggaggtggtaacagtcaagagcgtctagaaaaattgaaaaacaaaaacatcaagttggatgaagaacgtaaagagaggttgacgaagatgattaacgacggcaaccaaaagaaaatcgccaaaactaccgccactgcagctcaaacctctggaacagacaacaagcctgttcctgcaggaattcatcctgatagagccaaactactcaaatga

SEQ ID NO: 75810 - DNA, 633 bp, Saccharomyces pastorianus
atgttctcatattcagatttctgttctatcggtacggccatgatcttatcggccacaacgttcctaatgggtgttttcttcagtaacatgccatacgattatcatcttttatttaatcctaactctactcaagagcatttcgatttggcactaagacattatcagattttacatgagactccattgccggtgattgttactttgtgcgttgttgccggaattggcttagttggtggtacaattaaggttttcaagccaaaccctgaactgcagatgtttgagtattgttcattggggttgtacgtgttggctatctgtgtgtttctcactaatgtgaaaacaggtatcgactgttctgtgagccataattggggagaagttacggaaaatcagggtttggcagttattgcttcctccaacataattttattagttatgtttgccggtgtaatcatcctacaaattggtttgtggtacagtaactgggatttgcaaaaaagattaaaggagttttatgctgaagaagaaagagaagctgccaatgcctgtaaaaagactgagaaagttgacaatgcgaaaaagaatgataacaaatctaaaggtgctcaaaagaggaagaacgccaaaaaatag

SEQ ID NO: 75811 - DNA, 1119 bp, Saccharomyces pastorianus
atgctactaaatgtaacgtcttcgcaatacataggcacgcctcaatccagaagtctgagtgaaattgacacgtcagaaaccgccagcttatcatcagctaaagaccacatttttgcattatccactgtggttgtatcctcaattacgacgaacctcattgatagtttagaaagttcgattcaggtccccatatcaaccgcatatggtacgacttccttccgcaacaacacttcaagtccacaatatctggttagcaattacacttcctctgttcaaagcaatatcactatcgatagaggactgttaagtacattgaagacttttactacttcacaggtgccaaccatagagccttcaacgactaaactaacaacaccattatctaccacatttacctcaacctctacatcggaaatatactccgtattcaccagcgagaactcagtttatatcatctatgaccaagaatacaaatttacagagcgatcgacaacatttaacactcactttccccaaacatctgtgcttcaagaatcaaatcctccgttaactttcaccatcccatccaataccattaccggggatgctaaactttatcaatatctatctggcgcactaaacactcaagatgcctcagatgccaataatagaaggaccggagttattataggttctacggttggagttgtcattggagttgtaatagtaatttttatcggattcattattattagaaacagacgaaacgtgaaaaatcacagcaaaaagggctttagccatgatattggcaaaagggtaagttgtgatgaggtgacagaaacagaagcaccgccaaatccgttcctaaatgtccttaattataaagtaacaaccaacggcgagggcaaacgagattcctttgaaaatggtagagatttacacagagctagttcctcagatggtatatatatagcacatccttattatgggatggcggatcacgaatccgggagattttcatacgtatcgtcatacaatgaatctacagagtcatccattgaagaaacaagttccagtgcgtctactattactcggccaaatattcagcaaactaatagctttttgagagaaattatttaa

SEQ ID NO: 75812 - DNA, 1020 bp, Saccharomyces pastorianus
atgacatcttggagggataaatccgcgaaagtgcaagtgaaggagtcagaactgccctcctctataccggcgcagactggattgacgtttaatatatggtataataaatggtcccaagggtttgcggggaatacacgatttgttagtccatttgctttgcagccgcaacttcattctgggaagactaggggcgataatgatggccagttgttcttctgtctattttttgcaaagggtatgtgttgccttggccctaaatgtgaatatctgcatcatataccagacgaagaagatataggtaaactggccctgaggacagaggtattggactgttttggtagagaaaaatttgctgactatagagaggatatgggcgggatcggttcatttaggaagaaaaacaagacattgtatgtaggtggtattgatggagcattgaatagcaagcatttaaagccagctcagatagaaagcagaattcgatttgtattttctcgattgggtgatattgatagaatacgatacgttgagagcaaaaactgtggatttgtgaagtttaaatatcaagctaatgcagaatttgccaaagaagccatgagcaatcagacattgctgctacccagcgataaagaatgggatgatagaagggagggtactggactattggtgaaatgggcaaatgaagatccagaccccgctgcacagaaaagactgcaagaagaactgaagttagagtctttaaacatgatggttcatctaatcaataacaataccaatagtgctggcactgaggttaataataagaataatgaaaggttagacaggacatttccagaagcaagtgttgataatgtcaagaaaagactattgccattagataatggaatggagagtgatgatttcatagaaaaattgaagaaagtgaaaaaaaatatcagtagagaaaatatttcatcaaagccatctgttggtaagcttggtggtcccttgctcgattacctctcctctgatgaggattag

SEQ ID NO: 75813 - DNA, 522 bp, Saccharomyces pastorianus
atggtcaatggatcattgggtaacagagaaacggaaacaagtgcagtaaaaatgggtaaagacaacaaggaacataaggaaagcaaagaaagcaaaaccgtagacaactatgaggccagaatgcctgctgtgttgccattcgctaaaccattggcctctaagaaactaaacaagaaggtcttgaagaccgtgaagaaggcttccaaggccaagaatgttaaaagaggtgtcaaggaagttgtcaaggccttaagaaagggtgaaaaaggtttagtcgtcatcgccggtgacatttctccagctgatgttatttcccacatcccagtcttatgtgaagatcactctgtcccatacatcttcataccttcaaagcaagacttaggtgccgctggcgctacaaaaagacctacctcagttgtctttatcgtcccaggtagcaataagaaaaaagatggaaaaaataaagaagaagaatacaaggaatctttcaacgaagttgtcaaagaagttcaagctttatga

SEQ ID NO: 75814 - DNA, 1182 bp, Saccharomyces pastorianus
atgaataggaatacgactaccaataagaacgcgaatttgaataacagtagaaatgctaacgctcccggtgaagcaggtcatcggaacaagacgggattgatatactggactaaccctagcaagtcgggtgcgagctttgctgcgactctggtgagtttgctgatcctcagaaatgtcaatgttatttctgttttacttaagatcggatacatggtgttgttcacgagttttgcggtggagctttctacaaaggtgctatttgataaaggagtagtgtctaggtttggcatgcaagagtctccggaccttgttggcgtcttaaagcctcatatcgaccgcgaattggatcgtctgcctgcgttagaggacagaatcagaaagttagtgtttgcacacagaacaagaaacaattttaccattggtgtttcgctctatttcttgcacggcctatttgctatattctctatgaacactgttttgataatgaccaccatctttttgtacactgtgcctttaatctacgatagaaagcaggctagaattgaccgtgctatcgacaggatgaaggatctagttattcatatgtttcacaaaaattacaacaaggtggttgaaaagactgaaccatacattgacaagattatcccaccccaaaccgatgaaggcagctactcaacctctatcagtaacgaaaacaaatcttctacttctcaacgtaacaagagcggcctttcctcttctgagtttgacaacatgaacgacatgtcagcctctaaaagtggcaaagacagctattctacctctcaatataaccgagccgaatatccggtttctcagaatgagaatattggcaccttaaaatctgggaagcaggaaataccaacagagaaggatttcaacaacaggcatgaaaacttcagtaaaccagatgtcaagacatatgatccaagaacagttgatattgaagaagaattagcagctcatcagcgtgaactggagcaaaacctaaaagatggtgattacaatctggtaggaagcaaggaaatccctgatctaatcaccgttccagctccaactagacacaccactaaacccgccgaaagccaatcgattcccatcaagaataatgaaaccttacacaaaaccacgcacggcctaaagcaaaaattgcaacgcgcataa

SEQ ID NO: 75815 - DNA, 750 bp, Saccharomyces pastorianus
atgttgcagctaaggtttgtgcctggatgggttcccagaaatggtttttttggtttgaaggagacaattggtacagtacataagagattttatgctctggcttctgaacaaccctcaagaaagacagtaaagccgctggactcgaggaagacgtttctcatcgatacatacaagcatttaatggagaacagttctatgattttttttgtccattacaataatctttccaaaacagaagatcaccatttcagattcaagattaaacagacgggagggaaactcacaaaagtaagaaacaacctgttcgaagtctacttgagaaattcgcatctacccgacccatgtggattcgtgaagcgtaaagagcaaaactggaaacatccactcttgccactactgaagggtcctacggccacaattacatacgaagacaccaaccctcaacaagtagccaagctattgaaggttctgcagtcagcacaagacaagctgatggtgattggtgcaaaagtagaaaacgaagttttgaatgtggaaaaaataaacacttttaagactctccccacaaagccggaaatgcagtcgcagttagtcagcgttttgcaaatgctaagtgggttgggtttggttcgtacgttggaaaacagttcaaatgcattgtatttaacactaaaatctcacaatgacaaccaaaaacctaaagaggatgtggagtcaactacagatgcagaatcgaagggatcaaagtaa

SEQ ID NO: 75816 - DNA, 2655 bp, Saccharomyces pastorianus
atggatcctaatagtaacagttctagcgaaacattacgccaagagaaacagggtttcctagacaaagctcttcagagggtgaagggcatagcactgcgacgaaacaatagtaacaaagatcatacaacagatgatatgacaggtagcatacgaacccctacgagcttgcagcggcaaaattctgacaggcaatctaatatgacatccgtgtttacggatgacatttctaccatagacgacaactcaattttattttcagagcctcctcagaaacaatctatgatgatgtctatatgcgtaggtgtttttgttgcagttggcggatttttatttggttatgatacaggtctgatcaacagtattacatctatgaactatgtgaagtcacacgtagcacctaatcacgattcatttaccgcccaacaaatgtccattttggtgtcatttttgtcattgggaactttttttggggctttaactgcaccatttatatctgattcgtatggcaggaagcctactatcattttcagtacaattttcattttctctatcggaaattctttacaggtaggtgctggaggaatcacattattgattgtgggaagggtcatttcaggtatcggtataggcgcaatttcagcggttgttccattgtatcaagcagaagctacacataaatcattaagaggtgctattatttctacctaccaatgggccattacctggggtttgctcgtgtcaagtgcagtgtcgcaagggacacacgcaagaaacgacgcatcttcgtatcggattcccatagggttgcaatatgtctggtcgtcatttctcgctatcgggatgttctttctccctgagagtccacgctattacgttttgaaagacaagctagatgaagcagctaaatctttatcgtttttaagaggtgtaccagttcatgattctgggttactggaagaactagttgaaataaaggcaacgtatgattacgaggcatcttttggttcttcgaacttcattgattgttttatttcaagtaaaagtagaccaaagcaaactctaaggatgtttacgggaattgcccttcaagcatttcaacaattttcaggtatcaactttatattttactacggtgtcaatttcttcaataagacaggagtcagtaatagttatctggtttcatttataacctatgctgttaatgttgtctttaatgttcctggtttgttctttgtggaattttttggtagacgtaaggtgctggttgttgggggtgttatcatgactatagccaactttattgtggccattgttgggtgttccttaaagactgtagcggccgcaaaagttatgatagcatttatatgtctattcatagctgccttttctgctacatggggtggtgttgtttgggttatttcagcagaactgtacccattgggtgtgagatctaaatgtacggctatatgcgctgctgctaactggcttgtaaactttatttgtgctttaattaccccttatattgtagatactgggtcgcatacatcatcattaggtgcaaaaatattcttcatttggggctccttaaatgcgatgggggtgatagttgtttacttgaccgtttatgaaacgaagggtttgacattagaagagattgatgaattatatattaagtcatccactggtgtcgtgtcaccaaaatttaataaagatatcagggaacgcgcacttaaattccaatacgatcctttgcaaagattagaagacggaaagaacacttttgttgctaaaagaaataattttgacgatgaaacaccaagaaatgattttcgaaatacgatatcgggcgaaatagatcatagccccaatcaaaaagaaattcattctatccctgaacgtgttgatattcctcctagtacagaaattcttgaaagcccgaacaaaagtagtggtatgacagtccctgtaacacctcctctgcaagacgttccaatcccgcaaacaacagagcctgctgaaattcgaaccaaatatgtggacctaggaaatgggcttggtcttaatacgtataatagagggcctccctcactctcaagcgactcaagcgaagattacacagaagatgaaataggcgggccctcatctcaaggcgaccaaagtaatagaagtactatgaatgatattaatgattatatggcacgtctcattcacagtacttctactgcaagtaacacgacagataagttctccggtaaccaaagtacccttcgttaccacacggcttcctcacattcggatacaactgaagaggacagcaatttgatggacctgggaaacgggcttgccttgaatgcttataacagaggtccaccttcaattttaatgaattccagtgatgaagaggcaaatggtggtgagtcgtctgataatgtgaacacagctcaagacttggctggtatgaaggaacgaatggcgcagtttgcgcagagctatattgacaagagaggcggtctggaacctgaaactcgatctaatattttgagcacttctctctccgtgatggcagatactaatgaacataataatgaaagcctccactcaagcgaagaaaacgccactaatcaacctgtaaatgaaaataatgatttgaaataa

SEQ ID NO: 75817 - DNA, 1374 bp, Saccharomyces pastorianus
atgacagcactagattctcgaaactggggattgacacccgctatggaaacgggcttgttccagaaaccacaggaccgtatctttataatagagctggaaaattccatagtgtcattcataaactcaaacacagaatcatttcagctaagaccgatgaattcatattataggcttctatcgcaccaaatagctgagtaccacaacttgaaccatgttttggcaagaactcaagatagttgtgtgattcttttcaaaggtgagaatttccaaaagattgaaggaaagccactcttacaagagttgcagctaaacaaaaaaccggaagagtgtacttcctcaagtgagagtattgagaaatcgaacaataacagaatatttcggatcttaaagcggaaagaggtaggtaacgagtgtgattataaaatcgatggcaatacacgcacaccaaatagcaatttgacagccaattcaaataaggaccaaaaaatcgaaatcgatgataaatctaatactgatttggaacaagaaagaattgagaaggaaagactttatgaacaacgtaaacaagaaatttttgataagctcaacaagagtgaagacgatgtaaagtcaaccaacagtagcggtagtagtgatagtgacaatgaatggagtgattggttgaacggagatgactctaacacacaaactagtaacggttcagttagctcttcatcaccattcaattcatctgtgacgacgatacaagtaaacaaacctcaacaacaattttatgatagtcgaagaggaagaggaggaagaagaagaggaacaaacaattacaaagatgcctatagaggccaaagtcgtcggaataaagaaaacggcggttaccaatcgggatattcttcgccatatcttgtgtatcctcctccccaaatgggtggcaatagtctgccaacctaccctctaatgtataaccccgctggtcctgcccccggtcctgcaccttcacccatggtaatgggcaataacacagtcttcatgaacccttacatgtacaatatgaatccccaagggtcctgttcgtttggcaccccaatccctatgtatcccccataccaatatcaatatcaataccaatataacactcagtatcacagcgggccatatagcaatacaccaagctataattctaacaattacacaagatcctcagcaaataagtaccaccattttcaaggaaaaaattcatattctggtgcgattccgaaacgtagtgatgacagtaacagtaataagaatgagggaattcgtagggctagtgttgagggttcgccgtcatctagggatactgattcggtagagatgaaatttgataaattaaacatttag

SEQ ID NO: 75818 - DNA, 1134 bp, Saccharomyces pastorianus
atggatatggaaattgatgaccctatgcatggttcagatgaagatcaattatcaccgactctcgacgaagacatgaatagtgatgacggcaaaaataatacgaaggcgcgttctaatgacgaagacacagatgaagagttggaagattttaattttaaaccggggtcctcgggtatagcagatcataaatcctccaaaccactaaaactgaccaatacaaatataaatcagcttgaccaatggattgagcatttgagtaaatgcgagccactatcagaagacgatgtagcacgactatgtaaaatggcggtggacgtgttgcagttcgaggaaaatgttaaaccaattaacgtgcctgttaccatttgcggtgacgtacacggtcaattccatgacttgttagaacttttcaagattggtggtccttgtcctgacaccaattaccttttcatgggtgattacgtggatagaggatattattctgttgagaccgtatcttacctagttgccatgaaagtcagatatccacatagaattactatacttaggggcaatcacgagtctaggcagattacccaagtatatgggttttatgacgaatgtttgagaaagtacggcagtgcaaacgtgtggaaaatgtttaccgatctattcgattatttccccgttactgccttggtggataataaaatcttctgtttgcatggaggtctctcacccatgatagagacaatagatcaagttagagatttaaatagaatacaggaagtgcctcacgaaggtccaatgtgtgaccttctatggtccgatcctgatgatagaggcggatggggaatcagtccgagaggtgcaggcttcacttttggtcaagacatcagtgagcaattcaatcacactaatgacctatcactaatagcaagagctcaccaattggtaatggaaggatattcttggtctcaccagcaaaatgttgtcaccattttcagtgctccaaattattgttatagatgtggtaaccaggccgctattatggaggtggatgaaaaccataataggcaattcttacaatacgatccatctgtgagacccggtgaaccaaccgtcaccaggaagacaccggattatttcttataa

SEQ ID NO: 75819 - DNA, 330 bp, Saccharomyces pastorianus
atgcaggtggcctccattttacaagtacgtcctccatttttcccacaaatacattttcttctcttcttcttctgcttttttgtttcgaaatcacgagttgcctcacagaggggaactcacttcttggtaagaatctgttttgagcctccgcttcagggctgtaggatgggaaagttatgtcgcccccatctaaaccatcttctatacttgtgttacactgcatatttttctaatatttcttggctatctgtaagcaaatctacatccaggaatagagtccacaagtatattccatataaaagcacagaactacgaagtgtcgcaaattag

SEQ ID NO: 75820 - DNA, 834 bp, Saccharomyces pastorianus
atgcagtgtaacacaagtatagaagatggtttagatgggggcgacataactttcccatcctacagccctgaagcggaggctcaaaacagattcttaccaagaagtgagttcccctctgtgaggcaactcgtgatttcgaaacaaaaaagcagaagaagaagagaagaaaatgtatttgtgggaaaaatggaggacgtacttgtaaaatggaggccacctgcatcttcacatcgtggcgcaattgaagctattaatggcacgcatccatatcagcttagcacagcacaattcaactcgagaagatcggatccatttggttcaacaaagagagatgaatccgtgcgttccattgtagaatcgtttaccgattggtggaaacgcaattccaaaatgttttttcgtgacgaggaagaaggtgtacgaaccgaacacagtgcgagtcaagatgaccaagagttgcagcttttcgaagaagatctcttctcatttcacctaagcccaaatgatatgtcaaccaggaacagcgaacatcaagtgcaaacaccggtgcttttcccgtacgaagctcctactcgaacaaaacaaaacccagcagaaagaaaagtcattgaaattggggacggcgaagaactctctatctatcgagatgtttattccaatcctattcctgtcagctacctagataccttaaacttgaaccactccatgtctgtacggcaaacacaacagcaacaacaacagcggcaacagcagcagtatgtagactcttcatcggtatttcaatgctgtacagactccaattgggcgagaatatttttttgccaccacgattag

SEQ ID NO: 75821 - DNA, 228 bp, Saccharomyces pastorianus
atgagattctttttatttccttacgagcgttttcaattgcaccagccattgtttcttttcttctctatttgctttttaactctaagaatgaaagaacgactcctgcgttataatcttagatatctatatgctttgagaaatgtgtttggtactttttattctaatcaacgtagtaatcaaaatgttgcaaccttatcgaaagagccatttcttgttttcagcttttaa

SEQ ID NO: 75822 - DNA, 78 bp, Saccharomyces pastorianus
atgagagccaagtggagaaagaagagaactagaagacttaagagaaagagacggaaggtgagagccagatccaaataa

SEQ ID NO: 75823 - DNA, 963 bp, Saccharomyces pastorianus
atgatacgttcaatatttataccgccaactagtataactgccacttctcgactgttctacggaatgagggcgtattcaacaaaacttgaaaaggcttcactccaaaaatatctgcatgatcctgttaaagtgactgtgataccaataacggacaaagaatcattcatttactataagcataccgataatctctttaatagtcagtctagaatattaaaagcagaaaagtggatcgttgagaaatcagcaaagctttggagaaaactgaaaaagtcccctaaatcgtataataaaaaaatagtgtccatggtgcagtctctgctaaatagcacaccctggtcagaaaatagtctgttaaccataccaagtgaaagctatatattgaagagaattaagggagagaaagataagacccaagagattcgactcacattgaaagattataccgtaaaggcagaacaggtcgatactcaacccttacacgtgtattatccccctggaatttctagccctgatgagtgcttgagacaaatgaaaaagctctaccaagaaggcttaatttatcacaaaaaatggactttatattgccttttaggtctcccgctgacaattcctctaattttaataccgcttataccaaatgttccagggttctacctatcttatagagcttatgttaatatcaaagcttaccttggtgctaagcacttgaagagtctactggaaagttcaaaacaaaatttagaattcagggaactattgggatatacggaagtatataaacgtgggaccagcagccgtacgcagggcaatcaaaaggaatcaaaaggtgcaccagaattactacttaacaagaaaacccttcctttgatcttagatttcttagaggttcatgaactcgaaagcgacttgaacaaagtcatccttcaagaatcgaaatctcaagagaaaaacaaaatttaa

SEQ ID NO: 75824 - DNA, 1287 bp, Saccharomyces pastorianus
atgactgctgctaaaccaaatccatatgctgccaaaccgggcgactatctttctaatgtaaataatttccagttaatcgattcgacgctgagagaaggtgaacaatttgccaacgcattcttcgatactgaaaagaagatcgaaattgctagagccttggacgatttcggtgtggactacatcgagttaacctcaccagtagcatctgaacaatcaagaaaggactgtgaagctatatgtaaactaggtttaaaggccaagatccttacacacattcgttgtcatatggatgacgccaaagtcgccgtagagactggtgtcgacggtgtcgatgtcgttatcggcacctccaaatttttaagacaatattcccacggtaaggatatgaactacatcgccaagagtgctgttgaagtcattgaatttgtcaaatccaaaggtattgaaatcagattttcctctgaagattccttcagaagtgatctcgttgatcttttgaacatttataaaaccgttgacaagatcggtgtaaatagagtcggtattgccgacacagttggatgtgccaacccaagacaagtatatgaactgatcagaactttgaagagtgttgtttcatgtgacatcgaatgccatttccacaacgatactggttgtgccattgcaaacgcctacactgctttggaaggtggtgccagattgattgacgtcagtgtactgggtattggtgaaagaaacggtatcactcctctaggtgggctcatggcaagaatgattgttgccgcaccagactatgtcaagtccaaatacaagttgcacaagatcagagacattgaaaacctggtcgctgatgctgtggaagttaacattccattcaacaaccctatcacagggttctgtgcattcacacataaagcaggtatccatgccaaggccattttggctaacccatctacctacgaaatcttggaccctcacgatttcggtatgaagaggtatatccacttcgccaacagactaactggctggaacgccatcaaagccagagtcgaccagttgaacttgaacttgacggatgaccaaatcaaggaagttactgctaagattaagaagctgggtgatgtcagatcgctgaatatcgatgatgttgactctatcatcaagaacttccacgcagaggtcagcactcctcaagtattatctgcaaaaaagaacaagaagaatgacagcgatgtaccggaactggccaccatccccgccgccaagcggactaagccatccgcctaa

SEQ ID NO: 75825 - DNA, 258 bp, Saccharomyces pastorianus
atgttaccacgttcagcattagcacgctcattgcaattacagcgcggtgtggccgcaaggttctactctgaaggttctaccggcaccccaagagggtcaggctcagaggattcgtttgttaaaagggaaagggccacggatgacttcttcgttaggcagcgtgagaaggagcaactacgccatttgaaagaacaactggaaaaacaacgaaagaagattgattctttggaaaataaaattgactcgatgaccaaataa

SEQ ID NO: 75826 - DNA, 915 bp, Saccharomyces pastorianus
atgatttctgactacgatgctcttttgcaattcaacaaaaaacctgtttcgcaagaaatgattcagttcttagccacttctactgcttccataattaaaatcagggaaaataataatccaatccaaggatgtcgcccaccagacttatctatcttcattaaaaacgtggtaattcagtcaaatgttcaaacgccaactttaatggccacatcagtttatttaaacaaactgaaaagcgtaataccaaaaaatgtgtacggtattaacaccacaagacatcggatatttctcggatgcttgatattagctgccaaaactctgaacgattcttctccctggaacaaacactggaccacgtacacagaaggtttactcagaatacgtgaggtgaataccatcgaacgagaactattagaatatttaaattgggatgtgaggataactacaccggatttgattgattctctttcttacttcctcgggcctatcaaggaacaactatttttacaaaggagacaagaaatgctgttgttcaatgcaccaagtcccggccaactgaaagaatatataaatcatagaagaccggtttcgcattctagaacttcttctgctatatcggttccttcactgacatccatggcaacagtttcgacaacagactcaaggtcttctctactggcaaaataccaaccgtccctaccgttggtggaatctgacaacttcaacaaaaaaaatcatgtgccgttaaggaataataacgatatctgtaataatttcagggcagaggaaaacatacactcagtaaaccatattgatgtaacaatgggaagttcaccagtaatgtcgcataagcccacaattcaccaacggttaaattttacaaggaggggctggtcatcgtttttcaagcaataa

SEQ ID NO: 75827 - DNA, 513 bp, Saccharomyces pastorianus
atgagtaagaatgttggtaagctagtgaaaatatggaatgaatcagaagttttagttgatagaaaatcgaaatttcaagcaagatgttgcccattacaaaatcaaaaggatataccctccatactccaagaactaacgcaaaacaacaaaagcgtctccaaggcatcccacatgcacatgtatgcctggagaacggccgaggtatcaaataatttgcacttacaacaagagcagaaaaagaagggcaataaagcaaataagagtaataatagtcatgttaacaagtcaaggaacataacggtgcagccaaagaacattgagcaaggatgtgctgactgtggcgaagctggtgctggacagcgtttattgaccttacttgaaagagcaaacatattcaatgtcttggtaatagtgaccagatggtatggtggcacgcctttgggctcatcaagattcagacacatttcaacatgtgctgtggaaaccttaaagaagggtggatttcttccttaa

SEQ ID NO: 75828 - DNA, 1587 bp, Saccharomyces pastorianus
atgaattatggcgtggagaagctgaaattgaaatattcgaagcatgggtgtattacttgcaagatcagaaagaagagatgctctgaagataaacctgtgtgccgggactgtcgtcgattaagttttccctgtatctatatatcagaatctgttgataaccagtctttgaaaaaaataaaggcagatatacagcaacagttgatcagcaagaaaagaaagcatgctcctgacagtgctcagaaagcggccgtggccacccgtactcgacgggtcagtagcgacgaacaggataaccaggtatatttgtcaaaaccgctggaagattgcatttctcagaagctggactctatgggattgcagctgtacaactactacaggtctcaccttgcaaacataatttccatcgcgcccatgaaccagaactactatctgaacattttcttgccaatggcccacgagaatgatggtatattgtttgctattcttgcttggtcagctaatcatttgtctatatcatcatcaaatgagctgcgaaaggatgaaatatttgtcaacttggcgaacaagtatacatacatgtcgttatcgcatctaaagacaaacgagggctcaagtgcctgtgctagactggggtttctatattcactagcacaaatcctaatcttatgtggttcagagatatgtcagggtgatgtgaaattttggaagatattattgaatgtaggaaaaaatttgatcgaaaaccatgtgggcaaggatgtctcacggatactaaccactactacagaagaaccctccctagaggagaggataatcttccccaatttcaattccgttgttaagtactggctgattgtgaattttatatatcatgatattttgaatttcaatacaacgtccttcccgatcgaacaatacgagaaatttttccaaagggatcagaactctttacccagctcagccaactttattgagtcaatagactcgccaattgaggaaatagaccctttaattggcatcaacaagcctattttactactattgggacaagtcacaaatttgacgaggtttttgcagactatggaacaggaagaaatgctagagcacggcgataaaattttgagtttgcaagtcgagatttataaattacaaccttcgcttatggcgctggaacatttggatgatgaaaagaaattttactatttagaactattcgagataatgaaaatttctaccttaatgttctttcaattaactttattaaagattgacaaagattcgctggaactacagatactgagaaacaaattggactcgaagctagacaaggtcatcggaacttttttggaaggatcgttatgcttcccacttttcatttacggtgtatgcattcaggtagaagatatggagaaaaaaatagatttggaagccaaatttgacgacattttaaaacgatataaatgttacaatttcccaaatgctagattattgatacggaaaatttggccaaacgaggctgatggcatcagtgagcatgacctggtccacatgattgacgaattagattacaatattaattttgcctga

SEQ ID NO: 75829 - DNA, 672 bp, Saccharomyces pastorianus
atggaggataaggagaaacttattgtatactcaaataccagttcggtatttacatatagtgcagaaataaggccaaattttaaaatatctgtatctcaaagtcaaggttttgcctggaaccaggacttattcgccacacaataccaacaatcatataaggtggtatatgatgcacacgaggacaactttgatgagttaattttgaagatcaagggcaaattaaaggcaaattctaataaaagagctaaaatgaagtctaaggctaaattaacaaggactgcaaagcagagaagggaaagccccgtttgtgaaagggacgagagtgacgaggataatgatagtgatcactaccaaagaatacaagtgctagatggccatgaatttccgagagcaaatcggtataaatctgtatgggctcatgacgtccactcgaatgaagatagtacaagcgacggggaaagcaatcatgatatagatatgattggcggcactggcacgtcgtatgcaggagcagccataatggataggccacgcaggaaatctgagagaagcataagctttgtggaggactccaagacaggcgattacaggtatcaaatcgggcaggtggatgttgtagaggtggactcggacacccctgaaaataatcacctaaaatggttaattaaataa

SEQ ID NO: 75830 - DNA, 1161 bp, Saccharomyces pastorianus
atgtccgccgctactgttggtaaacctattaagtgcattgctgctgttgcgtatgatgcgaagaaaccattaagtgttgaagaaatcacggtagacgccccaaaagcgcacgaagtacgtatcaaaattgaatatactgctgtatgccacactgatgcgtacactttatcaggctctgatccagaaggacttttcccttgcgttctgggccacgaaggagccggtatcgtagaatctgtaggcgatgatgtcataacagttaagcctggtgatcatgttattgctttgtacactgctgagtgtggcaaatgtaagttctgtacttccggtaaaaccaacttatgtggtgccgttagagctactcaagggaaaggtgtaatgcctgatgggaccacaagatttcataatgcgaaaggtgaagatatataccatttcatgggttgctctactttttccgaatatactgtggtggcagatgtctctgtggttgccatcgatccaaaagctcccttggatgctgcctgtttactgggttgtggtgttactactggttttggggcggctcttaagacagctaatgtgcaaaaaggcgataccgttgcagtatttggctgcgggactgtaggactctccgttatccaaggtgcaaagttaaggggcgcttccaagatcattgccattgacattaacaataagaaaaaacaatattgttctcaatttggtgccacggattttgttaatcccaaggaagatttggccaaagatcaaactatcgttgaaaagttaattgaaatgactgatgggggtctggattttacttttgactgtactggtaataccaaaattatgagagatgctttggaagcctgtcataaaggttggggtcaatctattatcattggtgtggctgccgctggtggagaaatttctacaaggccgttccagctggtcactggtagagtgtggaaaggctctgcttttggtggcatcaaaggtagatctgaaatgggcggtttaattaaagactatcaaaaaggtgtcttaaaagtcgaagaatttatcactcacaggagaccattcaaagaaatcaatcaagcctttgaagatttgcataacggtgattgcttgagaaccgtcttgaagtctgatgaaataaaatag

SEQ ID NO: 75831 - DNA, 594 bp, Saccharomyces pastorianus
atggaagcaagacggtatggaccgaatattattgttacaggaacaccaggatgtggcaagtcgtctacgtgtgagtttttaaaaaataaactgaaggattacaaatactataacatttcggatttcgccaaagataacgactgtttcgaaggatatgatgagggccgtaaatcgcacattgtcgatgaagacaaactgctggacatgctagagcctcttttgagacagggaaatagtattgtcgattggcatgtcaatgatgtgttcccagagaggctgattgacttggtggtggtgttgagatgcgataactctaacttgtattcaagattgcatgcaagaggctatcatgactctaagattgaggaaaacctcgatgccgagattatgggtgtcgtcaaacaggatgccgtggaatcatacgaaccgcacattgtggtagagctacaaagcgatacgaaagaagatatggtatctaacgtatcccgtattgttgcttgggaaaagatgtggttagaacaacatccagatggagtcacaaatgaatatcaagggcctcgtagcgatgacgaagacgatgaagacagtgagtag

SEQ ID NO: 75832 - DNA, 576 bp, Saccharomyces pastorianus
atggaaaaatttggtttaaaagcgctagtaccgctccttaagctagaggacaaagaactttcaagtacatatgaccattccatgaccttaggagcggacttatcgtcgatgctatattcgttgggtattccaagagattcacaagatcacagagtcctcgatacttttcaatcaccgtgggcagaaacatccagaagcgaagtggagccccgatttttcacaccagaatcattcaccaatattccgggcgtattacaatccactgtaactccaccatgcttcaattccatccaaaatgaccaacagcgtgttgccctttttcaagatgaaactctatttttcctcttctataaacaccctggtacagtcatccaggaactaacgtatttggaactcaggaaaaggaactggagataccacaagacgttgaaggcctggctcaccaaagatcctatgatggaacctattgtatccgctgatggtttaagtgaaaggggatcatatgtgttttttgacccacaaaggtgggaaaagtgccaaagagatttcttattgttttataatgctattatgtaa

SEQ ID NO: 75833 - DNA, 303 bp, Saccharomyces pastorianus
atggagcttggagctgctacagtatgtgtaacagccgtctgtttcaatttcttggtcgcgtattcctctcccccactaacattatccattctgtcttccagcatatgtttggatgattttttgggagaaggagtaccttctgttggcttatttttcatggaagtgaagaatctagccaaagtggcttgtttaggcttcttaccggcagaggaaggtaatgaggatgacatcaataatggcaatcttgatttcaagggacgtgcagatgaaagaaggcaaccggtcagtaatctgcgcatgtaa

SEQ ID NO: 75834 - DNA, 357 bp, Saccharomyces pastorianus
atgattgttctgcctcttgctccctttccttctgatcctggcactcatacgaacggctctttcttctacttcttaaaactcctatttgtcattgaaagaaactttcatcattacccggatgattctctatacgtagccacaatttcagacaaccatacttccaaaatcaagtactttgaacaacataaggccccaccaaccttccgtaagacttgcaataggaattcgtactgcagccgctggttctattgctgtttaactctgtcatctttttgctcgcttcgatgtgttcctccacttgagatggctgatggaatttttcaccttaacgcgaaaacgcgtgaaagtgaaatttag

SEQ ID NO: 75835 - DNA, 1365 bp, Saccharomyces pastorianus
atgtcgaaacaatttgttagatctgcgaagaatttggtgaaagggtactcttctacccaggtcctggtaagaaatgcaacgtcaaacgacaatcatcaagtgtccaaggactcgttaattgagctggctgaaaaatcatatgatagcgcagatttcttcgaaatcatggatatgctggacaaaagacttaacgacaagggcaaatactggaggcatatcgcaaaggcattgacagtaatagattacttgatcaggtttggtagtgagaattgtgttctttggtgtagagaaaatttatacatcatcaagacattgaaggagttcaggcacgaggacgatgagggcatagatcaaggtcaaatcgttagggtcaaagcaaaagaattgactgcattactatctgatgacgaaagactgaacgaggaaaggaacatgaatatcaagggaagaaacaggaaaggaagaagaagaaggggaactgggcgcagtgatgaaaatgacgatgatttgcaaagagccattagtgctagcaggttgacggcggaagaagacgaaagaagaagaaaacaggacgaggattatgaaacagctttgcagttgagcaaagaagaagaggagctaaaaagattgcaagatttacaaagaatgcaacaacagcaaggccaacaacaattgcaacaacctatgtattatgatatttttggtaacccaatcactcctgaggaatacgcacaatttcaattgcaacaacagcaacaacagcaacaacaacagttgcaacaacaaccaatgtactacgatgtattcgggaatcctataacacccgaagaactagcacagtttcaacaacaacaacaactacaggaacaacagtacttagcttctatgcaacagcagcaacaggcaatgtccaacaatccatttgccaaatcagaacagagctcaagttcaccaaaacggaaccaactagtagcagcttcttctccacagcaactgcaacaacaaaaacaacaagagccattgattcaaaacaggacaggcaatcaatcaatgacagacaagtatagtaaactaaacgagctactagccacaggaacaggtattgatacattcggaaatgtaggggaggctcgtattcctgcccaacatacgaagacaggaacattcatcaattctcaaggaacaggatataggcaagtatcggatgatccaaaccacaatccgtttttgaacagtcagtatacaggtttaccaagcactagcgtcgtaccaacacaaacaggctatggctttggtaaccagtctcaacagcagtctcaaaataatggctcaaataaccggggatatactctaattgatttatga

SEQ ID NO: 75836 - DNA, 1521 bp, Saccharomyces pastorianus
atgggttccatcaataataacttcaacactaataataacagtaatacggatctcgatcgggactggaaaactgcattgaatattcccaagaaggataccagaccacagacagacgatgtcttaaatacaaagggtaatacttttgaagatttttatttgaaaagagagctgttaatgggtatttttgaagccggttttgaaaaaccatcccctattcaagaagaggctattccggtagcaataactggtagagacatattggccagagcaaagaatggtacaggtaagacagccgcatttgttattcctacgttagagaaagtcaaaccaaagttgaataaaattcaggctttgatcatggttcccacaagagagttagctctgcaaacttcccaagtcgtccgtacattgggaaaacactgtggtatttcatgtatggtgaccactggtggtaccaatttgagagacgatattctaagattaaatgaaacagtccatattttggttggtactcctggtagagtgttggatttagcttcgagaaaagtagcagatctgtctgattgttcattattcatcatggacgaagccgataaaatgttatctcgtgacttcaagacaataattgaacaaatcttatccttcttacctccaactcaccaatctttattatttagcgctactttcccactaacggttaaggaattcatggttaaacatctgcataagccttatgaaattaatttgatggaagaattgactctaaagggtattactcaatactacgcctttgttgaagaaagacaaaagctacattgtttaaatactttattctctaagcttcaaattaatcaagccattattttttgtaattctactaaccgtgtcgaattactagccaagaaaatcactgatttaggctattcctgttattactctcatgcaagaatgaagcaacaagaaagaaataaagttttccacgaatttcgtcaaggtaaggttcgtacattggtctgctccgatttattgacccgtggtatcgatattcaagccgttaatgtcgttatcaatttcgatttccccaaaacggcagaaacatatttacatcgtattggtagatccggtaggtttggccacttgggtttagcaatcaatttgattaactggaatgatcggtttaacctttataaaatcgaacaagaactgggcactgaaattgcggctattccggctactatcgataagtcattgtatgtggctgaaaatgacgaaacggtacctgttccattcccgatagagcaacagagctatcatcaacaagcgatacctcagcaacaattaccatctcagcaacaatttgctattcctccgcagcaacatcatccacaattcatggttcctccttcgcatcagcaacaacaggcgtatcctccaccgcaaatgccatcgcagcaggggtatcctccacagcaggaacatttcatggcgatgccacctggtcagtcacaaccccagtattaa

SEQ ID NO: 75837 - DNA, 132 bp, Saccharomyces pastorianus
atgtacaatcagataataaacacttttattgatgattgtcttttcttgcaaaccccaatgttacaatcgcccattagttctaagattgtgttgtcctttttcttacgaaatttttttccctcccttttttga

SEQ ID NO: 75838 - DNA, 1548 bp, Saccharomyces pastorianus
atgtttcaacgaaagactttacagagaaggaacttgaaagggctcaatcttaacctgcacccagatgtgggcaataatggccaattgcaggaaaagacagagactcaccagggacaatctcgaatagaaggccacgtgatgtctaacattaatgcaatacagaataatagcaacctgtttttgcgaagaggcataaaaaaaaaactgacgttggatgcgtttggtgatgaccaagctatatcgaaaccaaacactgtggtaatacagcaaccgcaaaatgaacctgttttagttctgtcttctctatcacaatccccgtgtgtaacatcatcatcatctttgtccacgccatgcattatagatgcgtacagtaataatttcggattatcgccatcatccacgaattctactccctctacgattcagggattgtccaatattgcaacgccagttgaaaacgaacattcgatatcactaccacctttggaggaaagcctatcgccagccgcagcagatctgaaagatacgttgtcgggaacttcaaatggtaattatatacaactccaggacttggttcagttggggaaaattggtgctggaaattctggaactgtggtgaaggcactacatgttcctgattccaaaatagttgccaaaaaaaccattcctgtggaacagaataacagtacaatcatcaaccaattagttagggaattatctatcgtcaaaaacgttaagccccatgaaaacattatcaccttctatggagcttattataaccagcatataaataatgaaatcataattttaatggaatactctgattgtggttctttagataaaatactgtccgtttataaaaggtttgttcaaagagggactgtttcgagtaagaaaacttggttcaacgaattaacaatatcaaaaatagcgtatggcgtactaaatggcttggatcatttgtaccgacaatataagataattcatcgtgatatcaagccttccaatgttctgattaatagtaaggggcagattaagttatgtgattttggagtttccaaaaaactaataaattctatcgctgatacatttgttggaacgtccacttatatgtcaccagagaggatacaaggaaacgtttattctatcaaaggggacgtttggtcattgggcttaatgatcatcgagctggtaactggagagtttcccctaggtgggcataacgatacacctgatggcatattggatttgctgcaacgtattgtcaacgagccttcaccaagattacccaaagaccgtatctattccaaggaaatgacggattttgtcaataggtgttgtattaagaatgaaagggaaaggtcatcgattcatgaattgctacatcatgatcttataatgaaatacgtatcaccgtctaaagatgataaatttagacattggtgtagaaaaataaaatctaaaataaaggaagacaagagaattaaaagagaagccttggaccgtgccaagttagaaaagaaacaatcggaaagatcaacccattga

SEQ ID NO: 75839 - DNA, 177 bp, Saccharomyces pastorianus
atgttttcatggggcttaacgtttttgacgatagataattccctaactaattggttgatgattgtactgttattctgttccacaggaatggtttttttggcaactattttggaatcaggaacatgtagtgccttcaccacagttccagaatttccagcaccaattttccccaactga

SEQ ID NO: 75840 - DNA, 357 bp, Saccharomyces pastorianus
atgagtaatattttggcagtgttcaaccctccaccacaaaggaagctggaaaaagaagagactatggattgcgttccttgtcaagtcatgagcactatgttttctgttggatttggctcatacttggcatctgggaaaccattcaagtatggtaaaaaagaagccaaaagaggcatttctctgactgaatttgaaaaaagaaacccacaatggtggaaagtaactttacgtagcttcggtgggttattaatcgccttcggtttcgttagaggaaccgaaggttggttgtggcataaaaataaagaatataagaactataagaaattaagtaacgatggtgaaacacaggctaactag

SEQ ID NO: 75841 - DNA, 1569 bp, Saccharomyces pastorianus
atgccggaattaacagaatttcagaaaaaacgtttagagaacatcaaaaggaataacgatttattgaaaaaactccacctttctggagtagcatctcaaattaagcacgaggctggggtgttggaaaaatctagagctcctgcaaaaaagaaacaaaaaacaactaataccagagcaaccaagtctgcgagtcccactttacctacacgaagatcaagaaggctaaggggtgagtctgcagacgatgtgaaaggaatacccaatgtgaacgataatcagttgcttaaaatgggttctccagatggccaggataagaattttatagacgcaataaaggagaaacctgtaataggagatgtgaaattaagtgatctgatcaaggatgaagaggaaagtgcccttttagagaaattcaagaggtttaataacggaaacttttcttctggtgatttctttgaagaaataaaaaagagacagggtgacgttacggggattgacgaatttgatttggatctatatgacgtttttcaaccgaacgaaattaagattacatacgaaagaatctctgccacttacttccatcctgctatggaaaaaaagctaataattgcaggtgatacaagcggtactgtgggtttttggaacgttagagatgaaccactagctgacagcgaagaggaccgaatggaagaacccgatatcaccagagtgaaactatttaccaaaaacgtcggccgtattgattgcttccctgcggacacatcgaagatattgctcacctcttacgacggaagcatcaggtcagttcacttgaataacttacagagtgaagaggttctcaccttgaaaaatgaatatgacgattcactgggtatcagcgattgccagtttagctacgaaaacccaaatgttttattcctcaccacattgggtggtgaattcaccacgtttgacacaagagtaaaaaaatcagagtataatctgcgaagactcgcagacaagaagatcgggtctatggcaataaatcctatgagaccctacgagattgccaccggatcacttgatagaacactcaaaatctgggatacaagaaaccttgttgaaaagccagagtggtcacaatatgaagactatcccagtcatgaagttgtctccacatatgactcaagattgagcgtctccgcagtttcttactcaccgacagatggcaccttagtgtgcaatggctatgacgataccatccgcttattcgatgtcaagagtagggatcacctttctgcgaagttggagcccaaactaacgatccagcacaattgccaaacaggaagatggacaagcatcctcaaggccagattcaagccgaacaagaatgtttttgcaatagctaacatgaagcgcgccatcgacatatacaacagcgaaggccagcaactggctcacctacccacagctactgtcccagctgtaattagttggcacccgctgcgaaactggattgcaggtggcaattctagcggcaaaatattcctctttactgatgactccggaaccataaagcaggaagaatga

SEQ ID NO: 75842 - DNA, 1284 bp, Saccharomyces pastorianus
atgcatcataactcacagtctttgagctctggacacatcaggagccccgaggatgaaaatgtggcacctataggtaatcttaaacacaggactggatccctcagtcatatttcatctgcgcacccgagggtcgcacttagcgacgttaccaatatagttgcgacaaactctagcaacaacagcataagtaagccaaaagtcgccccaattaaagaaagattggattcagctgcgataattgaggaagaaaggctggatgcgaatagtgttgcacagagaaaagaagctgatcataacgatttgttaacggacagggaacaagaggaacccgttgaagacgacggagaaagcgaagaggatgaagaagaagaccaggagcctctactgctgcaacattatgctagtgatacattggtctgggagcatgcatttaggacttactatagaactacattagatcccaatgatgatgacgtgtacgatgtggtcatggttgccgaattatctaatgagatattcgagtatatgaggaaattggaagacctgtataaacccaatccgtactacatggataaacaaccagagttaaggtggtcgtttcgaagcacactgattgattggatcgtccaagtacatgaaaaatttcaacttttacctgaaactctatatctctgcattaatataatagacagatatctgtgcaaagaagttgttcctgtaaataagttccaacttgtgggtgcagcctcactcttcattgctgctaaatatgaggaaatcaactgtcctacaatcaaggatttcgtatacatgtcagaaaactgctactcaaggaacgacctgctggacgcagaaagaactattttgaacggcttagaatttgaattgggttggcctggtccgatgtcatttttacgaagaatcagtaaggcagacgattacgagcatgatacgagaacactggccaaatatctattggaatctacaataatggaccatcgactggtctccgctcaacctagttggttagctgctggtgcatactttctaagtaagattattctgggccaaaatcagtggtctctggcgcacgtctactattccaattatacacaagaacaaattcttccgttggccaccattattttagaaaattgcagatatgcctctaaacgtcataacgccatatggagaaaatattcttcacgtcgttatttgcattcttcacagatcgtagcgaagtggatagcattagctgagcacagagtagaaagatctaactaa

SEQ ID NO: 75843 - DNA, 744 bp, Saccharomyces pastorianus
atggatcagatgatatataaacaaaaagtgggatacagcatatcgacgcctccactacaaattaacagaaggatgaaaaccaataagaaaatttctaaaagaagaagcctgaaaaatctccatggtgccttaaaaggactattgaaagagtccggcaagaagagtgagtccaaaatacgaaaacatagcgattgcaatcctgttcatcgagtatatccgccaaatatcgaaaaacggaagaccaagaaggacgatggaatttcacggccaattgctgaaagaaatggtcatgtgtatataatgtccaaggaaaaccacatcatccctaaactaaccgatgatgaagtcatggagcgccacaaactagcagacgaaaacatgagaaaagtgtggtccaacatcataagcaaatacgagtctattgaagaacaaggagacctcgtagacctgaaaactggtgaaatagttgaagataatgggcatatcaagacgctgacggccaacaacagcacgaaagataaaagaacaaaatacacaagcgtgctcagagacattatcgacatcagcgacgaggaagatggtgataaaaatgatgaatatactctttgggctaacgatagcgaggcaagcgattcagaggtggatgctgacaacgacactgaagaggaaaaagacgagaaattgatagacgcagatttcaagaagtacgaggccaaactctcgaaaaggatattacgagattaa

SEQ ID NO: 75844 - DNA, 609 bp, Saccharomyces pastorianus
atggccgaagaaagtaccgactttagtcaattcgaagaggagagaaacaacgatcagtataaagtttcagccaaaaaaactgttgacgaatacaaaaatctggatgctgaagatgaatccttggcgaaatggaaagagtctttgggtctaagttcagacgtcttgccattggaatttcccggtgacaaaaggaaggtggttgttcaaaaaattcaattactagtcaatacagaaccaaatcctatcacatttgatcttaccaacgaaaagacaatcaaagaactggcatctaaaagatacaaaattaaagaaaattctatttataagttgaagattgtgttcaaagttcaacatgaaattatcacggggttgcgatatgtccagtatatcaaaaaagcgggtattgccgttgacaagatagacgatcatttgggatcgtatgctcctaataccaagaccaaaccattttatgaggtggaactaccggaaagtgaagcacctagtgggtttttagcaagaggcaactacagtgccgtatcaaaattcattgatgatgataaaactaaccacttgactttaaattggggggtcgaaattgtcaaaaaataa

SEQ ID NO: 75845 - DNA, 1110 bp, Saccharomyces pastorianus
atggatacagatttagatgtgcctatgcaagatgctgttaccgaacagctgactcccacagtatctgaagatatggatctcaacaacaattcatcggataataatgcagaagaattctcggttgatgatttaaaacctggttcctcgggcatagcagatcacaaatcttccaaaccactagaattgaataacacaaatataaatcagcttgaccaatggattgagcatttgagtaaatgcgagccactatcagaagacgatgtagcacgactatgtaaaatggcggtggacgtgttgcagttcgaggaaaatgttaaaccaattaatgtgcctgttactatttgtggtgacgtacacggtcaattccatgacttgttagaactttttaagattggtggtccttgtcctgacaccaattaccttttcatgggtgattacgtggatagaggatattattctgttgaaactgtatcttacctagttgccatgaaagtcagatacccacatagaattacgatactgagaggcaatcacgagtctaggcagattacccaagtatacgggttttatgatgaatgtttgagaaagtacggcagtgcaaacgtgtggaaaatgttcacagatcttttcgattattttcctataaccgcattagtagataataaaattttctgtctgcatggaggactttcccccatgatagaaaccatagatcaggtgagagagttgaacagaatacaggaagtgcctcatgaaggtcctatgtgtgaccttctatggtcagaccctgacgatagaggcggatggggaatcagtccgagaggtgcaggcttcacttttggacaagatgtcagtgagcaattcaatcacactaatgatctatcactaatagcaagagctcaccaattggtaatggaaggctatgcttggtctcaccagcaaaatgttgtcaccattttcagtgctcctaattactgctacagatgtggtaatcaagcagctatcatggaagtggacgagaatcataatagacaattcttacagtacgacccatccgtaagaccaggtgaacctagcgtcagcagaaagacgccagattactttttatga

SEQ ID NO: 75846 - DNA, 78 bp, Saccharomyces pastorianus; identical to SEQ ID NO: 334

SEQ ID NO: 75847 - DNA, 1323 bp, Saccharomyces pastorianus
atgtctgaaaataacgaattccagagtgtcaccgaatcgacgactgctccaaccactagtaacccatatggcccaaatcctgcggattatctatccaatgttaagaatttccagttgattgattcaacactaagagagggtgaacaatttgccaacgcattcttcgatactgaaaaaaagattgaaattgctagagccttggatgatttcggtgtggactacatcgagttaacctctcccgtagcatccgaacaatcaagaaaggactgtgaagctatatgtaaactaggtttaaaggccaagatccttacacacattcgttgtcacatggacgatgccagagtcgccgtagagactggtgtcgacggtgtcgatgttgttatcggcacctccaaatttttaagacaatattcccacggtaaggatatgaactacatcgccaagagtgctgttgaagtcattgaatttgtcaaatccaaaggtattgaaatcagattttcctctgaagattccttcagaagtgatctcgttgatcttttgaacatttataaaaccgttgacaagatcggtgtaaatagagtcggtattgccgacacagttggatgtgccaacccaagacaagtatatgaactgatcagaactttgaagagtgttgtctcatgtgacatcgaatgccatttccacaatgataccggttgtgccattgcaaacgcctacacggctttggaaagtggtgccagattgattgacgtcagtgtactgggtattggtgaaagaaacggtatcactcctctaggtgggctcatggcaagaatgattgttgccgcaccagactatgtcagatctaaatacaagctgcacaagatcagagacatcgaaaacctggtcgctgatgctgtggaagttaacattccattcaacaaccctatcaccgggttctgtgcattcacacataaagcaggtatccatgccaaggccattttggctaacccatctacctacgaaatcttggaccctcacgatttcggtatgaagaggtatatccacttcgccaacagactaactggttggaatgcaatcaaatcaagagtcgaccaattgaacttgaatttgacggatgatcaaatcaaggaagttactgctaagattaagaagctgggtgatgtcagaccgctaaatattgatgatgtagactccattatcaaggacttccatgcagaattgagcaccccatttttaaaaccagtaaataagggtacagatgacgacaatatcgatatttccaatgggcatgtttctaaaaaggcaaaggtcaccaaatag

SEQ ID NO: 75848 - DNA, 261 bp, Saccharomyces pastorianus
atgttaaaccgttgcatttcccgtaataccaggctgccagtaaacctaagaattgtctctcgcttttattcagatggtcctctcggtggtgccggacctggtaatcctcaagatatctttatcaagagagaacgtgccaaagaggattattatgccagacaacaagagagggaacaattagcacatgtgaaggaacaactaaaagaacacaagaaaaaattagagaatttagaaaacaaaattaataacctttcaaagtga

SEQ ID NO: 75849 - DNA, 876 bp, Saccharomyces pastorianus
atggagctaagaagtagacggagcgcagaggcctatcttgtcacgcctgaggaacctgccaagaataagagtgaacggagcatagaatccaatgagagggtcggcacgagggaagcaaagagcgagaacacaagtgtatttagtcccgcttactctgataccgctactacagattcatcgaagaaagttgatgacaatgaatactacaattttactagtcacttcatgccatctttaaaaaacaccagagaactagaaaaaacaattctcaatctcatacagaggataaaggaaggggatgatgaaacgttagttagtgagaaagatctcatattaagtgtgcttaacaggtctttagcatccacatctcactggatgttacaggcccagctatcggagttaagggccacctcagagggaaggtatgcagttgagacaaacttgttgaaaaaagaggtagaatttttaaaaaacaagaccccaaaaaccaacgaaagtgcaggttccgcagagttgagaccacttcttgaacgaccttcaaagcgtaaactgtcattgccaggactagcgcaaagaccattatccactggcgctaggctagaaggaggatatggaggtgtatcgccgaactcatggaaaaccaaagttccaaaacttcctcttcctgcttcccggccgtctttgaatctttctccccaaaaagtcccaacgggtactgataaagttgaggaagataccaaaattgacacattggaattagtagagaacaataaaccgcatccgaggatgagaagaaggagtgacaatccagcaacaaacgaatatgtgagagtttttcatttggagaaaaaagaacctaaatcacgaaaaaaatag

SEQ ID NO: 75850 - DNA, 423 bp, Saccharomyces pastorianus
atgtgttgctactgtgtttgttgtaccgtttctgactttatactgtatattgttgcgttttttttccccccagctgcagtccttcttcgatctgggccttgttcatctgatttcctcctgaatgtattgctaacgctactgggatttttgcccggtatgttacacgcattctactacatcacaattacaagtcctttaaggaacgctgaatacgtctattattaccagcaaggctgggtggatagcgaaagaaacgttccttcgaatcgtcctcaaaactcgcagaccccccaaaaccgcccacaacaaggaagctccgctagaaacgtatacccgagcgttgaaactcctctgttacaaggggcagctccccatgacaacaaacagtctctggttgaatctcctcctccttatgtgccatga

SEQ ID NO: 75851 - DNA, 450 bp, Saccharomyces pastorianus
atgaatctatacggttattttttacttctcattattgtgattgctttcattgcattgttgccattgttttctggcatcggtacattcaaactaacaaaaccgaaatcgtctgcaacagcacagtcagcgactggtaagcttggtaagagggaatatttgaaaaaaaaacttgatcataccaatgtattaaagtttgatctgaaggacacggaggaaagccttggccatgacagtgcaagtgcctcttccgcttccagaaaatttgaaatagactcaaagacaggccttaaaagacgtgtaattggacagtacaacaaagatccaaatgatttcgatttcgatattgatgacctaattaacgaagatgaactagatgaacggagagaagaagagaaaaagttgaagaagtacaatggtaagaaaaatgaagcttacgaaggatttgtataa

SEQ ID NO: 75852 - DNA, 525 bp, Saccharomyces pastorianus
atgattaagcggtctctcgcaagtttagttcgagtcagctctgtagtgggcagaagatatatgatagcagcggcaggaggagaacgtgccagattttgtccagctgtaacaaataaaaagaatcatactgtaaatacttttcagaagagatttgtagaatcctcgacagatggtcaagttgtgcctcaagaagtgttaaacttaccgcttgaaaaataccatgaagaggcagatgactacctagaccatttactagatagcttagaagaactgagtgaggctcatccggattgtatacctgatgtagagctaagccatggcgtaatgacattggaaattccagcttttggaacgtatgtaataaacaaacagcctccaaataagcaaatttggttggcatcaccattgtccgggcctaacagatttgaccttctcaatggggagtgggtttcgttaagaaatggcacaaagctaacagatatacttactgaagaagttgagaaggccatttctaaaagccaataa

SEQ ID NO: 75853 - DNA, 924 bp, Saccharomyces pastorianus
atgactgagcaagcaactaagccaagaaattcatcgcatttgatcgggggctttttcggtgggctaacatctgctgttgcgttgcaacctttagaccttttgaagacgagaatccagcaagacaagaaagctacattatggaaaaatttgaaagagatagacagccctctacagctatggagaggtacattaccttcagcattacgaacatcaataggcagcgccttatatttatcatgtttgaaccttatgcgctcatctttggcaaagaggaggaatgctgtgccttcattaacaaacgattcaaacattgtatataacaagagcagtagcttaccacgattaacgatgtatgaaaatttactaacaggtgcatttgcaagaggtttggtaggttatataaccatgcctatcaccgtcattaaagtccgttatgagtctactctgtacaattactccagtttaaaggaggcaattacccatatatatactaaggaaggactttttggatttttcagagggtttggagctacttgtttaagagacgctccctatgcaggtttgtatgtgctgctatatgaaaaatcgaaacaattactgcccatggtattaccttctaggtttatacattacaatcctgagggaggatttactacttatacctctacaacagtaaatacaacaagcgccgtactatccgccagtttagccaccacagtaacggcaccgttcgacaccataaaaacgagaatgcaattggaaccatcaaaatttaccaactccttcaatacatttacatctatagttaaaaatgaaaatgtgctgaagttatttagcgggttaagcatgaggctggcaagaaaggccttgagtgcaggtattgcgtggggtatatatgaggagttggtcaaaagattcatgtaa

SEQ ID NO: 75854 - DNA, 381 bp, Saccharomyces pastorianus
atgtttgaatcgtttgttaatgaaggcacagcattcctcctctttgccaaagatgagcgcataaggttcaaacatgataaatataaggcgctgcctattgatgttcgtaatgctgaaggtaatgtacctctccatagctgtagagggctgtctatctctttcaaatttttccataatgtagctttcttgtcttgctggattctcgtcttcaaaaggtctaaaggttgcaacgcaacagcagatgttagcccaccgaaaaagcccccgatcaaatgcgatgaatttcttggcttagttgcttgctcagtcatgtatgctgcttcacaaattgtgtaccttctagttgttcccgctgtactatttgcttttcttttggtataa

SEQ ID NO: 75855 - DNA, 2658 bp, Saccharomyces pastorianus
atggccactaacttaacatgtttgaagccaccatttaaggtgaaggccaggtatggttggtcgggccaaactaaaggcgacttaggctttctggagggagatattatggaagtcacaaggattgccggttcttggttctacggcaagttattgagaaacaaaaaatgttctgggtattttcctcataacttcgtcatactattagaggagagattaaattcgagcactgaaaatggtaggcaaccttcaaaaatagtagaaagttttgaaaaatcaaataaagttgttattccaccagtaccatcaaggtattctgacaagaggccaaggcctaaaaagaagctatcttcatcaatgcccaattcacccaagaagccggtagattctttgacaaaggctagaaaggcaaaatcaaaagaaatggtaaatgaaaaaaatatctataatacccaatcctctcgacatcataataactcagctccaaatttacctttggctagccatagtaagcctcaagtacgaaatttcgaggagtccatgaacaatccgttaccacctctaccgccactaccagatttggacaatatgagaaagacagataaaagggcaccaaagaaatcatattctgcaaacgatttacatatggcacgttcttcaagagaatataactattacaaagacaatcagaaattctatgatgggtttatcccagaaaagagatattctttagaagaggactctatttcatcaggcctgttttcaaactctcagtacttaaatgattctgcttgtagtagtgagaacagttttgccttaatgagtgattttagtgccacgagcgcgggaagttttgccagacataaatatgcacaatcgttttccgattcattgcaaagatcacagaatgcaaatggctgctctacaaagataaatgattcacaggagtttggtgattccaatgctagttcgagaaatggaaaaatgggtgatatcattaggaaaataattattccaaagaggaatacaaatatttactccagttcagtatcctcaccaaagtcaccaaaagcatatcctaaactaccagatattcagaatttaaacttgtctgcaacacccgatgaagctcgcgattggattgcggtaaaatgtcacttgaacagagcaaggactcttaccaaatatgacaaacatccgaggtacatgagagctctcgaagaaaatcgcgacttgatcttacatcctcaagattcgatttataacgggctaaataccaatgaagtcaaaggtaatacaaagcccggtttggtcgatgtggaactggccgaattaaacatagaatacattgataagatgacttggaaacggtgtattagagacggaactatgacattagacagttgggctcaaacaactttttcagcaagatactcaactgttctggaaaagttaagaggcatatacattttttgcacagagatgtttgctctgactgatgataatggaacgtcagatttttctgcggaaccccaaaatttagagaaaatactatacagaaagcattgtacgccatatgaattgacatggcttttcaagaaattagcaaactcattgggaatcacttgtgaaattgttataggtttcctgaaaacaccgagtgctataaattgggagtttaagtataaccactgctggttgagaatactggttaacaaagaatggagatttattgacgttattttaggaaatgtaaccaacccaattcatgaatttgtaaataacagaaagatcaagaaagcagaaaatagctactttttgatggcaccattagaaatgatatacacacatataccacctagggaatttgagcagcatattgttcctagtatcgatcaattatctgcattgtatctgccattagtttttccatcttttttcaaaaatgagttaaagttatacaaatttagcactgcactatcatttttggaagattctgagatctacgaatgctccttagaaattcccaatgacgttgaagtctttgcatccgtggttattccaacggataatgaagaagcttcatctgcgtacaggaatatggaactcgcactgacccaaatcaaaaagcagaaagccgagtctggtagaagaattgctctaatcaaagcagtcctaccacccaatgtgaacaaaggttcactgtacatacattcaggtgtaagaggtacgcaaacgagtattgccaatatccatccactgtccatgatggtcccattaacacataagggaagtaacatgaaatacgaatttgtgatcaagataccctcagaaagcattcagaagattgagctatacattgtcgagccacagagtagatatctatttgttggtaatgagtactcattcgaagttattcaaagtccctccgatggtattatatacagcagtgatgaagggccgaacctaaataggaaacaaccaatggcaataaaatcaccctcgggaagagttcatgaactagtcaagagcgatcctcactttccttatggtacctggaaaggaagcattaaaatcaaagagcccggcgtctggagcgctttagtgatcgctgactctggtattgggtggtccgtttttgctgaatggttgtgcgtataa

SEQ ID NO: 75856 - DNA, 723 bp, Saccharomyces pastorianus
atggtgaatgactatttaaagttgaataaaggtgtagaaaagacagaaagaaaaaaaccaagtaggaaatattttactggggattctgcaaaaattgcatcactacccagtttagattacgtttttgacatctaccatttggagaaaattcatgacgatgaggttgctagatataacaacgagaaaaatatagggtttgtgaaaattattgagcatatagatttggctcttgatgaagaaagtgatcccaatgaagcccgttcagacgatgaggattctaatgacgaaaactattaccaaaatgattatccggaggatgaagatgatgatagatctattctatttggtagcgaaggggaggatatagctgcattgggtgaagagattgttataggggttaataagagcaggttttcctcttggaatgacgataaaattcagggatctaatgggtaccacgatgtggaggaagagtacggggatctttttaacaggcttggaggaaaaagtgatgtcttgaaatccataaattcctcgaatttcattgacttggatggccaagaaggtgaaatagagataagtgataatgaagatgattctgatgaaggagatgatattgaataccctagaaatgaattttttccgacggatgttgatgacccattggcgcatcatagggacagaatttttcatcagctacagaaaaaaattaatagaagctaa

SEQ ID NO: 75857 - DNA, 114 bp, Saccharomyces pastorianus
atgaacttctgcttcttcactcttttcccctcatcaattactgaattgtcccagatgaacttagttagtcaaacgcatttttgttatatcggtagaataacaacacatacataa

SEQ ID NO: 75858 - DNA, 1923 bp, Saccharomyces pastorianus
atgtcagacttaaatgatgtccaagaaaatgctaaattgaattcggaaactcggaatacaggaaaggctgaaccacctcatgggacaactgagtatgtggcagaggcagaaatttctaagaatggagttggatcgccaaaaaagagcccaaaaaagggtaaggttggaaagggggacaataacaaagtagaaactgagttagtacacacagccctgttagaaaaagacaacccattcattgaggaggggccaacaggattcacaaaatcagctttattagaaatacccggtatgagaagccataagctaaagaacccgaatgaagattacgaggatgactctgagggattattgcctttaaaccaggaatcgaatgcagaaacatgtagaacaagtcttagtggaagtattaactccatgaacggagagacctctgcgtcagaagaaccttctgtaagtaatagaaagaagtccgctaggatacacatacttgaagcgaaaagagtttccgaaggtcaaggaagagcctacatcgcctatgttattcagtttgaaaattctaccgttcagagacgttacagtgatttcgagagtttgagaagtatcttgataagattgtttcctatgacgttgataccgccgattccagaaaagcagtcaataaagaattatggtaagtcaataactggttcgagttcaaagtatttgctgccctcagaaggttctggttcagtagatctatcattgtctgtgatacatgcgtcggtcaataatagtgatgaaaagttaatacggcataggataagaatgctcactgagttcttgaacaaacttttgatgaacgaagaaataacaaaaacatctataattaccgattttttggatcctaataaccataattggcatgaatttgttaacagttcgtccactttttcatctttaccgaagagcatcctccagtgtaatccattggatcccactaacaccactagaattcatgccatgttaccaataccgggctcctcgtcacagttattgttgaataaggagtccaacgacaaaaaaatggataaggaaagaagtaagtcgtttactaatattgaacaggattacaagcaatatgagaacttgttagataacgggatttataagtataatagacgaaccacgaagacttatcacgatttgaaatcggattacaatgaaatcggtgaggtatttgcacagtttgcccatgaacaggctcaagttggggaattggccgaacagctttcttacttaagcaatgccttttgggggtcctcgatttctttagaaaaattagttggaagattatactacaatataaatgagcccttaaatgaatctgttcatatggcaacttctgcaagagaattgatcaaatacagaaaattgaaatacctgcaaaatgaaatgattaaaaattctctgaattccaaaagagcacagttggagaagctggaagcgcaaaacaatgaatataaggatgttgacaaaataattgacaacgaaatgtctaaaagtcatactattaatctggaacgccctaataataatacaggtagcggtgggaaatcatatggtggcaaactattcaatggatttaacaaattggcatcaatggtaaaagattctgtgaagtatcaagaaacagatccgcataccgcaagtatcaatttgaagaaagaaattgaacaactgtctgaatcattggaagttactgagaatgatttggaggtcatttcaaaagtcatcaaaaatgaccagctacctaaatattctaaagaaagggaagtagatttatcagaaattttaaagcattattccagatatatgagaaattatgcccgtcaaaatttagaaatttggaaagaagtcaaaagacatcaagattttgcatag

SEQ ID NO: 75859 - DNA, 798 bp, Saccharomyces pastorianus
atgtctctttcggtcgccgaaaagtcgtacctatacgattcactagcaagcacgccttcaattaggcccgatggaagactacctcatcaattcagacctatagaaatatttactgacttcctaccaagttccaatggatcgtccagaattatagctagtgatggaagtgaatgtatcgtgagcattaagtccaaagttgtggatcatcatgtggagaatgaactacttcaggtcgatgtagatatcgcaggccaaagagatgacgcgctggtagtagagacaatcacttctttactgaacaaggttttgaagtctggtagcggagtagattcctcaatgttgcaattgacaaaaaagtacagcttcaaaatatttgtcgatgttctggtcatttcatcacattcacacccagtttctttaatatcctttgctatttattcagcgttgaactccacatacctaccgaaacttatttcagcttttgacgacttagaggtggaagaacttcctacgtttcatgattacgacatggttaagcttgacattaatccgcctttagtgtttatattggccgttgttggcaacaatatgctattggaccctgcagccaacgaaagcgaagtggccaataatggcctaatcatttcctggtctaatggtaagattacatcacctatcagatcagtagcattgaatgattcaaacgttaaaagctttaaacctcatttgttgaagcaaggtcttgcaatggtggagaaatacgcccccgacgtagtacgatcactggagaatttataa

SEQ ID NO: 75860 - DNA, 453 bp, Saccharomyces pastorianus
atgtgctcagcaggcggtatcagaagaccaatccagatcgaagaatttaagacggcgataagcggcatgtccgacatggagttggcacagattaaaacagaaattgagaacagtatcaatcatttgcagaggtctaccgcccgcttgggtaaatacatagctaagttggagggtgctgacgaccgtcttgaagctgacgacagcgacgacttggagaacattgattcgggagacctggcgctgtacaaggactctgtcagggagaacgaaattgtgctaaacaattacaatgagagagtggacgcattggagcaagaaacggtatatagaaagacgggccatggcaagagtaagcacgaggtagaggcaaaggacaacaccaacaagggccctgacgttgacatggacaattcaaatgtggacgtcgtgacaccaaacagcatattcatttaa

SEQ ID NO: 75861 - DNA, 1944 bp, Saccharomyces pastorianus
atggaagctggcaggagtgctgatgaagtgctataccacaatcagtcgtcagtaaagttaggtgagttagaaagatacgttattacatatgagctataccagggtgatagtattcccgctgatatcacactggattccctatgggtaaagatcaaaaataccacaaagctatcctataaaccagcctatctattgggcccatttatcttatattgtgacgtgcgagcaaaagattacgaaagctcgtataagatcatatgttcggcggataaaccagtatttcaatcaaacctacaggcacaacaaaagtttattgcagagttgtccttgcaccacattaagccacgctatgtatggatagtggatattgtcagtcaaatactatttaataaagaaactaaggtaacttttgagatagtagtcggcaattcaaaggcctctttgaaaagaaaaatacgatgtgatgattcattgcctgataaagcctgcaatattttacacacaggattatcggtgcatagacttaccaccgcagatatatggaaagtaccacgacccatagacatgtcgcaaaaatcccatttagtcattctcacgcatggttttcaatcaaacgtttcggcagatatggaatacttaatggaagaaatatacaaggctcaaatgaacaatccaaatgagcgactagttattaagggatatatgaagaatgcttgtgagactgagaagggtattaagtttttgggtgttggattggcaaactacatcatcgacgagttatatgatgactctgtagggaaaatctcatttattggtcattccctgggtggattaacacaaacttttgctatttgttacataaagaccaaatatccatatttctttaagaaagtggagccgatcaattttatctcactggcgtcaccattgctaggcattgctaccagcacgcctaattacgtaaaaatgtcattgtcgatgggtatcattggtactacggggcaagaactgggtcttaaggatggaaattatggtgataagcccctactttacctgctatccgaggaatccttaatcagtgtgcttgctcgattcaaaagaagaacactttatgctaatgccgtcaacgacggaatagttcccttgtattcctcttctttactttttttggactactctcaattacttcagaaactgggaggtcaaactacggcatcttgtgatcctctcttccagcctgaagtaagtcctattggggaacttccaaatcatagcgatgttgctaatgatgatgatggaatcaatgcatcgtcatggaacacgttttggaagagcaaggaaaataactgcgacaagaaatttaaacgcttgatgaatgcttccgtcatcaaatccatgaagtctgtgcttctatcaccatgccccgaggcaaagttcttctcagatcccgatgcaagggtcgcaacaatcatacatgataagatctacacagaaaagaatttaccgcctccatcaccaacactttatgaaggaacagcagccaaggaaggcgaaacgaggaagacgagaaaagagatggaggaaatcatagcacgacgctggcacaaggggatgcattggaggaaagtcgtggtattgctgaaaccagatgcccacaataacatcatcgtaagaagaaggttttccaacgcttacggctggccggtggttgaccaccttgttaccgcccatttccaaagagatgacccaatcgccttaccaatgcaagataaacagtttgctgaggaagatataaacatggcaaccggaggggtggaaccaaacaagttctactcatggctcaccaagatcgaggatcctagtgtgtaccatggtggaatagtctccacagctagccagctcgccagctcctggattagcaagcattcctctgtgacagattga

SEQ ID NO: 75862 - DNA, 1650 bp, Saccharomyces pastorianus
atgatggaagaattctcgtacgatcacgattttaacacacattttgctacagatttggattatttgcaacatgaccaacaacataatcaacagcaacaaccacaaccacaaccaattcaaactcaaaacctggagcacgaccacgaccaacatactaatgatatgagtgcttcatcgaatgcatcagatagtggacctcagaggcccaagagaactcgcgcaaagggtgaagcactagatgtcctaaagcgtaaatttgaaataaatccaacaccctctttggtagaaagaaagaaaatatcagatctgataggaatgcctgaaaaaaacgtcagaatttggtttcagaacagaagagctaaattgaggaaaaagcagcatggaagtaataaggacacaatcccctcgtcacagtcccgtgaaattgccaacgattacgatcgtgggagtacagacaacaatttggtcactacaacaagtacttcatccatatttcacgatgaagacctgacttttttcgaccgtattccgctgaacagcaacaacaactattatttttttgacatttgctcaattactgtgggaagttggaatagaatgaaaagcggcgcactgcaaagaaggaactttcagtctataaaggagttgagaaacctatcgccaataaagattaataacataatgtcgaatgccacagatttaatggttttgatatccaagaaaaactcagaaataaactatttttttagtgccatggcaaataatactaaaattctcttcaggatctttttcccattaagttcagtcacgaattgctctctaactttagaaactgacgacgatataataaatagtaacaacacaagcgataaaaacaatagtaatactaataatgatgatgataacgacgataacagtaatgaagacaatgataatagtagtgaggataagaggaatgctaaggataactttggagaattgaagctaacagtcaccagatcacccacttttgctgtttactttttaaataatgctcctgatgaagatccaaatttgaacaatcagtggtccatatgtgatgatttctcagaaggtagacaggtaaatgacgcatttgttggtggttcgaatattcctcacactttgaaaggtttacagaaatcattaagattcatgaattctctaattctagactataaatcatcgaatgaaatattacctacgatcaatacagcgatccccactgctgcagttccacaacagaatattgcccctccctttctgaatacaaattcaagtgcaacagactcaaatccaaatacaaatttagaagattctctcttcttcgatcatgatctgttatcgagttcgataaccaacaccaacaacggacaaggctctaataatggacgtcaagctagcaaggatgatacgctcaatttactggatactaccgtcaacagcaataataatcataatgctaataatgaggagaatcatctagcgcaagaacatttatccaacgatgctgatattgttgcaaatccaaatgatcatttgttgtctttaccgactgatagtgaactcccaaatactccagattttttgaagaacactaacgaactaactgacgagcatagatggatatga

SEQ ID NO: 75863 - DNA, 1209 bp, Saccharomyces pastorianus
atgtctagtacagtaatatctagaaagaggagaaacagcactgttactgagcctgacagtagcggagaaacaagaaaacaaaagaagtcgagaagtgatgaaaagagctcatcttctaaggatggtgacccccagctagaatttaaagttttacagggatatagggacctggaaagtgaaatgcacaaaggcagagctcaggtgaccagaacaggagatataggtgttgctatggacaatctgaacgctgtggattccctattcaataaggttattggtataaagaataatggattgtttgctcatgatgctagagcaatggttagtataagtgaattggctcaaatttctgtgagaaatttgaagtttgatgattcgaggagtatggtcaatttagaaaacatagtaaattccttgaaaagatacatgctaaaagagcatttcaagcttaataatatcgccgaaaataggaatgatttgacgcttgccgctgatgaacaatccgcagcagaccagcaagaggaaagtgatggagatatcgataggacgcctgatgataatcatacagataaagccacttcctctttcaaagcgacatctatgaggcatagttatctacagcagttttctcactataatgagttttctcaatttaattggtttagaataggtgctctctacaatactataagtaaaaatgccccaattaccgaccatttaatgggacctttatccatagaaaagaagccacgagtgttaactcaacgaagaagaaataatgaccaagttggtgaaaagatcaccgctgagaaaatcactcagcattctttaaattccacacagcaagaaactacccctgaacaggtcaagaaatgtttcaaaaaactttcaaaaaaattaggcccagaaggttccattaatctttttaaatttattatagacccaaattcattctcgcgatccatcgaaaatcttttctataccagttttttgatcaaagagggaaaactattgatggaacacgatgaagaaggtttacccacaattaagataaaacaaagcataagtcacacagattcaagaagtaaagaaattgagagacaaaggcgtcgtgccgctcatcagaatcacattatttttcaaatggacatgcctacttggcgaaaactaataaagaaatacaacatcacttcaccattcttagactaa

SEQ ID NO: 75864 - DNA, 1224 bp, Saccharomyces pastorianus
atgatatcaataaaaggaaccggaagatttctcctcgataactatagaatttggcagaggcgtgcatccaacagaccaatacagttaagaaaaggctataaagttttagccattgagacttcttgcgatgatacatgcgtttcagttttggacaggttctcaaaaagtgcagctcctaatgtgctagccaatttgaaagatactctagatagtattgacgaaggaggtattataccaacaaaggctcatatccatcaccaagctcggataggacccttaactgaaagggccctgatagaaagcaatgcgagagaaggaattgatctcatatgtgttacaagaggccctggtatgcctggttcattatcaggaggattagattttgcaaaaggtttagctgttgcctggaacaaaccactgattggtgtgcatcacatgctgggacacttgctgataccaagaatgggtacaaatggaaaagtgcctcaatttccctttgttagcctgctggttagtggtggtcatactacgtttgttttgtcacgagcaattgacgatcacgaaatattatgtgatactatcgatattgcagtgggtgactcattagataaatgtggcagagagcttggattcaagggaacaatgatcgctagagaaatggagaaatttattaatcaagatattaacgaccaagattttgctttaaaactagaaatgcccagtccgttaaaaaacagcgctagtaaaagaaacatgctttcgttttcgttttcagcatttatcacagcattaagaactaatttgacaaaactagataaaacagaaatccaggaactgccagaacgcgaaatacggtcaattgcatatcaagtacaggaatctgttttcgaccatataataaataaactgaagcacgtgctcaagtcacaaccggaaaagtttaaaaacgtgcgtgaatttgtatgttctggtggagtgagtagtaatcaaaggttgagaacaaaattagaaacggaattggggacgttaaactccacaagcttttttaatttttattatcctcctatggacctttgtagtgacaactctattatgatcggctgggcaggtatcgagatatgggaaagcttacgattagttagtgatttagatatatgtccaattaggcaatggccattgaatgacctattaagtgttgatggttggagaacggaccagctatga

SEQ ID NO: 75865 - DNA, 1434 bp, Saccharomyces pastorianus
atgactgacacaaaacagctattcattgaagccggacaaagtcaacttttccacaattgggaaagcttgtctcgcaaagaccaagaagaattgctttcaaacctggagcaaatatcttccaagaggtcccctgcaaaactactggaagactgtcaaaatgctattaaattctcactagctaactcttctaaggatactgtcgtcgacatttcaccattgccccctacttcgtacgagtcgcttattggcaacagtaagaaagaaaatgaatactggcgtttaggccttgaagctattggcaagggtgaagtcgcagtgattttaatggctggcggacaaggtacgcggttaggatcctctcaaccaaagggctgttatgacattggattgccttctaagaaatctctttttcaaattcaagctgaaaagttgatcaggttgcaagatatggtaaaggacaaaaaggtagaaattccttggtatattatgacatcaggccccactagagcggctactgaggcatactttcaagaacacaattattttggcttgaataaagaacaaatcacgttcttcaaccagggaaccctgcctgcctttgatttaaccgggaagcatttcctaatgaaagacccagtaaacctatctcaatcaccagatggaaatggtggactctaccgtgccatcaaggaaaacaagttgaacgaagactttgataggagaggaatcaagcatgtttacatgtactgtgtcgataatgtcctatctaaaatcgcagaccctgtatttattggttttgccatcaagcatggcttcgaactggccaccaaagccgttagaaagagagatgcacatgaatcagttggattaattgctactaaaaacgagaaaccatgtgtcatagaatattctgaaatttccaatgaattggctgaagcaaaggataaagatggcttattaaaactacgcgcaggcaacattgtaaatcattattacctagtggatttactaaaacgtgacttggatcagtggtgtgagaatatgccatatcacattgcgaagaagaaaattccagcttatgatagtgttaccggcaagtacactaagcctaccgaaccaaacggtataaaattggagcaattcatatttgatgtctttgacactgtaccactgaacaagtttgggtgcttagaagtagatagatgcaaagaattttcacctttaaaaaacggtcctggttctaagaacgataatcctgagaccagcagactagcatatttgaaactaggaacttcgtggttggaagatgcaggcgctattgtaaaagatggggtactagtcgaagtttccagcaaattgagttatgcaggtgaaaacctatcccagttcaaaggtaaagtctttgacagaagtggtatagtattagaaaaataa

SEQ ID NO: 75866 - DNA, 1065 bp, Saccharomyces pastorianus
atggatttaaccgtggaacctaatttgcactctttaattacctctaccactcataagtggattttcgttggtggtaaaggtggtgttggtaagactacttcatcatgttccattgctatccaaatggctttgagtcaaccaaacaaacagtttctactgatctctactgatcctgcccataacttaagtgatgcattcggtgagaaatttggtaaagacgccagaaaggtgacaggcatgaataatctatcatgtatggaaatcgatccatccgctgctttgaaggatatgaacgacatggcagtttcacgcgctaacaacaacggaagtgatggtcaaggtgacgatctaggaagcttgcttcaaggtggtgctcttgctgatttgaccggttccatccctggtatcgacgaagctttatccttcatggaagtcatgaagcacattaaaaggcaagaacagggcgaaggtgaaaccttcgatactgttatttttgacactgctccaactggccacacattaagatttctacaactaccaaatactttatccaagcttttggaaaagttcggtgaaattaccaacaaattgggcccaatgctaaactcttttatgggcgcaggtaatgtcgatatctctggaaaattgaacgagttaaaggctaatgtcgagaccatcagacaacaattcacggatcctgacctaacgacttttgtttgcgtttgtatcagtgaattcttatccttatatgaaactgaaagactaattcaggaattgatttcctacgatatggacgttaattccatcattgtcaaccaattattatttgctgaaaacgatcaagagcacaactgtaagagatgtcaggcaagatggaagatgcaaaagaagtacttggaccaaatcgacgaattgtacgaagatttccatgtcgttaaaatgccattatgtgctggagaaatcagaggcttaaataacttaacaaagttctcacagttcctaaacaaagaatataaccctattactgatggcaaagtcatttatgagttagaagataaggaatag

SEQ ID NO: 75867 - DNA, 1026 bp, Saccharomyces pastorianus
atgtctgaacaggagtctgatgaagttaagcgtatgaaacaattggaagaggctagaaagagagtagaagaattgaagaaaaagaaaaataaaaagaataaaggtaagaagaataaaaatagcagtgccacaggctctataggatctgaaactcctgatttagagggcacaccaggcgaagagtccacacaggaggagactgtgaaagcaaattccaccaaaagtgaaaacaacgatcaaaatgacgtggatgaggagagtgaagaaaaagaaatagaacaggttaaatcagatccttcgggcacaacagagaaagatattgaagaaataaatagtacttcatcaaatgtgggaaaggatgatgcagaaaacacacaaaaagaggaagttcaagaggttataaaaaataacgacgatgagcaaacagcagatgccggaaagaccatagaaccacaagaggaaaagaaaattgtacaagctcaagaaggaaacgaaccttcaaatacatcagaagcagcagacgatttatttgccaatgacggcaatgaagaatctgactttctcaccacgattaaaaagcaaaaagaagaagatgagttgaccaaactaagggcggaaaatgagaaactcacacaggaaaataaacaactgaaatttttgaatatggaaaatgaaactactgtcgatgacctacaggatcaattgcaggaaaaagaagacatcattaatggtttacaaaacgatttgcaaactgcaagggatgaattaattgccgcagtagaaaaattaaaattagcagaagctaaggcagcaagaaataccacagcaactcctattcaatttgcggatttcaacacttcaagcaataatctaactccctcacaatctgtaaccaattctggtacgcaggtggcccacgggaataatatggaagtggatcgcgttatgctgaacaaatggcgccagtggaacgtagacatgaccacttggagaagtattggttctggcccaataatggaattttga

SEQ ID NO: 75868 - DNA, 585 bp, Saccharomyces pastorianus
atgtcgaattttggcagaagaacttgggatagagaggagtatgctgagcaggctagaagcggctatgacgatcgatcattaaaggctacgctaacaccgattgaattacaagctttaaaatccaaatatacaaattacgatcatttaatcaagggctcgctaaaagacctaaataaaaggaaactaacagcaaatacagagagcttatcgtctttcaagaggggaaagaagttcggattttactgcgatatttgtaacctaaccttcaaagacactttacaatacattgatcatctcaaccacaaggtccatgcaataaaatttgaaaatttgtttgatgaaccgttaattatagatataagagataatgatgacgtaccgcaagaggagtttgagttgtgctatcataccttgataaaagattttgtagaggtgcgttctatggagactcagtccaagaggaaaaggcttttggacacagatgtggagaaagcaaagaaagtggctactaagccttctattgagagtgaatcaaaagtcagtaaaatgatgggattttccaattttgccacctctaaaaaatga

SEQ ID NO: 75869 - DNA, 441 bp, Saccharomyces pastorianus
atggcaaatactggctgtttatcaccaggtgcatttttatcaaaggttccagaatttttccagactgcgaatgaaaaacatataactgtgcgtctaacggccaaaagactcatagaacacgatcctgtggaagggaatcttgaatttgattctaccaaccatcctgactatgatgtatctaaaaaggcttctgaaatttcagttagctcaagatctgacagagaatacccactattaatcagaatgtcttatggctcgcatgacaagaaaacaaaatgctcaacagtggtaaaagcaagtgagttagatcaattttggcaagagtattcatctgtatttaaggggggcatgcagaatttgatcaagaagaagaaaaagaagagtaagaacggtaccatcagtaagacaggtaagaaaaacaaggtagcgaagaaaaactga

SEQ ID NO: 75870 - DNA, 1368 bp, Saccharomyces pastorianus
atggatatatttaggcatacttttggaaataatgatgattcctttattcgaatcccaggtgcttttagagaagaaccacctgctgatttgaatggaaggacagaagatcaaaacagcaatacaaatgaacccacacagagccgggatggacgcttaaaatcaatactccattttttatttcaagctcccctaatagttctttattatttattgaatttcattgtccgaagttcaagtcttttaaaacctctattaagacttcacggattctaccagaggaagcacaaccgtttactagaccacagttcccaattacaccgtcttttagaaaacctagaaaacgaagctcaagctgtaacgtgttctgatggtaacgggaataatgatgatggcagcaatactgacagtacgagcaacaatgagagcagtggggtccagtttagttttggttctttatacaaccctgaaaatggaacattttccaaaagcattatgcaaaatagttacactgaattattggatgcttgtagcgaacaagtgaaatttggagtcatttatttacatgacccattgttggataatcatatggattacgttaataaaatattgtgctcagaagcctttgttaacatgataaggaagtaccaggtattactatggtatggtgacgttactacatccgaggggttgcaagtttccaatgcattaaaaattaggcaatatcccctacttggaataatttctttaaaggctgagaaaaaaatagagttaatagcaagagttgaaggttccatttctaactacaaagctcaagatttggaggccatattctccaagaattattctcgattaattcaattgcgtcagcaaagacaaaatattgaaatgcagagattaataagacaacaacaggattcaagataccaggattccttaagacgtgatcaacaaagagaatcagaaagattggaacagacccaaagagaacaaatggaaagagagcaccaaagaatagaaaaccaatggctattgtggagaaaaagccaactaaaacccgaaccctcttctgataaagatgcaagcaaagttgcgatcagactagaaaatgggcagagattagtgagaaagtttgacgcatctctaccaacggaggagatatatgccttcgtagaattacagttgcatgacatgttgaactcagaaaacgatactttacccgtataccaacctgctaattatcagcaccagtatagcttcaaattgatcacgccggtaccaagaagagagcttgatttatctaccaaaatatctgacgttagcggcatatatccatcaggaaatattgtaatggaacgcctggacgaatga

SEQ ID NO: 75871 - DNA, 786 bp, Saccharomyces pastorianus
atgtcaactatgtcaacgcctgccgcagaacaacgcaaactcgtcgaacagctgatgggcagggacttcagtttccgccacaacaggtattcgcatcaaaaaagagacctcggactacacgatcccaagatctgcaaatcataccttgttggcgagtgcccctacgacctgtttcagggcaccaagcagagcctgggaaaatgcccgcagatgcatcttaccaagcataaaattcagtacgagagagaggtcaagcagggcaaaacgtttcccgaattcgaaagagaatatctggccattctatctcggtttgttaatgagtgtaatggccagatatccgtagcactacaaaatctaaaacacaccgctgaggaacgaatgaagattcagcaggttaccgaagaactagatgtcttggacgtgcggataggcctaatgggacaagagattgattctttaattcgtgcagatgaagtcactatgggtatgctacagtcagtcaaattacaagagctgattagtaaaaggaaagaagttgcaaaacgtgtacgaaacattacagaaaacgtgggccagagcgcccagcaaaagttacaggtttgcgaggtgtgtggggcatacctatcgcgtttagatacagacagaaggcttgctgaccacttcttggggaagattcatctgggatatgtcaagatgagagaggattatgatcggctaatgaagaataaccggacaactaacgccagcaagacagctactacactacccggaagacgctttgtgtag

SEQ ID NO: 75872 - DNA, 822 bp, Saccharomyces pastorianus
atgttgattactgagacctttcatgatgtgcagacatcatacggcaccactctgcgtatatacgtatattctcctaagattgcaggctatccacaagctaagtttcctggggtgattctgtacagtgaaatttaccaagtgacgggtccggttcgtcgttttggtcaaagaattgcgtctgaaggttacgttgtggtggcacctgccatataccacaactttatgggccctgaagcgttgccctatgacgtgcagggtaccgatattggtaacgagtacaagatcaagaagccgttagaatcatacgatgaggacaacaaactgtgttgcgatctactcttccagttaccccaattcgatggtaagagaattggttccacaggaatgtgtttaggtgcccatttggcttttagagcgctcctggacaaaagggttacctgcgcaacctgcttcttccctaccgacatccattccaaaaccttaggtcttggccagaacgataactctttggaacgtgtttcgaaggagttgggtaataaccaagaaatggttttgatcttcggaactgcggacacccatgtcgacccgcaaggccgcgatctaatcagaaagaccctcagagaccacggagtaaagtttacgttcttggaaatcctggctgcccagcatgcgttcatccgtgacgagttcagcaagggcaggttcgactccgctatcactcaaagttgtctcggcttcttgttcgagcagttcaacagaaaattgagaatcgatttgggtgaatttgtcgatgataatacacctttggagcacgtttgttaa

SEQ ID NO: 75873 - DNA, 435 bp, Saccharomyces pastorianus
atgaacgcatgctgggcagccaggatttccaagaacgtaaactttactccgtggtctctgagggtctttctgattagatcgcggccttgcgggtcgacatgggtgtccgcagttccgaagatcaaaaccatttcttggttattacccaactccttcgaaacacgttccaaagagttatcgttctggccaagacctaaggttttggaatggatgtcggtagggaagaagcaggttgcgcaggtaacccttttgtccaggagcgctctaaaagccaaatgggcacctaaacacattcctgtggaaccaattctcttaccatcgaattggggtaactggaagagtagatcgcaacacagtttgttgtcctcatcgtatgattctaacggcttcttgatcttgtactcgttaccaatatcggtaccctgcacgtcatag

SEQ ID NO: 75874 - DNA, 1341 bp, Saccharomyces pastorianus
atgtcacacgaaggtgaagaagatttattggagtactccgataacgaacaagaaattcaaattgatgcctctaaggccgctgaagctggagaaactggcgccgccacttctgcaactgaaggtgatagtaataacaacactgcagctggcgacaagaaaggttcctatgttggtatccattccaccggtttcaaagatttcttgctaaagccagaactatcaagagccatcattgactgtggttttgaacatccttctgaggtccagcaacataccattcctcagtcaattcatggtaccgatgtcttgtgtcaagcaaagtctggtttaggtaagacagctgtctttgtcttatccactctgcaacaattggaccctgttccaggtgaagttgccgttgttgtcatttgtaatgctagagaactggcctatcaaattcgtaacgagtatttgagattttccaaatatatgccagacgttaagacagcagtcttttacggtggtactccaatttctaaggatgctgaacttttaaagaataaagatactgctcctcacattgttgttgcaactccaggtcgtttaaaagcgttagtgagagaaaaatacattgatttgtcacacgtcaagaactttgtcatagatgaatgtgataaggttttagaagaattagacatgagaagagatgtgcaagaaattttcagagctactccaagagacaaacaagtcatgatgttttcagccacactttctcaagagattagaccaatttgtagacgcttcttacagaatccattggaaattttcgtcgatgatgaagctaagctaaccttgcacgggttgcaacaatattatatcaaattagaagaacgtgaaaagaaccgtaaattggctcaattattagatgatttggagttcaatcaagtcattattttcgttaaatctaccacaagagctaatgagttgaccaaactattaaacgcctctaactttccggctatcaccgttcatggtcatatgaaacaagaagaacgtattgctcgttacaaggctttcaaagattttgaaaaacgtatttgcgtgtccacagatgtttttggtagaggtatcgatattgaacgtattaatttagccatcaattacgatttgactaatgaagctgaccaatatttacatcgtgtcggtagagctggtagatttggtactaagggtttggctatttcattcgtttcttcaaaggaagatgaggaagtcttggctaagatccaagagcgtttcgatgtcaaaatcgctgaattcccagaagaaggcattgatccgtccacttatttgaataattaa

SEQ ID NO: 75875 - DNA, 321 bp, Saccharomyces pastorianus
atgtctactgaatctgcttggtcttacgccgccttgatttgggctgactctgaaatcgaaatctcttctgaaaagttgttgactttgactaacgctgccaatgtcccagttgaaaatatctgggctgatatttttgctaaggctttggacggccaaaacttgaaggacttattggtcaacttcagcgctggtgctgctgccccagctggtgtcgctggtggtgtcgctggtggtgaagccggtgaagccgaagctgaaaaggaagaagaagaagctaaagaagaatccgatgacgacatgggtttcggtttatttgattag

SEQ ID NO: 75876 - DNA, 1032 bp, Saccharomyces pastorianus
atggtcaaagtcgcaattcttggcgcttctggtggcgtgggacaaccgctatcattactgctaaaattaagcccttacgtttccgagctggcgttgtacgatatccgagctgcggaaggcattggtaaggatttatctcacatcaacaccaactcaagttgtgtcggttatgataaggatagtattgagaacaccttgtcaaatgctcaggtggtgctaataccggctggtgttcccagaaagcccggtttaactagagatgatttgttcaagatgaacgccggtattgtcaaaagcctggtaaccgctgttggaaagttcgcaccaaatgcgaggattttagtcatttcaaaccctgtgaacagtttggtccctattgctgtggaaactttgaagaaaatgggtaagttcaaaccaggaaacgttatgggtgtgacgaaccttgacctggtacgtgcagaaacctttttggtagattatttgatgctaaaaaaccccaaaattggacaagaacaagacaaaactacaatgcacagaaaggtcactgttattgggggtcattcaggggaaaccattatcccaataatcaccgacaaatcgctggtatttcaacttgataagcagtacgagcacttcattcatagggtccagttcggaggtgatgaaattgtccaagctaaacagggcgccggttccgccacgttgtccatggcgttcgcgggggccaagtttgctgaagaagttttgaggagcttccataatgagaaaccagaaacggagtcactttccgcattcgtttatttaccaggcttaaaaaacggtaagaaagcgcagcaattagttggcgacaactctattgagtatttttccttgccaattgttttgagaaatggtagcgtagtatccatcgataccagtgttctggaaaaactgtctccgagagaggaacaactcgttaatactgcggtcaaagagctacgcaagaatattgaaaaaggcaagagtttcatcctagactcttccaagctatga

SEQ ID NO: 75877 - DNA, 885 bp, Saccharomyces pastorianus
atgtcggtaagcgaacaagatcctaatagggcgtacagagagactcaatcccagatatataaactacaggaaacactactaaattcggcgagaacaaaaaataagcaagaggagggacaagaaagcaacacccattcttttccagagcagtatatgcattaccaaaacggcagaaattcggcctacgacctgcctaatgtaagttcacagtcggttcttgctttcactgagaaacactatccaaacaagttaaaaaacttgggtacactttattacaatcgtttcaaagaagggtcttttgatgaagactccacaagttactcagacaggcacagttttccatacaacctttatgacaacactcttccaccaccgttccttccagctatcggtattcaaaatatcaataacattgcaacgctaaaaataacatatgaagatattcaggcaagtttcaataatatagaatctcctagaaagagaaataatgagatatggggatgtgatatctattctgatgactcagacccaatactagttttaagacattgcgggttcaaaattggagcgccttctggtggctcatttcacaaattgagaagaacccctgtaaatgtaactaatcaagataatgttacaggtaaccttcccctactggaaggcacaccttttgatctagaggtggagttgttgtttttgcctactctacaaaagtatcctagcgtaaaaagatttgatataacatcgcgggaatggggatcggaagccaccgttatacacgatggactgagttacggtatctatagtattgtcattaagcaaagactagatagagataaacctcatgaaccaaacgggtatattaaaaatttaaaatggacctaa

SEQ ID NO: 75878 - DNA, 612 bp, Saccharomyces pastorianus
atgtcattatattacaccttgttttttgccattctagtgttggagattttcatgttctccattctagccctacctatcccttctagataccgtaggcctctcaccttactgttattaaagccgttcaaatcctccacagtgcaagttgcgatcaagtgtatacttgggttcattcttttgcttttcatcgattgtatcaacagagtgtacagcatcgacaaagagctgcagttaagtagcgcctctcaaaataatggcgctataatcgctcaagatagaattgaggtgctttctaggaaattctttgcccaaaggaatatgtatttgacaggtataactttgtttttgacctttgtcgtcgttaggacttttgggctagtcatagaacttttaaccatgaaagacatatacagagcatcgcctccagtagcctccagcgatgtcaagaagaacgactctgttactgccgaagctgctgctcaatccggcgcttccaaggatgaccacggcgatgagaaaaattttgaactattgaagaaaattcaggacatcgatgacgaaattgcacgtttaaaggagaagtcggaatcgttgcaagaagaaatgaattag

SEQ ID NO: 75879 - DNA, 330 bp, Saccharomyces pastorianus
atgagctgttcacccaatttttgtaaagtttcgtttcttgtttcaaatgtatttcctgtgctcaagtctccagtcattggtactcgtaccaacatattcctgcttgtggtatatagcagtttagttagttctttagtcggtatgcgttcctttcctttatatccgtcaggattaacttcaaggacttcacacagtttttctatcttactaatattctttttcgtcaccgtgtttatagttctgatgggaatattcctgcgaatcccagatattcgagcaacagtagttgcaaacacttttgtccttaacatgtcgagattcattatctga

SEQ ID NO: 75880 - DNA, 180 bp, Saccharomyces pastorianus
atggctattgctccaattactggtacgatcaagagaagagtcatcatggacatcgtcctcgggttctccctcgggggtgtcatggcctcttactggtggtggggattccacatggataagattaacaagagagagaagttctacgcagagctagctgagaggaaaaagcaagagaactga

SEQ ID NO: 75881 - DNA, 426 bp, Saccharomyces pastorianus
atgtccgaattagaatcgttcagcaatttattcaaaatgataggaactaatttctctttcagtaaaagttgtctcatatgtgcatcctcacaaagaacactgatggaactcaaagcaatacttctatcatttggcaccacacttgacaaattctgcaatagcggctggagttttttattaacgacgttggtatctttattattgtcatttgacccagctttgcgtagtggatttaatcgagacgaagatgctcttgatcttttctttgatctgcccattcttttctgccctaaaaagtcgatttctgcgtccttgtacaaactcgaaaatccgatcgaaagtacttggaattcagtaagaataatgggggcgttgctacgaagatttaattttacaatacacagacctttaaacaatggtagataa

SEQ ID NO: 75882 - DNA, 2367 bp, Saccharomyces pastorianus
atggcaggtcattcacacaggtcatcattaaaaaacggacacaaatcttacaaatccaaacatgcttctaaaggtgctttgaaaagattatacaaggggaaagtggaaaaagaacccgtgggcactggcaaaccagacaaacaagtttcaaaattgcaacgtagaaacaaggcaaaacaattaagggcccaaaagatcttggattccattgaaaacaggaaattattcgaaggaaaaaatggcgctgccaaaatcattactattgttccgttagtgaatgatttagacccattggacattctttacaagctattaaagtgtgcagatgatgaagaaatcatggtgcaggaagtagactccaaacgtatatttaatgttcatataaagaagtttaaaagcaatcttaaaatcataattccagacatgaccaattttttgaacattttagattgcgctaaagtagcagactttgttgtgtttgggctcagtggtgtccaagaagtcgatgaagaatttggtgagcagatcatccgtgcgttagaactacaaggtattgcttcatatatcggtgtcttaagcaacctctcagcagtccatgaaaaggagaaattccaattggatgtcaagcaatccttagaaagttatttcaagcactttttcccaagtgaagaacgtgtttataatttggaaaaaaactcagacgctttaaacgtcttgagaacattgtgccagaggctaccaagatcaatcaattggagagacaatagaggttacgtagtcgctgactttgttgatttcgttgaaacctctcccgattctggtgacctggtaattgaggggaccgtccgtggtattggcttcaacgccaatagactggtccatattcctgattttggtgacttccaactgaataagatagaaaaaatcagtgaatcttcgcagaaaaggaaaataataaaggaaaaagctacagatagtctgagcttagagctggatttacaaacagttttcgaaagtaatatgaatagagatactttggacgaatatgccccagaaggcacggaagattggtcagattatgacgaggattttgagtacgacggtttgacaaccgcgagatacgacgaccatggcttcttgccagggagggaacaaacatcaaaaaaggcggcagttcctaagggaacttctgactatcaagcgaagtggtacttggatgacgtcattgacgcaaatgaggaagaagaggcagaacagaccaatggaaaggatgagacaatgatggaaattgatgatgaaatgatggtggagcaagacaatgaagaggtagcaggcgacgaagaatatgacatagaggataatgaaggatttgaagagctttcacccgaagaagaagaacgtcaactgagggaatttagagatatggaaaaggaggacagagagttccccgatgagatcgaactagagcccagtgaatctgccatcgaacgtttgaaaaggtatagaggtttgaaaaacttatacaactgtgattggcaagttgatgaaaaggacccatcatcaccagcggaatggaaacgtctattaaggattggcaattacaaaaacactaaaaacagaatcataaaggaaaccaagaatgaagcacaggccattgcaggtgatcgtattaggatgttcatcaggtttcctaagtttctgcttgaaaagattcaagatcctaaacaactattatttgctgtctacggattactacttcatgaacacaaaaatgcggtagtcaacttctctctacaaagatgggaacaatatgacaaacctgtgccttctcaggagcctatcgtagtacaatacggtgttagaagatacactattcaacctctattttctcaaggctctaacagtcctaataatgttcacaagtatgaaaggtttctgcatccagatacagtatcagttgccacatgtattgctcccgtagatttcacccagtcacctgcaatttttttcaagccatcaccaacagatgccaaaaatattgaattgattggtcacggtacatttctgaatgcagaccattcaagaatattagcaaagagagccattttgaccggtcatccattcagattccacaaaactgtggttactgtacgttacatgtttttcagaccagaagatgtggaatggttcaagtctatcccactgttcaccaaatcaggtaggtcaggtttcattaaagaaagtttgggtacgcatggttatttcaaggctacatttgatggtaaattatctgcgcaggatgttgttgctatgtccttgtacaaacgtatgtggcccatgccttcgttaccttggaatggtatgtaa

SEQ ID NO: 75883 - DNA, 717 bp, Saccharomyces pastorianus
atgacgatacaagcgaagcccagttcgagcatatcgtatgattcgactacatacggcacagcaccgggcttggatataaaagagttccaaatcatcgaagattggaatggaagacctgccagcgcttggtcggtgcagaggattgggcttctacagtccaagatcgaaaggtacacgtacaatatttaccacaataataaatatgggaagcacaacttatctaagctgataccagggcatgctctcattcagttcgctaatgaaacattcgggtatgatggttggcgaatggatgttatagatgttgaggcccgggagtgccagcccttcaccgcagtaaataatggagaaaacaccaacactagtgaggtcaagtatacagttgtggcagaagcccaagtaaaggttaccttaaaggatggcaccaacacacagtgtggtgggctaggtagaattactttgtcctcgagaggtgaatgttataacaggtcgaaaaaagaggctgtaggcgatgcgttaaagaaggcgttattgagctttgaaaaaatcatactcgattatgagactaagattacaaataattactatgtcgatggcttgtatggctcaaaaaaaattaaaaatgaagctaacaccaattacaacttattgtcagcgactaatagcaagccgacttttatcaaattggaggatgctaaaggcacgcatatcaaataa

SEQ ID NO: 75884 - DNA, 987 bp, Saccharomyces pastorianus
atggaaaaaaaacatgttactgtgcaaatacaaagtgctcccccctcctatatcaaattggaagcaaatgaaaaattcgtatatattacaagtacaatgaacggcttatcttatcaaattgcggctatagtttcatacccagaaaagagaaattcatcaactgcaaataaagaagatggtaaattactgtgcaaggaaaataaactagcattgttactacacggaagtcaatctcacaagaacgctatttatcaaactttactagcaaaaaggctggccgaattcggatattgggttctaagaatagattttaggggccaaggtgattcctcagataactgcgaccctggccttggtaggacgctcgctcaggatcttgaagatttgagtacagtataccaaacagtatctgacaggtctcttagggtacaattgtacaaaactagtacaatatcactggacgtggttgtggcacattctagaggatctcttgccatgttcaaattctgtctaaaattacatgcagctggatctccattaccgtctcacctgattaattgcgccggaagatatgatgggagaggacttattgaacgctgcacacgactgcacccacattggcaagcagaaggtgggttttgggcgaatggtccacgaaatggcgaatacaaagacttttggataccattaagtgagacttatagtatcgctggcgtttgcgttccggaatttgccacgataccacaaacttgttcagtaatgtcctgctatggcatgtgtgatcacatagtgccaattagcgcagcctcaaattatgcaaggcttttcgagggcagacattcattgaaacttattgaaaatgcggaccacaattattatggcattgaaggtgatcccaacgcgctaggcttaccgataaggaggggtggagtcaactactcaccactagtagttgatctaattatggaatacctgcaagatacatag

SEQ ID NO: 75885 - DNA, 1086 bp, Saccharomyces pastorianus
atgaaaggtttaattttagtcggtggttacggtaccagattgagacctttaactttgaccgttccaaagccactggttgaattcggtaatagaccaatgattttacaccaaatcgaggctttagccaacgctggtgttactgacatcgttcttgctgttaattacagaccagaagtcatggtggaaactttgaagaaatacgaaaaggaatatggtgttaacatcactttctctgtagaaactgaaccattaggtactgcaggtccattgaaattggctgaagatgttttgaagaaggacaactctccatttttcgtcctaaactccgacgtcatttgcgaatatccattcaaggaattggctgacttccacaaagctcacggtggtaaaggtaccattgttgctaccaaggtcgacgaaccttctaaatacggtgtcattgtccatgatatagctactccaaacttgattgacagatttgttgaaaagccaaaggaatttgttggtaacagaattaacgccggtttgtacatcttaaacccagaagtcattgacttgattgaaatgaagccaacttcaattgaaaaggaaactttcccaatcttggtcgaagaaaaacaactatattccttcgatttggaaggtttctggatggatgttggtcaaccaaaggacttcttgtctggtaccgttctttacttgaactctttggccaagagacaaccaaaaaaattggctacaggtgccaacattgttggtaatgccttgatcgatccaaccgctaagatttcctccactgctaagattggcccagacgtggttatcggtcctaatgtcaccatcggtgatggtgttagaatcaccagatctgttgttttgtgcaactccaccatcaagaaccactccttggtcgaatctaccatcgtaggctggaactctaccgttggtcaatggtgtcgtttggaaggtgtcactgtcttgggtgacgacgttgaagttaaggacgaaatctacatcaacggtggtaaagtcttacctcataagtctatctccgataatgttccaaaggaagctattattatgtga

SEQ ID NO: 75886 - DNA, 558 bp, Saccharomyces pastorianus
atgacaacaacctcaacaaccagtgtagatggcagaacctcctcgactttgaaggctactttatctgcttcaggtccaaattcaaatggtccaacgcccgctgtgcttcctcagaagccaaaattaacaggttgggtgcaggcagctgccaaagcccttccaaggcaacagcaacagcaacagcaggcacgaaaagatgattccgtggctgtacaacctgctaatacgaagactaaaaccatcgcatctaccgcgccgcctgctaatataaagggtagttccaccgccaatggatcatccacaaataagaaattcaaaagagcgaataaacaaccttacaatagagaagaagttagatcgtatatgcacaaattatttcagagctataccgctggtgaaaaaagtcattcaacgaaaacttataagcaagtactatcagaaacggcaagtggcagagtttcaacagccactgactggggtactgtatcaagcagtaaaaataagaataaaaaatacggctgtttgtccgatattgctaaagttttgagaaaccaatga

SEQ ID NO: 75887 - DNA, 912 bp, Saccharomyces pastorianus
atgagtgtgataggtaggttcttgtattacttgaggtccgtgttggtcgtactggcgcttgcaggctgtggcctttacggtgtaatcgcctctatcctttgcacgttaatcggtaagcaacatttggctcagtggattactgcgcgttgtttttaccatgtcatgaaattgatgcttggccttgacgtcaaggtcgttggcgaggagaatttggccaagaagccatatattatgattgccaatcaccaatccaccttggatatcttcatgttaggtaggattttcccccctggttgcacagttactgccaagaagtctttgaaatacgtcccctttctgggttggttcatggctttgagtggtacatatttcttagacagatctaaaaggcaagaagccattgacaccttgaataaaggtttagaaaatgttaagaaaaacaagcgtgctctatgggtttttcctgagggtaccaggtcttacacgagtgagctgacaatgttgcctttcaagaagggtgctttccatttggcacaacagggtaagatccccattgttccagtggttgtttccaataccagtactttagtgagtcctaaatatggggtcttcaacagaggctgtatgattgttagaattttaaaacctatttcaaccgagaacttaacaaaggacaaaattggtgaatttgctgaaaaagttagagatcaaatggttgacactttgaaggagattggctactctcccgctatcaacgatacaaccctcccaccacaagctattgagtatgccgctcttcaacatgacaagaaagtgaacaagaaaatcaagaatgagcctgtgccttctgtcagcattagcaacgatgtcaaaacccataacgaaggctcatctgtaaaaaagatgcattaa

SEQ ID NO: 75888 - DNA, 828 bp, Saccharomyces pastorianus
atgtctgaaaaaccacaacaagaggagcaagagaaaccacaatcaagacgtaattcatttgctgtgattgaatttactccagaagtcttggacagatgtttaaagcaagtggaattctacttttctgaattcaactttccatatgacaggttcttgcgcacaacagcggaaaaaaacgatggatgggtccccatcagcaccatcgccacattcaaccgtatgaagaaatatagaccagtggataaggttatcgaagcactacgtagttctgaaattttggaagtatctgctgatggagagaacgtcaagagacgtgttcctttggacctaactgctgccagaaatgccagaattgagcaaaaccaacggactttggccgtaatgaatttcccacatgaggacgttgaagcttcccaaattcctgaattgcaggagaacttggaagcctttttcaaaaaattaggtgaaatcaaccaagtgcgtttgagaagagatcacagaaacaagaaatttaatggtacggtcttggtggaatttaagacaattccagaatgtgaagcttttttgaaatcgtattccaatgacgatgagtccaacgaaattttgtcatatgaaggtaagaaactgagtgttttgacgaaaaaacagtttgatttacagagagaggcctcgaagtccaaaaacttcagcggtagatcaagatcctttaacggccataagaagaaaaacttgcctaaattccccaaaaataagaagaaaaacggcaaggaagagtcaaaagaggactcttctgccattgccgatgacgatgaggagcacaaggagtga

SEQ ID NO: 75889 - DNA, 372 bp, Saccharomyces pastorianus
atgataatgagatacgagaaccagaagaaacacaagaatcactccttgtgctcctcatcgtcatcggcaatggcagaagagtcctcttttgactcttccttgccgtttttcttcttatttttggggaatttaggcaagtttttcttcttatggccgttaaaggatcttgatctaccgctgaagtttttggacttcgaggcctctctctgtaaatcaaactgttttttcgtcaaaacactcagtttcttaccttcatatgacaaaatttcgttggactcatcgtcattggaatacgatttcaaaaaagcttcacattctggaattgtcttaaattccaccaagaccgtaccattaaatttcttgtttctgtga

SEQ ID NO: 75890 - DNA, 1473 bp, Saccharomyces pastorianus
atgccggtatcatcatctgttgcatcaagcattgactcagtaatgtcccatgagacgatgtctttacggagaaaccctccctttatagatactccagaaaaaatgccaaacccaacggcttctcccaatggcaccattcaccatttgatagatccatcactgccattgttgtccagtactacgtcgtcttcgcgctctaccctcagttctacactgaattctcctccacctcccccattaactacatcatactcttcttataactcctctgcatgccagtctatcacgagttcgcctacagacaatacagccttggcacataattccaaatgctatttccctcatagcctttctccaacaccgctgtcatccaacagctcaagccatgtcattttgccacccatatcctccttcaccaatttaattacagttgcagaaagagaatttaacggcagatcaaattccttgcatgccaattttacatcaccggtgccaagaacagtgctagatcatcacagacatgagctaacattttgcaaccctaacaacacaacgggtttcaaaaccatcaccccctcaccaccaactcaacaccagagtatattgccaaccgcggtagataacgtaccgagatcaaaatccgtgtccagcctacccgttagtggattcccacctttgatcgtcaaacaacaacagcaacagcaactcaacagtagtagtagtgcctctgcactaccgtctattcattccccattgactaatgaacatacaagcaggtattcatcgtctttaaaggattccgccaagataacgaagcaaagaaagaaaaaggaatgccccatctgccacaacttctacgccaacctatctacgcataaatccactcatttaactccggaggacagaccgcataagtgccctatctgtcaacgcggctttgccaggaacaatgatctgataaggcacaagaagcgccattggaaagatgaatttatgcagatatacgcaagggagtccgacaacaatagtggtgctgacgatcaagatgacactgcccgcacctccgcaaacaacgacagcgacgactcaaacgataaactcgctgcctcatcctcttccgaagaaacaaaactactgaagaaaaaccaattgaaatcactatacaagattaaaggtgcattcaagtgtccttacaactctactctgatcaatttggatatggaggtgtatccacacaagtctatatcactctatttcgagccaataaactgtcatcaaacgggcgttttttcgcgctgtgatactttcaagaatcacctaaaggctttgcatttcgagtacccgcccaaaaccaagaaagaagatagaggtgttgtgccggggaagtgcaagcattgtggactgcaatttccgaacgttgacgtctggctaaataagcacgtggggaaaggatgtggctactcatatcactaa

SEQ ID NO: 75891 - DNA, 936 bp, Saccharomyces pastorianus
atggtatctagaggccccgacgaatggcttgaaacaataaagaaatgccaggcgctaactgaaaacgagatgaaacaactgtgtgaaatggtgaaagaacttttgatggaggaaagtaacatccagccggtacagacccccgttactgtatgtggagacatacacggccaatttcatgacttgttagagctattccgtactgcgggtggctttcctgacgatataaactacatttttctcggtgattacgtggatcgtggctactatagtctggaaacttttacgcttttaatgtgtctgaaagtcaagtacccggcaaagataactttggtcagaggaaaccatgagtccagacaaattactcaagtttacgggttttacgaggaatgcctgaataagtacggatctaccaccgtatggaagtattgctgtcaagtttttgatttcctgacgctggccgctataattgacggtaagatcttatgtgtccatggagggttatctcccgagattagaatgctcgatcaaatcagagtcttgtcaagagctcaagaagtgccacacgagggtgggttctcggacctgctttggtcagaccctgacaatgtagaggcttggcaagtttcccctcgtggtgcaggatggctctttggcagtaaagttgctagagagtttaaccacgttaatggactgaaccttattgcccgggctcaccaactggttatggaagggttcaagtaccattttcctgaaaaggacgttgtaaccgtgtggtccgcgccaaattactgttatagatgtggtaatgtcgcgagtgtaatgaaggtcgatgaggatctggaacctactttcaaaattttctccgctgttcccgatgactacataagagaatccacggcaaaccataataatcaaagagccggctatttcttataa

SEQ ID NO: 75892 - DNA, 522 bp, Saccharomyces pastorianus
atgacccacggcttgaaagctctgtttgccttgctatttctttacacagctgctgtcaatgcgggtgtgattggcatattcaacgcccttcccccaccaaacaccaaaccaattaacggcgaatctccactttaccaatgtgacattctagacaagcaacttgtggaaatcaaagaggtcaatttggaccctaacccccctgttcgtggcgaaaatttgaccatttctgctaacggtgaggtctttgaaactatagaagagggggcatatatcgacgttgaagtccgtctaggatacatcagactgttatcccagacttttgatttgtgtgaaacattagaagataacgatatcgaaggcttatcctgtccaattgaaccaggtgaatacaacattaagaaaatagttgagatcccaggcgaggttccacctggcaaatatgttgttgtagcaagagcttacactgaaaaggatgatctgatcacttgcttaaccggagaagtcgtcttcccaccaaggtga

SEQ ID NO: 75893 - DNA, 288 bp, Saccharomyces pastorianus
atgtccggaaaaccaccagtttatagattaccccctcttcccagactaaaagtgaagaaacctatcattaggcaagaagcgaacaaatgtcttgttttaatgtcaaacttgttacaatgctggtcttcatatggtcacatgaaccctaaatgtgctggcttagtaacggaattgaaaagttgcactagtgaaagtgccctcggcaaaagaaacaacgttcaaaagagcaatattaactatcacgccgctaggctgtatgataggatcaacggtaaaccccatgattaa

SEQ ID NO: 75894 - DNA, 921 bp, Saccharomyces pastorianus
atgcagttgagcaaggctgctgagatgtgttatgagataacaaactcttacttacacatagaccagaaatctcagataatagcaagtacacaagaagcgatacggttgacaagaaaatacttactaagtgaaatttttgtacgttggagtccactgaatggggaaatatcattctcgtacaacggaggaaaagattgccaggtattactactgttatacctgagttgcttatgggaatatttctttattaaggctcaaaattcccaattcgatttcgagtttcaaagcttccccatgcaaagacttccaactgttttcattgatcaagaagaaactttccctacattagagaattttgtactggaaacctcagagcgatattgcctttccttatacgaatcacaaaggcaatctggtgcatcggtcaatatggcagacgcatttagagattttataaagatataccctgagaccgaagctatagtgataggtattagacacacagacccatttggtgaagcattaaagcctattcaaagaacagattctaactggcctgattttatgaggttgcaacctctcttacactgggacttaaccaatatatggagtttcttactgtattctaatgagccaatttgtggactatatggtaaaggtttcacatcaatcggcggaattaacaactcattgcctaacccacacttgagaaaggactccaataatccagccttgcattttgaatgggaaatcgttcatgcatttggcaaggacgcagaaggcgaacatagttccgctataaacacgtcacctatttccgtggtggataaggaaagattcagcaaataccatgacaattactatcctggctggtatttgattgatgacactttagagagagcaggcaggatcaagaattaa

SEQ ID NO: 75895 - DNA, 1323 bp, Saccharomyces pastorianus
atgatcagaacatcatctatattaaaaaactgtaactatagatacatacattgcatccatagatgcttgctgaatgaagccaatttgaaagatagaaaaactcacaacgtagaaagagtttcaaatgaaaagacatttgaacaagctctcgaagaggaacgtaaggtatttggagaactattcgaagctggagcaagggttgaaaacatgaggcacactaatgctagcaaaataattgacaagtattacaatgggctacaggacaactccgagggaactagtgtaaaaaaagaaaaaattgtttttaaccacagtcaaagagctcaaaggaagcttccaaataaggaccatgaattcctgaaggaaacagcaggcaatgactatgtctacgaacgggcagaaccttctgctattagcactaaaacgataagtgagcagacaagaactttgctggaaaagatatttgacgaagataatagcattaataaaagcaacagagaattgctgaatcttaatctgcgcaagggctcgggaatggaagctttgaggcagccagttgcacattccaacgtcaaatttagcgaggaagtgatgcaagaaattggtaataagattcggtaccaaaccacactggatcaggttttagaacctcacattgactacttgagggaagctgttaaaagtgattacgatcttttaagatacctaaagcaatcactagacatttacaagaaaaggaacaaagacctagagttaaagatgaatgcagaatcttcaaacattttcgaagacattagaagtgcgtgtataaataaaccggcagaactaccgaaaccgcttgcaatgactttaccatatattatagtcaaatcgcttagattaggtgactttgatttcccggcagacagaaagtacacattgatctcctatgtttataatgaatgtaaaaacaacatggacgcttcactgtacctaacaatttgtaatgttgatttctacaatttgctggttcagctattgtgggaaaacttccaggagattcgctacttgagacgtgtggttaccgagatgagcgttaatggtgtcatcggaaatattgaaaccgtggatatattggataagattgtcaaagaaatgagaagtttaaatgaggatgtctttcttgaagcaggagaacagctcagtgcagatgaggaagtttcgtccagcgcaaataaaatagtgaatgtaggtgttttatggaataaagacacgaataatgacttactaattgttgaaaattatctcaaaagcctcaaaaaaaatttaactagagacaggtag

SEQ ID NO: 75896 - DNA, 1389 bp, Saccharomyces pastorianus
atgcaaagaaataataggttaagaaatttgtttacagtgccagtaataatggctcgacaactcaaaaggaatgcattatctgcaggtcttgcttttgcaggtaatgcaacctcaaatgagtttgatgaacatttgcaaaatgaggttgaaagagagagggaaattcaaaagaaaaaaaaaataaagcgaactcaatcaaaaaaatcgccagatttgattaataaatctactttccaatcacgaacgataggcagcaaaaaagagaaacatagacaactagatccagagtatgaaattgtcatcgatggccctctaaggaaaatcaagccctaccattttacgtacaggaccttttgcaaagagcgttggagagataaaaaattggttgatgtctttatatctgaatttcgagatcgtgaatctgaatattataaaagaacaatcgaaaacggggacgttcacataaacgatgaaactgcggacttatctactgtaattcgcaatggtgacctgattacgcatcaggtacatagacatgaacctccagtcacttccaggcctatcaaagttatttttgaagatgataacataatggtcattgataaaccgagcggtatacctgttcacccaactggccgatatcggttcaatacaattacgaaaatgcttcaaaataatctaggatttgttgtgaacccatgtaataggttagataggcttacaagtggattaatgtttttggcaaaaactccgaggggagccgataatatcggcgatcaactaaaagctcgagaagtcactaaggaatacgtggccaaggtagttggagaatttccagaaacggaagtaattgttgaaaaacctctaaaactgatcgagccaaggcttgctcttaatgcagtttgtcaaatggacgagaaaggagccaaacatgcaaaaactgtttttaacagaatcagctacgacggtaaaacgagtattgtaaagtgcaaaccgcttaccgggcgatcacatcaaattagagtacatttacagtacttaggccacccaattgctaacgatcctatttattccaatgatgaagtatggggtaacaatctcggaaaaggcggccaggctgacttcgatatagttattactaagctagacgaaatagggaaaagaaaacctgctaaaagttggttccatagtaatggcgggtacggtgaggtattaaggcaagaaaaatgttctatttgtgaatctgatttgtatactgatcctggccccaatgatcttgatctgtggttacatgcctatctatacgaatcaactgagactgaagaaggaaccgaaaagaaaaagtggtgctacaaaacagagtatccagaatgggctctgagaagatag

SEQ ID NO: 75897 - DNA, 2874 bp, Saccharomyces pastorianus
  modified_base (1543)..(1585): a, c, g, t, unknown, or other
  modified_base (1604)..(1639): a, c, g, t, unknown, or other
atgataactgagggatttcccccgaatttaaacgcgttgaaagggtcatccttactagaaaagagagttgattctctccgacagcttaacactaccacggttaaccagctgctggggttgccggggatgacctctacattcacggctccgcaactgttgcagttaagaataatagctataactgcgtctgccgtgtcccttattgccggttgcctcggaatgttcttcctttctaaaatggataagagacgaaaagtcttcagacatgatctcatcgcatttttgataatttgcgactttcttaaagcttttattctgatgatttatcccatgattatccttattaataatagtgtgtatgcaacacctgcattttttaataccttgggttggtttacggcctttgccatcgaaggtgcagacatggccataatgatattcgccatacattttgctattttgatcttcaagcctaattggaaatggcgaaataaaagatcgggaaatatggagggtggcttgtacaaaaaaaggtcatatatctggccaattactgcattagtacctgccattttagcaagcttagccttcattaattataataaactcaatgacgattctgacaccactattatactggataataataactacaactttcctgattctcccaggcaaggtggctacaaaccttggagtgcatggtgctatttaccacccaagccgtactggtataaaattgttttaagctggggtcccagatatttcattattattttcatatttgcagtctacctcagtatttatattttcattaccagtgaaagtaaaagaattaaagcgcaaattggagactttaaccataacgtactagaggaagagaaagaaaagaaaaaattatttgggctcggtcactggggaaaagccaaatggtatttcagatcctattttaaattgccattgctacatcttttgagaaatttaaagaattttttcaccatttcgttcatagatccgaatgaggaaacagacgattcaggtagtagtaatggaactttcaattttggtgagagttcgaatgagatacctacactattcagaaaaacaaatacaggtagtgatgagaatgtctcggcaagtggtggagttcgcttacttgactataacagtgctaaaccactcgatatgtccaaatatgcaatgtctgaacagccagatttggaaagaaataatccttttgattgtgaaaatgacatcacactcaatccttcggaactagtatccaagcaaaaggagcataaagttacttttagtgttgaaaatgaaggactggatacaagaaaaagttcaatgctgggacatcagactttctcttgccaaaattctctagaatctcctttagcaatgtatgataataagaacgataacagcgacataactagtaacattaaggaaaaaggaggcatcatcaacaacaacagtaacaacgacgacgacgacaacaacaacaataacgataacgataacgataacaataatagcnnnnnnnnnnnnnnnnnnnnnnnnnnnnnnnnnnnnnnnnnnnacaataacaacaacaacannnnnnnnnnnnnnnnnnnnnnnnnnnnnnnnnnnnacgttgataacaataatactaatccagccgataatattcctacactttctaatgaagcatttactccgtctcaacaattttcacaggagagagtgaataataatgcagacagatgcgaaaattcaagtttcaccaacgtacaacagcatttccaagcccaaacctacaaacaaatgaaaaaacgtagggcacaaattcaaaagaatctaagggcaatattcatttatccactgtcgtatattgggatatggcttttccccatcattgcagatgcgttgcaatacaatcatgaaataaagcatgggcctaccatgtgggtgacatacattgacacttgcgttcgaccattaagttgtctcgtcgacgtcattgtttacctgttcaaggaaaaaccttggaactattcatgggcaaaaacagaatcaaaatatctcattgaaaaatatattctgaaaggagagcttggggaaaaggaaattctgaagttttgtcacagcaattgggggaaaagaggttggtattatcgtggtaagtggaagaaaagaaaatgctggaaatattctacaaaccctctgaagcgtatactgtggtttgttgaacgcttctttaaacaattgtttgaactaaaactacactttagtttttatgacaattgtgacgattttgaatactgggaaaactactattcagccaaagattcaaacgataataaacgcacagaatctgatgagactaaaacgaatagtagcgatcgctcccttccatcaaattcacttgaactacaggcaatgcttaataacatcacggccgaagaggttgaagtgcccttgttttggaggatcattcatcatattccaatgcttggcggaatagatcttgatgagttaaacagattgttgaaaatacggtacaataacgaccatttttctctacccgggttgaaatttgcattaaaccaaaataaaagtcacgataaacatcaggacgtctcaactaacagtatggtcaaatccagcttcttttcaagcaatattgtcacaaacgatgatgagaatagcattgaagaggataagaatttacgctattcagatgctagtgcatctgaaaattatctggtcaagcccacaataccaggtacgactcctgatccaataattgaggcgcagaacgataatgatagtagtgatagtagcggcatagatttgatagccttcttaagaaatggaccattataa

SEQ ID NO: 75898 - DNA, 312 bp, Saccharomyces pastorianus
atggctccttgccagggtcgtccaaagattgtgattcagaccagttctgcatatatactcctcgggtatttggaaattctccggcaaatagtgctgccgccacagaggaatctaccccagatgacattgccactatcacgttgtcaaactttgccggtagccgctgtggtctgtacggtgaagcactcctccgtcctattaaatttaaatatcttgccagcattgttatctgacttgaatcgattgccaaatcaatacgctcacatttttaacgttcttgtatgtttccaaactttcattcttttacaataa

SEQ ID NO: 75899 - DNA, 312 bp, Saccharomyces pastorianus
atgcatgaaagcttacgaaactggaaactttctcctcgatattttggaattgcgggagatgtaatcgccgaaggcactggtttaggaaaagcccttaatattcctggcaagtacatattgaaaccctttccattattgagactattgggcgtaacgctgttcataagctcccttgtcctactggctaatcccactggaactttgaacattttttcctactcatatgtggttatggtggtcttatttatctgcgctaaatcacttttcaaatattctttgcagtttataggggaggagacttcctctttgtaa

SEQ ID NO: 75900 - DNA, 105 bp, Saccharomyces pastorianus
atgcttatgattctttggtttttcaaccaaatcgccagatgtagggtcaacttcacaggaggggacggatacaagccaatcatcctttaccacgtcattcattaa

SEQ ID NO: 75901 - DNA, 936 bp, Saccharomyces pastorianus
atgactgcaagcacaccatccaatgtcatgacattgttcttgttaaggcatggacaaagtgaattgaatcacgagaatatattctgtggttggattgacgctaagctaaccgaaaaaggtaaagaacaagctcgtcattctgccgagctaatcgaacaatattgtaaagctaataatttgagattaccccagattggttacacctcacgtttaattaggacccaacagaccatagaaacgatgtgtgaagaatttaagttaaagccacaactgcaggttgtttacgactttaataaaatcaaacttggagacgaatttggcagtgatgacaaggataatatgaaaatcccgattcttcaaacttggaggctaaatgaacgtcattacggttcctggcagggccagaggaaaccgaatgttttaaaagaatatggtaaggataaatatatgttcattaggagagattacgagggtaagccaccacctgtagatcttgaccgtgagatgattcaacaagaaaatgagaagggctcttctactgggtacgaattcaaggagccaaacagacaaataaaatatgaattggaatgcagcaatcatgacattgtattgccggattccgaatctcttcgtgaagtggtttatagattgaatccttttctacaaaatgtcatattaaaattagccaatcaatatgatgaatcttcatgcctgattgtgggccatggaagttcagtgagatcgctactgaaaattctggagggtatatcagacgatgacatcaagaatgttgatattccaaatggtatccccttagtcgttgaattagataagaataatggtcttaagtttatcagaaaattctacctagatcctgaagctgctaagatcaatgctgagaaagtccgtaatgagggtttcataaaaaatccttaa

SEQ ID NO: 75902 - DNA, 678 bp, Saccharomyces pastorianus
atgtccaatttatgtgtacttttcttccagtttttttttttagcacaattttttgctgaggcatcaccgttgacatttgaactgaataaaggtcgaaaggagtgcttatatacgctaactccggacattgactgtacaatctcatattattttgcagtacagcaaggagagagcaatgactttgatgttaactacgaaatatttgctcctgatgacaaaaacaagccaataatcgagagatctggtgaacgtcaaggtgaatggtcatttataggccaacataagggagaatatgctatctgcttttatggtggtaaagcacacgacaagattgttgatctggacttcaagtacaattgtgaacgccaagatgatattcgaaatgaaagacgcaaggcgagaaaggcgcagagaaacctgagagactctaaaaccgatcccttgcaagacagtgtggaaaattctatagacaccatagaaaggcagctccacgttttggaacgtaatatacagtactataaaagcagaaacaccagaaatcatcacaccgtttgttcaacagagcatagaattgtaatgttttctatttacggcatattattaatcatcggaatgagctgcgctcaaattgccatactggagttcattttcagagaatcgagaaagcataatgtgtaa

SEQ ID NO: 75903 - DNA, 303 bp, Saccharomyces pastorianus
atgccaccaattatactaaaccgtttcactttaagaaatttttatttaaatctttcactatgcaaatatgtaagtacttttaaaattctctttccaaagaaaaggaaattatttcagactagcagtaatttatcactttgctattcagatattaggagaacatccttatcgagcaaatctgcctcgcttgagctgacaacgtcatcttcgtcagtactctcgccatccagtaaatatgtgttttcattcaattcattgaaaaacggggttttcagtaaatcttctgctgaactacgcttttga

SEQ ID NO: 75904 - DNA, 984 bp, Saccharomyces pastorianus
atgtcattcagaccaggtagcagaggtggttcccgtggaggttccagaggtggcttcggtggtagaggcggttcccgtggtggtgctcgcggtggttccagaggtggcttcggtggtagaggcggttctcgtggtggttcccgtggtggttccagaggcggcttcggtggtagaggcggttctcgtggtggtgcccgtggtggctccagaggtggtagaggtggcgctgctggtggtgcccgtggtggtgccaaggtcgttattgaaccacatagacatgccggtgtttacattgctagaggtaaagaagatttgctagttaccaagaacatggccccaggtgaatcagtttatggtgaaaagagaatctccgttgaagaaccatctaaggaagatggtgtcccaccaaccaaggtcgaataccgtgtatggaacccattcagatctaagttggctgccggtattatgggtggtctagatgaattatttattgccccaggcaagaaagttttatatttaggtgctgcttccggtacttctgtttctcacgtttcagatgttgttggtccagaaggtgttgtctacgccgtagaattttctcacagaccaggcagagaattgatttctatggctaagaagagacctaatatcatcccaatcattgaagatgctagacacccacaaaaatacagaatgttgattggtatggttgactgtgtcttcgcagatgttgcccagcctgatcaagctcgtattattgcattgaactctcatatgttcttgaaggaccaaggtggtgttgttatctccattaaggctaactgtattgattctactgtagacgcggaaaccgtttttgctagagaagttcaaaagttacgtgaggaacgtattaagccattagaacaattgactttagagccatatgaaagagaccattgtatcgtcgttggtagatacatgagaagcggtttgaagaaataa

SEQ ID NO: 75905 - DNA, 324 bp, Saccharomyces pastorianus
atggccgacaaactatcatcaaccgatgctatgggctgttggagtcccaccttctgttttatttcattaatttcttcgtctacttcagagctccccttattcgtggtagaagtcggcatagcagcatattccctggaagatcctgcagccatattgtccatattagtactaaatgctttagaagtttcctcttttatctctaccgtcaagaagttcgcattttgcgctacgaaaaacactaacaacaataatagcgttgtaacgcttaaaattctagcatttctcttattggaaggtatcataataaaattgtttctatattaa

SEQ ID NO: 75906 - DNA, 498 bp, Saccharomyces pastorianus
atgaaagttaaaataaacgaagtgtacagtgtgtttgcttggtcatggcacatccctagcacatctgatgaggacgcagccaataacgatccaaatggcaatgatgaagacgaggatgtctgtggtatctgtcgtgccagttataacggtacctgtccaagctgtaaatttccaggcgatcaatgccctttagtgattgggctatgccatcataacttccatgatcattgtatataccgttggctcgatacaccaacctcaaaaggactgtgtccgatgtgtaggcaaactttccagctacagaagggtctagcaattaatgacgctcatgtccaaaagttcgttgaaatagtttcaagaagaagagaagaaatgatagaggagggcgtcgcggaagagtttgtggactttgatgaaccaataaggcaaaacaccgataacccaatcggtagacagcaagttgataccatcctggacgaagactttttgttacgataa

SEQ ID NO: 75907 - DNA, 1314 bp, Saccharomyces pastorianus
atgggacaaggtgtatcatctggacaagacaaaaagaagaagaagggatctaatcagaaacccaaatatgaacctcccgttcaatctaaatttggtcgtaagaaaagaaagggaggtccagctactgctgaaaaattacccaacatatatccaagtactcgttgtaagttaaagcttctaaggatggaacgaattaaagaccatttgttattagaagaagaatttgtctctaactctgaaattttaaaaccctttgaaaagaagcaggaggaggaaaagaaacaattggaagaaatacgtggaaatccattgagcattgggacccttgaagaaattatagacgatgatcatgcgatagtgacaagtccaactatgcctgattattatgtatctatcttatcctttgtcgataaagagttactagagcctggatgttctgtgttattgcatcataaaaccatgtccatcgtaggtgttttacaggatgacgccgatccaatggtttcggtcatgaaaatggataagtcgccaacagaatcatacagtgatattggtggcttagaatctcaaattcaagaaataaaagagtctgtagagttaccgttaacacaccccgaactgtatgaagagatgggtatcaaacctcccaagggtgtgattctttatggtgcacccggtacaggtaagacattgctagcaaaggctgttgcaaatcaaacatctgccacattcttaaggattgttggctcagagttaattcaaaaatatttgggggatggtcctaggttgtgtaggcaaattttcaaagtagcgggtgagaacgcaccaagtattgtatttattgatgaaatagacgccattggtactaaaagatatgactccaatagtggtggtgagagagaaattcagagaaccatgctggaattgctgaaccagctggacgggttcgacgacagaggggatgtgaaggtgattatggccactaacaaaatcgagactcttgacccagcattaatcaggcctgggagaattgatcgtaaaatcttatttgaaaaccctgatctaagtactaagaaaaaaattttagggattcacacttccaagatgaatttaagtgaggacgttaatcttgaaactttagtaacaacaaaggatgatttgtcaggcgccgatatccaggcaatgtgtacagaagcaggtttgttagcccttagagagagaagaatgcaagttacagcggaggattttaaacaagccaaggagagagtcatgaaaaataaagttgaggaaaatttagaaggtttatacttgtga

SEQ ID NO: 75908 - DNA, 846 bp, Saccharomyces pastorianus
atgagtaatcattctgaaatcttagaaaggccagaaacaccatatgacataacttatagagtaggtgtggcggaaaataaaaactcgaaattccggaggacaatggaagatgttcatacgtatgttaaaaactttgcttcaagattagattggggatatttcgcggtgtttgatggacatgctgggattcaggcctccaaatggtgtggtaaacatcttcatacaattatagagcaaaacattttggcagatgaaacacgagatgttagagatgtattgaacgattcattcctagccattgacgaagaaattaatacaaaacttgtaggaaatagtggatgtactgctgctgtttgcgtattacgttgggagcttccggattcagtttctgatgattcaatggatttagcccaacaccaaagaaagttatatacagcaaatgttggtgattctcgaatagtattgtttagaaacgggaacagcataagactgacttatgatcataaggcatctgacactttggagatgcagagagttgaacaagcaggtggcctgataatgaaaagtcgtgtaaatggtatgctggcagtgacgagatcgttaggggataaattttttgatagtttagtagtgggcagcccatttaccacgagcgtagaaataacttctgaggacaaatttttaatcctagcgtgtgatggattatgggatgttattgatgatcaagatgcatgcgaattaatcaaggatattactgaacctaatgaagctgcaaaagtcttggttagatatgctttggaaaatggcacaacagataatgtaacggtcatggttgtcttcctctaa

SEQ ID NO: 75909 - DNA, 1293 bp, Saccharomyces pastorianus
atggtagtacaaaatagcccagtttcgtctgttcacgcagccaatttctctgaacgggggagcaataccagaacaatgacgtataaaaataagcttactgtttgcttcgatgacatcctaaaagttggagcagaaatgatgatgcaacaacagttaaaaaatgtacaactagattcttatctcgtcaatggtttcagtcaatctcagcaaaaattattgaaagagaaggttaaattatttcatggaattttagatgatttagagacttctctaagccagagttcttcatatttagaaactcttactgcactcggaaaagaaaaggagaaagaaagagaagaagctgaaaaaaagagggctgaacaagaaaatatgaggaaggttagagaacaagaagaattaaaaaagcgacaagaactcgaagaagcctcccaacagcagcaactccagcaaaattcaaaggaaaaaaatggccttggtttgaacttctccacaacagcacctgcgaacacaacggatgcaaacggttccaaagagaattatcaagaacttggatctcttcaatcatccaatcaaacacaacttgagaacgcaaatgctgctaataacggtgccgcattttctcccttaaccactactcgaatccaaagccagcaggcccaaccctcggatgcaatgtttaacgatttaaactctatggatatttcgatgttttcaggccttgacagtactggttttgactccacagccttcaatgccacggtggacgaaaccaaaggctttgacgataatgactcaggtaacaactacaatgacataaatatttcttctattgaaaacaacacaaataataatatcaatagcaccaagaacggcaaggataacaacaacgaaagcaacaaaaataacaacggcgatgaaaagaataagaacaacaacgagaacaacgagaacaacaacaacaacagcagtgagaagaacaacaataataataacaataacaacaatgacgataacggcaacaacaacaacaacaacagtgggaacgacaataacaataccaccaaccacgacagcaataacaagaacaattctatcactaccggaaatgataatgaaaatatagttaataatgatttaccaacgaccgttgtttccaatcctggagataaccctcctccagccgacaacggtgaagaatacttgacattaaatgatttcaacgaccttaatatcgactggtcgaccactggagataatggcgaattagacctcagcggcttcaatatatag

SEQ ID NO: 75910 - DNA, 612 bp, Saccharomyces pastorianus
  modified_base (460)..(495): a, c, g, t, unknown, or other
atgtcagttgaagaaaaaaagcgcagacttgaagaattgaaagatcagaatgtggtgcttggacttgcaatccaaaggtcacgactttcggtgaaaagactcaaattagaatacggtgttttactggagaggttggaatccaggatagaacttgatcctgagttaaactgtgaggatccattgccgactctggcctccttcaaacaggaactattgacgaaaccatttcgaaaatctaaaactaaaagacacaaagtaaaggaaagagatccgaatatgcccaagaggcccacaaatgcatacttattgtactgtgaaatgaataaggaaaggattaggcagaatggctctctggacgtgacaagagatctggcagaaggttggaaaaatcttaacgaacaagataggaaaccgtactataagctttatagtgaggacagagaaagataccagatggaannnnnnnnnnnnnnnnnnnnnnnnnnnnnnnnnnnngcggatgatgataaagaagagaatgaacagaagataaaaaataacgaggaaggatcatctacaaaagtagctgattctaaaggaggtgaagatggaagtttagtttcctctaactaa

SEQ ID NO: 75911 - DNA, 1293 bp, Saccharomyces pastorianus
atggtagatagtaatgatgatcaaccggaacgccatgcattacttcataatgacatccaaacatcaaataacagtaggccatcactggtccaaaaaaagtacttacctaccccacaagatacaagaaagtctagagcatcgtatacaggaagtgccatgatcaacccgacaagtaaacaaagtcgtacagggtcgggcgctcaaagaacatcacgcacagcacagaaactaaaacttttgccagaagaaccattccaaagagatagcgaaagacttactgatttaaagaatcaggaagtatattctcaggtaaacaggataaaagataagcctgctagaagggatgctgaaaagttgggaaaagctcacagacatttactccccaggtcaactgcatattgtaccgctagcagttacaatatgaaagagctggtaaggtggttaaaggactgtcgaaagctacatcatactcatcctaaattgtttgatgaatgcttgtacactcccttcatttacaacgattggaggggcgacaaaagatttgaggatgaagatgtgattaggttggatgatgagggcggtgaaattattgttagtgacaagcacccagatctgtttatctttgaatatggtgttgtcgttatgtggggctttactgaaagagaagaaaaagctttcttaaacgatatagaaaagttcgaaaaagaaaaattggcggaagaagatattcaagttgaagagttcaattattatgtcacaaaaagttatcaaccaagaatatataacgattttattaccttgagagatggttcaaattacatggtaaaactctctatctctcatgcaattgctcaaagcgtaaaaatttcacttttcgaagagcttgtggataatactattgaagatactcaggatataccacaagaaattgcatacagcggtaaagtttctatgagcaaagaagatataatgaaaagtataggggagctattcattttgaggataaatatcaatctacatggatcagttttagactctccggaaattatgtggtcagaaccacagttagaacccatataccaagcaacaagaggttacttagagatcaatcagcgcgtttcacttttaaatcaaagactcgaggtcatttcagatcttcttcaaatgttgaaggaacagctgggccattctcatgaagaatatcttgaatttattgtcatattactagttggtgtggaagtcctaatatcggtgatcaatatagtggttgacatgctggctagtcaacgttga

SEQ ID NO: 75912 - DNA, 2256 bp, Saccharomyces pastorianus
atgagtcaagttaatacaagccaaggaccggtagcccaaggccgtcaaagaagattatcatcactaagtgaattcaatgatccattttcgaacgcagaagtctactatggccccccaacagacccaagaaagcagaagcaggcaaagcccgctaagatcaaccgtacgaggactatgagtgttttcgataatgtatctcctttcaagaaaactggttttggtaaacttcaacagactaggcgtggttctgaggatgacacctattcaagtagtcaaggaaatcgtcgtttctttatcgaagatgtcgataaaacacttaatgaactactggctgctgaggataccgataaaaattatcagatcaccatcgaggataccggtccaaaagttttgaaagtcggtaccgcaaactcctatggctataagcatattaatattaggggtacgtatatgttatccaatttgttgcaggaactaactattgcgaaaagttttggtagacaccaaattttcttagatgaagctcgtataaacgaaaatcccgtcaacagattatcaagattgataaacacacagttctggaactctttgaccaggagagttgatctgaacaacgtaggcgaaattgcaaaagataccaagattgatacgccgggggcaaaaaatccaagaatctatgttccttatgattgtccagaacaatacgaattttatgttcaagcttctcaaatgcatccatctttgaaattagaagttgaatatttaccaaaaaaaataacggcagaatacgtcaaatccgtcaatgatacccccggtttactagcattggctatggaagagcacttcaatccttctactggtgaaaaaactctcattggttacccttatgctgttcctggtggtagattcaatgaattatatggttgggactcctatatgatggcactaggtctcctagaagccaacaagactgatgttgcaagaggtatggtggagcattttatttttgagattaatcactatggaaaaatattgaatgctaacagaagctactatctatgtagatcacagcccccattcttgactgaaatggccttggtagtattcaaaaaacttggtggtaggagtaatcccgatgctgtggatttgttgaaaagagctttccaagcaagcataaaagagtacaaaactgtttggaccgcatctccaaggcttgatcccgaaacaggattatccaggtaccatcctaacggtctcggtattcctccggaaactgaaagtgatcacttcgataccgttttactaccatatgcatcgaaacacggcgttaccttagacgaatttaagcaactttataacgatggtaagataaaggagcctaaattggatgagttttttcttcatgaccgtggcgttagagaatctggacacgacactacatataggtttgagggcgtatgtgcctacctggccactattgacctgaattctcttctttacaaatacgagattgatattgcagacttcataaaggaattctgcgacgacaaatatgaagatcctttagaccattctataacaacttcagctatgtggaaagaaatggccaaaatcagacaagaaaagattaccaaatatatgtgggatgacgagtcggggtttttctttgactacaacacaaaaatcaagcacagaacgtcatacgaatccgcaactacattctgggcattatgggctggacttgccacgaaggagcaagcacagaaaatggtggagaaagcactacccaagttagagatgcttggaggtttagctgcatgtacggagcgttctcgaggcccaatttctatttcgagaccaattagacaatgggactatccatttggttgggcaccccatcaaattcttgcttgggaaggcctccgttcttatggttatttaactgtaacgaataggctagcttatagatggcttttcatgatgacaaaggcttttgtcgattataatggtattgtggttgaaaaatatgatgtcacaagaggaacagatcctcatcgtgttgaagcagaatacggtaatcaaggtgctgactttaaaggggcagctactgaaggttttggatgggtcaatgccagttacattcttggtttgaagtatatgaacagtcacgcaagaagagcgcttggtgcttgcattccaccaatatcattctttagcagtttaaggcctcaagaaagaaacctttatggactatag

SEQ ID NO: 75913 - DNA, 606 bp, Saccharomyces pastorianus
atgtctagcgaagataagaaacctgtcgtcgacaagaaggaagaggctgctccaaagccaccatcctctgctgtcttctccatgtttggtggtaagaaggccgaaaagccagaaaccaagaaagacgaagaagataccaaggaggaaaccaagaaggaaggtgatgatgctccagaatcaccagatatccattttgaaccagtggttcacctggaaaaggtagatgttaagacaatggaagaagacgaagaagttctttacaaggtcagagccaagcttttcagattcgatgccgatgccaaggaatggaaagaaagaggtactggtgactgtaagttcttgaagaacaaaaagactaacaaggttagaatattgatgagaagagacaagaccttaaagatttgtgctaaccacatcattgctccagaatacactttgaagcctaacgttggttctgatagatcttgggtgtatgcttgtacagcagatattgcagaaggtgaagcagaagccttcacttttgctatcagatttggcagtaaggaaaatgctgataaatttaaagaagaatttgaaaaagctcaagaaatcaacaaaaaggcttag

SEQ ID NO: 75914 - DNA, 633 bp, Saccharomyces pastorianus
atgattttacgggagcagatcgacttcctaatacataaaagacaggatgataataataacaatggtgaagccattacagatgatgatccatttagctcttcctcatggagatggggaagatggattttttttatttttttcatagttgcactccttatacttctgttttcaactgcaaaagtgaataggagaagaagaattatgggtcaagctccgattaggggaaccgcttggttaaccccgcctacctacaggcagtccgagagagattacaatggcacacagcgttgcgttgaagactatgttcctgaatatacagagacagcaaatgagaatgatttggggttttacgacgaacgaggagagtttcatcctaatggtaaaacggaatatttagcgccaccgcctttatcagaagaacaagctagctcgactgataaagacttacagcgcccagtggctgccgtcgtacgaattcctagtgaaagtgaattcgacttcaatctgctaagacccactatgaataatttcgttaatggtcagagtaatcgcaacgagcagcattctccgactgttgaatcttcttcctttgatgttaataacgcgccggcaagagcgaaagtgagtaagtga

SEQ ID NO: 75915 - DNA, 123 bp, Saccharomyces pastorianus
atgacttgcggtatagaaaatagttataagagtgccgaaaaaaaaaagaagtacagaagttttcgtttctttgaaagtcgcgattattccgagttgtgtattatagtaggaacatactattga

SEQ ID NO: 75916 - DNA, 1383 bp, Saccharomyces pastorianus
atgcctagggccttatcaataaaatttgacaatacgtatatggacctttacgatgaattaccggaaagtaaactcctttatgatgaagaattttcatatcttttggatgcagtaaagcaaaatggtgtctgcgtcgtagattttttaacactcactccgaaggaattggcaaggctaatacaaaggtcgataaatgaggttttcagatttcagcaattgcttgttcatgaatataatgaaaagtacttagaaatctgtgaaaaaaactctatcagcccagataacggtcctgagtgtttcacgaccgctgatgtagctatggatgaattattaggtggaggcattttcacgcatggcattacagaaatattcggagagagctctactggtaaatctcaattacttatgcagttggcgctaagtgtccaactttccgaacctgcgggagggcttggcggcaaatgtgtatatattaccactgagggcgatttaccaactcagagattggaaagtatgctatcgtctaggccggcttatgaaaaactaggtatcacacaatcaaatattttcaccgtcagctgtaacgacctaataaatcaggaacacataatcaatgttcagttgcctattttattagagagatctaagggttcaataaaattggtgataatagattcgatttctcatcatttgagggtggagcttcagaacaagtccttcagagaatcccaagaaaataaaaactatctggataggatggcagagaagctccaaatactggcccacgattattcattatccgttgtggtggctaatcaagttggggataaaccactggctaacagtccagtggcacataggacatatgtaactgattatgattatcagctagggtggctagttggctggaagaactcaaccattctttatcggcagatgaattcgctgcttggagcaagttccaataacgatgaaattctatcagacgatgaagattatatgctaatcgagagagttatgagcactgtaaatgaccggaattatgattttttttcaaaaaagaaaccacccataattgagaataaaaccgttgagcgaaattcatcaagtcctatcagtcgacaaagtaagaaacggaaatttgactatcgtgtccccaatctcggtttgacttggtccaatcacgtttcaacacgaatattacttcaaaaatctttcaaggcttcaacaataattcaaagaggtgaagctcatctttataagggaggtgattcggcaagcttctggcaagttaagaggacaatgaaagtggtatattccacattcgctaagcctggtcaaattgcatatcaaattactaagcgaggaatagaaacagcctga

SEQ ID NO: 75917 - DNA, 351 bp, Saccharomyces pastorianus
atgtttagatcttttatgcttgcttttcaaaaggcctgcaggcaagtgcacaaacaatacttaaataaatactactcagtaataacctatttcttagcatttttgacgaaatttgctattttgttagagtcttttacaccatttgtctccacacctccgcttacatcaacaccaataacgccatttaatctaagcgcatcaccaacattttctggcgtcagtccaccagctaacataaaatgtaagctttcggggctctcttgccttccaacccagtcagaaatcgagttccaatccaaaagttcacctgtcccacctgcttctgaatcaaacaagggaataaacgaatga

SEQ ID NO: 75918 - DNA, 627 bp, Saccharomyces pastorianus
atgtatggagatttaggtaataaattagtattagaagctaaaagaacaaaacagctgtacgcaagaagtaatcaagatgttaatttacccatgtatcatgaagatataatacgaaatattctgaaagaagtttcaaatttacgtaaaaatacggaatatcttaaagaacagcagcaactaggaatgctagatgataaggtggctaaatgccagtatttcgttaccttgttatgtatggaaaggaacaagagatgtctcttagcataccaaaggttgaggacagacatactagattctatggcttggaataataatggtctggacttgatgagtagcattacgtttagccaacaagacacaaataacctttctcatcaagagcaggaatatttgaaagagtactgcgatttaattactgatttaaaaagtggtgacttggtcgatattgatttatccggctctttagtgcctccgagcgatgtatttattgatgttagagtgctcaaagatgctggtgagattcaaactgaatacggcgtgtttaaccttattaaagactcccagtttttcgtaaggcagtctgatgtagagcgtttgattcaacaaggttatttgcagaagatatga

SEQ ID NO: 75919 - DNA, 1203 bp, Saccharomyces pastorianus
atgtctataatcaaaaaaattgtgtttaagagattcaactcaactttgaaaaaaactgctcttcatgaccttcatgtgtcattaggcggtacaatggtaccatacgcaggatattccatgcccgtactatacaagggacagactcatattgaatcacataattggaccaggacaaacgctggtttatttgatgtttctcatatgttacaaagtaagttatctggtcctcattctgttaagtttctgcaacgtgtaacgcccacagatttcaatgccttgcctgttgggtcagggaccttaagtgttctattaaatccacagggaggcgtggtagacgataccatcatcactaaagaaaacgatgacaatgagttctatattgtgaccaatgctggctgtgcggaaagagacaccgagttctttcacgatgagctacaaaatggttctactttagattgtcaatggaaaatcattgaaggtagatcactattggcattgcagggtcctaaagcaaaagatgtgttggaaccacttttatcaaaaacagctcctggaaaggatctaaaagagttattttttggacaaagacatgaatttgcgttaaaggacggttctttggttcaaattgctagaggcgggtacactggtgaagatggatttgagataagcattgcaaatgagaaagcggttgagtttgcggagcaactcctggccaatccagtaatgaagcctatcggactggctgctagagacagtttaaggttggaagctggtatgtgtttgtatggtcatgaattggacgaaagtatcacaccagtagaagctgcgttaaactgggtgatttcaaagtcaagaagggacctagtagatcaaaagtactggttcaatggctatgccaagataatggaccagctaaacaataaaacgtatagcaaggtacgagtcggattcaaatacttgaaaaaggggccagctgccagaaatggtgtcaagatcttcttgcccgatgccgaaacagaggtcggccttgttacatcaggtagtgcatctccaactttaaacaacatcaatattggacaagcttatgtacagaaaggttaccacaagaagggaacgaagttgcttgttcaagtaaggaacaagttctacccgattgaacttgccaaaatgcctcttgtgcccacacattactacaagcagtga

SEQ ID NO: 75920 - DNA, 699 bp, Saccharomyces pastorianus
atggacagaaaagctgtcgaagaaaaaagaattgttatttctatcggtggagggcatgctactggtgttggagcaattgcactggatttacaaaatactttcaaaagcctatataactctatcaatataagggtaataaacctagataatatgatagaagggaacatcaagagctacaataataacgactatgattttgataatatccttaatttggtatatgaaaagcacgctgtaacttctcaaaatgacataattcaacatgattacgaggacccgatagatttgataatagtatgtggctgttatgcgctatacgataaacgcatcaacgaaatatctcaattaaaagtattcttggatagcgatgcagataaaagattaattagtctaatcaagaagaagaacgtagggagcaatgaacaactagcccagctgatcactgagtatatggaccatctgcgcccggagatgcaacaatatatagagcccactagaacttttgcagatttgatcattccttctacaaatgaaaatctagggcgcgcagtcctcgtggacggtatagttaaagcaatcgaagataccaaaagccaaatagaaggcaacaatacgaacaacaaaatacgcccacgtttatgggatttcgaagctgaaacaatggacttggagaaagatagatattacgatctgtcatga

SEQ ID NO: 75921 - DNA, 591 bp, Saccharomyces pastorianus
atgaatgttacagttactgtttatgataaaaatgtcaagtacagattagaagagaatatcaaaaataacaagggtcccagcaacgatgatcaaccagcatacaataatgaatcaaagagcacggaccgaagtgattatgcaatgtttcccactaacattaagtacatatttgaggacaacaatgatgaactagtagattcaagtgatgctgctttgacagcaggaatagataaggtcggagatgaacttgaaaatgtcataattgtccaattggatgaatcgggatctcttgaggatatcacactaatcagcgaccaatatgagcttttgtcacataggacaaatagtctcagcttggaggaaaaccaaatgagaacattatcatcacatggtgatgataaatctaatgatgaagaggaagaacttagcgttgacagtgatagattcagagtggactcggacattgagctcgatgtaatttcacaattttgcgatctgtctccttttcttcgcgatttgagtttgaatgacttaattaaactctacgtcacacaaaatgaacaattacaaatgctctccaattccgtatga

SEQ ID NO: 75922 - DNA, 486 bp, Saccharomyces pastorianus
atgagcctttaccaatcgatagtgttcatcgcacgtaatgttgttaattcaataacgagaatattgcatgaccatccgacaaatagttccctcataacccagacctattttattacacccaatcattcaggaaaaaacatttcttttcatctttttcacgatttcaaatattgttccgcgggtacgcgacactattcccagctaataatattcccggtgaaagaaaattccaggccaacccaagtaagtcgtccgttgggtggacgcccccacgagtcagtgtttctgcctaagtttacgcggacccaaaattcatactgtctcactcgcttggaccggatgggctttcctcctcctaggaaggcttccacaattatgcactttttccaagatgataggactgtaatgtgcagtccaaaagatggtatacctgtatcatcatttcatataatgatttgctttttggaacgtcgaaaaggaaattaa

SEQ ID NO: 75923 - DNA, 315 bp, Saccharomyces pastorianus
atgagcaaatattatatcttgatagagctgatgaacgataaaaagaatactaactctagttgtgatattttctctttctatttaaatttcagcgataaccctttctcaagctttcgtttgaaatcgcgtctcctatatggtatattctcctgttttctccttttttattccttaaaagacctgataggggtattcaaacaaaagtatttatatttgtctattcttcttttatggcttcttgttctcctgttctgtcttgcaaaaggcttgtcacacaatctcagggctgattccttccttcaatatccactgtga

SEQ ID NO: 75924 - DNA, 963 bp, Saccharomyces pastorianus
atgtctacctttgaaactttaattaaaagaggtggtaacgaagccatcaaaattaaccctccaaccggtgcggatttccacatcactagtcgtggttccgattggttctggacatgtttctgttgttacctattatttggtttaattttaacattcttaatgttcagaaaaccagtcaatgacagattcttttaccttaccggtattgctccaaactttttcatgtgtatcgcttatttcaccatggcttctaacttaggttggattccagtcaaggctaagtacaaccatgtccaaacttctactcaaaaagaacatccaggttacagacaaatcttctactctagattcgttggttggttcttagctttgccatggccaattattcaaatctgtatgctagctggtaccccattctggcaaatggctttcaatgtttgtattactgaattcttcactgtttgttggttgatcgctgcctgtgttcactccacttacaaatggggttactacaccatcggtctaggtgctgctattgtcgttagtatcagtgttatgaccaccagttacaacttggtgaaacaaagagataacgatatcaggttgacattccttgtcttcttcagcattattatgttcttgtggattattgcttacccaacttgtttcggtattaccgatggtggtaacgttttgcagccagactctgccggtattttctatggtatcattgatcttattttgatgtgtttcattccaactttattggttccaattgctaaccacttcggtgctgacaaattgggctaccatttcggacctagtgatgccgaagcagtgatggctccaaaagctcctgttgctagtccaagacctgctgctacaccaaacttgagtaaggacaagaaaaagaagtctaagaagagcaagaaatctaagaagtctaagaagtctgaagaataa

SEQ ID NO: 75925 - DNA, 177 bp, Saccharomyces pastorianus
atggaatctatatttctacatgctaatattacgatcattcctcattcagttttatatgtttcattatcctattacattatcaatccttgcgtttcagtttccactaatttagatgactatttctcatcatttgtgtcatcttctaacaccgtatatgataatatactagtaacataa

SEQ ID NO: 75926 - DNA, 156 bp, Saccharomyces pastorianus
atgaggcatcatcaaaatatgcattatgccccacaacaacaaccagtctatgtccaacagcctcctcctcggagagaatccggtggttgctgtagaacctgttgtcacttcctatgttgtctatgtttaattaacctatgttgtgacgttttttaa

SEQ ID NO: 75927 - DNA, 1776 bp, Saccharomyces pastorianus
atgtctcaacaagataatgtcaaagccgccgctgaaggtgttgctaacctacatctcgacgaagctaccggggaaatggtctccaagtctgaattgaagaagcgtatcaagcaaagacaagtcgaagctaaaaaggccgccaaaaaggctgccgctcaaccaaaaccggcttccaaaaaaaaaacagatttgttcgctgacctggatccatcgcaatatttcgaaacaagatctcgccaaatccaagaattgagaaagactcacgaaccaaatccatacccacacaagtttcacgtttctatatccaatcctgagttcttggccaaatatgcgcatttgaaaaaaggtgaaaccttacctgaagagaaggtttcaattgctggtagaattcatgccaaaagagaatctggctccaaattgaaattctatgttcttcacggtgatggtgttgaagttcaattgatgtcccaattgcaggactactgcgacccagactcttacgaaaaggatcacgaccttttgaaaaggggtgatatcgttggtgtcgagggttacgtcggaagaactcaaccaaagaaaggtggtgaaggtgaagtttccgtcttcgttagcagagtgcaattattgacaccatgtttgcacatgttacctgccgaccactttggtttcaaagaccaggaaaccagatacagaaagcgttatttggatttgatcatgaacaaagacgccagaaaccgttttattacccgttctgaaattatccgttacatcagaagatttttggaccaaagaaagtttattgaagtagaaactccaatgatgaacgttattgctggtggtgctaccgctaagccatttattacccaccataatgaccttgatatggacatgtacatgagaattgctccagaattgttcttgaaacaattggttgtcggtggtttggatcgtgtttacgaaattggtagacaattcagaaatgaaggtatcgatatgacacataatccagaattcaccacttgtgagttttatcaagcctacgctgatgtttatgatttgatggatatgactgaattgatgttttcagaaatggtcaaggagatcactggttcttatattatcaaataccatccggaccctgctgatccagccaaagaactagaattgaacttttctagaccatggaagagaatcaacatgattgaagaattagaaaaggtattcaacgttaagttcccatctggtgatcaattacatacagctgagactggtgaatttttgaaaaagattcttgtcgacaacaaattagaatgtccacctccactaactaatgctcgtatgttagataagcttgtcggtgaattagaagatacatgtatcaacccaactttcatttttggccaccctcaaatgatgtctccattagccaagtactcaagagatcaaccgggtctatgtgagcgtttcgaggtctttgtagctacaaaggaaatttgtaatgcctacactgaattgaacgatccatttgaccaaagggcacgtttcgaagaacaagctagacaaaaggatcaaggtgatgacgaagctcaattagtcgatgaaaccttctgtaatgctctagaatacggtttaccaccaactggtggttggggttgtggtattgatagactggccatgttcttgaccgactccaacaccattagagaagtcttattgttcccaactttgaagcctgatgttttgagagaggaagtcaaaaaggaagaagaaaattaa

SEQ ID NO: 75928 - DNA, 612 bp, Saccharomyces pastorianus
atgcttagaaataccattgcattaagatcatttatcagaacacagtcgacgcgcccatatcctgtaaatgtagaggcagtctactatgctcctttaaagttacctatcaaatatggtgatttagttgcagacattcagttaagatcgtatgacaatgaaaacctcgatttttattcagacttcatacttagaacaggttactatttgggtatcccattgacaggtcctaaacctttgcccacgagaagagaaaggtggactgtaataaaatcacctttcgtgcacgctaaatccaaagagaattttgaaagacatacacataagaggctcattagggcctgggatacgaaccccgaagtgctacagatgttgatagcttacattacgaagcactctatggcaggcgtcggaatgaaatgtaacttctttcaaaggtccgaaatatcgctggacttgggttcggacgccaatggcctcgaaaaatcactaagcaatatcgatgaattgtattctctgagaaacgatgataaagctcaaactagtgctgtcggacaaaaagtattggaactattggatagccccgattttaaaaaacatttggaaaagaagtaa

SEQ ID NO: 75929 - DNA, 696 bp, Saccharomyces pastorianus
atgttttacccatataactatagtaacctcaatgtttctactatgcccgcactgccgggaatctccgcatttgatggaatgcaagatgaagaaaacgttgaaataagcccggaaagaaaatatcagacgctactaccagttctaactaattctcatgtggtagagaatgaactaaaacacaaattaaataagactgcttttgatttccgataccaaaccaaatcagaaaatggctctgaaaagtgggagccaaaatacttaataacgcctaatttacaaacaagaagcgtctcttttgacaattcatcggtacaatataattcagattcatccgaaaaaagctcgctatcacaactaacttgtaattcatcaataatacaacagcctgagaacggaatagtttctaatgatgcatataataagatggcaaatagtagatactctctgaaaacgcggaagcaaagaacagatccaagaaatacgttatcagatgaggaagaccttgaacaaaggcgcaaatacatttgcaaaatttgcgcaagaggattcactacatcgggtcatttagcaaggcataatagaattcatacgggcgaaaaaaatcattgttgtccgtataagggatgcacgcagcgattcagtcgacatgataattgcttgcaacactatagaacacatttgaaaaagggacaataa

SEQ ID NO: 75930 - DNA, 987 bp, Saccharomyces pastorianus
atgcctgcccctcaagatccaaggaatcttccaattagacaacaaatggaagctcttatccgtcgcaaacaagctgaaatcacgcaaggtttggaatccatcgatactgttaagttccacgctgatacttggacccgtggtaacgatggtggtggtggtacctctatggttatccaagacggtacaactttcgaaaaaggtggtgttaatgtctccgttgtttatggtcaattgagcccagcggccgtttcagccatgaaagctgatcataagaatctgcgtctaccagaagatccaaagactggtttgccagttaccgacggtgtcaagttcttcgcttgtggtttaagtatggtcattcatcccgttaacccacacgctccaaccacgcacttaaactaccgttacttcgaaacttggaaccaagatgggaccccacaaacttggtggtttggtggtggtgctgatttgacaccttcttacttatacgaagaagacggtcaattattccaccaactgcacaaggatgccttggacaagcacgacactgctttgtacccacgtttcaagaaatggtgtgatgagtacttctacattacccaccgtaaggaaacacgtggtattggtggtatattctttgacgattatgatgaacgtgacccacaagaaatattgaagatggttgaagactgtttcgatgctttcttgccatcctacttgactatcgtcaagagaagaaaagatatgccatatacaaaggaagaacaacaatggcaggccattagacgtggtagatacgttgaattcaacttaatctacgatagaggtacccaattcggtttgagaaccccaggctctagagttgagtcaattttgatgagtttgcctgaacatgcttcatggttatacaaccaccaccctgctcctggttccagagaagctaaattactagaagttaccaccaaaccaagagagtgggttaaataa

SEQ ID NO: 75931 - DNA, 315 bp, Saccharomyces pastorianus
atgtcttctctacttcaacttctcgcagtgtggagtcaaagctcatcaatttcaatgaattcagaagttgctcagacaaatcaaaaatataaagatcattcttttttagtgagccagtcattttactcgccttttgtgaattcatgctattggaagcttgtcaacaggcgtgcagatcttttgaaaatcctttttcttcgaaggaaaggtgatatgcattctcatttattttcatataccttcatcttttattttcttctatttaagattttgtcactacatccattcagagaacctgcaaaaataaatatctga

SEQ ID NO: 75932 - DNA, 1899 bp, Saccharomyces pastorianus
atgaattcacaaaaggcgagtaaaatgactggctcactaaaaaagaatgatctttatatttttgatttgtctgagcaacttctgaattcattgaaattgatgagctttgactccacactgcgagaagttgaagtagagaagacatctgataatgatagaaacaaggagtctggagatctccaaatagcaagaaagaaggtcacatcaaatgttatgcgttgtagtgtttgtcaaatgagctttgattccagaaatgaacaaaaggcccactaccagactgattatcatttgatgaatgttaagcgtaaccttagggggctggatatcctatccgttgaggaattcgatgcgctgatttctaaggagcatggtatcaagtctgaagacgaaaattctgacggcgagcaaacttcaagcgatcacgaagaaagtgaggaagccagcgatcgggacccggacctacaaactaataattatatggaaactataatcgaaaatggtttgcagaaattagggttccaaaaagacgagtcggatgctattagccatattaatacccaatcgccctacatttatttcaaatcgaagtatcttcaaaagaatgaggtcttggcgatttataagtctctatttaataaaaggagtctttccaaccccaatgaagctttgactttttggaattcgcaagagaacccaatggccatttcagctctgtttatggtgggaggtggacattttgcgggagcaattgtttctcatcaaagactcaatgtcaaggggaacgcgcacaagaaggacgaaaccttaattgagcaagcggtcaatttcttagagcacaagacgtttcacaggtatactaccagaaggaagcaaggtggttctcagtcagcaatggacaatgcaaagggaaaagctaactctgccggttcagcacttcgtaggtacaatgaaagcgctttaaaaacagatatacagggtgtgttgaaggactgggaaccttatctgtcaaagtgtgataatatttttattcgagctcgcaatgtcagtgataaaaaaatttttactgataataccgttctgaacaagggtgatgaaaggataaagagcttcccttttaccacgaacaggcccactgtattagaattgaagaaggcatggtgcgaactttcctacctgaaaatattacctaagcctgaaccattggcagtgaaagaaacagtacaaaagttagaagtgtcgaacaaaaaggacgaatttaaagaaaaacaagaaccgttactggaagaaatccaaacagaagaaataatttctctgctgaagaaaggaagggcaccgttattgatatccttcttaaaaaagaataagcttgatggaaactttcggttaaagcctgagagtaaatattccttaacccctaccatgttacattatgcatcgcagcaagggatgaaacagatggcactgattttgctctcaaatattaaatgcgatccaacgatcaagaacagactaggaaggactgcgtgggatttgaatagaagcgacgacgtgagacacgcgtttcaaattgcaagatacaatctcggagagtctttcactaattgggacgaaactcatatcggtcagccattgagcagagaacaagttgatgaaatcaatgaaaagaaaaaagcaatagagaatgaaaaggcagaaaaactgattaaattggaattagaagccgccaaggaaaaacaaagatttgctaaagatgcagagaggggtccaggcaaaaagttaaccaatattccttcaattcagcaacaaaatttgaattctttgaccgatgaacagagacgcagattgatgagagaacaaagggctagagccgcagaagaaaggatgaaaaagaaatactga

SEQ ID NO: 75933 - DNA, 747 bp, Saccharomyces pastorianus
atggctagaactttcttcgtcggtggtaactttaaattaaacggttccaaacaatccattaaggaaattgttgaaagattgaacactgcttctatcccagaaaacgttgaagttgttatctgtcctccagctacctacttggactactctgtctctttggttaagaagccacaagtcactgtcggtgcccaaaacgcctacttgaaggcttccggtgcttacactggtgaaaactccgttgaacaaatcaaggatgttggtgctaagtgggttgtcctgggtcactctgaaagaagatcttacttccacgaagatgacaagttcattgctgacaagaccaagttcgctttaggtcaaggtgtcggtgtcatcttgtgtatcggtgaaactttggaagaaaagaaggccggtaagactttggatgttgttgaaagacaattgaacgctgtcttggaagaagttaaggactggactaacgtcgttgtcgcttacgaaccagtctgggccattggtaccggtttggctgctactccagaagatgctcaagatattcacgcttccatcagaaagttcttggcttccaagttgggtgacaaggctgccagcgaattgagaatcttatacggtggttccgctaacggtagcaacgccgttaccttcaaggacaaggctgatgtcgatggtttcttggtcggtggtgcttctttgaagccagaatttgttgatatcatcaactctagaaactaa

SEQ ID NO: 75934 - DNA, 1005 bp, Saccharomyces pastorianus
atgtgtgaagagaatgttcatgttagtgaagatgttgctggcagtcacggttcttttacgaatgccagacctaggttaattgtactaataaggcatggggaaagcgaatcaaataaaaacaaggaggtcaatggttacattcctaaccatctgatttctttgacgaaaacaggtcaaatccaagctagacaagctggtattgacttattacgtgttttaaacgtagacgatcacaacttggtggaggatttggctaagaagtatattaaagatgaaagtagcaggagaactttaccgctgaaggactataccaggctgagtagagaaaaagacacaaacatagttttttatacatcaccctatagaagagcaagggaaacattgaaaggtattttggacgtcatcgatgaatataatgaattaaacagtggtgttcgtatatgtgaagatatgagatatgatccacatggtaaacagaaacatgcattttggccgagaggacttaataatactggtggtgtttacgaaaataatgaagataatatttgtgaagggaagcctggaaaatgttatctgcaatatcgggttaaggatgagccaagaataagggaacaagattttggtaatttccaaaaaatcaatagcatgcaggacgttatgaagaagagatctacgtatggtcatttcttcttcagattccctcatggagaaagtgcggcagatgtatatgacagagtcgccagtttccaagagactttattcaggcacttccatgataggcaagagagaagacccagagatgttgttgtcctagttacacatggtatttattccagagtattcctgatgaaatggtttagatggacatacgaagagtttgaatcgtttaccaatgttcccaacgggagcgtaatggtgatggaactggacgaatccatcaatagatacgtcctgaggaccgtgctacccaaatggactgattgtgagggagacctaactacatag

SEQ ID NO: 75935 - DNA, 396 bp, Saccharomyces pastorianus
atgcgagaatctcttttcattatctttttccaatttgtttgccattccagcaattccttaggcgtaacccttggctcgacatttttcagacccgtacctttgctgacttggacagcgccttcaatagacctggccctttctattctggcccttttcttttcatgcaaatgctgctgctgttggagctcgaggcgctcaagggatcttttcttcggaaaggattcagtggtattgtttttgttgcaattattgtcgttagaaaacacattcaagtggcccgctgctgtagttgatgcggcaattccattattatgtttcaagttggtatctgtttcctttaacggagaccttattatcattttcgttggagaaaccattttcttctttcttttctaa

SEQ ID NO: 75936 - DNA, 1335 bp, Saccharomyces pastorianus
atgcaattacattcacttatcgcttcaactgcgctcttaataacgtcagctttggctgctacttcctcttcttccagcataccctcttcctgtaccataagctcacatgccacggccacagctcagagtgacttagataaatatagccgctgtgatacgttagtcgggaacttaactattggtggtggtttgaagactggtgctttggctaatgttaaagaaatcaacgggtctctaactatatttaacgctacaaatctaacttcattcgctgctgattccttggagtccatcacagattctttgaacctacagagtttgacaatcttgacttctgcttcatttgggtctttacagagcgttgatagtataaaactgattactctacccgccatctccagttttacttcaaatatcaaatctgctaacaacatttatatttccgacacttcgttacaatctgtcgatggattctcagccttgaaaaaagttaacgtgttcaacgtcaataacaataagaaattaacctcgatcaaatctccagttgaaacagtcagcgattctttacaattttcgttcaacggtaaccagactaaaatcaccttcgatgacttggtttgggcaaacaatatcagtttgaccgatgtccactctgtttccttcgctaacttgcaaaagattaactcttcattgggtttcatcaacaactccatctcaagtttgaatttcactaagctaaacaccattggccaaaccttcagtatcgtttccaatgactacttgaagaacttgtcgttctctaatttgtcaaccataggtggtgctcttgtcgtcgctaataacactggtttacaaaaaattggtggtctcgacaacctaacaaccattggcggtactttggaagttgttggtaacttcacctccttgaacctagactctttgaagtctgtcaagggtggcgcagatgtcgaatcaaagtcaagcaatttctcctgtaatgctttgaaagctttgcaaaagaaagggggtatcaagggtgaatcttttgtctgcaaaaatggtgcatcatccacatctgttaaactatcgtccacttccaaatctcaatcaagccaaactactgccaaggtttccaagtcatcttctaaggccgaggaaaagaagttcacttctggcgatatcaaggctgctgcttctgcctctagtgtttctagttctagcgcttccagctctagctctaagagttccaaaggcaatgccgctatcatggcaccaattggccaaacaacccctttggtcggtcttttgacggcaatcatcatgtctataatgtaa

SEQ ID NO: 75937 - DNA, 618 bp, Saccharomyces pastorianus
atgcttgtgcggctgttgcgtgtgattttattggccagcatggttttctgtgctgatattttacaattaagctattcagatgatgcgaaagacgctatacccctaggaacatttgagattgatagtacatccgatgggaatgttacagtaacaaccgttaatatacaggatgctgaagtttctggagaatactgtttgaatgcccagattgaaggtaagctggatatgccatgttttagctacatgaagctgaggacaccactaaaatacgatttaattgtggatgtagatgaagataatgaggtcaaacaagtgtcgctatcctataacgagactaacgatgctattactgctacagtcagatatccagaagcgggacctactgcgccagtcactaaattaaagaagaaaaccaaaacttatgctgataaaaaagctagtaagaataaggatggaagcactgcacaattcgaagaagatgaagaggttaaggaggtgtcttggtttcaaaagaactggaaaatgttacttttaggcctattgatttacaattttgttgcgggctcagcaaagaagcaacaacaaggaggtgccggagctgatcaaaagactgagtaa

SEQ ID NO: 75938 - DNA, 1620 bp, Saccharomyces pastorianus
atgagtaccaataagttcgttgtacgaataacgaatgcgctcttcaagtcatcactggctagcaacagtccacctgtttaccctaagaggattaggcatttcgagattttacccaacgaaaaatgggttatatggggacctggaaagggcaagttcttggatgtactgaataacaagtatatttgtgagcccccattatctttgaggtttggatttttgaaggaaagttcgaacatcctgccgaggatagagcaagtggccttcaaaggggttatgccaacagctcatttaagtgctagatatgaatacttcaaagatgactacgatcaaacctgcaaacagtttatatttgataaggcaagcggatcaaatgctgtttcatataaagttgagacgaacaatcggcaaataaacatggagctgtacaatgcattagttgaaaatttaaacctctctagtttacaggataggtgggtaatgggattgagtaatggacaaatgaggagagcaaggttagctcgtagtatactcaaggaaccggatctactacttattgacgacccatttttagggttggatccagccgcaacagcaaccatttcacaatttttagccaaatatgatagtatagaagtcagtgccggatgtccaatcgtcattggtttgaggtatcaagataccattccagcatggtgtactcatatatgttgcgttgatgagaaaaacggtatattgtttgaaggcccaatcgaaaaacttcaaagtaaaatggatgaaaccagatcaagggcactaaaagaactacagcagctcaaaaaagcgtctaattccaaagaagacatttccattaacgatttgatttgtatacatcctatgtatggcaagaaagagcacgaaattatcaaaatgcctcatcttatagaattagacgggttgagcgtttcatacaaaggcgaagctgttttggaaaatctgcactggaaagttcagccgggttcgaaatggcatataagaggtgacaatgggtcaggtaagtcgaccttattatctttgcttacggcggaacatccccaatcgtggaattcgagggtgatagataatggcgtcccacgaagaacaggtaaaacaaactactttgacctaaacagcaaaataggtatgtcatcacccgaattacacgcaatttttttgaagaatgctggaggaaggctaaacattcgggaaagtgttgcaactggctatcatgaggcgtcctccaacaattacctacccatatggaagcgcttggacaaaaatagccaagacatagtgaatatgtatctgaaatattttggcttggacaaagacgccgatagtgttttatttgaacagttgtccgtaagtgaccagaaactagtcctttttgtcaggtctttaattaagatgccgcaaatattgattctcgatgaggcattttctggaatggaggtagaacctatgatgcgttgtcatgaatttttagaggagtggcctggaacagtccttgtagtggcacacgttgccgaagagacaccaaaatgtgcccattacttaaggctcatatctcctggagagtatgaaataggcgatatagaaaattaa

SEQ ID NO: 75939 - DNA, 1686 bp, Saccharomyces pastorianus
atgagtactcctgcaaactatacccgtgtgcccctgtgcgaaccagaggatctgccagacgacatacaaaaagaaaatgaatatggtacactagattctccggagcatttgtatcaagtcaagtcacgtcatgggaagccactacctgagcccgttgtcgacacccctccttattacatttctttgttaacatatctaaattatttgattctgattatattaggtcatgttcacgacttcttaggtatgaccttccaaaaaaacaaacatctggatcttttagagcatgatgggttagcaccttggttttcaaatttcgagagtttttatgtcaggagaattaaaatgagaattgatgattgcttttctagaccaactactggtgttcctggtagatttattcgttgtattgatagaatttctcataatataaatgagtattttacctactcaggcgcagtgtatccatgcatgaacttatcatcatataactatttaggcttcgcacaaagtaagggtcaatgtaccgatgccgccttggaatctgtcgataaatattctattcaatctggtggtccaagagctcaaatcggtaccacagatttgcacattaaagcagagaaattagttgctagatttatcggtaaggaggatgccctcgttttttcgatgggttatggtacaaatgcaaacttgttcaacgctttcctcgataaaaagtgtttagttatctctgacgaattgaaccacacctctattagaacaggtgttaggctttctggtgctgctgtgcgaactttcaagcatggtgatatggtgggtttagaaaagcttatcagagaacagatagtacttggtcaaccaaaaacaaatcgtccatggaagaaaattttaatttgcgcagaagggttgttttccatggaaggtactttgtgtaacttgccaaaattggttgaattgaagaagaaatataaatgttacttgtttatcgatgaagcccattctataggcgctatgggcccaactggtcgcggtgtttgtgaaatatttggcgttgatcccaaggacgtcgacattctaatgggtactttcactaagtcgtttggtgctgctggtggttacattgctgctgatcaatggattatcgatagactgaggttggatttaaccactgtgagttatagtgagtcaatgccggctcctgttttagctcaaactatttcctcattacaaaccattagtggtgaaatatgtcccggacaaggtactgaaagattgcaacgtatagcctttaattcccgttatctacgtttagctttgcaaaggttaggatttattgtctacggtgtggctgactcaccagttattcccttactactgtattgtccctcaaagatgcccgcattttcgagaatgatgttacaaagacggattgctgttgttgttgttgcttatcctgctactccgctgatcgaatcaagagtaagattctgtatgtctgcatctttaacaaaggaagatatcgattatttactgcgtcatgttagtgaagttggtgacaaattgaatttgaaatcaaattccggcaaatccagttacgacggtaaacgtcaaagatgggacatcgaggaagttatcaggagaacacctgaagattgtaaggacgacaagtattttgttaattga

SEQ ID NO: 75940 - DNA, 450 bp, Saccharomyces pastorianus
atgtcgaacctctacaaaattggaactgaaactagaaataaaatcaagaagtttcgtacatctacggcaagaaccgactccataaaagctttatcaataaagatcgaaccaaaaccgtcctatgagataattgtcgatgaagacgaacaagaagagctagacgaaattgaagatttgaacgaattagccgagatcctacctgataactcacctagatttgtactaactgcatatccaacaacaacaaaagatgggttcaaacagactcccttagttctggtatattggaagccaatgacggtcgtttcacaggaatggaagatgctttatgccggcgcattagaaatgatcagagaggagtgcggtacttttaaattgatagaggtttcttcaggtttggaggatgactcagacgttgaagaattgagggagcaattagaaaattgttag

SEQ ID NO: 75941 - DNA, 1098 bp, Saccharomyces pastorianus
atggctcaaaattttggaaagattccttctcacaagtcttacgtattgagcttatatcggaccgttctcagaaacattccaaagtgttgccactcatatgcgtttcaatatgaaataaaaaaaacactttcaaaacaattgttcaaacacaagcatgacaagtcaagttggagtgtttatactttactcaatgaattcagtttgttgaacaactgccttttggaaggtaaattacaagaaatcaaaaacttaatgaagccattaaaaaagatgaaaaaacaactggaaacaacgaaaatcctcaactctttgacttccttaggggatgtaaagaccaacgacccagaagaagtaagaagatttcatgttctgagtgcttacattaagcgaaaacaagatttgggtcttttacctgcatacataccaaaaacgtatcagcacaaactcctattaccattagcattgaacgaacatgcgtgcctgaaactatttcacattcagcaaaaattgaaaaatggcccaccttctgctaggctgtcatatacaaaagaaggaaggaatcaaatatggtttgttcggtcaccaattaacaagggcagacaacaatcgaaaaagctgggaatattgatacgaaaagaaaggaaggattctcagaaaaatatcgataatctcaatttttgcgaaattaatgctgcttgggcgttacatgaggccatttgggaggaatatctagagtcgaaaaagattattaaagtaaacttaccgaaatacttggaatacgctgcaaatatcccaaagtctactaaatgtaatccttcgagtcaatatcagaaaattaaagaatgggtagatcccgtgagagaaataatgttcgaattacattccaaaagttttcaaagagtggagtactttaacaaatataaggaaaagcttttaaagaacggtggccaactagcatattttgataaaaagtcaaaagaaatgtacgccaaacggttgacactattcagaaaaatgagcaaagaaacattaccatatgtgacactttttatagaagggagggacttgccaagtgttttggcgaaatacggtttttaa

SEQ ID NO: 75942 - DNA, 591 bp, Saccharomyces pastorianus
atgcagataataaccactacgttcattcaaaacgtaattttaggatcacaccaattacatgagcaattatctatagtggaagcccgaatgattgaatctgccatagtttcaatgctcacagaatcattttgcgaaaatgagcagacattaaaatacttagcacggctactttcaccgatgtcttatatggatgttattaatgcaagaaggggaaagaaaatatgtgggtacccgctatgctataagagtgcggcagaaaaatcatctgatggcttctttattcactcaatgtattgtaataattatcacagtaaatgttcgttgtatttaatgagacagttatcacaaacgcctttgcatgaaaggagaggcgtgcatttaactagttacattaatctagagtttgatgatatgtactcggtaagccttttagaagaattagttggaagtgaggtacctatagataccgtcaaatcgctgataacgagtttcaaggatcttgagtttgatgatacctacaagaatgagcctttaccattggatgtgtactttggacagttgactactgatgaggaaacctgtatagaatag

SEQ ID NO: 75943 - DNA, 942 bp, Saccharomyces pastorianus
atggaattcttttatgaagagcaagtagcttgtatcgaagatgataaaataaacgactctcataccaaggaaactggatcaacagaaaacactgaaaataacgaacttcagagccgagatgacaaaacaaatggggccttccaaaagttagaagaggaagtcaataaacgatatgaaaagactacaagtgcattcaaaaagttagtaatcgaaaaagatgacggaattgagattaacttgccaattagcaatgaaactacagagactgcccaaaagtatttgaagaaactagacgagaacattcacagcgtggaaagtctagcccagtcatattggagcaaaatgaaaactaagaatttttggtctggcttcagtagcttcgataatgctgcagaaaatgactctaatgacaaggatgagagttcgaaagaaaatgaaattgctgtgggtggaaatagaacagaagccgaactaaggacattatctaaagataaatcggtttatttagacaataaaatggatttgcaactggacccgtttgatgtggatgaaaaaactgaggagatatgttctattttacagggcgacaaagatatctccaaattaatgaacgacatcgtaccccataaaatcagctataaagatttctggcacatctatttcttacaaagaaacaaaattctagataaagaaagtaaaaggaaagaaatattgtccaaaaaggaaaaggaaacggaggaaaaagaagttgagtgggatgacgaagaagaagaagatgatgatgacaaagtagaagcagtagttgacaacaaatctaaaggagagacgaaagttgctgtgtctcaagagggattgaaagatgttagtgaccatgttggcctcgccaacaaggatgagagcaaggacgacgacgacgacgacgacgatgatgactgggaatga

SEQ ID NO: 75944 - DNA, 282 bp, Saccharomyces pastorianus
atgttgagaaccacttttttgcgcactccaagacaattgatgcgtaaatcgccaagggcgtctttctcaatcgtcactagggccgcctttcctcacctaaagaacaatcaagatgaagctgagaaaaaagaacagggtttgtttgatagcaacaagaagaggttggacactttggaacacggcaagaatccagattataagcaacctggaatggaagatttgaaaaaaaagggagatgacgctagaatcgaacaaaacaggccagatgacggtgtttattaa

SEQ ID NO: 75945 - DNA, 576 bp, Saccharomyces pastorianus
atggcctcctcaagtagcacgctaccgcttcatatgtatattagacccttaatcattgaagatttaaagcagattttgaacttggaaagccaaggtttcccaccaaacgaaagagcttcagaagaaattatcagctttcgtttgatcaattgtccagagctatgttcaggtcttttcatcagagagatcgagggcaaagaagttaaaaaggagacactaattggtcatattatgggtactaagatacctcatgaatacattactattgaaagcatgggcaaattacaagtggaatcgagtaatcatattggtattcactctgtagtaatcaagccagaataccagaaaaaaaacctggctactttacttttaactgactacattcagaaattgagtaatcaggaaattggtaacaaaattgtccttattgctcacgagccattgataccattttatgaaagagttggtttcaagatcattgctgagaacaccaatgttgctaaggacaaaaacttcgcagaacagaaatggatcgatatggagagagaactaattaaggaagaatacgacaactag

SEQ ID NO: 75946 - DNA, 474 bp, Saccharomyces pastorianus
atgagcagtgaaattgcctactcgaatacgaacaccaacactgaaaacgagaaccgcaatactggcgctggcgtagatgtaaatacaaatgcaaatgcaaatgcaaatgcaactgcagagctgaacctccccacggtcgatgagcaaagacagtataaggtacaactgctattgcatatcaacagcatattacttgctagagttattcagatgaataatagtttacaaaacaatctacagaacaatataaataatagcaataacaataacatcatcaggatacagcaacttatatctcagtcccttaaaagggttcatgccaatcttcaatgcatatctcagataaaccaaggagtgccctcagcgaaaccactgatcctcacgcctcctcagctagccaaccagcagcaacctccacaggatattctttctaaactctatcttctcttggcaagagtgttcgagatatggtag

SEQ ID NO: 75947 - DNA, 2691 bp, Saccharomyces pastorianus
atgaccaccactgcccaagacaattctccaaagaagagacagcgtatcatcaattgtgtcacgcagctgccctacaaaatccaattgggagaaagcaatgatgactggaaaatatctgctactacaggtaacagcgcattatattcctctctagaataccttcaatttgattctaccgagtacgagcaacacgttgttggttggaccggcgaaataacaagaaccgaacgcaacctgtttactagagaagcgaaagagaaaccacaggatctggacgatgacccactatatttaacaaaagagcagatcaatgggttgactactactctacaagatcatatgaaatctgataaagaggcaaagaccgatactactcaaacagctcccgttaccaataacgttcatcccgtttggctacttagaaaaaaccagagtagatggagaaattacgcggaaaaagtaatttggccaaccttccactacatcttgaatccttcaaatgaaggtgagcaagaaaaaaactggtggtacgactacgtcaagtttaacgaagcttatgcacaaaaaatcggggaagtttacaggaagggtgacatcatctggatccatgactactacctactgctattgcctcaactactgagaatgaaatttaacgacgaatctatcattattggttatttccatcatgccccatggcctagtaatgaatattttcgttgtttgccacgtagaaaacaaatcttagatggtcttgttggggccaatagaatttgtttccaaaatgaatctttctcccgtcattttgtatcgagttgtaaaagatcactcgacgcaaccgccaaaaaatctaaaaactcttccaatagtgatcaatatcaagtctctgtgtacggtggtgacgtactcgtagattctttgcctataggtgttaacacaactcaaatactaaaagatgctttcacgaaggatatagattccaaggttctttccatcaagcaagcttatcaaaacaaaaaaattattattggtagagatcgtctggattccgtcagaggcgtcgttcaaaaattaagagctttcgaaactttcttggccatgtatccagaatggcgagatcaagtggtattgatccaggtcagcagtcctattgccaacagaaattccccccaaactatcagattggaacaacaagtcaacgagttggttaactccataaattctgaatacggtaatttgaatttttctcccgtccagcattactatatgagaatccctaaagatgtatacttgtccttactaagagttgcagacttatgtttaatcacaagtgttagagacggtatgaataccactgctttggaatacgtcactgtcaaatcgcacatgtcgaacttttcatgctacggaaatccattgatcttaagtgagttttctggctctagtaacgtattgaaagatgccattgtggttaacccatgggattcggtggccgtggctaaatctattaacatggctttgaaattggacaaggaagaaaagtccaatttagaatcaaaattatggaaagaagttcctacaattcaagattggactaataagtttttgagttcattaaaggaacaggcgtcatctgatgatgatgtggaaaggaaaatgactccagcacttaatagacctgttcttttagaaaactacaagcaggctaagcgtagattattcctttttgattacgatggtactttgaccccaattgtcaaagacccagctgcagctattccatcggcaagactttatacaattctacaaaaattatgtgccgatcctcataatcaaatctggattatttctggtcgtgaccagaagtttttgaacaagtggttaggcggtaaacttcctcaactgggtctaagtgcggagcatggatgtttcatgaaagatgtttcttgccaagattgggtcaatttgaccgaaaaagttgatatgtcttggcaagtacgcgtcaatgaagtgatggaagaatttaccacaaggaccccaggttcattcatcgaaagaaagaaagtcgctctaacttggcattatagacgtaccgttccagaattgggtgaattccacgccaaagaactgaaagaaaaattgttatcatttactgatgacttcgatttagaggtcatggatggtaaagcaaacattgaagttcgtccaagattcgtcaacaaaggtgaaatagtcaagagactagtctggcatcaacatggcaaaccacaggacatgttgaagggaatcagtgaaaaactacctaaggatgaaatgcctgattttgtattatgtttgggtgatgacttcactgacgaagacatgtttagacagttgaataccattgaaacttgttggaaagaaaaatatcctgaccaaaaaaatcaatggggcaactacggattctatcctgtcactgtgggatctgcatccaagaaaactgtcgcaaaggctcatttaaccgatcctcagcaagtcctggagactttaggtttacttgttggtgatgtctctctcttccaaagtgctggtacggtcgacctggattccagaggtcatgtcaagaatagtgagagcagtttgaaatcaaagctagcatctaaagcttatgttatgaaaagatcggcttcttacaccggcgcaaaggtttga

SEQ ID NO: 75948 - DNA, 927 bp, Saccharomyces pastorianus
atgatggacttagataagattatagcatcactgagagacggaaaacatattcctgaagaaaccgtttttaggctatgtttaaattcacaggaactattaatgaatgaaggcaatgtaacacaagtcgatacaccggttacaatatgcggtgatatacatggccaattacacgatctactaacgctcttcgaaaagagtggtggtgtagagaaaacaaggtatattttcttgggcgattttgtggataggggattttactcattggagagttttttacttttactatgttacaaattaagatatcctgataggattactttaattagaggcaatcacgaaacccggcaaattactaaagtatacggattttacgatgaagtagtaagaaaatatggtaatagtaacgtatggaggtactgctgtgaagtttttgattatttatcattgggggcaataataaacaatagcatattctgtgttcatggtggattatctccggatatgaccacggttgatgaaatacgaacaatagacaggaaacaagaagttccacatgaaggtgctatgtgtgacttattatggagcgaccccgaagacgttgacacatggtcattatcaccaagaggtgctggatttcttttcggtaaaagagaagttgatcaattcttagagaaaaacaacgttgagttaattgctagagctcatcagttagtgatggaaggttacaaagaaatgttcgacggtggattagtgacagtctggtcggcaccgaattactgttatcgttgtggtaatgtagcagctgtattgaagatagacgacgatttgaatcgtgaatatacaatttttgaagctgttcaggcacaaaatgaagtcggaaatgctataattccaaccaaaaaatctcaaatggactatttcttataa

SEQ ID NO: 75949 - DNA, 1221 bp, Saccharomyces pastorianus
atgtcgcttggtataccactttcccaattaatagtagaaagtccaaagccattaagtagcggcatcacaggattagatgagatattaaacctgggattccaggcaaggtcgatctacgaaatatttgggcctccgggcattggcaagactaattttggcattcaattggtgtgtaattcgttagaaggtatacaacaatcggaaataaacgacgataaaattctatggatagaaacatttcaagaaatgcccataaacatattaagagagcgctttcaaaaatttaaaatcgtggaagaaaatgtgaagcgggtccgaataacgaaatttggacagctattatatttcttccagaatttgttcaaattatctcaaagtgtgcgatataaactagttataattgatggattttctcaattagtctgcgatcatctgtgtacactaagtaaaagaggcggcggaatgatagataaaactatacacgagttaaaatgtcgacatttgatattaatttttacggtaatgaccaaatacacacattccacgggttcgacaataatagttttaaatgactgtatgaacaccgccttccaatcaaacgaattcgaatccttggaagaatactacgaaattttagacgacggatcaaacttctttgtcaactctaacaacgaaagacgtaagaacaatgtacatatattgaaaagcgcgctcgttgccaatatcgctatgggaagcaaggattccacttgggaagtatttctaagaggcaggatcggcctttttagggattggaatgaacaagtggacgaaaccgttttcgtgaaaagcaaaagagtgaaggcgccatcctcgcagagtaacgagggatgtactaccatcaaagaaatgagaataaacaaacgaaactttgaaaacttgagaatagctattgtttttaatttacacggcgaagatagaaaaagagaaggacgaaatttaaagcggtcaagaagcagcgacgatcgtaactatattgtcaaatttgattttgataaagcaacaggtcaactccgcgatataattgatctgaaacctgatactgctaatattgcctcatttccgaatttatcaacaagcagcagcagttgctcacaagtgtttaacaatattgactccaatgataatccattaccaaatgcggagggaaaggaggagataatttatgatagtgaaggttaa

SEQ ID NO: 75950 - DNA, 909 bp, Saccharomyces pastorianus
atgaaattatcaactgtcctattatctgccggtttagcctcgactactttggcccaattttccaacagtacatctgcttcttccaccgatgtcacttcctcctcttccatctccacttcctctggctcagtaactatcacatcttctgaagctccagaatccgacaacggtaccagcacagctgcaccaactgaaacctcaacagaggctccaaccaccgctattccaactaacggtacttctactgaagctccaactgatactactactgaagctccaaccaccggtcttccaaccaacggtaccacttcagctttcccaccaactacatctttgccaccaagcaacacaaccaccactcctccttacaacccatctactgactacaccactgactacaccgtagtcactgaatataccacttactgtccagaaccaaccactttcaccacaaacggtaagacttacactgtcactgaaccaaccacattgactatcactgactgtccatgcaccattgagaagccaacaaccacatcaaccaccgaatacactgtagtcactgagtacactacttactgtccagaaccaaccactttcaccacaaacggtaagacttacactgtcactgaaccaaccactttgactatcactgactgtccatgtactattgaaaagagcgaagcccctgagtcttctgtcccagttaccgaatctaagggcactaccaccaaagaaacaggtgttactaccaaacaaaccacagccaacccaagtctaactgtctccacagtcgtcccagtttcatcctctgcttcttctcattccgttgtcatcaacagtaacggtgctaacgtcgtcgttccaggtgctttaggtttggctggtgttgctatgttattcttataa

SEQ ID NO: 75951 - DNA, 672 bp, Saccharomyces pastorianus
atgtcgaaggatgtaatagaatactctaaattatttgctaaactggttaacacaaacgatgatacaaaactggatgatacaatagcatccttcttatattatatgtttccaagggaactatttattcgagcaatttcattactagaatcttcagacatgtttatatacatattagatagagtccataacaaggaaggtaatgagcatacatcattgattgatgtattagttgatgaattttataagggttcatctaattcgctcctggagtatcgcttaatagtgaaggatactaatgatggagcgccaccaatactcgtagatatcgcacactggttctgctcatgtgaagagttttgtaaatactttcatgaagcactagaaaaaactgacgaaaaagaagaattacacgatgtgctaataaatgaagttgatgatcatttgcaattttcggatgataggtttgcacagctggatcctcatagcttatcaaagcagtggtatttcaaatttgataaaatttgttgttcgcatctactggcgttctccattttgcttagatcttccataaatgtgctgaagtttttcactgtgaactcgaataaagttttcgttatagcaatagataatatcgacgagtggttaaacttgcacatcaacatagttgagtaa

SEQ ID NO: 75952 - DNA, 336 bp, Saccharomyces pastorianus
atgggtctatttaataacttcaagtttaaatatacaagggcgcaactggagatctttagattttcattttgtttgctagcacctgttgctgtaatgtactatattggtacagatactgataaaaaattaaatgttccagggttttggccagatcctgcaacgttgaaccaaataccaaaagagccttatgagattaaagctgaactggcaaggatgaaaaaagaacgtttagagaaaaggcttaggttggagaaaaagatacaagaggagtttggtttagaccttgaggaggaaaaagaaaaaattaaacgggatttggctctcaaaaaaggatga

SEQ ID NO: 75953 - DNA, 219 bp, Saccharomyces pastorianus
atggctagagcaagaaagggtgcactggttcaatgtgatccatccatcaaggcgctcatattacaaattgacgccaagatgagtgatatagtactagaggagttggatgacacccatcttttagtagatccctcgaaagtcgaatttgttaagcatgagctaaataggctattatctaagaatatatataatcctatggatgaagaagaaaatcagtaa

SEQ ID NO: 75954 - DNA, 243 bp, Saccharomyces pastorianus
atggctagagctagtgagaaaggtgaagagaaaaagcagagcaacaaccaggttgaaaagctggttgaagcacctgtagaatttgtcagagaaggtactcaattcttggccaagtgtaagaaacctgatttgaaggaatacaccaagattgtcaaggctgttggtattggttttattgcagtcggtatcattggttacgccatcaagttgattcatattccaatcagatacgttattgtttaa

SEQ ID NO: 75955 - DNA, 837 bp, Saccharomyces pastorianus
atggagacctccaactttgttaaacaattatcgtcgaacaacagaaaaaccagggtaaatgcactcgaagcgttaaagaaatatctaaccgctaaacagttcaaggagaacaaacaaatagaattcaataaactttggaagggtctttactatgcaatgtggttcagtgaccgtcctagacctcagcaacgtttagccaatgaattaggtgaattacatggattatattttgatcctaaggacaatagcactgcagatgagttgaccacaaacgataaagcatttataaagtttagcagagggttctggaaggtcatgtgctttgaatggtttaacattgacagatataggttggataagtatcttctattgataagaagggtattattcaatcaattgaagtatttgcagtccagaaactgggacaaaaaattagtcgacgagtatattaagaaagtgttgaggtggttacctctgagtggaagtccaaaggtctacacagggattccaattcatatcgtcgatattctgctggacgaatgggaaagattgcttaaagatggagatgaagacgatgaagacgaggaaaacaaggaggaagagatgcgcaaaattgcagagagcgcaaaaaaaacgccactagccgatgttatcgcaattttccaagatatcgtggcagattacaataacagtaaggtgttgagagagaagatcaaagaagacctattcagtgacacgagacttgtttcctgggatattcttgaaggcgaaacgcaacataatgattccagtaacgaatctgaagaagaggaagaggaagagtggaagggattttga

SEQ ID NO: 75956 - DNA, 1149 bp, Saccharomyces pastorianus
atgaataataacagcagaaacaacaaaaatcgaagcactattaacagaaataaaaggcaactacaacaagcaaaagaaaaaaatgaaaatattcatatccccaggtatattagaaatcaaccatggtactataaggatacccccaaagaacaagaagggaagaagcccggcaatgatgatacgagcactgcagaaggaggagaaaaaagtgactacttggtgcatcataggcaaaaagcaaaagggggtgctttagatattgacaataattcagaaccaaaaattggtatgggtataaaggatgagttcaaactaatcagaccccagaagatgtccgtccgagattctcattcgctgtcattttgtaggaattgtggggaagcagggcataaggagaaagactgcatggaaaaacctcgtaagatgcagaagcttgttcccgatttaaattcacaaaaaactaatggcacagttttagtacgagctactgatgatgactgggactccagaaaagatagatggtacggttactcagggaaagaatacaatgaactgataagtaagtgggagcgtgataaaagaaataaaataaaaggaaaagacaaatcccaaactgatgaaacactatgggatacagatgaagagatagaactaatgaagttagaactttacaaggattccgtaggttcattgaagaaagatgatgctgataattctcagttgtataggacatcaacgagattgagagaagataaggctgcttacttgaacgacataaattcaacggagagtaattatgatcctaaatcaagattgtacaaaactgaaacactgggtgcagttgatgaaaaatcaaaaatgttccgcagacatttgacaggtgaaggcctaaaattaaacgaattgaaccagtttgctagatctcacgctaaggaaatgggtatacgtgatgaaattgaggataaggaaaaagtacaacacgttttagtcgccaatcctactaaatatgaatatctgaagaaaaaacgggaacaagaagaaaccaagcagcccaagattgtcagcattggagatctggaagctaggaaagtagatggtacaaagcaatctgaggaacaacggaaccacttaaaagatttatatggttaa

SEQ ID NO: 75957 - DNA, 336 bp, Saccharomyces pastorianus
atggtgagcaaggctcgcgcaaggggtaccgtgtctctaccactctggaacgccgtgaccagctcagccccgttacaacaacgaacaacttgcctagaagatcaatggccagtgcccgcggaaataagctcagaacttcgctggatcgcacaagagaagagatgcttgccaaccaccaactggacacaagatactccgtggaaagagcacgtgcctcgctggatctgccgggtatcaatcatgcagagacgctgctcagccagcgcagcagggaccgttaatgattacaatttttttcttcctttgtactatgtataccaatgtgatatgatatag

SEQ ID NO: 75958 - DNA, 411 bp, Saccharomyces pastorianus
atgcgaagcggtaatagtggcagttgtaaccattttctagtctttctccgtaaagtagttacgtgccacaatgccgccatagtgcggaaaacaacgaaatataattccttgaagcacaaaacgccaccccttccccttgcccttgcccttgcggacgccctttcccctcaaaatttttttcatattacgtctccggcttcgctctcttactcttggcgccgggcggaccccggcaggaaggggagaatccagccccttcctactcaaggctctgcgcagcgttttctccataccccacagggcggggtagagccgtgccgggtgatgcacatcatcacatcctatatgaaatctatatcatatcacattggtatacatagtacaaaggaagaaaaaaattgtaatcattaa

SEQ ID NO: 75959 - DNA, 2685 bp, Saccharomyces pastorianus
  modified_base (2337)..(2381): a, c, g, t, unknown, or other
atggaaatcaagccagttgaggttattgatggcgttccggtttttaagccgtctatgatggagtttgtaaatttccaatatttcattgatgaaattactaaattcggaatagaaaatgatattgtcaaagtcattcctcccaaagaatggctggagcttttagaaggctcacctcctgcggaaagtttaaagactatacaactagactccccgattcaacaacaagccaagcgatgggacaaacatgaaaacggtgtatttagcatcgaaaacgagtatgacaataagtcgtacaatttaacacagtggaagaacttggccgaaagtctagactctcgaataagtcaaggttatttttatgataaaactttaaaggaaaattgccgcgtagatagtcagcaggattgttatgatttggcacagttacaaattttagaaagtgatttttggaaaaccatcgctttttcgaaacctttttatgcagtggacgaaaactcttcaattttcccctatgatttaactttatggaatttgaataatttgccagattctataaactcaagtaacagacggttacttactggtcagtctaaatgcatttttccatggcatttggacgaacagaataaatgctctataaactacttgcatttcggtgctcccaaacaatggtattccataccgtccgcaaacacagaccaatttttgaaaattttatcaaaggaaccatcaagtaataaggaaaattgtccagcttttattagacatcaaaacatcataacttctcccgatttcttgcgaaaaaataatataaaatttaatagagtggtgcagttccaacatgaattcatcattactttcccttattgcatgtactccggattcaattatggttacaattttggcgaatctattgagttcatattagatcagcaagctgtcgttagaaagcaacctttaaaatgcggctgtggaaacaagaaggaagagcgaaaatctggtccgttttcaaatttatcttatgattctaatgagtcggagcaacgaggctccattactgataatgataacgatttatttcaaaaagttcgaagttttgatgaattactaaaccattcctctcaagagttacaaaatttagaagacaataagaaccccttgttctccaatattaatatgaacagaccgcaaagtagttctcttcggtctactacccctaatggtgtaaaccagttcctgaacatgaatcaaactaccataagcagaatttcttccccgttgttatcaaggatgatggacttatcaaatattgtggaacctactttggatgatccgggttccaagttcaaaaggaaagttttaactccgcaattaccgcagatgaatattccgtctaattctagtaattttggcaccccttctctaactaatacaaactccttactatctaatataacggctacatcaaccaacccatcgacaactacaaatggcaaccaaaaccacaataatgttaacgccaatggcattaacacctctgcagccgcatctatcaataataacattagcagtaccaataatagcgctaataatagtagtagtaataataacgtttccactgtgccttcttcaatgatgcattcgtccactttaaatgggacttcaggtctaggcggtgataacgatgacaatatgttagctttaagtttagcgacactggctaacagcgctactgcgtcaccaagattgacgttaccgccgctgtcgtcaccaatgaatccgaacggccacacctcatataatggcaatatgatgaacaacaacagtggtaatggtagcaacggtagcaacagctattctaacggtgtgactacggctgctgccacaactacatcagcgcctcacaatctatccatagtgtcccctaatccaacatacaatccgaatcccctatctctttatttgaccaactccaaaaatccattaaattcaggtcttgcacccttatcaccttcaacatctaacatcccatttctcaagaggaataatgtggttacattaaatatttcaagagaagcttcaaacagccctatatcttcttttgtaaatgactatagatctccgttgggtgtaagcaatccactcatgtattcttccacaatcaacgattattcaaacggtactggaattcgccaaaatagtaataatattaatcccttagatgcaggtccatctttttctcctctccacaaaaaacccaaaatactcaacggtaatgataatagcaatctggacagtaataattttgattacagtttcacgggtaacaagcaagannnnnnnnnnnnnnnnnnnnnnnnnnnnnnnnnnnnnnnnnnnnnctatcgtacatcttcaatgaacaataacggcaacaattatcaagcacattcttctaagttcggtgaaaatgaggtcattatgtcagatcatggtaagatttacatttgtcgggaatgtaatagacagttttcctctggtcaccatctaacaagacataaaaagtcagttcattccggtgagaaaccccattcttgcccaagatgcggtaaaagattcaagagaagagaccatgttctgcaacatttaaataaaaaaattccatgcactcaagaaatggaaaatactaaattagctgaatcatag

SEQ ID NO: 75960 - DNA, 432 bp, Saccharomyces pastorianus
atgtcagttattcctccaaaattcttcaagattgcaaatatatcaattggctgcatagacattattgctgccctttcacaattgacgtatattttcaccaatttaaacgtcttcctcttggcagtttacggactggcactctccgtacctatcgtctatctggagttcaaggttccgtcaaatctttacaggtatgcttccttttactttagttttcttggaaggggtttatcttatattttactaagtctgataatcagcttcggcggtatctacaacatattggcgggaatgtttacttttattttaggggttgcctttattgtttttcatttttcccagtttgtggaagaacctgctaacttcagagcacccggctcatctttgtcaattggtgatgatgacatcgacgatgacgatgacatgatttaa

SEQ ID NO: 75961 - DNA, 1782 bp, Saccharomyces pastorianus
atggctctagctatctcccacgaggatactcagattttgctaaaggacaaaaatattctacaggaatcggtcttgaacaaatacagaactgctggacaaattgcacaaactgctttgaaatatgttacttctttgatcaatgattcatatcactctaagaccacacagcgccaattaaccgtgccagagctatgtttgcttaccgattcttttattttgacccggttggaacaatattataaaaacaaagttaatgaaagaggtattgccattccaaccactattgatatcgaccaaatttctggtggatggtgccccgaaatagatgatactcaaaatttgttaaactggaataaggggaaagactccacttttgcatcatctgtcactgggactttgagaccgggggatttagtcaagattacactaggtgttcatattgatggttacacctctgaagtttctcatactatggttatttaccccgttgatgaaaccaaacctattcttcaacccactgggccactactaggtggtaaagcggatgctgtagctgctgctcacattgctatggaaacagttgttgctttattagcctgtgctctgactccagaaaagcttcctgcctcactgggaggaacttcaagtggtatcacaggccaattgattagaactatagtggatactattgccagatcttataactgtggcgttgttcctggttctcgtgtaagaaggattagaagattcctggcaggccaaaacgaaggtattgttgccgaaagggaatataagggtgttgtttggacagagtcccatcaagaagcagatttgctatctaatactgatgccaaggatttaacagtggtagatcgtggacaatcgactccattcactaatgtttctgctattccaagtgatgatttcgttgttcaatcaggtgaagtgtatttaattgatttgaaaatggcatctttggagcattgtaccaaaaagggtttagtaactttagaaaccgttgactcttacacaggtaaatctcataaggctggagaattgattgcaagacccggtgcatatgttagagattttgctcaaacccatattcttaaattaaagacttctagacaattattaactaaaatcgataaacaaggcgtttatccattcaagttatctcatttatcttctaactttcctttcgttcacgaaaatgaagaagaactccaaagcttaaagaaagatttgaaatcatttagacttgggatgagtgagatttccaacaactacttatgtgtggaaagtccaatacaaattgctagatgggttccatgggaccatattttaaaggctaccaatccaaacggtaatttaagttatgatgcaacctctacattaacattacctgggcatgagttacctttaccaaaattgggtgtttcagccatcaagcttaaatccttaatgaattcaaccaaggaatcgatttctttaccagttgctcgtgaatgtaataccatcgtattatgtgactctagtgtaagtacaacggacagacccgaattattgagattaactggtggttctaagacctgtcaaccgagctggattcactctcagcacgaattaaatccacaagattcaattgttcaagggatctttcaattagctactttggccaaggataagaggttcggtctattattaaaggaaacgcagccaatgaagcagaagagtgttgagacatcaaatggcggagttgaagaaaccatgaaaatgtag

SEQ ID NO: 75962 - DNA, 333 bp, Saccharomyces pastorianus
atgactctcctacttcaaaaatgtatcagagtagaactgcggaaagatccaatatttaacgcttcttcttcactcgaaatatttctgtcagttttagaatctgttatatatccctttaaaggaaacttgatacttctagattttcatcttgtcgatgttcaaacaacgtgttatcagagaaacagctccatgagaaatcagctgatgtcagtattctgtcagtcacttcgtgaatttacattgactgctctttcgtgcaattcatactgtattattatagttgcaactagatggcaaaaaattgataatgccctaaaaatgacaggccggtaa

SEQ ID NO: 75963 - DNA, 1422 bp, Saccharomyces pastorianus
atgggtgccgtaatttctttgccagttagcatggcgggctcattcgtggcgtcctgttttggaggttgctgctcaaacttggtgactaagactgcatcttccgtagggtcttcttctttagggacaagacttctgtacgccgtttggcttttacttaactcattgatatcatgggtgtcctattctgcgaacaaatcaatcctatggccagggaagacatgtactgggactggggaatgtggattttttacagttcataggttgaattttgcattgggatgcttacatttgatattggcgcttgtactaacgggcgtaaagtcgactaatgacgtaagagcagcattacagaattcgtggtggagtttaaaatttatactgtatttatgtctcattgttttgtcatttgtcatccccaatgacttttatattttcttttccaagtgggtgtcagtccctagtggagcaattttcatcctggttgggcttatattattagtagacttcgctcatgagtgggctgaaacgtgtattagtcacgttgagtcagaagatgaagattcctcattctggcaacgatttttggttttagggacaacttcaatgtatactgcatcgattatcatgactgttgttatgtatgttatgttttgtcatcaacaatgtaacatgaatcaaacagcggtaacagtcaatttaatattaactgttataacgcttgtcttatcggtgaatcctaagatccaagaggccaaccctaaaagtgggctggcccaaagtagtatggtttctgtttactgtacttatttgacaatgagtgccatgtcttccgaaccggatgacaaaatgtgtaatccgttggttagatctagtggaacccgtaagtttagtatcattttgggctctttatttacttttattgcgattgcctacaccacaactagagccgctgctaatagtgcttttcaaggcaccaatactaatggtgctatatatctcgggaatgatatcgagtacgaaggactaggtggacagacaagaaatcagttgagatatgaagctattaaacaagctgtagaagaaggatctttaccggaaagtgccttatatgataccgcttggttagggacatcatctcctacaggcgcaatggataaccaaaatgatgatgaaaggactggaaccaagtacaattacactctgttccacgttatattctttctggcaacccagtggattgcaattttactaacaataaacgttacccaggatgatgtaggtgactttatacccgtaggaagaacatatttttattcttgggtaaaaatagttagtgcatggatatgttatgccctttacggttggacagtggtagccccagcgattatgcccgatagatttgattacgagaattactattaa

SEQ ID NO: 75964 - DNA, 2148 bp, Saccharomyces pastorianus
atgaaaagcaggaaacgccaaaacaatatgcaagatgaaacacgggagccagcggtattgtcgtcacaggaaacctcgatttctcgcatttctccacaagatccagaagcaaaattctacgttggtgtagatgtcggaacaggctctgcaagggcatgtgttatcgatcaatctggtaacatgttgtcgctagcagaaaaacccataaaaagggaacaattgatatccaattttattactcagtcttcaagagaaatctggaatgcagtttgctattgtgttagaactgttgttgaagaatcaggagttgaccctgaaagagttcgtggaattggttttgatgcgacttgttccttagtagtcgtatccgctaccaattttgaagaaattgcagttggaccggattttaccaataatgaccagaatatcatattatggatggaccatagggcgatgaaggagactgaagaaatcaactcatctggtgataaatgtttaaaatatgtgggagggcaaatgtctgttgaaatggaaattccgaagattaagtggttgaagaacaacttagaagctggaatttttcaggattgtaagttttttgaccttccggattacttgactttcaaagccacgggaaaagagaataggtcattttgttccgctgtttgtaagcagggatttctaccagtgggtgtcgaaggttccgatataggctggtccaaagaattcttaaattcaattgggctttcagagcttacgaagaatgattttgaaagactgggtggatcgttaagggaaaaaaaaaactttctgaccgcaggtgaatgtatcagcccgttagataaaaaggctgcctgccaattaggcttgacagagcattgtgtagtaagttcaggaattattgatgcatatgcaggctgggtagggacggtagccgccaagccggaatcaccagtgaaaggtcttgccgagaccgaaaattataaaaaggatttcaatggtgcaattggcagattggcagctgttgccggtacgtctacgtgtcatattttgttatcaaaaaaccctatatttgtccatggcgtttgggggccttatagagatgtccttgcaagaggcttttgggcggcagaaggcggccaaagctgcacaggcgttcttttagatcatttaataacgacgcatccagctttcactgagctatcccacctggctaatttggcaggtttgtcgaaattcgaatatttaaacaaaatacttgaaaccttggtcgagaagcgcaaagtaagatctgttatttctctagctaagcacttgtttttttatggtgactatcacggtaatcggtcaccgatagcagatccgaatatgcgcgcttgtattataggacaatctatggataactcaattgaagacttagcggttatgtatctgagtgcctgtgaattcatatcacaacaaacaagacaaatcattgaagtaatgctaaaaagtgggcatgaaataaatgctattttcatgtcaggtggacagtgtcgaaatagcttgttgatgaggttgttggctgattgtactggcctgccgatagtgattcctcgatacgttgacgctgcagttgtatttggttctgccttgcttggggctgcagcaagtgaagattttgattataccagggaaaaaagaactctcaaaggccaaaaatcttctcagacaaagacggaacgttttaacgattcatattcgtcgatacaaaagttatcaatggaagatcgaaactcgacaaatggctttgtatccccacataatctacaactttcaactccaagtgcacctgccaaaataaataactattctcttccgatttgcacacaacaaccacttgacaaaacctctgaggaaagtagtaaggatgcttcattgaccgtgggacaggagagcctaggagagggaacatataacgggacaagttttctatggaaagttatgcaagagctaacgggtaatgcaagaattgtcaatccaaatgagaaaactcatccagatagaattcttttagacacgaagtaccaaatttttctcgatatgattgaaacacagagaaaatataggcgtatggtagataaagtagaagggtcctttagtagataa

SEQ ID NO: 75965 - DNA, 1701 bp, Saccharomyces pastorianus
atgacgaaaccgcgttacaatgacgtgttgtttgatgatgatgactcggtaccatcagaatcagttacgaggaaatcgcagagaagaaaggcaacgtcacctggggaatcaagagagtcctcaaaagatcgtctactgatacttccctctatgggggaatcatatactgagtacgtagactcttatttgaacttagaattattggaaaggggagaaagagaaacaccaatctttcttgaatctctgacaagacaactaacgcagaaaatatatgaactaataaaaacaaaatctttaactgcagataccttgcaacaaataagtgataaatacgatggtgtagtggcagaaaacaagctgttatttttgcaaagacagtattatgttgatgatgaaggaaatgttagagatggccgaaataatgataaaatatactgtgagccaaagcatgtatacgacatggtgatggcaacacacttgatgaataagcatcttaggggtaaaacattacattcctttttattttctcattttgccaatattagtcatgccatcatcgattgggtccagcaattttgttcaaaatgtaataaaaagggcaaaattaaaccattgaaggaatataaacgtcctgacatgtacgataaactactaccaatggaaaggatacatattgaggtattcgaacccttcaatggagaagctattgagggaaaatattcttatgtccttttatgccgagactatcgctctagttttatgtggttattaccacttaagagtaccaaattcaaacatcttatcccagttgtttcctcactttttttaacatttgctagggttccaattttcgtaacatcaagcactttagataaagatgatctttatgatatttgtgaagaaattgcatcaaaatacggtctccgtattggcttgggtttgaagagttctgcgagatttcatactgggggtatactgtgcattcagtatgctctaaatagttataagaaggaatgtctagccgattggggtaagtgcctaagatatggcccttacagattcaaccgaaggagaaataagagaacgaaacgtaaacctgtgcaagtactacttagtgaagttccaggtcacaatgccaaatttgagactaagagagaaagggttatagaaaacacatattcccgtaatatgttcaagatggcaggtggaaaaggtcttatatatttggaagatgtcaatacttttgcccttgctaatgaagcggataatagctgtaacaataatggaattcttcataataacaatataggaaatgataactttgaagaagaagtgcaaaaacaatttgatctaactgaaaaaaactatatcgatgagtatgatgatttggcacatgattcttcagagggcgaatttgaacctaataccttaactcccgaaggaaagcctcctcataatgtcgatgaggaccgaatagagtccaccggcgtggcagccccaatgcagggaacagaagagcctgaaaaaggggatcaaaaagaaagtgacggtgcatcgcaagtagatcaaagtgtcgaaataactagaccagaaacttcctactatcaaactttggaatcgccgtcaataaaacgacagaaattagaccaacagggtaatggagatcaaacaagagactttggcacatcaatggaattgtaa

SEQ ID NO: 75966 - DNA, 1524 bp, Saccharomyces pastorianus
atgacaatgacacaccaacaggatttgaaaggtgtgttcaccgcaaaggatttggattttaagcccgctggcaagattactaaaaaagatttgaatacaggtgtcactaaggcagaatatgctgtaagaggagctattccgaccagagctgacgagctaaaagaggaattgaaaaaaaacccagaagttttgcctttcgatgatattatcaatgcgaacattggtaatccgcagcaactggatcagaagcctttgacctttaccaggcaagtactagccatcctggagtacccggaaattttacgagtaggccataatgaactggcatctttgaacttgttttccagggacgccttggaaagagctgagcgcctcttgaatgatattggcggttctataggggcatattcgcattctcaaggtgtgccaggaataaggcaaacagttgctgacttcattactagaagagacggcggtgagcccgctacaccggaagatatttatctaaccactggcgcttcgtccgcggcaacttctttgttatctttattgtgtaaagattctcaaacaggcctgctgattccaattccgcagtatccgctttatactgcatccgcatctcttttcaatgcacaagtgctgccatactacttagatgaggagtcaaattggtctacaaacagcgacgaaattgaaaaagtagtgcaagatgctttgaaaaaacagatcagaccatctgtgctgatagttattaatccaggtaacccaaccggtgcagttctttctgaagaaaccattgccaggatctgtttgatcgctgcgaaatacggcattacaatcatttctgatgaggtctatcaagaaaacattttcaacgatgttaaatttcattcgatgaagaaagtcctaagaaaattgcagcatctttatccaggaaaattcgataacgttcagctcgcctctttacactccatttctaaaggattcatgggtgagtgcggccaaagaggcggttacatggaaattattgggttttctcaagaaataagagatgctcttttcaaactcatgtctatatccatatgttctgttgtcacaggacaagctgtggttgatttaatggtcaaaccaccccagcctggagacgagtcttatgaacaagatcatgacgaaaggctgaaaatttttcatgaaatgcgtacgagagcaaacttattgtacgagacgtttaaggaactagagggtatcgaatgccaaaaacctcagggtgcaatgtatctttttcctaggcttgttttacctaagaaagctctttgtgaaagcgaacgtcttggcatcgaacctgatgagttctattgcacatctttgctagaatctacaggtatttgtactgtcccagggtctgggttcggacaaagacccgggacttatcatgtgcgaacaacgtttttggctccagggactaaatggattcaagactggaaagaatttcatcaagatttcttcagcaagtatcgtaattga

SEQ ID NO: 75967 - DNA, 309 bp, Saccharomyces pastorianus
atgttcgcattgataatatcatcgaaaggcaaaacttctgggttttttttcaattcctcttttagctcgtcagctctggtcggaatagctcctcttacagcatattctgccttagtgacacctgtattcaaatcttttttagtaatcttgccagcgggcttaaaatccaaatcctttgcggtgaacacacctttcaaatcctgttggtgtgtcattgtcatgtgttcttacttcttccgtgtttaccacttacaaaaacaacactactgtggcgctccttccctttattcgtatcttttatgcctctag

SEQ ID NO: 75968 - DNA, 1122 bp, Saccharomyces pastorianus
atgatgccagctaacgaagataaagagaataatatcgtatatacagggaatgaaagttccggcattaactttccacagacgccggctcacttgctgaaaaggtcgcactctaatattttaaaaccacctgtaagattggaccaactcaaaagggatgcgaacagcaacaatggcaacacattaaagtacatacaaggaggaaaggaggtgtcacccacaaaaaggttgcatacccatgcgcaacaacaaggaagattgcctctggcagcaaaagacaacaatagatcgaaaagctttatttttcccgaaacttttaatcagagtaaagatgcagatttaccacaactacagaatacactatctatacgcaagaacgaccaactcaggaaactttcgcaaatttctcgcagtcgtagtagggccaaccataatgatttgttaagcaattcaagaaagttacaaaagtacggttctgtccttggttataatgctctacctaaaatgaaaagtctagttttaaaagatcttgcagattcaggtaaaaatgaagagagttccgacgatgatgaaggtaatgaagattccgagagtaaacttggcaaaaaactccaaagtgcacttttaaaacaggattcctccgacggtgaaaatgaattaaatggtggcctaggactatttaatgagcaaggtggtctgcaacaactcataaagaactccacgaagaatgagcaaaaaagtaaaaacgataaaagtgataaaactgatgactatgatatcgaaatagcaccacagaggcaggagccgctaccgtatgtaccagaaggctattccccatttcaacaagaagatattgaaaagctgaagacattcaactcaccatataagcttgatttggaagacgaagatgacaccccagataaagttgatttactcccactagaacaaattgatgaagaaggcgaaaaagatgagactgagcgcatcactcggaatcaagaagaagatgcagcgttaccactgctgtctaagaacttcaaagaagttgccgccgtcccaaccatggagttagtgtacagcgaagaaggcctcgatcctgaagaactagaggacttagttacttag

SEQ ID NO: 75969 - DNA, 858 bp, Saccharomyces pastorianus
atgctatccgtagtagcgatcccgaaaatatgtgtcacaggtcctgcaagaagatgcgtttctcatactgcaaaaaaactgtacgcagatgactataaaccagcagctatgtcctccaatgcaccttcgctaacaaaagaccaagccaaaaaaagagagttgaaaagattggtacaacgaaaggccgaggcaaagagaccagctacagcaagcccattgtacatgcctgttacaaaggcactaagatatttacgcgcagcagaagttggcagaccgcaatcgcaacagacaattaatttgactacattggtagtcggtgaaagaggtacagcgcctttatccggtagcgtgacatttcctaagcctttgagatatatcaaaattgctgcctttaccaacgacgaaagtaaattggaagagcttcgtgagaaatacccaaatcatttgattggcggagcagatcttgttgccaaaattaaaagcggtgaaattagcgttgattttgacaaagcatttgcaactcctgatattgttccagctttacaatcgcaggtggccaggatacttggtcctcgtggggttttaccctctgtcacaaaaggtacggtgagtgatgatataggctccctacttcaagaaagtctaggatctatgcctttcaggcaaaggggaaactctatcagcattggagtcggcaaatgctacttcactgatcgagaaattttacaaaacattatatccgctagagcggcatttaaaactgctgttgataatcaaaaatctaagaaaccaaatatactgagtaaaaccacattatcaagcacacatggccccggtattgtaatcgattttgcttaa

SEQ ID NO: 75970 - DNA, 1698 bp, Saccharomyces pastorianus
atgtttaagaaggagcctcacataaaagctttaagtaatttgaagaattccgaaagaaagaagttgctacaaacattccaaaaacaaacgaataatgaggaatatagctttcctacttccactataaaacaaaccaactttaacggccagaaaagtgtaggaacggtttacacagatgagaataataccccaatattattcaaggaaaagcataaggagcaactttttccaactgtgtattcttgttgggaatatcctgcgttattgccaatcgttttaactcatggatttgttatagaagaacatttattcaacggcgctaacttaatgatttccggttcgatcccaccctttgatcctcgttgcaaaataggtactctttgtggtatagctagcaaacaggcaccagaaactgtcttagccatcggcattgtcgaattagatctaccgtcctatgataaagtaattggtgaaacaggagttgctgtcaaaatcatacattatttcaatgatgggctctccaaagtctttaaaatgaaattggaacctccaattgttctcagtactcaatcaaaggataacaatatcagtagtaaacagatagaatcctcggagcaaatcaaggctgttgaaaaggaacaagaagatgcaaaagaagcgtctgttgatgtagaggagattgctgaagttctagaccattttactgtgtcggatgtagattatttcattacaagagcattatattataccttgactcaagataaaggtttggaattacccatttcagcttctaacttcatctcaaaccacattatgcgtaatttgcctccaattgatcacaatgaagtcaatgtaaagaaaacttcatggaaaaaaagcgcaaaatttttgaaacacttcgagaaagaaggcttcttaaaattaaaaggaaagggggatgacttaactattgtgggcaaaaatactgacaaggatgagttaaagaactttgtgccatataagcttggttgtagcaagtctaccacagaaagtagggagagcacaacatcgaaggagaaaacatctggaatgatgtattcactgactctgtataaaccctttaatcttgccaaagatcttttgaaggaggttaatttggcttctcacacgtactacacctctcaggacattagaagcgcggtttctcagtatatttctgtcaagaacctagcagacacaaaagataaaggaaaagttattatggacgatctattattcgatatggtcaataagaagaagaaagtcttgaatgcttcacgtatcattgctagaggtgaaattttgcatcccttactcaccaataattttaccgagttctatcagatattcaaaagcgatgatactctcttgttcaaggcgccaatgaagggttctcttccgcatattaagattattactgaaatgaaaattggcagaaaagttattaccagagtgagcaattttgaagtgtttcaagtcgatccagaatcacttgcggctgacttaagaaagatttgtagcggatcgacaacaataagtgaatcacaaacattcaaatgtgctgaagtgcaggttcaaggtccacacggtcaatcgatcattgatcaccttaacaagctaggtattccaagcaaatggatagactttgagaacaagttgaagaagaaaaaaagaaagtag

SEQ ID NO: 75971 - DNA, 1959 bp, Saccharomyces pastorianus
atgtcgtctcctattaatgattatttcattgattataaccctctttttccaatctttgctacaagaattgcgaaaggccttgctatttacagagtctcggatcacgctaggcttgcagtaattccaataagaaatataaacttggtggcgaattacaattgggatacaactactggtaaatttttgtccatcttttttaaggatgggacgatcagaatccatgacatttttaaagacggtcgattagtttcattcctaagaattccgagtacaaaaatatcaaaaggtatatgggaccgaattccattaagatacgaaccaaataatcgagattttgcatgtaacatcattgatgatttaccaaagctaataaggtttgtaaaggactcaaaaaggataaacattgtcccttacactcaaccgaatagcttgtggagaggtcctgatgaggatgatctagatagtaatgaaaaactagacgttcacgtagtattcaatgagggaaatgataaaattacagttttttttaatggtgattacgctgttttcttgtcggtggataatattgaaaacgaaaattctttaaaatcaattatcaaagttcaagatggcttttaccagtgcttctatgaggatggaactgtacaaactttaaatttaggacctttattacagagcaaatcatcagtgaacctgctgaattatataatggtaataaaagagcttataggttatatgcttactcatctcgagttcattaaccgggaactggcaacaccttatttagatttcgtcaaaagattgtgtgatgaagcctacggatatggaaaactcaaatcggaattagaagccctctttttacttggagagatctcatgtgacttggaagactggctttgcaattcagtaggtgagaagaactttaaaaggtggaagtatttaggttgtgaagcttaccaaaaaactgttcagattttaactttgatattcgtacccgcatgtgaaagaatcattatttatgtggagaagttaagggcaatattacaagccttttctatacagaataagctcagttatacgtcagatttgacagctgttgaagtgctcctaaaaagttcacagaaattgttaactatgacattaaattcaataataggcttggggagggacgaaacactttttgagaagtttttcatatggttcaacgacagacttcatgaagcgctagatgaagattataaactgaaatttcaatttgaggatgatctttactttggatacgatttactaagttactttgacagaatcttatctaaaaaaggtacggaacctagctcaataatcgacgtgaaactttatagagacctaattaatagcatgtctgatatggaaaaagagattgcacaaagtaatgttaattctcatattcaacagcatattctggttgatttaaaaacggatgtttttgcgcaaaaatatccatcttcgcaaataaatttgcttgatgccataaaattaccaaagcataattacatagtctacgttgttcaggtaacaaaacacaacagtgctcaagaacctttctcagaagaaaacaaaaagaaactatatataggaactctgaaagatgagaatttaggcattatatcaagagaatcgtcagtcaagattccggcgctattcaagagctataggttgagcagtacacggtttgtgccgaatagggtccatagcttgcttcgggatattgaattgtcagatggtaactatcatagtagccacgtcaccgattataggggagaaaactataaaaacgaggaagatgatggcataatagctattcctgcttacatcagggagaatgaggaaaatgatgatttcatagcatgcaccgcgaaggtatcggtggatggaagaagcgcatccctagtgtttccaaaagaaaaacgaaatgtttga

SEQ ID NO: 75972 - DNA, 1713 bp, Saccharomyces pastorianus
atggaaagtttcttcaggatacccctcaagcgggcaaatttacacggaatgttgaaggctgctatatccaaaattaaggcgaattttaccgcgtatggtgcaccaagaatcaatattgaggatttcaatatagtcaaggaaggaaaagcagaaattcttttccctaaaaaggaaactgttttctataatccgatccaacaatttaatagagatctaagtgttacatgcatcaaggcgtgggacaacctatatggtgaggaatgtggccaaaagagaaataataaaaaaagtaagaagaaaaggtgcgcggaaactaacgatgattcttccaagcgtcaaaaaatgggaaacgggtcaccaaaagaagccgttggtaattctaatcgaaacgaaccttatataaatattttggaagcattgtcggccactgggttaagagccattaggtatgctcatgaaattcctcatgtgagggaagttattgctaacgatttacttccagaggctgtcgaatctataaaacgaaacgttgaatataatagtgtcgaaaacattgtcaagccaaaccttgatgatgctaatgtcttaatgtaccgtaacaaagcatcgaataataagtttcacgtcatcgacttggatccttacggtaccgttacaccctttgtagacgcggctattcagagtatcgaggagggtggtctaatgctggtaacttgcactgatttatccgttttggccggtaatggatacccagaaaagtgttttgccttatatggtggtgcaaatatggtttctcatgaatcaactcacgaaagtgcgctgagactagtattgaacttactaaagcaaactgccgcgaaatacaagaaaactgtggaaccgcttttgtcgttgagcattgacttttacgtcagagtttttgtcaaagtcaaaacaagcccaattgaagtcaaaaacgttatgtcaagtactatgactacttaccattgttcccgttgcggctcttaccacaatcaacctctgggcagaatttctcaacgcgaaggtagaaacaacaaaacattcaccaaatactcggttgcgcaagggcccccggttgatactaaatgtaaattctgcgaagggacataccatttagctggtccaatgtatgcaggacctctacacaacaaggagttcatcgaggaggtgttgagaattaataaagaagagcatcgtgaccaggatgatacatatggaacacgtaaaagaattgaaggtatgctatctctagctaaaaatgaattatccgattcgccattctatttcagtcctaaccatattgcgtcggtaataaaattacaagtacctcccttgaaaaaagtagtcgcaggcctaggttccctaggctttgaatgttcattgacacatgcccaaccatcgtccctaaagactaacgctccatgggatgcaatctggtatgtgatgcagaaatgtgatgatgagaagaaagacttaagcaaaatgaatccaaatactacgggctataagattttatcggcaatgccaagatggttgagtggcactgtcaaatcagagtatgactcaaagctgtcgttcgcaccaaatgaacaaagcggtaatattgaaaaactaaggaagctaaaaattgtgagatatcaggaaaatccaacaaagaattggggcccaaaagcccgtcccaacacttcataa

SEQ ID NO: 75973 - DNA, 594 bp, Saccharomyces pastorianus
atgccaccaaaaggttggagaaaagacgcccaagggaattaccccactacttcgtatattaaagaacaagagaacattacgattcaggacctgttatttcctaaaagcactattgtgaatttggcacgcgaagtgccacagcagagcggcaaaaagctgctgataaataaagacgcatcactagcgttacagcgtggtgctacagtatttgttaaccacttgctcctgtttgcaagggaaattgcaaagagtcaagataaaaaaagctgcagtgtagatgatgttctgagtgctttggaccatataggacactcggcattgaagggtccggttagagataaactagatgaataccaagctgctgttgaacagaggaagaaggaaaaactagatagtgatgaagtagatgctgatggcgatatagatatgggtgaagataaggagaatgcgcccgtggaaaaggttattaaagagcatgacgaaatagaagaacaaggtgatgcattacaggacgtagaagagtcctccgaaaagaaacagaaaacggagagccaagatgtagaaactagagttcaaaaccttgagcaaacgtaa

SEQ ID NO: 75974 - DNA, 915 bp, Saccharomyces pastorianus
atgcaacaagcaactgggaacgaattactgggtatcctagatctggataacgatatagactttgaaactgcttaccaaatgctcagcagtaacttcgacgaccaaatgtctgcgcacatacatgaaaacacgtttagtgcaacttcccctcctctgttaacacacgagctcggcataattcctaacgtggcaaccgtgcaaccctctcacgtagaaactatacctgccgataaccaaactcatcatgctcctttgcatactcatgcacactatctaaatcacaaccctcatcaaccaagcatgggttttgatcaagcgcttggtctcaagttgtctccttccagttcggggttgttgagcacgaatgaatcgaatgccattgaacagtttttagacaatctaatatcacaggatatgatgtcttccaacgcttccatgaactccgaatcacatctacatataagatcaccaaaaaagcagcataggtataccgaattaaatcaaagatatcctgaaacacatccacacagtaacacaggggagttacccacaaacacagcagatgtgccaactgagttcaccacgagggaaggacctcatcagcctatcggcaatgaccactacaacccgccaccgttttcagtacctgagatacgaatcccagactctgatattccagccaatatcgaggacgaccctgtgaaggtacggaaatggaaacacgttcaaatggagaagatacgaagaataaacaccaaagaagcctttgaaaggctcattaaatcagtaaggaccccatcaaaggaaaacgggaaaagaattcccaagcatattcttttaacttgtgtaatgaacgatatcaagtccattagaagcgcaaatgaagcactacagcacatactggatgattcctga

SEQ ID NO: 75975 - DNA, 975 bp, Saccharomyces pastorianus
atgcgtataggtatggaagagcttagaagggcgctggcgctgctaaatggtcaaggatatgagtttatggtgttcataaaggaaaaagaccatttaataagtgagtcaattccaaaaaacttgttctcagagagttttatatcatcttcaattgaaaaaaaccctccactcacgttcgatccattggtaaataggaaaagaataactgtttatgaagaaaatatccaaccagcgatcatgctacccttagatcaacccctactaatacagaattatctgtatacggcttttaaattattaagacaggtcccatgcaaggcgattgctaagttgtggataaaaattattgagccaaggaagaaaaccaggtttccatacattaaaggcaatgctggaaggccggaatggtggccaaaagatgtagaacataaagagccggaccacctccagaaagcggatcgactgaaattgatgtgcacgataattatgaatgttctaccgcaatctcccttcagccttgagattttggacgagcttacaagagtgaccgccgcaatgaccatttttaagaaagaaactgtgaagaaagtaatcatgaaaaatgttttcgaaattgcgaaatgcttgtgcaacaaagatttcaagcagaagaccatatcacttgatgatttaaatgacctagcccaaaaacagaaaaaatcataccatagtcgtcgatttgatgtaaataaaatggttaaggtagaaaaagatttgttacaacagtcaagtggaagcgattcttcaccctcgatgatccttccttcaaaagaaagtgacacagagtatttccccagggaatatccgaaagaccctgtatcggaggattattcgaatagcatatctcgattagaaaatttagtggaatttgatccgttattcctcactaaattggatgaattaactagtagcgatgattgtaaaggttttatttga

SEQ ID NO: 75976 - DNA, 1362 bp, Saccharomyces pastorianus
atgcttttaataaagaggtacttgatggaccctgaaagtttaaggaggcagataatgaatgtatataaatgttacatgtggaagagagcgttccacagtaatagaagcctattggaagttaaacgtcgtgaaaagagtctccagagaaaaattttggaaaggattcttagacccaaggaggaaaatgctgtcaaaaaatctggattcaagctatggtcaagccatttgaataacccacacaaaacttatatgcggctggaggaattacggagacgtattatggaagaggtacacgttgaaggtattaaaaagaatgataagttattcaacgaaataaatcaatggcatttccaaaatgaaaacacaagtactgttcgaacaccaacattgctgatacatggctatgccgcatcttcaatgtcttttttcagaaattatccaggtctgtccaagcacatccgaaatttatactcaattgacatgccagcgagcggattgtcttcagtaccgtctttagagatcaatacaacaacacctctgccgttagatatcaaatttattggagaaaataaatttaaggttccatatacaataaatgcaaatcacaataaatttgtgattcaaatgtacgaagatttctatctcaacagaatcgagcaatggcgcattgataacaaattgggcaaaatgaatgttgtggggcattcttttggcggatatttatcttttaaatatgctgttaaatatccaaactcggtaaacaaactttgcttggtatccccactaggagtggaaaggaatatctggtctgtaaataataatttccactccaacactctttatactatcgattttaaaaatccaaattccaagttttactccaaaagaaatatgattccaaaatacttatttgaacaacaatttcacattttgagaatgatgggaccattaggagctaagttatgttggaattacataatggcggcatatagccgagtcccatcgttggcatacaaagagtacatatttgaactgttttacggtaagggaggtataccggaggttacgacagatattttcaaagcgttattttcaagatgtatcctagcaaaggaccccttgatggattctctgcaatatttaaatgttaagaaattattgatagtatatgggcaatatgattggatgaataaaaaagccggtatgttcatggtcaaagagttgaacaatttaaagaactgtctagaaggagcaagttatttagaaataccttcttccggtcacaatctttttttagataatccagaatcgttcaaccaatctatagtgtccttcttatcagacgaaactaaatcgccttga

SEQ ID NO: 75977 - DNA, 1011 bp, Saccharomyces pastorianus
atgtcatggaatctactatttgtgctgctaataggattcgtagttttgatattactttcgcccgtcttcaagtcaacatggccattttcgactttctatcgtaatgtgtttcagcccttcctagtggatgaccaaaaatatcgttggaagttccatttagtacctcttttctacacctctatttacctgtacctagtatatacataccacatgagagtggagtctacgattaagaatgagctattccttttagaacgaatactgatcgtgcctataattatactaccaccggtagcattaggaattctagccatggtaagcagagctgaggattcaaaggatcataaatcaggctcgacagaggaatatccatatgattacctattgtattatcctgccataaagtgttcgacatgccggatcgtcaagcctgctagatccaaacattgtagcatttgcaaccgatgcgttctcgtcgccgaccatcattgcatctggataaataactgcatcggaaagggaaactaccttcaattctaccttttcctaattaccaacatattctcgatgtgctacgcctttctaaggctgtggtacatttctttaaatagcacaagtacgctccctagagctgttctgactcttaccatattatgtggatgcttcactatcatctgcgctattttcacgtatcttcaattggccattgtaaaggagggaatgactacaaatgagcaagataaatggtataccattcaagagtatatgagagaaggaaaactggtgagatcattggatgatgattgcccatcttggtttttcaaatgcacagaacaaaaagatgacgctgctgaaccactccaagatcaacatgttacgttttatagcacgaatgcctacgaccataagcactacaaccttacacactacatcacgattaaagacgcgtccgaaattcccaatatatatgacaaaggtaccttcctggccaatctcacagatttaatatag

SEQ ID NO: 75978 - DNA, 876 bp, Saccharomyces pastorianus
atgagcaataaaagcaaccgcaggagtttacgtgacatagggaatacgattggtcgaaataatataccaagtgacaaggacaatgtctttgtgagattgagtatgtcccctttgaggacgacaagccaaaaagagtttttgaaaccacctatgaggatatcacctaacaagacagatggaatgaagcatagtatacaagtaacaccaagaaggattatgtcgccggaatgtctgaagggctatgtctctaaggaaactcaaagcctggataggcctcagttcaaaaattcgaataaaaatgtgaagatccaaaactcagatcatataactaatataatattccctacatcaccaaccaaactgacattcagtaatgaaaataaaatcgggggtgatggttcgttaacgagaatacgggcccggtttaagaatggactcatgtcacctgaaaggatacagcagcaacagcagcaacatattctcccatcggatgccaaaagcaacactgacctctgttctaatactgagctcaaggacgccccatttgagaatgaccttcctcgagctaaattgaaagggaagaatttattagttgaactcaagaaagaagaggaagacgtgggaaatggcatagaatcccttactaaatcgaacactaaactgaattccatgctggcgaacgaaggtaagatacacaaagctagtttccagaaaagtgtaaaatttaaactacctgataatatagtgactgaagaaaccgtggaacttaaagaaataaaggacttgctactacaaatgttgagaagacagcgagagattgaatcaagattatccaatatcgaacttcaactcacggaaataccgaaacataagtaa

SEQ ID NO: 75979 - DNA, 1671 bp, Saccharomyces pastorianus
atgttagataagttaccttatgagatttttaaacaaattgcctgtagaattccgcaggaagataaaatttcgttaacatatgtatgcaaaagatcctatgaatcaattatacctttcatctaccagaatgtatttcttaatgaaacctatcacatcagtggtgactatgataactcatttggaacctgttattggtctgtcttaaactttcactacatagatgaagatgattccaatactaaaaacgacatgtcgaatagaagactagctaaagtgaaatttagttatttcgaaagaacattagcagagtcaccgaaaagattatgtcccttaattaatcgaatacgttgtacatggcatttaaatgaagatgtgatgacaaatgtacttaaattgctatccgagtatggatccaatttgaaatttgtcgatcaatttgttcgctcatcagttaacaaggggctagaacctttatcaaagcaattaaaaactctaacattaacgccaccaacgttaatgcccacccataacagtgtaagcggttcttatttgaataaaattgatcggttgctcttgaagtgcgatctatctcgattagaaaaactttccattcatataaatgcattgaagtacttcaaaaataccgggtctcctatgaagatcaaagcattggtattaaatttgcgacccgacacacttaaccttgcggagtacgacgctttcgatgacttcttaaaagagctagaatacatcgacatatttgatgcttccaccttaaggcagctagagattttgtcttggtacagtcgcgacgattttccctctgtcgaagaaggtggttttgacaggttatatgtcaaatgggggctagaaggattttggaaatttccgaacattgagaaactatcattagcgtcattggtttacagcgaattttttctaatgaattgtttggctgtgtttcacaatttaaagatactgaaacttgattacatgggtaaatttgacttcgatgtgtcgttgattaacttcttatctaaacaagtgtgtggcaaaaaattacagcgttttgacatacactgcgaactgaatcacaggcttttttttcccatgacagataacccactaactcgcttgaatttcgatggtttctgcccttgttcaacttgcaaaaatacaattcacgaggtcattctaaaaaaaatctttcctgaaacccggtcaaaacttttaaagaacccaaataagttccaagcccataatttcttttaccaaatgtttttcgagaacaagatcatgccctatacaaacattattgacaacgaatcacctgcgatgggatgggattctgtacctattgaaacgtttgtacgaaagttcaatgaaaatctgcaaagcaccatagaaaatactgagaatattacagtgaataaaattactagagaagatgccattagtttgtaccacttataccttcattatctaaaagacgtatttaaagtttttgagcaaagtttgccgaacttagaatatctaaccatcaacggtatacctacaaaaataatacaagtggacgagttacaacgatgcgcggttcccctcttctataataatggctataaaagcaactctgtttatgaattggtggacgcagaagctctatttagttga

SEQ ID NO: 75980 - DNA, 348 bp, Saccharomyces pastorianus
atgacgttatcactcaatacaccacctggtgtccattgccaaccactgaagcaccaaagaataccacttctccagctccaactgaaaagccaaccgaaaagccaactgaaaagccaactgaaaagccaacccaacaaggttctagcactcaaactgttacctcctacactggtgccgctgttaaggctttgccagctgccggtgctttgttggctggtgctgccgctttattgttgtaatttactcaaccttttctttaatatatttttagaaaaatggttaagtacttttccgtcaatacagcttccacaaaatccttttatttcaattaataagatattctggtaa

SEQ ID NO: 75981 - DNA, 423 bp, Saccharomyces pastorianus
atgcaattctctaccgtcgcttctatcgctgctattgccgctgttgcctccgccgcttctaacattaccactgctactgtcacagaagaatctaccactttggtcactatcacttcttgtgaggaccacgtttgttctgaaacagtttccccagctttggtttccactgctaccgtcaccgtaaatgacgttatcactcaatacaccacctggtgtccattgccaaccactgaagcaccaaagaataccacttctccagctccaactgaaaagccaaccgaaaagccaactgaaaagccaactgaaaagccaacccaacaaggttctagcactcaaactgttacctcctacactggtgccgctgttaaggctttgccagctgccggtgctttgttggctggtgctgccgctttattgttgtaa

SEQ ID NO: 75982 - DNA, 2259 bp, Saccharomyces pastorianus
atgtctaataccgaggaattgatccaaaactcaataggttttctccagaaaacttttaaagcactcccagtttcgtttgactccattcgacatgaaccacttccatcttcaatgttgcatgcaagtattctcaattttgaatgggaaccgctcgaaaaaaatatttcggcaattcatgatagagattctttgattgacattatacttaaaagattcattatagattcaatgacaaatgctattgaagacgaagaagaaaataatcttgaaaaagggttactaaattcgtgtataggtctcgattttgtgtataactcaagatttaatagatctaatccagctagctggggaaatacctttttcgagttattttccaccatcattgatttgctaaactcaccatctacgtttttgaagttttggccctatgctgaatcacgtatcgaatggttcaaaatgaatacatctgttgagccagtatcattgggggagagcaatttgattagttacaaacagcctttatacgaaaagctgcgccactggaacgatattttagctaaattagagaataatgacatccttaataccgtcaaacattataatatgaaatacaaactagagaactttttatccgagctactacctataaatgaagaatcgaacttcaatagatccgcttctatttcagctttacaagaatctgataacgaatggaacagatcagcacgtgaacgagaaagcaaccgcagttccgacgttatatttgctgcagattataacttcgtgttttatcatctaattatttgcccgatcgaatttgcttttagcgatttagaatataaaaatgatgtggacagatcattaagtccccttcttgatgcaatcttggaaatcgaagagaacttttacagcaaaatcaagatgaacaataggactagatattccttagaggaagctctgaacactgagtattacgcgaattacgatgttatgacccctaaattacccgtgtatatgaagcattcaaacgcaatgaaaatggacaggaatgaattttgggcgaatctacagaatattaaagaatcagatgactacactcttcgacctaccattatggatatctctttgagcaatacgacctgcctttataaacaattgactcaagaggacgatgattactaccgcaaacagttcattttacaactatgtttcacaacaaatcttatacgcaatttaatttcttctgatgaaacgaggaatttctataaaagctgctatttgagggaaaacccgttgagcgatattgattttgagaaccttgatgaagttaaccaaaagcgtgggctcaatctatgttcatacatttgcgacaatcgtgttttgaaattttataaaattaaagaccctgacttttatcgtgttatccgcaaattaatgtcttctgacgaaaagtttacaaccgccaagatcgatggctttaaagaattccaaaacttcagaatatctaaggagaagataccgccacccgcttttgacgaaacttttaaaaagtttacattcatcaagatggggaataaattgattaataatgtttggaaaatacctactggtctagataaaattgagcaagaagtgaagaagcctgaaggtgtctatgaagcagcccaagcgaaatgggaatcaaaaatttcttctgaaacttccggtggagaagcgaaagatgaaataatcagacaatggcaaactttacggtttctaagatcgcgatacttgttcgattttgataaagttaacgaaaagactggtgttgatggtttgttcgaggaacccagaaaagtggaagcgttggatgatagtttcaaagagaaacttttgtacaaaatcaatcaagagcacaggaaaaaacttcaggatgctagggagtacaagattggaaaggaaagaaagaagagggcactggaagaagaggcttcgtttcctgaaagagagcaaaaaattaagtcgcaacgtataaacagcgcttctcaaacagaaggagatgagttgaagagcgaacagacgcaaccaaagggagaaatatcagaagagaataccaaaataaaaagctcggaagtttcttcgcaagatcctgacagtggtgttgccggggagtttgctccacagaatacaacagctcaactagaaaatccaaaaacagaagataacaatgcagctacttcgaacatttctaatggttcatctacccaagatatgaaataa

SEQ ID NO: 75983 - DNA, 666 bp, Saccharomyces pastorianus
atgctaccgaccccttatgtaaaatgcgattacgataaagtatatgagcctgctgaggatagcttcctcatactggactgtttggaaaaagagcatgattttttgaaacagaaatttggtaatcgtttggccatcgtttgcgaaattggttcgggatcaggtatcgtcacaacatttctaatgcaaaacaaaataataccgcaggaaaattccatccacttagctgttgatatcaacccatgggcgctcgaagcaactttggatactgcgaagttaaattcatgtaaaagttcttttttagaagtgattcaagctgatttaaactccagtattcggaataatcaggttgatgtcctaatatttaacccaccatatgtgccagcagaatgtgtgccagatgtcccaggatcaagagaggaggcagaccaatggctagatttagcgttattgggtggaaaagacgggatggcgattactgataaactgctacgacaattagaacaaattctttctccagatggtgttgcatatatattattttgtgcaagaaataagcctaaagaagtcattaagaggtttgtcgatacttacaaatggaatgtgaaacttattgaaacgagaaaagcgggatgggaagtcctcagtgtgtacagctttacaaggtga

SEQ ID NO: 75984 - DNA, 1128 bp, Saccharomyces pastorianus
atgctcagatatcatatgcaaggttttagtgggtacggtgtccagtattctccctttttcgataacaggctcgcggtagctgctggttcaaactttggcctggttgggaatggaaaattgttcatccttgagattgatcgttcaggtagaatagtggaagttaattcctttttaacacaggattgtttatttgatcttgcatggaacgaaagtcatgaaaaccaagtgttggttgcacagggcgatggtacattacgcttgtttgatacaacctttaaagagtttcctattgctatatttaaagagcatgaacgagaagtattcagttgtaattggaacttagtcaacaggcagaatttcttaagtagttcatgggatggatctataaaaatatggtcccctctaagaaagcaaagtttaatgacccttactccacgacctttagagattaccaaaatggtggatccattaaacgccattatattgaaaaagaaaagctttacaggtatttcaaaaaacaggaactgtgtataccaagcacagttctcgccccacgaccaaaatctcgtattatcctgttcagggaattcttatgcaagcttatttgacattagactaccttccggcaaaaatcagaataattttttagtgcattcaggactagaagcattgacttgcgatttcaacaaatacagaccttatgtagttgccacaggaggtgtagataatgccattagaatctgggacattaggatgctaaataaaaatgaatcagcgactatcaagaggactgtgcccggccaacttcacaattcatcatgcatcaatgaaatccctaatgcgcacgggctggcaatcagaaaagttacctggtcccctcatcattccaatattttaatgtcagcttcatatgatatgacctgtcgaatatggagagatctcagcaacgatggtgcaaaagaaacatataaaactaactctacggatgctactaaaggttccattttcaatttcacacagcattcagaattcgtatttggagctgactggagcttgtggggaaagccaggatatgtggcttcaactgcatgggatggaaatttatttgtatggaacggcttaggttga

SEQ ID NO: 75985 - DNA, 1833 bp, Saccharomyces pastorianus
atgagtgaaagtggtcaagaacaagacagaggcacaaatacatcaccaaataatgctgaaaataataataattcaaatgcagcttccggtccactcaatggcggtgctgagcaaacaagaaacataaccgtttccattcagtattcctatttcactccggagagattagcacatttgagcaatatatctaataatgataataacgaaaacaacagcgcagcatccggtagcacgattgccaacggtactgggcccagctttggcatcggaaatgggggccatcaacccgacggtgctcttgttttatcttttcgtgatgttcctgcgtctactccacaagaccgtttgaacagcttcatatctgttgctgctcagcttgcaatggagagattcaacagactattaaatagaccaaaaggaatatcaaaggatgagtttgataagctccccgttctgcaagtttctgatctacccaaggccgaagggcccttatgtagtatatgttatgacgaatatgaagatgaagttgattcaactaaagcaaaaagaaaaagggattctgaaaatgaggaggaatctgaaggaacaaaaaaaaggaaggataatgaaggtgcgcccctacgcacaaccgccgataatgacagtaacccatcgattacaaatgctacggttgttgaaccgccttctattcctctcactgaacaacaacgcactctcaatgatgaagaaacaaatccaagctacaaacactcaccaatcaagttaccttgtggccacatttttgggagggaatgtatctacaaatggtcaagattagaaaattcttgtcccctttgtagacaaaagatcagcgaatctgtaggtgttcaacgtgcagcccaacaagatacggatgaagtagcagctaacgaagctgcttttgaacgtattagacgagttttatacgacccaactgcagtgaatagcactaacgaaaatagttccgccccatccgaaaacacgtccaatacaacggttcccactatcggaaatgcaagttctggcgaacagatgttatcaagaacaggcttttttttagtgcctcaaaacggccaacctttacacaatccagtccgtttaccgcctaatgatagcgatagaaacggtgtcaacgggccgagctcaactactcaaaatccaccctctaattctggtggttcgaataacaatcaaagtccgcgctgggttcccatccctttgactttgttccaattccacagtccaaatccgaatccttccgcttctgattcttcggcaagcccatcagcagcgaacggtccaaactcaaataacactagtagtgacgctacagaccctcaccacaacagactaagagccgttttggatcacatattcaacgttgctcagaggggaacttctgatacctctgcaacaacagcacccggagcacaaactgttcacaaccaaggacgtaatgactcatcgtcctctgatacaacgcaaggaagttcctttttggaaaatatttcacgattaacaggccattttacgaatggctcaagagacaacaataacgacaataaccatagcaatgatcaacaacgaggtggaagtactggtgagaacaacagaaataacttgttttcctccggtgttgccagttatagaaatcaaaatggtgatgttactaccgtcgaactacgcaacaacaattctgctgcctttcctcctacagacgaaaatccctctcaaggccaaggttcaagcagttcggacaccaccattcataacgacgtccctaatgataacaatgagcaacgatcatcacaataa

SEQ ID NO: 75986 - DNA, 1791 bp, Saccharomyces pastorianus
atgaaattatctgtcctcacatttgtcgtagatgcattacttgtctgcagctcaatagtagatgccgatgttacagattttccatccttaccaagtaatgaagactatgtcaaaatgaattttcagaagaaatacggcagttcatttgaaaacgctttggatgatacaaaaggtagaacgcgtttaatgacaagagatgatgattacgagctggtggaactgactaatcaaaacagtttttattcggtggaattagatattggcacccctcctcaaaaagttactgtgcttgtcgacactggttcttctgatctatgggtcacgggttcagacaatccatactgttccactaaaaagaaggataccactggctcatcctttaaacaagtaaacaaggatgctttggctagcgtggttgagagtgtgtttactgaaattagctacgacaccactatagttaccagcgaagccactgctacttttgatagtacagcttctacatcacagttaattgactgcgctacatacgggacatttaatacctctaagtcgtctacattcaactccaataatacagaattttcgatcgcctatggtgatacgacttttgcatctggtacctggggccatgatcaattgagcttgaacgatttgaacattacgggtttatcatttgctgtagcaaacgaaacaaactcaacagttggtgtcttgggtattggtttgcctggcttggagtcaacttattctggtgtttctctcagctctgtacaaaaaagctacacttacaataactttccgatggtgctaaagaattcgggtgtaataaaatcaacagcttattcttttttcgcaaatgattctgattcgaaacatggtaccattttgtttggcgctgtggatcatggaaaatatgcgggcgacctatacacaattcccatcattaatactttgcagcatcgcggctacaaggatccaattcaattccaagtcaccttacaaggattaggtacgtcgaaaggggataaagaagataatctgacaaccctaaccactacaaagatcccagtcctgctagattcaggtacgaccatatcgtatatgccaactgagctggtaaaaatgcttgccgaccaggtcggagctacttactcttctgcatatggttactacataatggattgtatcaaagagatggaagaagagagtagcatcatctttgattttggtggattctatctttctaattggttaagcgattttcagctagtcacagatagtcgttcaaacatttgtatactaggtattgcaccgcagtcagatccgaccattattttgggtgataacttcttagctaatacttacgtggtatatgatctggacaatatggagatatcaatggctcaggctaacttcagcgacgacggtgaatacattgagattatagagagcgcggttccaagtgctcttaaagcacctggttactcaagcacttggtctatatatgaaagtattgtctccggcggcaacatgttttccacggcagctaactccagtatatcgtactttgcttccacatctcattcggcaacaagttcttccagctccaaaggccaaaaaacccaaacaagtacgacagctctctctatttcaaaatctacctcaagtacttcctcaacaggaatgttatctcccacctcaagttcatctacgagaaaagaaaacggaggacacaatctgaatcctccatttttcgccaggttcattacagcaatttttcatcacatttga

SEQ ID NO: 75987 - DNA, 2130 bp, Saccharomyces pastorianus
atggatacatcaaactcttggtttgatgcctcaaaagtacaaagtcaaaattttgacctacaaaccaactcttattactcaaatgctagaggcagtgacccttcgagttatgcaatagaaggcgaatataaaacactagcaacagatgatttaggcaatatattgaacctaaactatggtgaaaccaacgaagttataatgaatgaaataaatgacttaaaccttccgctgggaccactttctgatgaaaaatctgtcaaggtttctactttctccgagttaataggaaatgattggcaaagtatgaactttgacttagaaaataattcaagagaagtgactctaaatgcaactagcttgttgaatgaaaatagattaaatcaagacagtggtatgactgtttatcaaaaaacaatgagtgataagccccgcgatgaaaagaagatttccatggcggataatttattgtcgattataaacaaaagtgaaattaataaaggcttcgatagaaacctcggggaattactgttacagcaacaacaagagttgcgcgagcaattgagagcacaacaagaggctaataagaagttagagttagaactcaaacaaacacaatacaagcaacaacaactacaggctaccttagagaactctgatggtccacagtttttatctcccaaaaggaagatctcccccgcttcagaaaatgtggaggatgtatacgcaaatagcctttcaccaatgatttccccaccaatgtctaatacttcgttcactgggtcaccttctaggagaaacaatagacaaaagtactgcctgcagagaaaaaactctagtggtactgtaggaccactatgtttccaggaattgaacgaaggtttcaatgactccctcatttcaccaaagaaaattcgctcgaatccaaatgaaaacctcagttcaaaaaccaaatttattacgcccttcactccaaagagtagagttagttcagctacgtccaactctgctaacattacccctaataacttaaggttagatttcaagattaatgttgaagatcaggaaagcgaatattcagaaaaacctttgggcctgggtattgaacttcttggaaaaccaggtccttctcctacaaaatcagtgtctttaaagagtgcttctgtggatattatgcctacaattcctgggtctgtaaataatactccatcagtcaataaagtatccctttcctccagttatatagaccaatatacaccaagaggtaagcagttacactttagctctatcagtgagaatgcattgggtatcaatgctgcgacaccacatctaaagccgccgagccagcaagcacgacatcgggaaggcgttttcaatgatttagaccctaatgtacttacgaaaaatacagacaatgaaggagatgataatgaggaaaatgagcctgaaagtagatttgttatttccgaaacgccttctcccattcttaagtcacaaagtaagtacgaaggaagatctcctcaattcggcacacacattaaggaaatcaacacatataccacaaatagtccctcaaaaatcacaagaaaactcacaacactgcccagaggttcaatcgataaatatgtgaaggaaatgcctgataaaacatttgaatgtttatttcctggatgtacaaaaacattcaagagaaggtataacatcagatctcatattcaaacacatttggaagatcggccatattcctgtgatcaccctggatgtgataaggcatttgtacgaaatcatgacttgataagacacaaaaaatcgcaccaagaaaaggcgtatgcatgtccctgtggtaagaaattcaatagagaagacgctttggttgtgcacagaagtagaatgatttgcagcggtggtaaaaagtatgaaaacgtggtaattaaaaggtctccaagaaaaagaggaagacccagaaaagatggaacttcaagtgtttctagtagtccaatcaaagaaaatattaacaaggatcataatggacagttgatgttcaagcttgaagatcaactcagaagagagcgtagttatgatgggaatggaacggggattatggtttcgccaatgaaaactaatcaaaggtaa

SEQ ID NO: 75988 - DNA, 1605 bp, Saccharomyces pastorianus
atgtacaccaattattcacttacaagcagtgacgcaatgccccgaacttacttggtcggcacagcctcaccagaaatgtctaagaaaaagcgccagtctgcaaattgtgacaagccaacgaggagggtgatccacatcatcgatactaatgagcactcagaagtcgacttgaaaaatgaactgccaataacatgcacgaatgaagacggtgagatgacatcaagctcatggacttcacaaaccgctaatgattttctcaagctggcatacgtaaacgcgaaattagacccgtctttgccatctcaatatttcaaacaagatatcataaatgttttacaaagcttggagattcctggatggtctgtgcccggctctaaagaatcctcgttgaataagaatttattaactttgacacgaatcaagggggcccttacaaatgttatttataagattcactatccaaacttaccccctttactgatgagaatttttggtgatagcatagattctgtaattgatagagagtatgaattaaaggttattgcgagattatcattttatgatttaggacccaaactagaagggttttttgaaaatggcagatttgaaaaatacattgagggttcgaggacatctactcaagccgactttatagatcgggatacttcaataaaaattgctaaaaaattgaaagagttgcattgtactgttccattaacgcataaagaaataacggatcaaccgtcatgctggacaacctttgatcagtggatcaaattaatagactcgcataaagagtgggtttccaataatgtaaatataagtgaaaatttacgctgttcaagttggaatttttttttaaagagtttcaaaaattataagcgttggttgtataatgattctgcttttacctcaaaattattaagagaggatgataaagatagtatgataaattctgggctaaaaatggtattttgccataacgacttacagcatggtaatttactttttaaaagtaagggtaaggatgacatctcagtgggcgatttaacaattattgactttgagtacgcaggccctaaccccgttgtatttgatttatcaaatcatttgaatgaatggatgcaagactataatgatgtgcagtctttcaagtctcatattgataagtatccaaaagaagaagatattttagtttttgcacaaagttatataaatcacatgaatgagaaccatgtcaaaattgcttctcaagaggttaggattctttacaatctaatcatcgaatggaggccttgtacacaattattctggtgcctttgggctcttttgcaaagcggaaggctaccacaacgaccactgatagaaggtgaaaaactaatgagcgaaaaggctggactaggtgatgaaacgcaccttatggagcacaaaaataaagagaatggaaaatacgattgttctgaagatgattcgttcaactatttaggattttgtaaagaaaaaatgactgtcttttggggcgatttaattacattgggagttatcgacaaagactgcccagatattggaaaaacagattacttagacactaaacttattttttaa

SEQ ID NO: 75989 - DNA, 1410 bp, Saccharomyces pastorianus
atgctttccagagcgacgcgtactgcagctgccaaatccttagtaaaatctaaagtggctagaaatgttatggctgcttctttcgtcaagagacatgcttctacaagtttgttcaaacaagctaacaaggtcgaatccttaggttcaatatatttatccggcaagaaaatttcagttgcggcgaatccgttctccataactagcaatcgttttaaatctacctctattgaagttcctccgatggcagagtccctgactgaaggctctttaaaggaatatactaaaaacgttggtgattttattaaggaggacgagctgttggccactattgagaccgataaaattgatattgaggtcaattcgccagtatcaggtactgttacgaagctaaatttcaaaccagaggacactgtcactgttggtgaggagttagctcaggtcgagcctggtgaagcacctgctgagggttctggagaatctaagccagagcctaccgaacaagcggagccatcgcaaggtgtcgccgcaagggaaaactcaagtgaggaaacggcttcaaagaaagaagctgctccaaagaaagaagccgctccaaagaaagaagccgctccaaagaaagaagttacagaaccaaaaaaggctgatcaaccaaagaagaccatctctaaggcgcaggaacccccagtagcctctaactctttcacaccatttccacgtacagaaaccagggtcaaaatgaaccgtatgagattgaggattgccgaaagattaaaagagtctcaaaacactgctgcttccttaaccacattcaacgaagttgacatgtcagctttgatggaaatgaggaaactgtataaagatgagattattaagaagaccggtactaaattcggattcatgggtcttttctccaaagcatgtaccttggccgccaaggatattccagccgtcaatggtgccattgaaggtgaccagattgtttatcgtgattacacagatatttctgttgctgtcgccactccaaagggtttggttaccccagtcgttcgtaatgcagagtcattgagtgttttagatattgagaacgaaattgttcgcttgagtcataaagcgcgtgatggcaaattaaccctagaagatatgacgggtggtactttcaccatatctaatggtggtgtttttggttcattatacggtactcctatcatcaattcaccacaaacagccgtcctaggcttgcatggtgtcaaagagagacctgtcactgttaatggacaaattgtctcaagaccaatgatgtacttggctttgacttatgatcatagattgctagatggtagagaagctgttaccttcttgaagactgttaaagagttgattgaagaccctagaaaaatgttgttatggtga

SEQ ID NO: 75990 - DNA, 978 bp, Saccharomyces pastorianus
atgatgccgaatgttgctccaaacagctactatttaaacataccgaatgccaattcgacctcaacgactacgtcctcgatcttttctgatctcaacaaggagtacgagtcaaagattaaagaaatcgaagaatattatataaagacactgctcaatgaaaataccgataatgatgacagcagcagctccgaggggcataatataaatgaaacggacattttaagtgaatactcaccaaggccttctccttggttaccatccaaaccaaactgttatcatccgttgggagattttaaagacttgatcatatctgattccagacctacaaatacattacctattaataaccctttcgcaggcaataataacatctcaacacttgctacaactgagaaaaaacgtaagaaaaggtcactcgaagttgagattaaccctacttacacgacaagtgcattttcattacctctgacagcggagaatttacaaaaactatctcaggtggattctcagtctactggacttccatacacacttccaattcagaaaacaacaaaactggaaccttgtagaagggcacctttgcagcttcctcaattagtcaataagaccttatacaaaactgagctctgtgaatcttttactattaaaggctattgtaagtatggaaataaatgccaatttgctcatggtcttaatgaactgaaattcaagaaaaaatcaaacaattatagaactaaaccttgcataaattggtcgaagttaggctactgtccgtacggtaagcgttgctgtttcaaacacggtgatgataaggacgttgaaatatatcaaaatgctaacgatggaagaagtaaggatacggcgttgactccacttcctacttccctagccccaagcaacaacgataatatcactaatttgagtaagcctaggaacttacatactagtgttaaagcattgcaaaggatgacttggtag

SEQ ID NO: 75991 - DNA, 798 bp, Saccharomyces pastorianus
atggattataaggaagaacagaagcaggaactagaagttttagagtccatttatcctggtgaactgaggatcataaacgatgaatacccaaagattaaatttgaagtagccattaaattagagctggatacaggtgattctacttctgttttaaccaaagagcacactataatcgccgaattcaagttaccagaaaactaccctgacgaaccatgcctgatttcattggaagctcaagaagtagccctcaatgacaacgaagaagataacgaggaagatgaagacgaggttgaatatgacgaccatggtaataaagtactgaaaaagtttgaaaacctgccagatttaataagctttaaggggtacttgcctgaattaaccgtacaattagaatcgcaaatcgaaaccgatatgttattgggtatgcaaatgtgttttgcattgatttcatccataaaagaaagatgtgagcaatggtatagtgaacaattgaataagctcgagaagcagtacgagctggaagcacaagaacgtgaaaagaaggaacaggccaagttccatggtactaaagtcacaagagaatcgtacttggaatggaggtctaaatttcgccaagaactgaaactggatgaaagagaccaggtgagaaggatgaaggctcatcatgggaagctaaccggtaagcaaatgtttgaacaaggcgtggtgggcacaggcgacgagtatatggaagaggatgacgcgagtgtagatgacgtagccaagggacttgccaagaccgaaatagcaaatcaataa

SEQ ID NO: 75992 - DNA, 1236 bp, Saccharomyces pastorianus
atggactcattatcaaaaaagattcaaaatttaggtatccatgatattagaaatgccgcaaggtttgcccaaaacgtgatagttcaatatgagccttatcagatagatatccgtcgtgctacaaataccgatgcttggggccccacaccgaagcacctcgccaaggttttaaggaacagataccaagtgccgctctacttgatgacagaatacacgttgaaaagattagtcgaccatatcgctaccaggcccaagaacctatacgaaaaggcaagaaaggactacgttaattatgggtccgaatggagggtggtcttaaaatgtctagtagtcattgaattcctattattgaacgtcgacacaggtgacgaactgaatcagattagatcatgtttgctcactcataagcatattttaaccagggagattgcccaattcaaggtaaaattctccaatgatggtaaaatggagattcatgagagaggtattaggaaaaagggagaacttatcttgcaatacttggaagacccacaatttttgaaaaaggaaagagccaagaataagaagaatgccttgaaaattcgacagcaaggagaatcctccatttataatgccaaccagatttcaacctctgcaagttacgataacatcgacgacgatgaatttgatgcagatgcagatggctttgacagtgaaatggatgctaataatgtgaccaacttcaatgttcctgtggaaacagaagcaaattcgaatactcgcaggcgttctcatatggaagaacaaagaagacaaagaagggagatattaagagagcagatcaaaaataaagaacagcagaggaaaagaaagcaacaacaagatagcatccctgacttaatcgatcttgacgatagtactagcaccacgaataatataacaatagacaatggtaataatgacaacaaaaacaataatatcaacaacaatagtgatgatgatgatgatgagtttggcgacttccaaagcgaaacgagtcccgacacaacagcacctaaaacttccaatagtaaaatagatgatttgcttgactgggatggcccaaaatcagacacagataccaccgctgctgcgcaaacatcattgccctttgcggagaaaaaacagcaaaaagcccgtcctcaggctacaaaggacaagtcgaagggaaatgatgcattttccgacttattctcttactccaagtcgttggtctaa

SEQ ID NO: 75993 - DNA, 351 bp, Saccharomyces pastorianus
atgacaacttcaagaagcaccacgacagaccaggtttgtcgtccatggccaacgccggtccatactcctacggttctcaattcttcatcaccaccgttccatgcccatggttggacggtaagcatgttgtctttggtgaagttgttgacggttacgacatcgttaagaaggttgagtccttgggttctccttccggtgccaccaaggctagaattgttgttgccaagtccggtgaattataaccgctctgcctggaacaatacagcaaaaattgaaacgaactattctctcttaaattatatgtatatgtataaggtatgtgtatgtatgacaatcaattcttataactaa

SEQ ID NO: 75994 - DNA, 414 bp, Saccharomyces pastorianus
atgatgaaaggttctagaagaacaggtaataacactgctaccacgctaaacacgcctgtggtcattcatgccacgcagctgccccaacatgtctctactgacgaggttcttcaatttctggagagctttatcgatgagaaggagaacattattgatagtactaccatgaataccatcagcggcaacgccgctgacgcggacgctgccgctgtggctaacaccagcctcaacatcgacaccaacctttccagctccatatcgcaattaaagaggattcagagagacttcaagggtctgccacccgcccaagacttttccgccgcgcccattcaggtctccacgacggagaagaaggagacaagcataggtgtcagtgccaccggcggcaagaaaactacattcgccgatgagtga

SEQ ID NO: 75995 - DNA, 402 bp, Saccharomyces pastorianus
atgagtgagacctgtagcagcagccttgcccttttacacaaaatcctacatatccattcacatacgccttctgtatactacaatatatgcatatcagttagaatcctgacatctgagcgtcttcagtgttttttttctctttctttccagatccaaatatcaccggcagcggcctcaaagtacccggttttctttttttttcacactttttttttttccaaaccatgttgtcaagcattgattgactcattttcctctgactactaccagttcaaaatgttagagaaaaatagaaaagcagaaaaaataaataaaagaaccatatttatttgttcattcactttcgagtataaaattaaatcttgtctttcttgttttcacttaagtacacatacaaattaa

SEQ ID NO: 75996 - DNA, 1164 bp, Saccharomyces pastorianus
atgagtgaacttgaagccacaattaggcaagccaaagaagccctggctgaaaataatgccaaaaaggcgctcaaaatattgaagccgttcaaaagttcactgaaaaaagaaaacgcaagcaatgtaatactgaatgaagtgtttgccgatgcatacctggataatggacaggtagagaaagcctacccaattttagcgcgtgcttgcgaattagatcctgagggacaagttggcggaccggacaaattttttaccatgggtcaaatcatgggtggacaggatggtgtatcgataataactcgcggaataatgaacatctctaatactggaggtgaaatgttaaccaacgttcaggttgaaaagattgtaggtggactgctttctatgattgaaatttggatgacggatttatgcatggagccaaatgcagaagagcagtgtgaggagttaatacaaaaggcgatggaactcacagagggaaaatctcctgaaacatggtctaccctgggttctatcaaaatctcgcaacaaaaatttggagaagcttatgaagcattctcacaagcctggaatttctttgagttgaaaaaacaagaaattggtagcggtataaatgaaaatggtgacacaactcagaaagctggtttacagtcagagtatgtagatcttttacaacctcttttatctttaacaaagatgtgcctcgaagtgggagcttacgaagtcgcattgaaagttattgccgcagtaagagatatagatgaggataacatagagggttattatctagagggttttacttattatttaatgagtaaattagaaattttcaagttgaacaatcccgaagtaagcctgcgtccggaaaatatatacgagtttaaccaactcattcaagaagttcctttggatttatcccacgagccaatctcccagttaatctatgactcaagattagcgctaagtttcgcattgcaagcaggtatcaatgctgacagcaaagatgaaattgtgcaagaattattgggcggtgctaatgctttactccaagaaattggtggtcctctagatccaagtgagttaacacaaatcaagaagggtgatttagtgaatgagaatgaagacttggaagagttggacatagaggaagaatattctgactaa

SEQ ID NO: 75997 - DNA, 711 bp, Saccharomyces pastorianus
atggcaacgatggaaacgaccacacaaaaagataccaatattttgaaatctggtctcaaaaaaactataggtgttctcaatgaggcagtattacagaacgggagagaggtggaggcagtgcaggcaggaaatagtgacacaatggaagatacagaaacaaccacaataggttatatatcaatcaaagattatgcgtacgcagattcgaatcctctccattatggttattttgatggagacaatgaggaggatgaaatggtttcagattcttcaaatggagaagacacatacaataaaagacaaagtataacactaccagacgactacatagttaaccaacgtgctgttgccctctacgatttcgaacccgaaaatgataatgaattgagattggctgagggtgacatcgtatttatcagttacaagcatgggcaaggttggctagtagcagaaaatgagtcaggatcaaaaacagggttggtaccggaggagtttgtctcttatatacagccgcaagatggtgagaacgaggtggagaataaggctcgacctttctatttgacacatttgattacacagagcgttagtcctaaaaacaatattgataacactaacgaagatgaatacgacgacaacgatgaatgggaagatattgatgatgttgcggaggtcgaagcagatatgaaaacaaaattagatatatcggattga

SEQ ID NO: 75998 - DNA, 528 bp, Saccharomyces pastorianus
atgaccacatcacacagaccacagttagaagcaagaagcggtgcaaaagcggccgcttatacaccaacaggcatcgagcatgccagattactaccaggacatacaacattaaaatacaggaaatttaaagaggaggaaaatcttaaagcaaactgtgcgcaagaagataggagcaacgataaatctttagaggaggcagtagtgaacgaagagaaacaggatgttgtggggagtgggaacctccaagaaacccgcagtgagaaagaccaaaaagactcgttgcaagagctgctgattactcaaaaaaataaagtggaagataaagcagagcttgaaggaaatgaacaattaaagggtggaaattcgtctaggcgatcgtggagaaagggcacggcgtttggacgccataaagtaaccaaagagacaaatattaaggaacatgcaactaaaaaatcagcgtccggatacattaacgatatgaccaaatctgaatatcatcaagaatttctccataagcatgttagatag

SEQ ID NO: 75999 - DNA, 2175 bp, Saccharomyces pastorianus
atgtctgatttaattgaattacagaggaactatttgataggggttttgaatcagattgagacgaaaaataacttgaagtttcttattatcgataaaactgtggagacaatattaagttatcttttcctcacaccccaagaacttttaaataatgttacatctgttgatttgattgattccccaacaagaaaaggacaatcctccatcgaggcaatttacatattggaaccaacgaaatataacatcaattgtatcgatgctgacttcatggtaagaccacctaagtacagaagatgtcacatcagatttttaccaggattaacaaaccctatatttcagttttttcaatcaaaacgttacattgctcaaaatttggagtcatttaagccgatcgaactagggtttttcgtcaaagaatctcaattcttcgaaactttacaaatggaacactcattacaggtttttttcaacaacaactgtaaggctttgattcctactaacgtgaggaagattgtaggctcactggttagtttgtgtgttattacgggggaatatccgattgttagatattctgtatctaatcctgtggaagaggaagatgcccgcaatggaaacgccgtagtcaacgcaaattctttaacaaggtctattgcaaacgctttccaaatagcgatagatacatacgctcgcaataatccagatttccctcctcaaaacactgaaagaccgcgttccattctaataatcaccgatagaacactggacccttttgcgccaatattacatgattttagctatcaagcaatggcttatgacctggtagctaatgtggacacacaaaaagatatatatcattattctgccgagaatgaagctggtgagcaagaggaaaaggtttcaaaattggtagatttgtatgatcctgactggattgatttgaaacatcagcatattatggatgccaacgaatatattcaaggaagaatcaaggaactgattgctaaaaaccctctgctggttgatagatcgaacgtaaagaatactaccgatctgctgagtgtcgtagcgcacctgaaagattttgatgaagaaagaagaaggctgattttgcataagacactggtagatgaatgcctaggagagaacgcggaaagaaaattagcggatatttctgctattgaacaaaacctatccggatttggaatggattttagtggtgagaagataaagcatattatcgatgatctcttaccagcgttagcaatgaaggaaccgacaatcttagataaattgcgttacattattgcgtatgctcttttcagaggtggaattatcgagttagacttcattaagttattgaactttataggagttactcatgaacatgaaaatttccagcaatatttaaaaatattcagaaattacgatttaattgatttcaaattgatcaaagacaaaccgaaggataaaccatttcaaaaggaatggtttcatgatactttagtgaatgatccaaatatctatcacacttcaaggttcgttcccgctgtagggaatattctttcaaaggttatagcgaatccattgttattgagcgaacaatacttcccatatttaaaggacaagccaattgagttattgaatgaagaagaattccaagcaggcttagcgaatacctctgctaactcctcctcatccttaaggaatccccgtcacaaggcagcttggaccacgaaaagctctaatataaaaaaaaacatacctagacaaagattcttctactatgttattggtggtatatcaatccccgaaattaaagctgcttatgatcaatcaaacttgaagaacagagatatctttattggcagcgacgagatattaacaccaacaaaattcttagatgaagtggaacgtttacaaaatcctagagaatttttcaaattcaaggaagatcagcgccagcaagtaaacccgcctgatttccttctaagggaaatgaaaccggtggcacaaccagtctctcatgttcatttaaaaagccaagacaatagtcctaagtctggtacttctagtcccaaagcagcaggttccctcaagtcagaaccacccgaaaaagagaagaaacgtagcaaattctcgaggttcttgaaaagaaaatctcaccatgataaatga

SEQ ID NO: 76000 - DNA, 2916 bp, Saccharomyces pastorianus
atggataggtttcaaattggcgacgagcaactacttcgtttttatcagttgaagactattaatccgacccattcctgggcccaagattcctcaaaattgaataatgaagaggctacaagcaatgaacttggcgttgaaacgtcattcgacatattaaaagacttcaaatatggcaatcaaattagcattgacaaggaatcgagagcatatttaaacgatgagtcgttaagttatattagagatcccttgaatggacaagaaatgtctaaagaattgcaacatctaccaaatgattcaatgcggttgaactatcttgtcaacagtaaacaattcaacgtcaaagcctttctgagagatatgcacaaacaagactctttcaatgatctaaataactcactggacaggttggacagtgatatacaagaccaatctatacatttgaaacaattggttggtaaaaatttcaccaagtatgttaagattaaaaacaagttagaccaaatttacaaagaatttgacgagaaaacgaatgaaaaaaaccaatgtgattcaccaaaagaaaatcaaataaatgtggaaagcttaaataaaaaggtcgacgaggttattagaacgacaactttcaaactgaaaccgctaatggataactatcagaaaattttgaattaccaggccaccaaaaaatttattgaactgaataagttttacttcaacctacccaaatctttaaagagatgtttgactaacaacgatttcaatgagttcattatcgaatattcaaaaggtcttacgctccgtcgccgtttcaaccagagttcagatgcttcacaatctcttgttataaaaagaatttggactcaaatagaaaatttattagtcacgtataaagatctgatttggaacagtttaataaattcaaattttaacattgaccaaccccaagaaacaattttgtccctcttttcaaaattgttgaacttagaaaactttatcaataataatcaaagagaaagtgaaagtggtaacaagaacacaacttcatcatccaatgaaaatccaatcctaagatggatgtccatcaaaatgaatggctttcagaatgaactgaacgagttgtctggccatatgattagtaaaatcattcattctcaaaggcttatattacaaaacaatactaatcaagataaaagtcaagggtgcgtggagctgtcgtattatttgaaaatcaatcaattattccaaataataagtgatacgggcaaggatagtgaaggtttgaaaagtaccgttgaacccaataaagttaacaccatttctggaaccagctatctaaatttgaattgccaacccagctctcaaggactaactgattccccaactatcattgaaatgtggctattaatcttaaaatatattaacgacctgtggaaaatttgtgatcaatttatagaattctgggaacacattgaaaagttcctcgatgggacttaccaaaattccattataaatgaaaaaagaaaagaaaacattttgatcggtgattctaatattattgaatcataccaaaaaagcctgatcttgaaggaagagcagattaacgaggttaggttaaagggtgaggaattcatcacttcagtctcacaaaatttaatatcatttttcacatcttctcaatcatctctaccatcatcattgaagaattctactggagatattacccgcagtaataaagattcggggtcacctttggattatggatttatacctcctaattgtaatggattgagttgtttaagatatctaccgaaaattgtggagcccattttgaaattctctaccgagttagcgcaattaaatatcacaactaacggaatcaccatttgcaggaacactctatcaactataatcaatcgttgcgtaggtgccatatcttccacgaaattaagagatatatctaacttttatcagctggagaactggcaggtctatgaaacggttacattttcaagcaaatcacaggacagtagtaaaaatctaactttcgaatatggtgtgacacaatttccggaaattgtcacctcgtttcaagaagtgagtatcaaaactactagagatctattattcgcatatgaaaaattaccaatcattaacggaatttcagtagtaagttatccgccaaaacaactgctcacaggtatagaaattcaacagattatatcgatggaagctgtattggaagcgatcttaaaaaatgcggcaaaggataaggacaacccaagaaattctcataccatcttaacattaacaaatctacaatattttagagaatgtgcattcccaaatattttgcagtattttgatgacgcattcgagtggaatttggcttccaaaaacttagaattatttagcctactatctaagatggaatcttcaattttcggtaactatctttctgacttaaagatcaacttaagggatactcttgaagaaaaattccacgaaataaattggcccatgtatacatcaaattcattcagggttggtgactatattatagaagcgttaatgattctgatcgtggttcacagtgagtgctttagaattgggcctcagctcatccataagattttaattgaaacgcagatttttatagccagatacctctttgaggcatttaagccttatgttggtaatctttctaatgatggctcattacaaattatagtggatttggaattctttcagaaggttatgggtcctttacttgaaaaggacaccgaggccacattaagggcatgcttacaaaactgtttccagaacgacacaaatagactacaaaaatgtatcaatgagattaatcctattgtatctgccaatttaaaaagaactgctattcaattcgccgccttcagctag

SEQ ID NO: 76001 - DNA, 621 bp, Saccharomyces pastorianus
atggattttgaggaagattacgatgcggagtttgatgataatcaagaaggacaattagaaacaccttttccatcggttgcgggagccgatgatggggacaatgataatgatgactctgtcgcagaaaacatgaagaagaagcaaaagagagaggctatagtggatgatgggagtgaaaatgcatttggtatacccgaatttacaagaaaagataagactctggaggagattctagagatgatggacagtactcctcctatcattcccgatgcagtaatagactactatttaaccaaaaacgggtttaacgtagcagatttacgagtgaaacgacttttagcacttgctactcagaaatttgttagtgatatagctaaggatgcctacgaatattccaggatcaggtcttccgtagcggtatctaatgctaacaacagtcaggcgagagctaggcagctattgcaaggacagcaacagcctggcgtgcagcagatttcacaacaacaacatcaacagaatgagaagactacagcaagcaaagttgttctgacggtgaacgatctcagtagcgctgttgctgaatacgggctcaatataggtcgcccagacttttatcgttag

SEQ ID NO: 76002 - DNA, 1542 bp, Saccharomyces pastorianus
atgtcagaaaaccaaaaggaggtatcgcctcctcaagccatatcggtcaaatccgaggcaagctctaatatattttccaaacctatctccacatcatcacccgctgggttagcagccgctcaaagagttacgcccgggaaactgtccactttattactagaaaagggaccattggccattagacacattacacagaccttatgcctagatattccctgttttaaagatttatcatcttccaagcaaagacgacttataatgagtgctatggaaagtggtgataaagaaaaatcagtggtatttgaaaaaattggatggggtcaatggtccgcgaaaagagtagaccctgccaactttgataaggagctggaagcgaccaattttgcaaatgcaaaggtgaaagacttgatttctcaagagagtcaaagaaggaaaagcaacaattcaaattctaattcaggcggcaaagttgaaatgcctatgaaagttgagcataacatcacgaatatcgatggagccaccaccccgcctaccgctgttgcttccaccaccattcctgttaatatcaaacgcagcaaatctccacttgcagcagcaaacgtagtatatatagatgaaaatgcgctagcatcggaggatgaggatgaggagtttgatgaagatgaccatcatttacattaccaaaacaaatcgaggaacagcagtaataattttggaaaatcttcaaatggtgatccctatagtttcggcaggagaaggtctcaagttgtgttcgccgattcaactcccgagaatattgagcatgaaataatagcacaaaagattagaccgctattaagaaatagacgccgttcgagcataaaaccacatacacctttcatttccaaactaaacacacaccaagattcatcctacctttcccccaatacaacctcaacgacaaccccatcaaataacaacagtaactcaaaccaggcgaagatagatttagagaaacttactgcgacaagtgagccaacttcaagaagagcttctcgtctgtctgtatcgaaaaaatcaagtattagatcgacacttttcccaaacaaaaactatttgatcgtcactacaaaccctaactctaaagctacgtcggtttccacctcccctaagctagaagaacagatgaatgtaagttcaaatccgatagtattatcggacaaggagaaacatagagtagcttcacaacacctgaatggggaatcgtcgccacaacttgttccccattctcatcatcaacctcactcagatacagacgaagaagactgggaatcaattggtgcagcttctctgagaaataacagtttagcacctaacatagacagcgtagcaagttctactaatggcgtagttagccctaaacctacaaatccaagttttactaactctcagaatggagatattgagcctcccctacaacacgaccaacagaaacatgaacagcagccaagaaatggggaagacaatagtgctgcgtttttattaatgagcttaaaatcttaa

SEQ ID NO: 76003 - DNA, 1128 bp, Saccharomyces pastorianus
atgagtttttatcaaccatccctatctctttatgacgttttgaacgcattatccaaccaaactggccagagagggcagcaaggatatcctcgccaaccacaaaggccacagagataccatccccattatggacaagtgcacgttggcgggcatcatcctcgtcatcatccattgtatagcagatacaatggtgttcctaatacctattactaccagttccctggacaagcctattactatagtcctgaatacggttatgatgacgaggatggtgaagaagaggaccaagacgaagatatggtgggtgacagcggcactacaagacaggaagatggtggcgaggacagcaactcgagaagatatccatcatattaccattgtaatactgccaggaataataggaccaaccaacaggcaaacagtttaaacgacttattaaccgcgttaataggtgttccaccatatgaaggtactgaaccagaaattgaagcaaataccgagcaggagggcgaaaagggagaagaaaaggataagaaggataagtctgaagcacccaaagaggaagctggcgaaaccaacaaagaaaaacctttgaatcagccggaggaatcgtcgagaccaccattagccaaaaaatcttcatcgttcgctcacctacaagcgccttccccaatacctgacccgttacaagtatccaagcctgaaacgagaatggacttaccattttcaccagaagtgaatgtctatgataccgaggacacttacgtagttgttcttgcgttaccaggtgctaactctagggctttccacattgattaccatccatcttctcatgagatgctcatcaagggtaagatcgaagacagagtgggcattgatgaaaaattcttgaagatcacggaactaaaatatggtgcgtttgagagaaccgttaaattccccgtgctgccacgcattaaggacgaagaaattaaagctacttacaacaacggtctactacaaattaaggtgcctaaaattgtcaatgacactgaaaagccgaagccaaaaaagaggatcgccattgaggaaatacccgacgaagaattggagtttgaagaaaatcccaaccctacggtagaaaattaa

SEQ ID NO: 76004 - DNA, 741 bp, Saccharomyces pastorianus
atgactacagatccttctgtcaaattgaagtccgccaaagactccctcgtctcctccctcttcgagttatcaaaagctgctaatcagacagcctcctctattgttgatttctacaatgccatcggcgacgatgaagaagagaagatagaggctttcaccactttgactgagtctttgcaaacattgacttctggtgtaaaccacttgcacggcatcagctcggagctggttaaccctattgatgatgataaagatgctattatcgctgctccagtcaaggctgtaagaagaaagatcgaacgtgatccaaatgctccaaagaagccactgactgttttctttgcttactctgcgtacgttcgtcaagaacttcgtgaagacagacaaaaggctggcttgccacctttatcgtcaactgagattactcaagaaatctccaagaaatggaaggaattgagtgataacgaaaaagaaaaatggaagcaggcttacaacgtcgagttggagaattaccaaagagagaaatccaaatacttagaagcaaagaaaaacggtaccctaccaccagcttccttggaaaacggtccaactcatgcgccggttccaattcctttcagtttacagcacgccgctgaacctcctgtggaaaagagacctcacgatgatgatggatcttcggaaaagaagaagaagaagaagaagaaggataagaagaaggacaaatccaactcttctatttga

SEQ ID NO: 76005 - DNA, 960 bp, Saccharomyces pastorianus
atgaaagtaccattggggttatggaaagtctctcggggcaatttgtggagcacccagagaagggttttgacaatgtctagatgtttgaacagtgatgctggtaatgaagctaaaactgtgagagaaggaccagctttttcagcagatctctatatgcatcccgaaaaatggaagggtttacctcctcaaagaattttagagttatattgggagagaatggctagattgggttcagagtataaacctaacaaagacgaactgaatgccttattaaccacttctgagtactcaaatgtacctgttaacgatattaaaaagctatatcacagaggagaacaaggcgctattgatataaaaggtggaaacgtgaatcgcgataacagtcttagaccgtttatgtttgatgaattgccatcgcaagctcaggaattggttgcccaacatcgtgaacaaaggttctataatcgattagccgcatatgagttaccgctattagctcaatatcgccaggaatacaagagaccatctccagaaagtcatccggtcacttatagatacactagttatgttggcgaagagcatcctaattcgaggaaggttgtattaagcgttaaaaccaaggaattgggcctggaggaaaaatcattacataagttcagaatattagccaggtcgcgttatgatcatactacagatatttttaaaatgtctagtgacaaatttgagcatgcatcacaaaatgcacgttatttgcatgatattcttcaaaggctgttagcggagtcaaaagatttgacggaggacgattttagcgatgttccccttgacacaaggcatactatagctaagagtttacgtaaaaagaagcgggattatgagtttcctgaacactggaaacgccctgaagatgcaccaaagaagaaatttgatattgtagatcaattattgagcactctttaa

SEQ ID NO: 76006 - DNA, 489 bp, Saccharomyces pastorianus
atggtaatgagggaagaaacaataaaatcgctagaagatccttacaaatatcactacaaagaagaatggttaaatactaaagatcccgatgaacaacaattattcgaaatatttgcctttggaaacattaaagatctaccggaaaacataatcctaacatcattaatgcgatcaaaactggagaaattaacattggtaacattaagcgaaatatataatgagttaagttacgagttaattaaagaagaatgtcaaattgaagacgatggtatcatcgaaagccatttaattcagctacagaatatttttaaagcagagatggattcagtcagtaaatctatgaaattttcaagaagatttgactgtagagatgtgtactgtcatgaaaaggaactgactataattgaaaatccgcgagtgacgaaagagtatttagttcaaaatcttcggagctgggaaacaaagctcaaacagaatatattggagtaa

SEQ ID NO: 76007 - DNA, 1446 bp, Saccharomyces pastorianus
atgggtatttttcaatcaatagaagaagcaaataatacttctgagagattgctgaggtctgagattaaaaatagtcatggagaatttgaaaaattcgattttgatacagaagaatacgaaattaaccctaaaaggaagttaagattagtcagcaggataaacccaaatgctggacatctaaggaaatctaagtcctgctttactgtagatgagcatgttgacgaaacgcgttgtcagaaacctgtgatgaagtcgccgttcatgagtaatgtcgatgatgagatcaagaaaaagagagagacaattacaaagatgacactagaaattgaacatcatgaattgagccagaatattagaaaaccaactgatgatctgcttcctgatagcacgtatcagccttaccacaagaaaatgttgaagcaagaaaatagaatgattcaatcggacatcgtaaatggtgaaaatgaagcagacaggctttcattaatttcagatagactgggtatgttgaattgggaagtaacattacagaaggttactaaaataaatgaccccactgacgagaatgaaatggagactaaacgttaccaaactaaagagctgattgattcaatgttacataaatttgaatctatgaaaaaaaaaagccgcaatttagctagaaggccagcctcaagtgattcattgttgaaattggttagtggcaaagattggcccaagatatatactcgaatcgatcgaacttttattccagattacgcaagctcctctgacgaagaagaagaaaaaataaccgttgaggaaataagggagagacgcctaaagaagagagagcagcaatgcggtggttccattatagtactgctgagcgatcatcaatcacaaaagggaatgacacggtttgctatcgtagctgagccgctccgaaaaccgtatttgattaaaacctccactaaagagagaaattcatggaaaaacaaagttcctacaaatccaaaaaaattcaagaaagctcctcgaatatcaacgcaaattgctgtgaaaagaagaagggaagtcatcccgttaacgatggaggtggaaccagaagtcattcgggatataaggcgagatacacaaaagtctatgaaactgaatgttaaagcggaggaaatatctgtgacagagactgtcaaatcaaaagaaatgaatgccttaaggaacaatgctgcatctataagtccaactctttcagagaaggcacctttaggttcaatttcatcttgcactgcatctcagatttcacaaaggtcttctgagaatgtgggtgctattattaacaatatcaacccaaacttagcaatagtgccctcttgtaacgaaaagacctttgtaaaaacacacaatggaatgaaaactaactcaggtattgatattttgcctgtccgcaagaaaaaaaaggtttag

SEQ ID NO: 76008 - DNA, 1476 bp, Saccharomyces pastorianus
atggtatatcgtaacaggtcaaagagcgttttatctacacacagcaagaagagcgacgataaggcccactataaatcacgttcgaaaaagaaatcaaaaagcaggagcaagaagaggttaagaatctactggagatacatatctattgtatggatcttatggttaggattaatatcttattatgaatcagtggttgtgaagagagcaatgaagaagtgccaatggtcgacttgggaggattggcctgaaggcgctgaaagtcatagggtgggtttatttgcagacccacaaataatggacgaatattcatatcctgggaggcctcaaatagttaattattttacaagagtgattgttgaccattatcacaggagaaattggaaatatgtccagtattacttggatcctgatagcaattttttcctaggtgatctatttgatggagggagaaactgggatgataagcaatggattaaagagtacacacgattcaaccaaatattccccaagaagccactgagaagaacggtcatgtctttaccaggtaatcacgatattggttttggagacacagttgttgaatcgagtttacagagattttctagttactttggagaaacttcctcctcattagacgctggaaatcatacctttgtacttttagatacaatttcgctttctgataaaacaaatccgaatgtctcgaggattcctagacagtttttggataattttgcaatgggttcacatccgcttcctagaattcttttaactcacgttccattatggagggatccagaacagcaaacgtgcggtcagctacgtgaatccaaagaaccttttcctattcagaaagggcaccagtaccagacagttatagaaaacgatatatcacaagaaattttaacgaaaattcaaccagaaatattattttccggggatgatcatgaccattgtcagatatcacactcatatccgtttcaggggaaaactaaaaatgctcaagaaattacagtaaagtcatgtgcaatgaacatggggatcagtaggcctgctattcaattgctctccttatataatccttcagatttgacaatggtaaatgccggcggagagtatgcatcaaaaacttaccaaacagagctatgctatatgccagatccctataaggcaatcagaatgtacctatggggattattattctctgctgcctttatcgcatacatgcattttttcccaaaatcttttaataatcgcgtagcaaccataatgaacagagtatttacacgacctgatggtaacacctcagatttgccattacctacaagtatttccaaatcgaaatccaaaaaatcattgacacatagtaaatacgctgtgaatgatacgcgttcgatcaaacaatttctagttaatgcaattgtcctttttgtttctgtgatgcccatttttatttatttttatactgtagtctag

SEQ ID NO: 76009 - DNA, 204 bp, Saccharomyces pastorianus
atgaacaagagatataaattataccgggtgtggtattactatgctcaccaaacagtttgcataacctctactggatttgcattatgttttgtggtccaagctaaaactgcaggactgggcgtaacaccaattacttcactatacggggacaaaaaagaacacctaggtaagttgttggttcctttagttttatatcaaatttag

SEQ ID NO: 76010 - DNA, 258 bp, Saccharomyces pastorianus
atgaaaaatcatccaaggaaagttaaatttagagtcagttctgctaagtttatctgcatttattggtttttttgtctttactacaaagatggtccaattttatatacaatatacactacctttctcagtcatcgttattcgtactcaacttttattattttaaggaacacagtcgcatttttgagtttcatgtataaacattactatacgcatatttcgtatttaactttctataaatcccccaaaacgttttattaa

SEQ ID NO: 76011 - DNA, 885 bp, Saccharomyces pastorianus
atgaacacgaatcagtccaatccgaatacagatttaacagatgatgccaatatagaacatacgttgcatcggctgctcactcaggcaaataatcattttgatgatacagtaaagattgatgggcagagtttagatttgggaaaggatctcgaacaagttatgatggataatttagactgcactgatatttttgattccgacatcgcttctcagaaacacctaacattggaatctttatttaacgatgaacacaacaccgattcgagcacacttttggaaatgcagagaagtgctaatgatagcctagttggtattgatctcgataggcataaaaagggttatactggcaaggcatcattagataaaagtacaaaccaaaataacgtacataaacctgataaagaacaaaagaactataagatagataaacccaccatcaagaagaaaaaatcccttttgaaaaccacaaatgaacccatgttatcccctgcatccctatcaccttcatcttcgttagcttcatccgacgctaatgaatcccacctaaaaatagaatccatgattactgatataacatctaaaatagattctgcaagacaagacattgtatctgcaacgaagcctgctaagttcacaaatgagtttacaataagtcaaatttcggaaatgaaggcaagaataattaatactcataaattgctgctcaatttcaattttattaaagaaggttacgcgagatcttgtattcaattgaaaaaaactatggactctttaaaggatagtgaaattcacagagcacatttattggttgagaatgatgacttgaagcaacaaatcctagaacttactcaaaaactcaatgaaaaatcatccaaggaaagttaa

SEQ ID NO: 76012 - DNA, 540 bp, Saccharomyces pastorianus
atgaaatcatttcaaaaatcttatgaattcgattacccatgggagaaagtcaccacggcgaactggatgaaatatccaaacaagatctccacacacgttattgcagtcgatgtgctccgcagagagctcaaagaacatggcgatgtacttcttacagaacggctgataaccatacgtcagaacacccctcactggatgtccattttagtggggaacactaatttagcatacgtgcgagaggtctccaccgttgatcgaagggacagatctttaactatgaggagttgcaatatgaccttcccgcatattttgaagtgttacgaaaccgtacgttatgttcctcatccgaaaaatccatcgaatgtgactcttttcaagcaggatgcaaagtttctgtctggtgttccgaccaaaacctttagtgagaaagtagaaaactggggcgttaaacgttttagtgataacgcggtgaaggggaaagtcgggtttgatagtattctagcaatgttcaacgatatctggaaaaatgctaacgaataa

SEQ ID NO: 76013 - DNA, 519 bp, Saccharomyces pastorianus
atgaaacggtgcgcttgtctaagcaattcacccacaagacacacaaccgtcgtggtcccatcgcccgtgatttcatcctgcgcggcagctgccctagcaatcagtaccgctgtaggcgactggatctgcatctcggtcagcaacactttaccgtccttggtcagcttgatgttaccagcaccatccaccagcatctttagcgtgcccttagggcccaagttggtctctaggacggattgtaagccctcagcagatgtgacgttaaccttcaaagccgcatcccttctcaacgattcagccttcggattcagcaattgcaatgacatgcttctactctacttatattataatcttctgcttctcactgcttccacacccttaacctttaccctttccacacactgcacacatacactgttatacataatcctttccgtctttcgttcgtttcttaccagaataacaactactaacacatcaccgagcgaaaattttgccaccaaagcaaaactcccgtaa

SEQ ID NO: 76014 - DNA, 1113 bp, Saccharomyces pastorianus
atgaagcaaaaatttgtactaccgatcaccccaccaagtacagcggaaaagaagcctcaaacagaaaaccgttgcaatgagaatttgaagcctagaagattgctaccgcaattgaaaaaaagtgtccgtaacaggaaacctagactgtcatataggcctgagttaaactctgtgtttgatctggatgcgtacgtggattcgacacacttgtccaaatcccaacgccatcatatggaccgcgacgccggttttattagctatgctctgaattatagcaaaagaatggttgtagtcagcggggcaggtatatctgttgccgctggtataccggattttagatccagtgaagggattttctctactgtgaacggcggctctgggaaagatttgtttgactacaatcgtgtgtatggcgacgaatcaatgagtttgaaatttaatcagttaatggtgtcattgttcagattatccaagaattgccaacctacaaaatttcatgaaatgctcaatgagtttgctagggatggcaggctattgagactgtacacgcagaatattgacggtttagatacacaattacctcatttatcaactaatgtgcctctggcgaagccaatacccagtacagtacaattacacggaagcataaaacacatggaatgcaataaatgtctgaatatcaaaccttttgaccctgaactgttcaaatgcgacgacaaatttgattctcggactgaaatcataccgtcatgtccacaatgtgaagaatatgaaacagttagaaaaattgcaggcttaagatctactggtgtgggcaagttgcgtccaagagtaattttatacaatgaggtccaccctgaaggtgattttatcggtgaaattgccaataatgacttaaagaaaagaattgattgtttgattattgttggaacgagtttgaagattcccggagtgaaaaatatttgcaggcagtttgcggccaaagtccatgcaaacaggggtattgtgttatatttaaacaccagtatgccgcctaagaatgtgctagactctttgaaatttgtagacctagttgtactgggagattgtcagcatgttacctcattattatag

SEQ ID NO: 76015 - DNA, 399 bp, Saccharomyces pastorianus
atgggggcgctagagccaaatgctggtgctccaaatgctgacggtttagccgcattactggtgttcccaaaagcgctaattgacgtattgccagtattgcctgtattggtaccaaactggggcattccaaatgctgaagtggtggttcctcctgtcattgtgtttgctgttccaaaactaggtcttccaaatgcacttcctcccatgttattggtactagcagcattatttgtgaaagggttgataccacttgtattagaaagattaggcttagcacccgacgtgaatgggttaccgaaagctgacattacagttgagtcgttgctcgggtcgaaatttaatgatagcttgatgagcttttgcgttaaagtacaacagttcagtgttatagtactttaa

SEQ ID NO: 76016 - DNA, 1995 bp, Saccharomyces pastorianus
atgttgacctctatattgataaaaggtcgcacacctgttcttgcaagcagaaatttattagcagctctctcgaattgcaaccatattacttgggctgtttcaagaagattatacaatgatggaaacagagatcaaagaaattttggtaggtatcagagaaacaacaacagtaacaggtatagaaactcccgtttcaattctcgcccaaggacaaggtctagagaagacgatgatgaagtgcactttgataagaccactttttccaagctaattcacgtcccaaaagaagataatagtaaagaagtaacgctggactctttactggaggaaggagtccttgataaagaaatacataaagccattaccaggatggaatttcccggtttaactcctgtacagcaaaagactatcaaaccaatcttgtccagtgaagaccatgatgttatcgcaagagctaaaaccggtacaggtaagacatttgccttcttgattccaattttccagcatttgataaatacgaagttcgattctcaatatatggtaaaagctgttattgtcgcaccaacaagagatttggccttgcaaatcgaagcagaggtgaaaaaaatccacgatatgaattatggcttgaaaaagtacgcttgtgtctctttagttggtggtactgacttcagggcagctatgaataaaatgaataagttgagaccaaacattgtaattgccactccagggagattgattgatgttttggaaaaatactccaacaaattttttaggttcgtagattacaaagtgctagatgaagctgacagattgctagaaattggattcagggatgatttagaaactatttctggtattttaaatgaaaagaactccaaatcagccgataacatcaagactttgttgttctctgctactctggacgacaaagtacaaaagttggcaaacaatatcatgaataaaaaagaatgtctctttttagacacagtagataagaatgaacctgaagcacatgaaagaattgatcagtctgtcgtcatttcagaaaagtttgccaatagtatatttgctgctgtggagcatataaagaaacaaataaaggaaagagattctaattacaaagccattatttttgcaccaactgttaaattcacatcctttttgtgcagtattttaaagaatgaatttaagaaagatttaccaattttggaatttcatggtaaaattactcaaaataaaagaacaagtttagttaaaagattcaaaaaagatgaatccggtattttggtttgtacggatgtgggagcccgtggtatggatttcccaaacgtccacgaagttttgcaaattggtgttccatctgagttggctaattatattcatagaattggtagaacagccagaagtgggaaagaaggatcttctgtgctattcatttgtaaagatgaattgccatttgttagagaattggaagatgcaaaaaatatagtcattgccaaacaagaaaaatatgagcccagtgaagaaataaaatctgaggtcctagaggcagtgaccgaagaaccggaagacatatcagatattgtaataagtttaatctcatcctacagatcctgtatcaaggaatacaggttttctgaaaggcgcatacttcctgaaattgcttccacttatggtgtactgttaaatgatcctcaattaaagattccagtatccagaaggtttttagataaattaggtttgagccgtagtccaattggtaaggcaatgtttgaaattagagactatagtagtagagatggaaatgacaagtcctacgattatgatgatgattcagaaatttctttcagaggcaacaaaaactataataataggagccaaaatagagattacgatgacgaaccgtttagacgcagcaacaacaatagacgctcattctcccgtagtaatgataaaaataattactccagtagaaacagcaacatatattag

SEQ ID NO: 76017 - DNA, 153 bp, Saccharomyces pastorianus
atgaaacagatgatgattgaagcatccataagtaaagacactttgaggttgctaatttgctttttcgaaataaaacagtgccatatatcactccagcctacttgttattatcagaattgggtacggtattcatctatatattaccagttgtaa

SEQ ID NO: 76018 - DNA, 726 bp, Saccharomyces pastorianus
atgctggtagtgggattgacaggtgggatcgcttgtggtaagagtacagtgtcgagaagactcagagacaaatacaagctacccattgttgatgcggacaagattgctagacaagtggtcgaaccaggacagaatgcttatgatcaaattgtgttatacttcaaggacaaaataccgaatttattattggaggatgggcatttaaatcgtgaagccctagggaaatgggtttttagtcataaagaagatttgcaagccttgaatgggataacacatcctgcaatcaggtatgcaatgttcaaggaaattggctactattacttgaagggatatagaatgtgtgtattggatgtgccactcttatttgaaggaaatctggattcaatatgcggagtgactgtaagcgtaatttgtacgcaagaattgcaactagaaagattaatgacaagaaatcctgaacttagtgaagaagatgcaaaaaacaggctaaaaagtcaaatgagcgctgaagaaagaatggcaagatctgactatatcctacaaaataacagcacattggttgacttatacgaacagattgaaagtgttgtaaaaaaaatccaacctagtaaattaagaactgttttggagtatttcccaccttttggggccgtaagtgccagtagcatcgtcatgtccagattactgatgaaaaaacttcaaaataaaaagtcttcagcggtataa

SEQ ID NO: 76019 - DNA, 366 bp, Saccharomyces pastorianus
atggaatatgtgcttatttataatatatggtttttctcatttctacaggacaagccctgtttttgctttgtagattatgcttgtagtatttttcttctttcgagttattgtggcaattgcttaacggccgtcgcaactaaaccgaatgaaatggcaactattccaaagagcattcccttactaactcttgttttcttgccttcgacgactcctagttcttcagtgcttattaatgtatcttcggtatcctttttttcttctcttgaatcattttgttttactttagcgttattgtcattgttaataccaccattaaaattgctttgtgttaaaactaaatttttccccctctcttcttctatttga

SEQ ID NO: 76020 - DNA, 1815 bp, Saccharomyces pastorianus
atggtagaactggaaaaaagaagaaggccccctccgcaactgcaacattctccctatgttagggatcaatcgaattcgcagggaatgacaaagacgccagaaacgtcaccgcctaagaggcccatgggaagagctagatcaaactcgagaagcagtggatcccgttcaaatgtcgatatagatcagtataccataccaccaggcttagatttgttgcctaccgcttcatctccaccttccgtccatcaagtttcacaacagcaacaattatccccaatattagccaacaaaatccgttctccatttgaaaatcaaagtcaggatcaaaatgacaattcaatagacccaacaccggctggacaagtaacaattcctgtagaagccatatctccaccggcactggacgaattatcgaaattccaaaatggttcaactgagacattatttagaactggatcaccccgtaagaagcatacacatattattatactcaaatccttaaatgcaacttttgagaccaagtttcttgttgtaccatttaaacctgacggacttaaattaggtcgaccagttaccaatagcgtaaacaagaataattcaggatcgaaaagagatttattttcgcaacaagttagaccagataacggaaattttgactcaagagttctttccagaaatcacgcttgtctcagttgtgatcctacatcaggaaagatatatattcgcgatctaaagtccagcaatgggacatttgttaatggggttaaaataggccaaaatgatgtagaattaaaagttggtgatactgtggatttgggaactgatattgactcaaagtttgaacatagaaaaatcagtgcgtatgtggaagagatttcagtaattcccttaatgaacactgtatctgatcccacaaatttggtgatgaaaaaacaagatcatactaataagaataatgggaactccactaatataaacggaataaagatagacagaggtcatcataatcaacacattccaatacgatctcatttaaaggaaaattataccgaagctggtgtaacatctgcaacaacggctcaaagggcagcctttgaggcagctatgtttggagatattaataactcagaattagatgatgatattttaggtccagaaactgaggttctcagtggaatttttatcaacaattcagcaggtacaagcataaatttgataaatatgataaaaactttgactactgagctgtccttagaaaaacaagagctggaaaaattacattccatgcaaaactttatgcaaaactatacgataaaccttgatttcatcaataagcacatgattgatatgaatgaaaagcatttactgaaactgagcacggctttacaaaaaactctatcagaaaataatgatgcgctactcaaagaatcggaagatcaattaaaagaaatcaaacaacaaaataataaagtaaaatctgcatgtagcttgaaggaaaaacaaaaccatgaaaagctacaggagctcgaaagtgaattaagagagctgaaccttcaaatagaagaagagagggggaaaaatttagttttaacacaaagcaattttaatggtggtattaacaatgacaataacgctaaagtaaaacaaaatgattcaagagaagaaaaaaaggataccgaagatacattaataagcactgaagaactaggagtcgtcgaaggcaagaaaacaagagttagtaagggaatgctctttggaatagttgccatttcattcggtttagttgcgacggccgttaagcaattgccacaataa

SEQ ID NO: 76021 - DNA, 498 bp, Saccharomyces pastorianus
atgacagatgctttggaacagagcgtccttgcgttggagggaacagtttcagtattgaaggattctgtggagtctttaaaatgtgcaaatgagccaagcacgaaccttgcatcgacaatgttgcaaaccaaaagggttttccgtttagttcccgaatatgatgttgaaagatcaaaattagatttgattgaagaggtagaaccactggttaggactctgggcgataagttacgtaaatctatgggtagaatgcaaagggaactcgatactttgcagcaaacttatgaattaaacgatttaaggctaaagaagaacattagtatggatgacgatgatgctctgaatagtccagacatgggtcaagaatacgaaggcagagacgcggacgacgtggttatgatggcatcttctactaatgaggaattggaagaattgaagaaactaaaggaaaagaagaagcaactggagaataagttggaaatactcaaacagaaatag

SEQ ID NO: 76022 - DNA, 318 bp, Saccharomyces pastorianus
atgtattggccttgtcttgtgataacaccctttaccgtcggagagtcgttttgtttgttactttcgttgggaataccattagatacaggcattttgaatatttggtcactctctagcatctctaggcatttagaaaagttgtcaataatgttgggtaattgcggtttgacgatttcttcgatgagccaggagcattcttttacggcatccttaaagttgtcgtatttatcttctgcaccaaatctatcatttggaaacaaatcaacactcatattgcttttcgagcacttccactgtgtgcttgatcagatactataa

SEQ ID NO: 76023 - DNA, 2511 bp, Saccharomyces pastorianus
atgctagacaaggcgcgctctcaaagcaaacacatggacgaatctaatgcggctgcctctctgctttcgatggaaacaaccgccaacaatcatcactatttgcacaataaaacatctcgtgccacgctgatgaatagcagccaagacggcaaaaaacatgcagaagatgaagttagtgatggagctaactcccgccatcctacaatttccagtgctagcatcgaatctctcaagacaacctacgatgaaaaccctttgctttctattatgaaatcgacatgtgcgcccaacaacactcccgtgcatactccgtctggttcgccgagtttgaaagtccaaagtggcggagatatcaaagacgatcctaaggaaaacgatactactactacgaccaatactacacttcaagatcgccgtgacagcgataacgctgtgcatgctgccgccagcccactcgcgccttccaatacaccttcggatcctaagtcattgtgcaatggccatgtcgcacaggctacagacccgcaaatttccggtgctattcagccgcagtatactgcaaccaacgaggatgttttcccttactcctccacctccactaatagtaacactgccactactactatcgtcgccggcgccaaaaaaaaaatacatttgccgccaccacaagctccagcggtttcttcccccggtaccaccgcagcaggctcgggcgcgggcacgggctcgggcatccgttcccgcacaggatcggatttgccgctcatcattaccagcgccaacaagaacaacggtaagactaccaattcgcctatgtcgatactgagcagaaacaacagtaccaacaacaacgacaataattcgatacaaagctcagattcgagagaatcctctaataacaatgagattggcgggtatttgcgcggcggaactaagcgcggcggcagtccatctaacgactctcaggtccagcataatgtgcatgatgaccaatgtgccgtgggcgtggcgcccaggaacttctatttcaacaaggatagagagataacagacccaaatgtaaaactggacgagaacgaatcaaaaatcaacatatcgttctggctaaattcgaaatacagagatgaggcttattctttgaatgaatcatcctccaacaatgctagttcaaacacggatacgcctacaaactctcgacatgcgaacaccagctcttccattaccagcagaaacaatttccagcattttaggttcaaccaaataccttctcaacctccaacttccgcatcttcgtttacaagcacaaacaacaacaaccctcaacggaccaatatcaatcgcggtgaagacccgtttgccacttcgtcaagaccttccactgggtttttttacggcgatttgccgaatcgtaacaatagaaatagtcccttccatacaaatgaacaatacatcccaccacctccaccgaaatacatcaattctaaattggatggattgagatcaagattattgctcggtccgaattctgcgtcttcatctaccaaactagacgacgacttgggtacagcagcagcagtgctatcaaacatgagatcatccccatatagaactcatgataaacccatttccaatgtcaatgacatgaataacacaaatgcgctcggtgtgccggctagtaggcctcattcgtcatcttttccatcaaagggtgtcttaagaccaattctgttacgtatccataattccgaacaacaacccattttcgaaagcaacaattctacagctgtttttgatgaagaccaggaccaaaatcaagacttgtctccttaccatttaaatctaaactctaaaaaggttttagatcccacttttgagtcaaggacaaggcaagttacttggaataagaatggtaagcgaatagacagacgcctttctgctccagaacaacaacagcaactggaagttccaccattgaaaaaatcgagaaggtcagttggaaacgcaagagtagcaagccaaaccaatagcgattataattctcttggcgaatcctcaacttcgtcagctccatcgtctccatctttgaaggcttcttctggcttggcatataccgctgattatcctaacgctacttcgccggatttcgctaaatctaaaggaaaaaatgtcaagcctaaggcaaaatcaaaggcgaaacagtcatcaaagaaaagaccaaataatacaacttcaaaatcaaaagcaaacaattctcaagaatcgaataatgctacttcctcaacgtctcaaggtacaaggtcccgtactggttgctggatttgtagattaaggaaaaagaagtgtaccgaggaaagaccgcactgtttcaactgtgaaaggttgaaattggactgtcactatgacgcgttcaaaccagattttgtatctgatccaaagaaaaaacagatgaaactggaggaaatcaagaaaaaaacaaaagaggccaaaagaagagcaatgaaaaaaaaataa

SEQ ID NO: 76024 - DNA, 414 bp, Saccharomyces pastorianus
atgaacgatggtcaattcttgttccaacgtaacgatcccatcatattatatacatttttgcttaaaagtaattatatagtctttcgcagcatagatgaaaggctatgtgatttcgttttttatattgaccacttcttgaacaaacgaatcagttatcgcataccaattctaataagaaacaacaacacaaacattttaaacaactgtccaagcagctttcctcctttggttgaccttgttggacatagactggttgctgctgaggataaccctgttgcggtggaccttgttgataataaccttgttgtggtggaccttgttgataataaccttgctgtgggggtccttgttggtagtaaccttgttgttggctcattagttttcgctcttttgacttgtttcgaagacggatag

SEQ ID NO: 76025 - DNA, 228 bp, Saccharomyces pastorianus
atgagccaacaacaaggttactaccaacaaggacccccacagcaaggttattatcaacaaggtccaccacaacaaggttattatcaacaaggtccaccgcaacagggttatcctcagcagcaaccagtctatgtccaacaaggtcaaccaaaggaggaaagctgcttggacagttgtttaaaatgtttgtgttgttgtttcttattagaattggtatgcgataactga

SEQ ID NO: 76026 - DNA, 3930 bp, Saccharomyces pastorianus
atgtcaggccagttagttcaatggaaaagctctccagatcgagtcacccaaagcgctataaaggaagcactgcattctcccttggctgatggcgacatgaacgaaatgaatgttcccgttgatccgttggaaaacaaggtaaatagcacaaacataatcgaaggaagtcccaaagcaaatccaaatcctgtcaagtttatgaatacaagtgagatatttcaaaaatctctgggattacttgacgagagtccaagacatgatgatgagttaaatattgaagtaggagataatgatcgaccaaatgctaacatattgcataatgaaaggactcctgaccttgaccgaattgctaactttttcaaaagcaatcgaacccctggtaaagaaaatcttttgaccaaatatcaaagctccgatctggaagacactcctctgatgttaagaaaaaaaatgacttttcaaactccaactgatccattggaacagaaaaccttcaaaaagttgaagtcagatactgggttttgctattatggagagcagaatgatggagaagaaaatgcgtcattagaagttacagaggcggatgccacttttgtacagatggctgaacgttctgctgataattatgactgtgcattggaaggaattgttacacctaaaagatataaagacgaattaagtaaaagtggaggaatgcaagatgaacgagttcaaaaaactcaaatcatgatatcagcagaatcacctaattcgataagctcttatgacaagaacaaaattaccgggaatggccggaccacaagaaatgtaaacaaggtttttaacaataacgaagataacataggagctatcgaggaaaaaaatccagtaaaaaagaaaagtgagaactattcatcagatgatctcagagaacggaacaatcaaataatacaaagtaatgaatcagaggagattaacgaattggaaaagaatctgaatgtttcgggtagagagaatgacgtgaacaatttagatatcgatattaatagtgctgtgtctggcaccccttcacgcaacaatgcggaagaagaaatgtattccagtgagagtgtaaacaatcgggaaccatccaagaagtggatattccgatactcaaaagacaaaacggaaaataatagcaatagatctacgcaaatagtcaataatccaagaacacaggaaatgcctttagatagtatttcaatcgatacgcaacccttatctaaaagtttcaataccgaaacaaataatgaattagagacacagataattgtttcatcgctttcccaaggcatatctgctcagaagggacctgtttttcattctactggccagacagaagaaataaaaacccaaataataaattctcctgaacaaaatgctttgaatgcaacctttgaaactcccgttactctttctcggattaattttgaacccatattggaagttcctgagactagttcaccatctaagaatacgatgtcaaaaccctcgaattcttcacctattccgaaggaaaaagatacatttaatatacacgagagagaagtagagacaaacaatgttttttcaaacgatatacaaaattcttcaaatgcagctaccagagatgacattatcatagccggttcatctgatttcaacgaacaaaaggaaataaccgatagaatatacttacaactttcaggaaagcaaatatctgattcaggaagtgatgaaacagaacgtatgtccccaaatgagcttgatacgaaaaaggaaagtacaatcatgagcgaggttgaactaacccaagaactgcctgaagttgaagagcagcaagatcttcaaacgtctccaaaaaagctggtagtcgaggaagaaactttaatggagataaaaaaaagcaaggggaactcacttcagcttcatgatgataataaagaatgcaattcagataaacaagatggcacagagtctttggatgtagctttgattgaacacgaaagcaaaggacagagctcagaacttcagaaaaacctcatgcaattatttccaagtgagtcacaggagattattcagaaccgaagaacaataaagcgacgtcaaaaagatacaatagagatcggtgaagaggaggagaacagaagcactaagacatcaccgacaaaacacctcaaaagaaattcagatttggatgctgcttctatcaaaagggaaccgtcttgcagcattaccatacaaacaggggagacaggttcgggcaaagactctaaagaacagtctcacgtgtttcctgaaggtattagaacggcagataatagtttcttatcgaaagacgacataatttttggaaatgcggtatggtgtcagtattcgtggaattacaaattttatccgggtattttattggaagttgacactaatcaagatggctgttggatttatttcgaaacaggaagatcgctaaccaaagatgaggacatctactacttagatattagaataggggatgctgttacctttgatggaaatgagtacgtagtcgttggtctagaatgtcgtagccatgatctcaacataataagatgtattcgaggatatgatacggttcatttgaaaaaaaaaaatgcaagcggattgttggggaaaaggacgttaattaaagcactaagctcgatcagtcttgacctaagcgagtgggctaaaagagcgaagatcatattagaagataatgagaaaaataaaggcgacgcgtataggtacttgagacatcccattaggggaaggaaatcaatgaccaatgttctgtctccgaagaaacatactgatgacgaaaaggacataaatacgcatactgaagtgtacaataacgaaatagaatcgagctccgaaaagaaggaaattgttaaaaaggattctagagacgcattagctgaacatgcaggagcgccaagcctgcttttttcttctggtgaaatcagaacagggaatgtatttgataaatgtatttttgttttgacaagcctattcgaaaatagagaggaacttcgacagaccattgaatcgcaaggcggcactgtaattgagtcaggattttccactttatttaacttcactcatccgctagctaaatctttagtcaataaaggtaatacagataatattcgagaattggccttgaagctaacctggaaacctcattccctatttgcagactgcagatttgcttgcctaatcacaaaacggcatttaagaagcttaaagtacttagaaactttggcgttggggtggcctacactacactggaaattcataagtgcatgcattgaaaagaaaagaatagtaccacatttaatataccaatacctattaccttcgggtgaaagttttcggttatcgttagattctccatcaaagggaggaatcattaaatccaacaatattttttcattttatacacaattcttacgcggatctaatttaagagatcagatatgtggagtgaagaaaatgttaaatgactacattgttattgtttggggtagatctgagttggacagttttgtcaaatttgcttttgcatgtttgagcgcaggtagaatgcttacaattgatttacccaatattgatgtagatgatacagagccattgttaaatgccttagattctttagtacccagaataggatcagaattatctaatcgaaagttaaagtttctcatatatgctaacgaaaataatggtaaatctcagatgaagcttctcgaaagattgagaagtcaaatatcactgaaatttaagaaatttaattacatatttcacactgaatctaaagaatggctaattcagacaataattaacgaggacactggttttcacgatgatattacggacaatgatatatacaacactatttctgaggttagatga

SEQ ID NO: 76027 - DNA, 294 bp, Saccharomyces pastorianus
atgcttcctaaatgcagtgtggaagcctctgcttctaccataacatcttccaacacagtcttcatatactattattattcattttatagccgggtaagtatttttaaaggcattggcaatacccgttttgttttgacccaaacaactgtttatcattattcctggtgctgtcttcttagaaactataaacgtttgtgcacctacccagtatttaaccagttgggaggagctaacaatatttacttactttttcacaaaataggaaaaggaaagttatactttgctatagtttaa

SEQ ID NO: 76028 - DNA, 1248 bp, Saccharomyces pastorianus
atgcttgaatcgagcagtgataagataaagtttgcgcctattaaagaggtagattacaaaaaaccggtaagtaagagtaagaactatactcttattaatgacatccaaccattggagtggtattgtcacaatgatagtgaaacgggctaccaacacaccataagtaacaagacagatggtggtagaggtttattcagagtgatgaaaaaatcgatggagaccagagtcgagacccaaacgttatatttcacagatttgcatacaggcttgtgtggatttgttcaattactgtattctacggttatgggtggtatctataaaggcttccaattgaatttcaaggtttttggctcagaaagtaataatactgactacgacgtttgggaaagttttaaattggatgacatagctgaatttcaaccattaaagtttgtctctagaaatgttatttttgaatttttgagcaacagaaatgaaaaattaggttccattggccagttatctatcaaatgtgatttaccaacatgtaacaatacaattcaaaatttgaaaatcgatttgttggtggatttgtttcaaggttttaagatgaaccccaacggttgcaattattattttgacaaacaaatctcgacgagtgacgaattcgtttcctcagacaaaatgatcagacatgtttttgtgcccagaggtaaatgtaatggtaatatttcctacgataaaaaactcaatagtggggactttcaaaataaaaatatttcattaactgatgttcctgtcgtttatctggacgctgttcaaggtcttttgccgaataaagcagccagtaaatggaatttcctatgttttcaaagcgaaaactactctgttttagcaattgaattcactactcctcgagatcatgataacgtcaccgtaacagtttggtcaattactgaaaaaaaaaaactgatatctattggttcttctgtgcagagcccaaaacgtcatgttaggttccgtgctacgagtacagataaggaaagcggctgggtatatccaacctctatcaagttccccggtggattttcagaacacgacttgaggctggttaatcgatacgacgttctcggtgagttaccaagcatggtcaggtcgttagctcagaaaattgtgagcatcaaacctttcatttatcaatactgtcaaccttctaaatataagcacgagaaaggtatttccatcgttgagagcaccttcattagttga
